United States Patent Application Publication US 2007/0067865 A1 - sequence listing, part 59

SEQ ID NO: 384148 - DNA, 177 bp, Zea mays
tagtagtactttcgtgggtagcatgctgtatgctcacacttgccctctttcacctagctgcttgatttgctacttgtccgacctcttcgtgtggctggacctcaatgcgatcgctcttgccagaaccacatttgccgttgtgccatttagtgaatccttgtatgattgcctgccaac

SEQ ID NO: 384149 - DNA, 296 bp, Zea mays
  unsure (1)..(296): unsure at all n locations
ctctggagaagaagatgtgggtgatgacgatgatgaagatagtgatcctgaagctaatggtgaagaaggaagtgacaacgcaatgatgacgacgaagatggtgatgatgatgacgatgaggacgacgaaggtgatgaggacgacaaagacgaggacgatgatgaagatgacgaagaccagccaccttccggagctgangaaatgatttgctcatccatggatttacctcagcttctccatgctgttagttgtgttgtgtagatcatggacagctttgggatcaatgtacttgttgc

SEQ ID NO: 384150 - DNA, 294 bp, Zea mays
gcaccacctttgctagtgcggtcaagagagcctgtgacaatttgacaatttgttccagaaccagtctgatgcacgtgcacctctaatatatgccttacaaactccagaggccatattcagaacatggtcttctcagtgtatgcaaggggctgcagccctcttctcttccttcgcaccctgaacaatacggacagttgtcgcacatatctacctgtatagacctctgtacctctcataactggtcaacgactgtaatttatacatcagtgtttttctacatacttttacacagat

SEQ ID NO: 384151 - DNA, 298 bp, Zea mays
  unsure (1)..(298): unsure at all n locations
tcgagcaaacgactgaagatctgaggacgactttacaaggccggtgattgatattgcagctgatggatcgatcactggagaagccagcctcctcttcgttgccatccagtcgtctcagcatgtactgtagcgtcagcccgccgtagcatgacaccggtttgatgaataggtttagcttcatcgattgatgatacggcatgcgctgttctgatgtgcagttggttcaaattggaatttttacactttacaatcctacgtctcactanaacatgcgtacggaggagtatctatggttcac

SEQ ID NO: 384152 - DNA, 305 bp, Zea mays
catacgctcatgaccaggagcatcgcaagaggacgactcgcgcaaggagcgccgccaagtcggccgctgcgtagtccttccgctgagagaaatgctccaggagcactagctaggttttagcagtcgtctgttctctgttattacgagtgttgcatagcagccatgaccatgtttttttacacgtctgtagctgtttggatggtgtaataccaggtacgtgcgttgttaggtgatgctgttagcacgtaggttccaaacctatgagaccttgagctctgctgtgcggtgagatggttatgtcgact

SEQ ID NO: 384153 - DNA, 289 bp, Zea mays
cttctcccctcttccttggtcacatggcgtcgtctctcggctccgacgacggtgccggctcgccgccgccgccgtctgctgcatgtgcggcgaccatggcctgccgcgcgagctgtaccggtgcgaccactgccgcatccgtacacagcacaggtactgcagcgacctgtacccggcggcggcggcggggccgtaccggagctgcaactggtgtctcaggcagggcggcgccgtcggagggggtgatcattcgtcgtcaccggttaataataaggtgtccgcggcggca

SEQ ID NO: 384154 - DNA, 202 bp, Zea mays
  unsure (1)..(202): unsure at all n locations
ccccactggtttcattgtgtaatttcacaaacaagcaagctgttccagcaattaacgttcaacgagggtctcggtagtatgctaaactgctgcagcaacagaacatactgattgtgtggaagctactgttcacgtgcctcgagtgcgaccagaaacganactttatgcatgtagtaggagcacatttagctggtgattgatc

SEQ ID NO: 384155 - DNA, 266 bp, Zea mays
  unsure (1)..(266): unsure at all n locations
tggncattccttactgtagcagaagtatcatgattcatgaatgacaccatgacacggactttgagagctggaagttctgttttatactttcgttggctaatattggatttttatagaaagttgtgatcgtaataattcaacataactacataagaatgtgctgttggcacattcattgggaaaacttatgagagtcagtgctgtccgccagtgtgtaggatagagtatgttcaggagttgtatcagttcagccatggtttgttcaa

SEQ ID NO: 384156 - DNA, 285 bp, Zea mays
cggctcgagcgcaatgttagccgtagccaacgctggtttatccccgcagagctccccgttactggcattcctagaagtggttaggcgctggactcatgcggtttgcggcaatttgtttccagtggaattggttctccaccatcgagagctattatgccaagaaaaagaagagcgagtgatagcacaaaccacagctggacattattttcctagatctcgtgagagtcaaaagtaacaaataagtcacgtctgacctaatgtaaatgtagcgtggtagtattagag

SEQ ID NO: 384157 - DNA, 203 bp, Zea mays
tgcatattatggttgatgggatgctgtcctataccaagaggagacaagatcgcctctggcaggatgccaaggatataggttgagttgctcaaccatgcacagatgtgcaggcggctttatcatggctggctggagcaaagctgctggcttggtgaggtcaattgatctgacaacttgaggatgggtttacactaatggcggca

SEQ ID NO: 384158 - DNA, 149 bp, Zea mays
tgttaattctgagctgtactttttgtgtacattgctatcgagactcgagagtggtgactctcattttgaagtattaatattgcatcggcatgtgccgattcttactgagatgtatgtgttgatatttgccacgttgtttgcgttgcctc

SEQ ID NO: 384159 - DNA, 228 bp, Zea mays
ggtttttccactcacatttcaagattgacagagaccttcagtcggctgttgtggtttattcatggagggatgtgctatgatttagtactgatgtggcagaaaatgcctgttagctcgtgtaacaatccccacatgtttaatgttgtttcagcttttcatttgagaaatgagttgtggcattgctggatacttctgatatcttaatcctcttggaatgagatgttatgt

SEQ ID NO: 384160 - DNA, 267 bp, Zea mays
gcagcttcctacagagaaaagtggagctctttccatggttctaattccgatacaacctacaaaactattgcacaggatgctcctgtattgtatggacaattcacaatagcgtgtggtcagtttcaatgcgaattttccatacaatacaggagcatcctgtgcaatagttttgtatggaaaattcgcattgaaactggtcacacgctatcgtgaatttaagactcttgtatggtggggcgagtttgttgatattggattgttgccttc

SEQ ID NO: 384161 - DNA, 262 bp, Zea mays
tgttgtataacactaattttgacgccttgatccctgcccctttctgttggttcgacctgcttcccctgcacctctgcttttttgccactttgtttagctttttgctcctttttttttttcttttctttcttttttgcatgtgttgcttcatggcttgatatagatcttgctatagtcctccattgtcattgcttatatgtatgtaaaatggaatatgtggaaataggaaagaaaatgggtcgaaaaaaaaaaataggaaagg

SEQ ID NO: 384162 - DNA, 292 bp, Zea mays
cttccgagttctttgaggatgcttggctgaggtaaatgaggtagaggccaatggtgagatcactgaggctccagtcctttatgcttatcttacttctctggaggtcgcttaggatctcactaaatgtacgagtgcttgcagggatgttttccacacgaccagaagctgcattcagatagtacaactttaaccactttctaattgtgtggcatatcttaattctgaatgtgcagctataaatttgtgtagcaaaggaaataaaccacataatgtatcccttgaggtcgtccag

SEQ ID NO: 384163 - DNA, 244 bp, Zea mays
ggccgctcgcgatctagaactataaagtcaagattaccacccatcttcttgctataacatgtgaagtttgtgtggatggcgtcgtgcttgtagtgttagctggatttgaagcggactacatgtaggtttgttcaatgtctagtatctattagctgaaggtgtttgcctgtaagttgtaactctctgtgaactgtgatgcgggataatgctaagaagaatagatgatcgttggagtctgtctttc

SEQ ID NO: 384164 - DNA, 291 bp, Zea mays
tgggaaagatcagtatgccgaggatgggaccgggttgtagcttgcgatgctagatctgctcatcatgaaacccatcatgactaatgcatttatctgccatttaagtgtacaccagattatttgtatgtttgctgcttactatgcaaaatggcagctaaaagaagccctaaagcatgcgagctgcacctctaccggtttagtggccaaactggctgttactacgtttcaggtgttttatctgtaacttttattttgttctttttcttgttactcacttatttctgaataatt

SEQ ID NO: 384165 - DNA, 232 bp, Zea mays
ttggatctccgccgggggatatgatttgccttccttcctttttagccctcttagaatccaagctaatttctcccccgttttcttccatacttttaggttctgttttggtttagtattaatactgtagtagttaccaaccagacgcttttcttctctcaaacgaggaattaaaagccagtcggaccaaggaaatagaacatcgaattgcacaaaaaaaaaaaaccaacagaac

SEQ ID NO: 384166 - DNA, 116 bp, Zea mays
ctcgagccgcgaatggtcaaattgtagcacttttggtgcttataatactaataggtgagacgcctgtaaaaaagaaggacatgaatgtgtatgctctggtggtggtgtcatacaac

SEQ ID NO: 384167 - DNA, 139 bp, Zea mays
ccctgcgtcggctatttccagcttgaaataaacctggttgccctttgaggggttgatgaggaaaaaaaaaaaaaaaaaataacaacagaagatcctcaataagccatgactagatcgagagaaggaagcggataaaccc

SEQ ID NO: 384168 - DNA, 247 bp, Zea mays
cgcacatcgccctgatggtggcgcggatggcgcaggcgttcgagtggcgcgcgcacccgtcgcagccgcagctggacttcaaggacaaggtggagttcacgagtggtgatggatcggccgctgctggccgcagtgaagccgcgaaacctcgcgttctgatcggacgggcggacggacgcgcgcatgcatggctacagtgtgcgcgtgtcaggtagcgtggcagtacgacatcgctcgtacgtgtgct

SEQ ID NO: 384169 - DNA, 233 bp, Zea mays
aagtaagagaaggaagtggagtatcctatgaagaggcatgtgagctcggtggtggtagagtgaaagcctctggagttgcagtggatgttagtggtccagtgctaaacaaggaggcctgcaacacagaggagttgcaggcaagggaggataagaagcgtcatggagttgggcatgtgaatgagaagagggttttggaagaaactagtatgattgatactggtgaattgaaatct

SEQ ID NO: 384170 - DNA, 252 bp, Zea mays
ctcggcgccagggcgtaccgccatcagcgcatccacagccgacgccgaaatcctcgctcgcccccaaatcctcccccaccgcgcccttccatcgacgacggactacccacgctttcgcatctcctgagctccgaagggccccgctatcctcgcccaatctcatcgcccttccatcgacgcccttccagcacgattgccacccgacgggacagtcgatgccgcctgcctcctgattcgctcctcctcatccgg

SEQ ID NO: 384171 - DNA, 252 bp, Zea mays
cgcaggtttatgtcgatgaagatgcctccatatccaccatagaaaggagggcgagcctgaaggaattctacagtatgcttactatccaccatagaaactagtgattaagaagtttttttttatctgttcaagattttttttgtcgatgctgcagcagcagcagcagcagtggtttaatatagttttgggaccccatggaatgcagctatcatataccctttcttgcaacaactggaggacaacttgatggac

SEQ ID NO: 384172 - DNA, 252 bp, Zea mays
cttgagactggattgtatgatccatttcactcaaagccatcggctaatattactgacaacaacagggaaagtcatgaacaagctgaacttaatattgccagtgctagtagtgctgctgcagccgacacttcatgcagtcatctgcagaccattacagattaccagtttcagtcgcctgtcagctgtagcgattgacagtatgaatgaacaaattggtattgctaagatccatgctattgatgctacagttag

SEQ ID NO: 384173 - DNA, 246 bp, Zea mays
cccagatccttaatggacaatgtgggagtttggaggcctgttgttacacctaaagggcgtaaatctcttgagtctttgtctgctaacacattaactggtgcaagcccaagtctgtctatccagagacaacctgttgtagatcttctctgtgccatgactctgcttgttcaacaatctacttcgtttgttgatatgtcacttgatatggatgacggggacggttctttattctggctttccctggat

SEQ ID NO: 384174 - DNA, 246 bp, Zea mays
cgagcccaggacttggagttgctactcggaagtcctcaacctctaggctagaggccctttcgcaatttacctttatataagttgaagaaacagggtgtgctgtgttgctgttgtttgatagttactaattctgtatggtgacctgcaaagaagctgaaagatgactagtaatatcaatgcccagctatgcaggccgcagagagcttaaatgcaagcttaacttataactggtggtgtcatcttttg

SEQ ID NO: 384175 - DNA, 260 bp, Zea mays
gtcgcgcctccgaggcgcatttgccgttctccgtgggaaattgggacgcgcgcggaaaagattgtttttttttgtaaaaaaaaactttatatgaataacgcgttgctcatcttgatgcgtaaattggcggctgggtttgtcgcctttccatgcgcacgtttcgtagttgctgcttagacagtattttctttttgtatgtactaggtaccgatgaatgtggcaattttatgatgccacttgttgtgaggctcatgttgtta

SEQ ID NO: 384176 - DNA, 132 bp, Zea mays
ctcgcgaaaagcgcaataaatcccgagtcgtagcacgggactggagcacccaacccaagttcacgatcgcgaggtcttcgtctccgcctgggtccagcactcggatttccgcgcgttccacttccacacaac

SEQ ID NO: 384177 - DNA, 111 bp, Zea mays
  unsure (1)..(111): unsure at all n locations
ctcgagccgatgtcggctcgagagtaccacgttagctttatgctactccagnagcgcagnaagaactgccgatcgacaccgatgagggatgatgctcgtgtgccctcgctc

SEQ ID NO: 384178 - DNA, 290 bp, Zea mays
aaacgctcaacagctgctagtcgagctgtgtctgactccgatttctcggtgttcgatctatgtccaaaagttaatctgccttcgtactctcaaatggaatgctcaatatgtcgtcctctaatcaattttatccgactcggctaaatatctcatgtccgaaccgaactcaaaaccccgtatcgacagcaattttaagttaccaagattcgccttccctgactaaaaatccaaagccgatcaaatctcaggatgatttattttcgaatcacgcgtagggaattatttccgag

SEQ ID NO: 384179 - DNA, 282 bp, Zea mays
gcctctgcatgggcgagatggaagaggctcttcgacaccagcagggaggtcttcgccaactcctacccgggcttcgtcccgccgccggacgccgtcgcccgcctctcgggcctcctcaatgagctgaagcctcgtgacgtcagggttgccccaagcatgtccgtcttcaagcatgccgatcctacaagcccccctccagttacctatttgcacttctacggttcctccgagttttcgtttggtatcttctgtttaccgaaatcggcaattattcccctccac

SEQ ID NO: 384180 - DNA, 284 bp, Zea mays
tgtgataaactgtcatgtgtgaattgcatcattgggaattgggctgtgatggatttttctgcaggtacactaacttcgaactcgtatgtgtagctgacgactagcaatatatcgagagagacgtagttatgccaccgatatagaacgctattgccacattatgttggtgaaattcgtgaggacgaataggacgagcatgcatcctgattgttccattgtgtttgttatttgcgcaagaaatgcttccctcacctttattctaataataggtgattgcctttatt

SEQ ID NO: 384181 - DNA, 254 bp, Zea mays
ctcgagcgatttcaggtaaaacataaaataaagagttgtaattgggtgtaatataaatttcaccatacaaaaaaaatcatctcaactatcaaaccatggtaaaaggttcaaaattatctatcaaatgattatccctaccaggtcggaggaagaatggatcctccgtcattgaaaaggtatggaggctttaaaaaaaaaaaaaaaaaaaaaaaaaaaaataagaataaacaagaaatagcaataagaaaaagggg

SEQ ID NO: 384182 - DNA, 270 bp, Zea mays
ctcgagccgttttgttgtatattttttttttctgtttacaggtcttgctgcatgaatacggttggacatggatgattatggttgtgaagcggaaggattgtaaatttggtggctaccctgttgaggccattgtaggctcacagcagattcagtaacatcaaaggctactgaaaagttttactgtgcagatctgattcaatatttgtcagttatcttgttgggcaaacatttttgctttgctggaaaattggggagggaggttggtggggg

SEQ ID NO: 384183 - DNA, 121 bp, Zea mays
taagagcctagttttgactcaatcactggatgctcacaacataactgaaacaaaagagcagcctgaaggatttgacagggttgcacttggtattggggaacaagtctattcaattcttctt

SEQ ID NO: 384184 - DNA, 271 bp, Zea mays
ggtatctgtattcaatagaatagctgaggactccaagtctgataggaataagatttccaagcaagcaggcagtgttgtggaaatcttattcctatcagacttggagtcctcagttattctgttgggggtatctgtattcaatagaaaacaggcttggcaatggagctgaggtaacattcattgcacattgcgatcacgcagcatgagtcaggcggattcatgctgtgctggagaaattcattcatccagcttcaataattcgattccattt

SEQ ID NO: 384185 - DNA, 258 bp, Zea mays
agggaactgaatatggaaggaataaccccagcaggggaaagtaaaaaggccgaaaagattggagcatgcagaaattctgaatacagtaaggtagcgtccactacaatcaagtcaaagaagacacaaatattaggagacacatcaagagctccgagagatgagttgatcactaaatatcccaaaggtgacgggatggatcaaatgggatcaagcgcccaaggtgacgaaaaagaagatgcatccataatagacacaggg

SEQ ID NO: 384186 - DNA, 261 bp, Zea mays
cctcgagcggctcgagcggctcgagctcgaccgaatcggctcgaggcctcttcccctccacccctgctctcaactttgagaccctaactatcccgtcgtcgcaagtcgccacgccgtcggccacgccccgacgaccaacacctgctccctccgccgccgcccgtgtcctcccgctccgtccgcgcgccgccctcatacctccaagcgcggttggatctgctctgggaccaagtccgctcgatcctcctctcgtcggaaatt

SEQ ID NO: 384187 - DNA, 251 bp, Zea mays
cggctcgaggtgattgggctgtaaaactgggcattaatctgtactatagtgctaatcttgctaagtctcctttatacagtaagcaagttccatacaatagagttatatatgaggcatttggctgcggttctcccaatgactcaccagtgaagctgaagacttattccagaaggcaatgcagggcgaagaaaatagtcttggctggcaggtggtgtggaaaagtatggatgtcaaaccaggttcatccatac

SEQ ID NO: 384188 - DNA, 228 bp, Zea mays
ggggaaaacaactcttgctagattaattttccttgaccagggagaaggttgggattttgatcttcgtatctggatatacttaaataggaaactaaacataaaaatgattgctagtgatataaactcgcaatgtaatcatagagaagaaaagcttttagatgttcgtacggacatggagatccaggaaaactttcagttgctaaagaggtgtttgcaagcggcactcca

SEQ ID NO: 384189 - DNA, 263 bp, Zea mays
ccctcgtcgtcaaggtcatggccatcatcggaacaaccggagaggcagtggtcacatgcgggcatgaagcctcgcatggcaccggggtcattgagggcagagaaatcccaaccggagtcggggatgtcctcttcctcggaacccgccggtccgaaggtcgagacggctgtcggtcggtcccaggtcgaccacatgtggtaccccagaaggtttggatacgcctttacgaaggcgctcacctcagcagggtcgctaggtggatc

SEQ ID NO: 384190 - DNA, 273 bp, Zea mays
tggaggtcttatttatgattcggtgcttacaatggatcgtttctgcctcttgcagtgcgcgaggaagccatcctgatatctctgtcgtcatccccatccttgtagcgtagaaaccacctgcattttcattttgatctccctaatccctccggctagctgctttccagtgaccaaaagatatcaaagaccacttcccgtcttcctcccgtggctgtctgtcatctggctctgaaacgatggcagtcctgcaagttgctgctgctgcccctcccc

SEQ ID NO: 384191 - DNA, 132 bp, Zea mays
gattgacgacgaatcgtagatccgatcgacgaaccagaagcacaacgacgaagctctcatcgaaccggttgcggcggtgtcccgagtcgcctcggaagataaacaaatggggataaattcctcgcaaaagtt

SEQ ID NO: 384192 - DNA, 276 bp, Zea mays
cttgctgttgcatcaatggacctaatattgaagggatctgtaccttctaatgtatggatgcctattctgcaaaagcattttcatctccagactatactgcataaatgccagaatggtgatttattatctactcaagttatacttaatttcctcttgaccttggggcgaacaaaggatggtgctaaagttcttcagtctgccaatatttttgcattcttaaagttacttttgagtcagttgtctctggatgactcctgtttgagaaattccttgagc

SEQ ID NO: 384193 - DNA, 278 bp, Zea mays
gaagattgaagcttgaagggaagatcccacggcgatctgttcctaggctcttccgctagaattgaagcatgtatattacacatgtgtctggagtcctgacagatgtgtgccatgaggtgaggagtttctagtaccagcttgttgcagtttctggacagaaacctgaccagactctcacagcttctgttgagaaatcctgtcaaatgtcatatcatctttaagatggaattagaaagagttaaaacgtccctaccacggggcctaaaatcgcctggggt

SEQ ID NO: 384194 - DNA, 280 bp, Zea mays
gtgcaagaaagctatgccatgacacacgatgaaccacctccagcactggacacgagagcaccaaccccgcagaagaactacagcctcatgagaaaggagcccgagaagacccactacgtccgccatgggcacccgtatttcaatagctgggacggtcactgtcacccccagcagcagccggaccagcagctgtatcgccagcagcagcacctgcagcagcacaggcagtactctgcaggcccacagacattttacgagcagagctgcgagcctacaaagg

SEQ ID NO: 384195 - DNA, 260 bp, Zea mays
tgattgcggtcctagtacttgaatgataagtctgggaacaaccaaatcaactgaaatactcagtgcaagcttcagttctgaacacgtccttgattcttttagtcgagcttggtgtgttcagaagtctgtggtgtttttttgtatatagaaaattgttagcaggcaagagcatttcagttgatttggttgttcccagacttatcatttgattgcggtcctagtacttgaatttttgctgcgtgcctaaagtcgtatgccta

SEQ ID NO: 384196 - DNA, 258 bp, Zea mays
gctgtgcgtacctgtgatgggcgtagtttatgagatgaggtggttttgggtaaactagtgacgtgtttagttccaagtaggagtgcagtatctgtttccagttccaactggtcagagttgtaagtgctccatctgatctagatactacagcctggctttgttagagtttaggagcaatggtactactgtgtttgtttggcaaattgtattggagtggaaatggcgtgcttgttacaggctttggtaagttatattatt

SEQ ID NO: 384197 - DNA, 250 bp, Zea mays
gcggctgctgcagctggagccggcgagcagcaacgcatcctcctcgtccggcgagcagcgacgcatcctcctcgtccagcgagtgtttgctggattcaacggcacccccccctccttctccatctccggtgcggcggtggcttgcagctgcagggaggacttcaaccatgagtaccacaccaatgactgcagtacgagctatgaaatgtgttgtaactgtgacagacagaaggtctagtgagttttgttt

SEQ ID NO: 384198 - DNA, 247 bp, Zea mays
cgcgatgaactggcagtggcaggtaggttcgcgctcgtctccgtcttccagtgattcccctgccgctgcatttcccccggattctctccggtttcaactgacgtaaggtcgtgcctgtggtttacctaagtacttgcactttggacgaggagagagcttcataggccattctctgctggaggttactagaggatcactactttgaactcattaaagtgtctaatgatggctgctgttttaaaaacaa

SEQ ID NO: 384199 - DNA, 247 bp, Zea mays
gcgcgacggcgacgagacgatgacgttggcatctgagacagaggttgcagaagatgaggatgatcagacggaggaggaggaggaggaagaagatgatcaggtactagctgccgaggacggtggctggctacagcgcggtgagggtgagcttcttgacgtggacgacagggccgaggagttcatcaacatgttctacgagcagctcagggcgcagaactttgccgcggtgttccgatactccccatga

SEQ ID NO: 384200 - DNA, 265 bp, Zea mays
ctcgagccgtccgacgcagcggaacacactatggctttgccgaacatgtaccctggcaacggcagatggcagacggcaggcaggaaccctttgtgtgttccgacgcagcggcggaggcggctcgctacggcttcactgcagtggaccgtccggaagggtacctggtcctggcggtggcctctctgggagaagagatcgaggaagtcaccggaacaccaggggcagaggaggcacgagtcctggaagagaagaaggtgggcgtgaa

SEQ ID NO: 384201 - DNA, 264 bp, Zea mays
ttctcgagccgctcgagccgctcgagccgcaaattgtactcttccgatcgctaaggaggctgctatatcaacggcacgagaaattgagcgctgctctggttcaattggaaaacaatcatggtcttgcaatgacacttctacttcacctctcgcttcctctgtgcaaggtgaggaaagttaccttcatgatgaacctttgtcaccaagcagggctcttcgtgcagcaatgctcaggagtcgttttgctgggactatagtgaaggc

SEQ ID NO: 384202 - DNA, 180 bp, Zea mays
ccagcttccaagttctccgacgcaacggagggggatggaggcatcgtgaacaacaccagcagggattgcggcgagcggtacccatcgaaccaagagacagctagaaggcctccgccgatgggccagcagcggtacgacgatccagggccgtgctggaggcaagaaccgagcagcgggcag

SEQ ID NO: 384203 - DNA, 280 bp, Zea mays
attgcctatgccagtttggactgcatgcattcggtgtggcggttgctgagctacagttctgccatcctgaggttgtcccaacgtcaaagaacttctggaagccactatgtgcatctctgcagaatctgctgaggtgcagcgtcgacatccgaatcaacctatctcctatctccggcaacggggcgggatccaaggactcgtccgtcagccttgtcatggagtcaagagaagaagaccgcgaggcacaggacccagccacctcaaactgcgaaccgtggtg

SEQ ID NO: 384204 - DNA, 272 bp, Zea mays
atttgtttcggtagaacgacaatttgatcataattaggaaatatattattgttttgtctagtaaaaaaaatcttttctcgataacactggttgaaataagttttggatatggccatcttggccaaatcatgggattaaactgttgagtttaggtggatgaaccatgaaccagcatattagtattatggatgaggtggttatagaatgaaccgattaagatacgcttccattctggaaagggagcatatgcccttgtctcttggttttttttt

SEQ ID NO: 384205 - DNA, 241 bp, Zea mays
gctttcccaaaagtagattgattacgaaatgcatgccgagtgtcctggaacgtgtctgtttcaaatgcaaaatgtcgattctctcgccgaaaccagataactagctagattggaaaaaaaaaagcccagtgattagtgaggtctctgagctgcgtcaccagacaattacccttcgcttccttccgatctgcgtcgagaattccggaagcatccgggtctctagaatgttcgggtcattgca

SEQ ID NO: 384206 - DNA, 275 bp, Zea mays
atcgagcgcagctccaagccgttcgacgagagagacgacgaacccggccggaaggagaggagcgggaggaccgcctgcgccgtcggtgagctgcaagttaggctttcaaagaatgtggaggagtgtgtggactttgcgccagagggaggtaaggtggtggtgagtgctactccaaaaggccactccgatggaagtcatggtgttgagcttcctgttgctctgcaggcattggagattattgatgccctagactatgggatggcaaaaattgcagt

SEQ ID NO: 384207 - DNA, 104 bp, Zea mays
cttcgctgaggttggtcgccgcacttctccctgtaacaatctagactctagactatggtagtgtttttagcttcgattgtttctcctgttggtggggaatttcg

SEQ ID NO: 384208 - DNA, 100 bp, Zea mays
tgagaattcaaacaacaatgttgcgatgtatgatcctttgctgaagaaatggcaccaccaatctgttcctctcaatcatacgaagatagttattccagtg

SEQ ID NO: 384209 - DNA, 125 bp, Zea mays
tttcgaaccgctcgtcttgtttaaaaaatcaactgtgtcatatacttccttggttatttagatatatgacacagttgattttcgaaccgctcgtcttgtttaaaaaatcgtcagttttcatttaa

SEQ ID NO: 384210 - DNA, 135 bp, Zea mays
tgtgggctcctctatgaaggcccatcttcactaaaggctgggtctaatgcaccgacaggtgattgtagcagcgcaggcggtcgaattagattggttggtactagtgtattgtgcacgtcttgcgcgcaaaccgta

SEQ ID NO: 384211 - DNA, 283 bp, Zea mays
ctcgagccggtcgaggcctagaacaatacttactcagaacctagaacaattttggctgtcgacgcacaagcggtggctgtggaggccgcggcagcgcagaaggccatcgctgggttgtggcggggcaggagagatgagtgggggagactgggagagtgatgagccttttctgtaattgagacagactccaccaagatttgggtccagagtttgtcttcacaatcaaacggtatcctcatgtattgcatcaggaggatccctgaaacttgattcttcctgtgtg

SEQ ID NO: 384212 - DNA, 281 bp, Zea mays
gttttagaggcggattttaagaaagtggtaggcataagctggtacttgtgggtcttcgtggtgatatttctgttgctgaatgttaatggctggcacacatacttttggattgctttccttccccttattcactgagccatgccgacgtcttcatcccactgttgggaggcagcagccgtggcttctttaacagaggcatctcgtgaagccaacacagagccgctgctgaagctgaggagtgtgacacatgcattggagcagcaaaggcgcagcggcgtggg

SEQ ID NO: 384213 - DNA, 263 bp, Zea mays
gagattttagcttgttgtgcaagactggtcaacttcagattgtgtgggtcagtacagaaccttgaggagctggacctctcaaacacatcaatcaaaacacttgacctcagtgataaagtggtgcaggtcccatgcctagagcgcatcatcttgctgggatgtgagcggcttcgtgctgtcctgtggccaaaggatggaatgcccaatctaatggtgctaggaatgacaatccgggaaggccgaaactaactagtgcaaaaaca

SEQ ID NO: 384214 - DNA, 179 bp, Zea mays
ggaaactgaaagtgcaagaacttttttctcatggcatacttccgtcctctacttatcttagaactagctactctcatggggtgttttttggtgcattgggcttcctaataactatagatgctaaaatctattgcaaatattattaactatccatagtatctgtggtaaattcttggtat

SEQ ID NO: 384215 - DNA, 120 bp, Zea mays
ggcgatatggcaggatcagagccgtttctcgccatggccatcggaggttcccttcctccttccttgcaacaagctgtaactgtacatagatccaagtgttgtatcaatggaagagcgagt

SEQ ID NO: 384216 - DNA, 284 bp, Zea mays
attgccccaaattctaatcttctacatggtaccacgaactcaggtcccgatcccgatctaatctcgtgatctctcccctcagcccccctcccctccccatggcaaccgaatcagcccctacccccgtgatctgcccgcttcgccaccatcaacatcaagctccacgtccccatgacccttgagttgaagccctctaacttcacgaagtggtcgacggcgttccaggccacctgtgggaaattcgggctgcaacatcatctcgccaccgcctccacctcaaactc

SEQ ID NO: 384217 - DNA, 112 bp, Zea mays
cttctacagaggttgcatcgttgcaatgttaattgagtagaggacgttgtcgacttccatctcctacatccttgtcggtggctgtcgccgaccatcggctcgacgaggtcgt

SEQ ID NO: 384218 - DNA, 204 bp, Zea mays
tctcgagccgaatcggctcgagcggctcgagattctttttaagggctgtagagtgtaataagtcaaaaaaaatgttgaccaaaagttaatctctggtgcgtggatgaggtaaagggttgtgggccattggatgcaaagatagaagtcatctgaggcgtcgtttctttctcccacaaaaaccctaggtggccacccctttttttc

SEQ ID NO: 384219 - DNA, 262 bp, Zea mays
cctgtgggcatccgcagctgcagcagcttctgttgcggttgcgggcgcccagcttttgctctccgcgccgcatccgtccgtccacctcatcatcccctggtcgctgctaccgaaccgcagctccgccgccgccggcctaactcaccaccgtgctgggccagccgatcgcggccggggtcactagttagttttggttgctgggttctgatgctatggcggcgatgatgatcagatcggcggaggactgtgccggtgcctgtgc

SEQ ID NO: 384220 - DNA, 274 bp, Zea mays
gtattattatttctcttgaacttggccctctgcttcacgtccaagttcatcacatccaagtgcaactgcagagcgggcatgcaggcacaagctatacgttgcttctgatgaactgcacaagatcaagcctgtttatttggcgaagaagaagaagaagaagaagaagaagaagaagaagaagaagaagaagaagaagaagaatgcgctgagactgctgcctgggctaggaacggaataggtctagcattgtcatgcagatacatgtatcttgata

SEQ ID NO: 384221 - DNA, 252 bp, Zea mays
gaaagggatctccggtccccaggccccggctcctccccttccgattccaatctggtctcgccgggcctggcggcgagggagagatggggaagaaccaggcgtacaaggcgatgcagcgggcgcggttggggtcctcgtccggcgcgccgggcgccgccgacgcccccgaagacggcatggcttccagccgctgaggaattttggctaccatcccactttcgctttgggtgaaagataaagaaaaagaacttt

SEQ ID NO: 384222 - DNA, 150 bp, Zea mays
cgatgacatacttataggggacagtcaaaatagttggaaccgtcttcgtatctcacagacggtatgtccaagtccagttgtccgagtgaatcaggccaatatatgtcagctaaagattgatcctgattcactcggacaactggacttgga

SEQ ID NO: 384223 - DNA, 106 bp, Zea mays
tgaacagcagtagttctagcagttctgtgatctttcgtgcgatcttaaggtgcatcagtttggggatccatgtagaaccttgtcttacctttccaacgagtattta

SEQ ID NO: 384224 - DNA, 108 bp, Zea mays
tgtttctggacagtgaagcagtattccggacagtgaacaaaaatctgggaacacatttcattttcactgtcattggctaccagagtccgggaacaaaatctgggaaca

SEQ ID NO: 384225 - DNA, 281 bp, Zea mays
tacggcacgtcggcattgaggcaagtggcgaggaaaacctccaggagaaggtgcaggaaggtggcaaggtaaacctcacggagaaggtgcaggaaggtggcgaggaaaacctcacggagaaggtgcaggcaggtggcgaggaaaacctcacggcaaaggagaatgaagggctagtggaggtctcaaaacccccccaaaggcgccggaaggatcctgttgcagacccctcttctcttgagtctagtggtttcatgcgatttcgggagaggaggaatgcttca

SEQ ID NO: 384226 - DNA, 118 bp, Zea mays
aattgaagtgcgattttctttctcaaaaacagtcatgtgcgattttctttctcaaaaacagtgaagatgctcaggctgtatgcgactctgggtgactcttgtcttccacacatcgtaa

SEQ ID NO: 384227 - DNA, 157 bp, Zea mays
ctcggtacatgaaaatccagatcacattgccaccgccggagaacagggggtggcaatgtgatctggattttctcggtacatgaaaaaattactgtatattaaaacccgctcagctcgggtttcacctccttcccgtgcatcacgggaatttggcgac

SEQ ID NO: 384228 - DNA, 267 bp, Zea mays
ctcgagccgattcggctcgagggaaaggaaaggtccatggcggggagatcgacgtacgacaaccccttcgaggagggcgccgccgcggccgaggtcaaccctttcgcggaccaagctaaacgaggaggaccgacggtcagtccagctattctggcggcgcgttctacacgacggtgagtgcaatgttttcagtaaccaaaaaaaaggggggtaaaaaataaaaatgttttggatggatgaccatacgatggcaacattgagttcacg

SEQ ID NO: 384229 - DNA, 242 bp, Zea mays
agcacaattagcttagaaatcatgatgacacttgcaaaaatgctccttcgcccctgaaaaaagctgagcccacatcagtctagttctgctccttctctgaactgaagccatacgcgaaggcaagactagagggcgattttgggcacgaatagagagatggaaagctccactgcgattgcgactgcgcgcgcccatgatgctgctgtttatggcgcggaagggacccactccaatctgggagt

SEQ ID NO: 384230 - DNA, 232 bp, Zea mays
atcgagccgatcataacttagcccgtttggtgtgatcgcagttgaactgacgttgttgctatctgtctcgcagccctacaagttttgtctggaaaaagaagcgcctccgagttgtgctgggtgtggagatctgagacggtcgtcggcccacttggttgccttgcctttgccatgcctgcaaacatacgggaacctgccccttttttcgaaccccttatttcgaagaaaattt

SEQ ID NO: 384231 - DNA, 243 bp, Zea mays
ccgtaaatcatccaagaaggcataagaggtgggatgatgaagaagcggaggaagcttttagagctggaagataacaataatattaatcacaatcaaactggggtgcagcaaaaccaagagaggtttggatttgaacctggacctgagttcacacttcagacatttaagaagtatgcagatgatttccaagtacaatattttaagaaagaagtgtccgcggactcaccaccatcatagaagaca

SEQ ID NO: 384232 - DNA, 223 bp, Zea mays
attttattaggtttcttgacagtttggatgctttcccagaacagcgtgcaatggccgcttttgttatagcagtcatcgtggatgggcataggatgggtcaagaggcttgtatgaatgcagggcttatagatgtttgcatgagacatctgcaacctgagaatcttcatgcacaaacagaacctttgcttttgcagtggctttgtttatgccttgggaaactctg

SEQ ID NO: 384233 - DNA, 105 bp, Zea mays
cacctacgcggttcgatccaactggcaggaaggaacgtgatggccaagacgagctcgttcaagctggagcacccccttggttaaattatacatatctcgtgccaa

SEQ ID NO: 384234 - DNA, 205 bp, Zea mays
cacctacgcggttcgatccaactggcaggaaggaacgtgatggccaagacgagctcgttcaagctggagcacccccttggttaaattatacatatctcgtgccaaaatttttgagctaggtgtgattatggtgcgatcatggtgagcaggttgtgattataatggaagtatggtgctgttgttgattggatagtaatgcgtggct

SEQ ID NO: 384235 - DNA, 267 bp, Zea mays
gcattgtcttgtttggtatcagggactgagtgcaacatttagtgggcttctcatcgtgaataccactgtgtgctggaaattgatagtttcatattcttggcacatgttctgtggattagataatctcttggatgaagatttgtgtgtctccgcactctacagatgtcttatgtccttttaattagttcatattatcagattgagtgaatgaggttctagttagacaactgcggccaactttctgaaatgtcttggaagtcaaggatg

SEQ ID NO: 384236 - DNA, 261 bp, Zea mays
cttgatttcatcgcagcgatttatgaggatgtggggcacaacctacagcttgtgttgctggcacacaaagcaccactcaatgctcttgtccgttgttccaagagaaatgagcgtctacattggctcgtgaagcataagaatcttctctgctttgaggcaagaaggagtttagtcttcatgatgctgcctgaagggaaggatgactttggggagctgcatgagatgttaatcgatcgatcacatttacttgatgaatccttt

SEQ ID NO: 384237 - DNA, 257 bp, Zea mays
  unsure (1)..(257): unsure at all n locations
ggcgttttcaagctttctaacataagtggcaagaagcgggaacctataccagcttcagcagttgaagctgacactgatgtggatagtgacagcagcagcgatgaagaagatgaagagattaatgaggatacaaaacccatcctacatctaaaaaaggtggctcatgcggggtgtgtaaatcggatacgctcaatgactcaaaaaccacatataagtgctacgtggnggagatactggtcatgttcaggtgtgggact

SEQ ID NO: 384238 - DNA, 258 bp, Zea mays
ggttttcgtagcagcagtgagacatgttacgtctcaaaatcgccaactacttgccagattgagtttcctatgaggccagaaacttttgatgaagacccaaatcaacatgatcgacttcccaatataatcatccaactccctcttatgcaagacttgatggcaaataagattcagatgcttcctgtacatcaacgccagaagttccaagctacgttgattgattatgacttagaggttggcaaaataattgcccccaac

SEQ ID NO: 384239 - DNA, 110 bp, Zea mays
ccacgttcgtgcgcttcgtgagcacgccagaggtgctggagttgacgagcatctatgatttagagatgtcgcagctggaacgggctaggcagatatatgcgcagggaggt

SEQ ID NO: 384240 - DNA, 281 bp, Zea mays
aaacaatctaaacaataaagatggaatcatgtatatattacacagtacttcaaatagggaatctgcaccatccttcctgctgcctacccattgtggctgctgcccgtgttagtttggcaccacctcccagtggtgtagaaattgaaaaacaaggaagaagtgaagaacgagtctactggagcatattttcatgccgtggcaatagaattttgttagtatgcaggtagttgtagctctacgccaaacttttgccccttagcctgaacctgtggatgcatatg

SEQ ID NO: 384241 - DNA, 229 bp, Zea mays
cccttttgtgccttgccccaagagaagagaggaagaaaaaagaagagaagagaggggagatgagggcataccgtcgcccatcatcgtcgttcctctccaagaattgactgtaatcttgctgacggagagtacatcctcgtgccggagccaaggagctgttcaggaggtagccccagatccagcaccagagcctgcacaagaggacgtgtgtgccagtgtttggaaaggt

SEQ ID NO: 384242 - DNA, 103 bp, Zea mays
ggcagatgaatgaaggcgttgcctcgtatagtcgtatccaatccaacgaccgatatcaccgagtggcgaccgcctgacgcgcccgtgtcggcaagccgccgac

SEQ ID NO: 384243 - DNA, 102 bp, Zea mays
ggccttcacggagaggttacctgcctgcacattagctgctaggaggcacattgattccaccactaccatcttggacgtccagggtgtggggtttaagaattt

SEQ ID NO: 384244 - DNA, 203 bp, Zea mays
ctcgagtcgctcgagcggctctcaggagtccccacccacacaactctttgttgaactacaaagggccagatctgaataatccagctgaggatgtttctctccagaaacagtcagatcacaaaggtgtgacatctctaacccagatttactgagtatggatgatgggttagctacatctaaagctcagtcatctgagcctcaac

SEQ ID NO: 384245 - DNA, 245 bp, Zea mays
actcgagccggtcagattctgtatcgatggcaatgggttccagaacagtacacaacgcaatttcaagacggttattcaattgctcaaatagttcagcgaaagaaggctcatgtgctgcttcgaaaatcagttctaagaaggcaaccagggacaacaaacctgataagggaagaaacatgttctggataaatattggcctttgtttcaagactccaagcccgccaacatccagggatcaatcctca

SEQ ID NO: 384246 - DNA, 101 bp, Zea mays
cgccaaagggaaatacccattgatctcatctcatgccctgttgccgcgcctgctcctccttccgcatccgcacccaccgctgcgcacccggaagcttcgcg

SEQ ID NO: 384247 - DNA, 115 bp, Zea mays
cccgcattcggctcgagcacgatatttactttacacaacgcgattgctttgatgaggagaaggatactacagcgtgatgtggagatagaggttgaagcagttgacagaacaggaa

SEQ ID NO: 384248 - DNA, 256 bp, Zea mays
cgccaaagggaaatacccattgatctcatctcatgccctgttgccgcgcctgctcctccttccccatccgcacccaccgccgcccacccgcaagcttcccgcacggccaccgctgcccggtatcaatcgaaccagtcgtccgtcctcctttccttcaaatcaagtccatttccactccctgtctaccctctccctcgtctctggtgggcggtggcctcgcctccctttccccgtcgccctgatggctccctccgca

SEQ ID NO: 384249 - DNA, 256 bp, Zea mays
agcgccatggccttctatcccattccttcgccgttcctcagtcgtcgatttccagagagagagaaaggatgtccttctgccaggaacttggcggctccgcctcgggctcacgactgcgtgctactcggtgaaattaaaggggctagggtgtgtcgtcgaggttcgttgtccacgagtgtggtttgcggtggtcggaaaagcacgaggttactggggatttctcgccggaggtcatttccgtcgcgacgtcgaggac

SEQ ID NO: 384250 - DNA, 187 bp, Zea mays
  unsure (1)..(187): unsure at all n locations
cttccctggctgctaccttggagttttgggccaaccatcagcaagctagagctagaggaggctcatccatcagcaagctgaagccanagaaggcgactacgcacgcaaggatcttcttcagggaataattatatcgatgtatatcacaccaagtttgaagctaagtcagctagagatggttcttggt

SEQ ID NO: 384251 - DNA, 114 bp, Zea mays
attgccccaaattctaatcttctacatggtaccacgaggtcaggtcccgatcccgatctaatctcgtgatctcgccctcagagtccctcccctccccatggcaaccgaatcagc

SEQ ID NO: 384252 - DNA, 121 bp, Zea mays
cttcaactaccggatgaactactcgcagtggaacctggtcgcgcctggtcccgggtacacatgcggagccgctaagcttgtcaagcctaccaagttcatgtctctggatggcaggagatca

SEQ ID NO: 384253 - DNA, 201 bp, Zea mays
  unsure (1)..(201): unsure at all n locations
attttcagcattcaaaaacacaccaagcgaacgnactagcaacgcctaacaccaatggctacaagatattagcctcctgcgctctgcctttatgacgcacaatcgtcatatcacagtgtattgtctatgatatcaagtctccacagtaccatggtcgcatcacggcactaagtaactacgtcgcgacgctcacacatccat

SEQ ID NO: 384254 - DNA, 120 bp, Zea mays
atccaagcactgctagaagcacttgaaagacagtcgagcagcacttgttcttgcctgctgctggtgattttgctgaaatgtatagcatgctttgtgtatgatgaatggtaacttggagcc

SEQ ID NO: 384255 - DNA, 257 bp, Zea mays
atggctaccatcaccccctccttgccgtcgtcctgctctaccccacaccacctcgctctacggtggcccgggtcgttacgcccctgacactcgagtcgcgctcgcgaggaaggagtcggccgagcaaaaagacactaggttcgggcatacgattctactgtgctgtgctagaggaagaccatagggacgcagatgctctgtctcctcaaatcgatgccttcgtaactgctgcagctcttgcaaaggcttctgtctat

SEQ ID NO: 384256 - DNA, 246 bp, Zea mays
ttgttttgttcgtggggcttttcgtgttcctgtgcaccaatgtagttgtcctgggtgacgtgcacgccattggagatggaccttacatcccatcttcccatccatttgttttaagagctgctggtggtagagctaatggtgatggatccaagaagatagagaacatgtgatcgacctaaggtagtttcagctccagagaagaaggtccattactcatgcaaatgctaagagcagagtgaaaagttc

SEQ ID NO: 384257 - DNA, 235 bp, Zea mays
ggaagactagagggggtgatggtttagtaaatgattgggtatctgcttccactgcctcagaatacgatgaagacatggaagatgggcgggatctggtagtaggatcttctgatgatttcaaaaagtctcgaatgggttatcttgcttcatatgatgattttgttgaggatgaggtttttgctgaacaagaacaatcactacgcagttaattccaaacccacctgcaaatttcaga

SEQ ID NO: 384258 - DNA, 255 bp, Zea mays
ggcagcagggagctcagctccttctcccatggcacagcagcaagcccccaccccatggcgcccttcctcctcggctccaatggtgtggccgagcagcagctccctcagctcttccctctccagctcgtccctctcctctcccacaacggcagcaacacccatggatggcgcccagaaaattccagcagcaagcatcgcacatcctgctgtccacggcgtgcagcaaatagggaactccagctccactctcccaat

SEQ ID NO: 384259 - DNA, 263 bp, Zea mays
ctctaattttcacatgctttttcctaagatctctatcagggggagctttccttcatctctaaagggggagaaaaactctttctaaaggagaatactcatttagggggagtaatcttttgaggacaagcttttatttacttcctacatgcttttaatgtcttccttttcggtggttgatgccaaagggggagaagtttagggaccaaagcaatgaaaactatatcaaacaacaaacaccacaaatttaaaattttatatgtaca

SEQ ID NO: 384260 - DNA, 262 bp, Zea mays
gttactattgtccgtttaaccagtagcagcagtgaacctaaactagacctatcttttacctggtcagcagaaaaagataggcaactactaggagtgtactggtgcaaggctcttgaatgtagccacattttcacagctgatcctaggggtgtgcttaagttgtggaacataagaaatgtcctgttctcaagtactgatattatcaatgcacctcagatgtttccacctgtagcagtgtttgaaccgtcctttggagctcgaa

SEQ ID NO: 384261 - DNA, 99 bp, Zea mays
agttgtgtaccaatgcagttttgatatttgatggtaggtcagcatatgtccgtgcattgcaaccgataaataaagttgaagaggtatctataagctact

SEQ ID NO: 384262 - DNA, 283 bp, Zea mays
attttaaacactggataattgaagtggtacgcgttgcatattgaattgttcaaaagtcatttttgagggttcacactggagtcctcaaaaggctaatggcgcacatatgtaggaggtcctaagttttcctctcctggttatttgcaggatgctgctttgcatacacttcagaaggacttgcaagagaagatgaacaaaatgcgcattgttgattcattagactttataccggcaacaatcaacagcaacatttgcagaccaatcatctcactgtggattcatc

SEQ ID NO: 384263 - DNA, 99 bp, Zea mays
gtgaatcctggttcttctctgattggaagtctgacagataacgtatcttctagcttcagaccgatattgtcaccgagattgggacaggcattttacact

SEQ ID NO: 384264 - DNA, 104 bp, Zea mays
aaatgggcagttgagttaggccggatattttactgtggttttctcaacaatcatttttctcatattgtatctccacaaacaactccttgggtaaaacttttgtg

SEQ ID NO: 384265 - DNA, 111 bp, Zea mays
agctgctgagcacctcgcctgggctacagcagctgtcagcgccggttttccctggtgcctgcctcacagctccggcacgccagcgtctctctctactcaacctccctcatc

SEQ ID NO: 384266 - DNA, 277 bp, Zea mays
ctcaaggcggccaagcactcccctccgccgcccaatacctgagctgccggatgcatgcgttgctgctgtacgagactcttgtgtctgtctgtacatatgctgcctctgcgtgtgatgtgatatactgaacctactgatgcgctttgtttatagcttgctcgctctagtctagtgtgtctctagtaattgtaatgttcacttggattggactgttatgtacaagtagaaggcgacaaacttccagttacagatatgaactgcccgcagagcttccttc

SEQ ID NO: 384267 - DNA, 303 bp, Zea mays
gaagccgccaccgctcctcctccgtggcctcgcgcagtctactcccgcggcgccgccaaccagcagctgccagaaaagactcgtcgctgacctccgccgccacttcgacgctctccccaacagctacgcacaggcaggatatgacatgaaagatgtcctcctgcatgcccgccttgcagagcaggcgacaggtgaggatcagcctgcagtgaacattgaggaagttcatggcagaggaagttgtgaagaaggcactgttttccagctaacatttgcttgcacagccccgctctcatggcagtc

SEQ ID NO: 384268 - DNA, 123 bp, Zea mays
ggcgtactgttctgggtggggtaatatgatgaaacagatatttggacggcgcaaggcgtccaaaaccgcagacaaggagttcactggtgggaggacgttcagccagctgtcggggtctggagt

SEQ ID NO: 384269 - DNA, 247 bp, Zea mays
ggcagtggcagtagttctggtgataagttagagaaaaatgaagccagccaattagaggagacggagaaagatgaaatgggtcggtacaaaccatcattccttcctgaggagccatctacgagaagttcccttggcgcttccaacagcaataatacaatcgatgaaaacaatccacccagggcttctctccaaaatgatgtggctacatgtctccgctgtgtagaaactaccaatctggataagccct

SEQ ID NO: 384270 - DNA, 195 bp, Zea mays
tttgctctcgcagttcatactagacaccgccatcacctactgtcgtgcgccgtgtgtgagagagtgccgctgccgccgtgattacgcgtcctagtcatcgctctggcctcggacggcggtcggggccttcgttggtgcatcccggtgcttgtggtgacctcggcggacgcgattcgcggacagcgggcaaggaat

SEQ ID NO: 384271 - DNA, 256 bp, Zea mays
tttatatctgaagcagtcaacttgtgcgaccaggtacctaaggaaggcatttttgagaacatacatactatggaagatttgctaaagatgactgaatggacagaagataggccactacgtgttgttactggatttggatatgtatgatccaaactcaagcagtctaattcctgctccacgccccaccagttcaccactactacacacttgtgcgcttactgctttgctgattattcaccccagttacattattgtg

SEQ ID NO: 384272 - DNA, 245 bp, Zea mays
cggctcgagctcgagccgattcggctcgaggcaaacgaatgtgactccttaaggtagtacttcatgtacttattacctgttcattttgttgtcgtagtaactgcacttcaatacatattttcaatcgtctacacttgttttgcactagatggacaagtctggcaaggtcattgctaagtgggatagtagagcaacaaaaatttacacagaaatatgtgtagaagaggtcaatgcacggaacagac

SEQ ID NO: 384273 - DNA, 99 bp, Zea mays
ggcagaacttctgcttaaatttgtaaagaagctgaaaataagctgtgccaaacagagccttaataataactgacggcatatgtgttggccttgttaccc

SEQ ID NO: 384274 - DNA, 244 bp, Zea mays
aaaagttctaggactcctattcatgtagaacttgagaggtctaaaacaaaatctgctgggaatgacagcattcagagcacgaaacctgtgccatctgcattgactgttgacaaagccacttcagttcgtgggagtctttctattacacctaataattcatctaaagtagcagatagtcttcctgacagaagttttaaaccttcagataggtcaggctcaacaacaaataaccttgcaacatctc

SEQ ID NO: 384275 - DNA, 106 bp, Zea mays
tttgaataagaatactaattgtaattaaaatatcatagtacaaacgtcataatgtatgggactttatggcttaacaccgttatatgagtataacggtgttaagcaa

SEQ ID NO: 384276 - DNA, 240 bp, Zea mays
ctcgagccgaatcggctcgaggtttgcgagggagaaatgctctagtcagccccaagtcaacaggtgtttggttgtttaaggtggtcatgcacaccaatttagtatttagatccttttgttctagttgattgtagatatgatgtttgtgatcattacggaggcaaggttttcctttttgtccactattgccacctatacaacttggtggtggattatgagttgtatcctcattcactattg

SEQ ID NO: 384277 - DNA, 244 bp, Zea mays
gtaaagtcttacttaaagaacttatatagattttttatacagtaagtaatttatacctataccttttcattttctatatcctcattgtggggtctgatctctaggctaccccaagttgtttaggactaaaagtctgttcttacaggttgactgtaaactttggaaaagaaccattctgttttgacgttgagggttatattcttgaggacaaaatgaggcagcaatcagtgtctgataaattgaa

SEQ ID NO: 384278 - DNA, 250 bp, Zea mays
caaaatcgcagcgagcgagcgagcatgttgttctttgttcgttcttccccggagcacacgtcaggaacagtgccgagcgagctcttgtctttcgtggagcattagtttaatgattggggaggcaacttgtcagcagatttcttgggagcaacaagcactccagctagctgtggtggccgtcttctctctactgtcattcagagacaagtaagtacgcgcgttgtcctagtattttatgcgcgggagaggg

SEQ ID NO: 384279 - DNA, 245 bp, Zea mays
ctcgagccgctcgagccgaatcggctcgagcgagcgggacctcaaaactgatggacttgcacttccaaaactaatgccttcctattagaggcaagcactacaatatcgcttgtgtgaatgatgtgcttaacggcattgtctcaaaaggtcaaccggtgctttatcatgttggtaacatactagagaaatttattcaggcacaaatgtcctcatctctgactcgacagcaacttctagaagttgtt

SEQ ID NO: 384280 - DNA, 266 bp, Zea mays
ctcttatagtaagtcactaactggatcccatggaaatgggctatcaggatctgtttttccaactaccggcttttcaggtgtggtagaaactgaagatggatcactggaggatgttatttcttctcaaaattctgctgtttcttcccagaattccccagattacgttgttcgtagaaccgatccaataggttctagttcgttacaaaatttcactgaagagggctgtattatgagaaatatgtccaatgggactggcatctctactg

SEQ ID NO: 384281 - DNA, 265 bp, Zea mays
caacagaatacatagaagggaaatatggaaaatttggggttgaccgtgtgccacagctcttgtaacagtgccaatccacaagtgaagctggtgttcacaaatattataggcaagcaacagcagtgtttggcatgacactgctatccctttcaagcaagtgctgcaagagtttgaggactggcttggaaatcacaacctgtggaaaaaggagcaaggtggatcactcaaccgtggagcatttgttacttgtggaaactgggatttg

SEQ ID NO: 384282 - DNA, 259 bp, Zea mays
gccagatgcagggcgtcactgtgcagtccccctcgcctgcttctcgcggaagaatccgcccgcgccacagagcggacacttcgcgctcctcttctctcccgttcgacgcgtctgcggaaggccgatttccggcgaggcggtggtgaatctaccgcgggaaggacgcgtcggcgccggtccccgtcgggtctgtggaagacgaagccgaggtgctcatcaagcaggtccggtcgcgaccgaagacgaagaggccgcaaat

SEQ ID NO: 384283 - DNA, 249 bp, Zea mays
ctcgagccgctcatctgcgtacacggtctccctcttcctgtcagtagtagagtgagagtgacgcagcgagtgggagacaaggggaaatggggaagggagcgcaagggagcgatgcggcggcggcggcggaggaggtcgtcgtggtcatcgtcttctggtaggatgcctggtggctgctgatcgtcttcctcctcagcacaccgtggtcgacgtgaagctgatcatcgaccacttcttcgtcttctagca

SEQ ID NO: 384284 - DNA, 247 bp, Zea mays
gattcgaggaacagattagtcaaattttgtggtgtttacacttttacttctgacctccgtttgtgcatagctcagcttcatccaaaactatctgctgtcacctaaccaagatgttctggtctgtgatgtaagacatgtttatacatttttttttttgaaaaaaaaagaaacaaactgtactttcgtgtttagcaaaaaaaaaaaaaaaaaaggggggcccgccgattattgagctcttcgcccgggg

SEQ ID NO: 384285 - DNA, 270 bp, Zea mays
caaggtcctgtttgtatgcgaacgagaaaagtaggaccctttttatgtagcagcaaacaaaaatgaatataaagaactatatttatgaatgtaggttgtatgtatgtcgatatttattatcattcattcgaatatggacggaaaatggactaaaaactatattttagaacagatagagtaatactcatcataaaccactaacacgtaacgatcaccttgcatattatacacttagcactcattaaactattagcgtacacgttacaacta

SEQ ID NO: 384286 - DNA, 270 bp, Zea mays
ctggccaccaaacacagagatgttccttgtgctgttttctcgttagtcacacaatcttattcactttcagttgaatggtgttgtttgcatctttctaatccagccaagttgcatggttgcacatatgctttacagtttgcagcacaatgattgcagttttagtcaaaccagattgcatattttttgtttaatagttctttcaacgaagcacctgtggtttacttggcatcacaggtgtttgcatgtttctggttctctgtgtagattttt

SEQ ID NO: 384287 - DNA, 246 bp, Zea mays
tgcatttctatatccttgaacttgttaaatgatgtaccacacatccctaaacatataaaaatggtgcatcacaggcccacttttggaccatagtgaccactgcggtgtgctacttaacaagttcaaggacctaaaaatgtattttcaaagtttgtggacttcagtgacatctgttgacaagtcagaggttgctcatgcatttaacacttttttgtattactatataattaaggagtttgctcgcct

SEQ ID NO: 384288 - DNA, 267 bp, Zea mays
ccagggtgaaggctatagccgaaatatttgctgacgctgggttttcagatgttacaaagaatttcttgggtactccggctcgattaaagcgaccagaaacctggtcagccggttagtcgatgattaatcaccatgctgtgggcacaaatgcgcaatcatccctgccgctggtcttcctcttcttccttccagctttcccagcagtcgtgcctactctctgactgctgctgctgctacgtcgtccctgcctcggcaacagtgcatggg

SEQ ID NO: 384289 - DNA, 265 bp, Zea mays
gccaaggatcatcgacgacgacgacgacgagcccgccaccgtgatcgtgatcgacgacgacgacgagcccgcccccgtgatcgtggtcgacgacgacgacgacgtgcccgtcaccgtgatcgtgatcgacgacgactaggcgactagctagctagcgcgcgctagaggctagcgataataataagggatcaatctagctgagccgtgatatgacatatgcatgttcgtctgcgaaactctacatctctggggcttcatgactcca

SEQ ID NO: 384290 - DNA, 268 bp, Zea mays
ctttcccactgccgtgacgattttcacagcgaattctccggccggcgccgccccgtccgtccgtccgttcttccgataccgaactcgccagtcgccacagcgatctctctcgctcgctccgtcgacgcagcgcacggcttcagctcgagaggaggacatggccagcagcggctacgaagggatcctcctggggatgcggcaccccctcctcgacatctccgctgtcgtcgccgagggcttcctcgccacgtatgatgtgcacccgggc

SEQ ID NO: 384291 - DNA, 136 bp, Zea mays
aggtcagtcagcaacatagatagtagaatgcattagccatcatagataagccatggcgaccttgatcatctccctgctcatgttacttgcgctagctacatgtgtggctaaggcgacaattttccctgaatgctca

SEQ ID NO: 384292 - DNA, 260 bp, Zea mays
ggcatttggcgcatatggaaggccatggctgcagcaagttaacgacgaaagacatgtcgacatgctgatcattgcactctctcctagctctctctgcccggccggatgggtccataaatacgcactagtacatactcagctagtagtctcacatagcatagccatcttcttcgtcgacaagcaggggaattgttgactgcataacgaaacacatcgtcgtcggatcggagatgatgagttccgtcgtcgtggatgctgct

SEQ ID NO: 384293 - DNA, 258 bp, Zea mays
ctatattcaggaataaaagaaggcagcaaacatcatatataagccttgaagaaattgatccaccacatgaaacatgtcatttgtgttagaaagagcaatgaaaaggaacaccaatgcccccaaggccccaactatccacattcttgtttgcttagttaccaggcaaagaggtctggtccagcatcaccatcaactgaagcattcacgacaaatggctcttctttcttggaattcgattttatatagttcagcaactgc

SEQ ID NO: 384294 - DNA, 257 bp, Zea mays
aggtgttggatttctcgaggctatggcagacattggaaagaaggatgggcttaagggttactggaaaggaaaccttccacaggtgcttgatgttccctatcatccatggtttatcttgctgtgctgtgctgattcctatccatctcccattaacttgtccaggtcattcgcataattccttacagtgcagtgcaactcttctcgtatgaagtttacaagaaaattttccggagaaaggatggagagctttctgtatt

SEQ ID NO: 384295 - DNA, 277 bp, Zea mays
gttcggcgcacacggacacagcccgcgacctcgatacttcttcacgcgaatctcgacgatcccctcgctgcgcccccttccttccttccttcaagacattcacagaggatgaggatctccattcataaggaatgcaggaattttaactgagcttgcagagcttgatggtttagctgtgcatggtggttatgacaaaggatcctccaaaagctaataaataaaaagctccttgtttaccataacccctggaggttgagatcggggtcaccattgacaa

SEQ ID NO: 384296 - DNA, 278 bp, Zea mays
gggagatgctatgcgcccacatctaccacgccgccttcatattgctcaagctcgcgctccgcaactcctgccccatctgccaccatgagatgcccaccgatgctgccctgcgggctgccgccagcgtcggcgttgccgaacgcgccgccggggaggaacaagcgtgggatgcgccccacgcgcgcgactttcacctgcctcccaatttgatccgtgagttcaccaggaccaggcttctatgcttacatattcagtgctgttcgctcgtgctgtatctg

SEQ ID NO: 384297 - DNA, 278 bp, Zea mays
gtttgttgctgctattttcacaatagctttaatccccttcatgtgacgctatctagtttttcttatcctagtgtgaattaacagtcatcatagaatgtactaattattatgtgcaatcactgtcaaatgtcatgaaaaaactaggttgttattagatccatatttgcagcacattgctcgattttcatgcccaagttgattggtcctcttatcatcatgaagcacaaggtcacttctgatttatgatgcatgttttttttagttaatataattcatga

SEQ ID NO: 384298 - DNA, 269 bp, Zea mays
ggtatatctggaagaggactcgttgcatttggttgaagccctaagtgtgattatcacaacgcttccaccagaatctgctagtagagccctggagttaatctgccagccagtaatcaatcccttgcaagaatttatccagcagggtgatcaagttcttcaacgagtccctgctcggcatttaactgtacatatagaccgactatcaagcattttcagtaatgtgaaacaaccagaagttgttgctgaagctgtatatagatattggccga

SEQ ID NO: 384299 - DNA, 275 bp, Zea mays
gagagagagggcagctcgcttcctcgtggaatctctctgttcttagttctgttctacttctccaccaagtccctaacacgcgggtccgccgccgccgccgccgccgttcgaagactcgaggctcgagcacctcgtctgctcgcccggcccctcctatccctcgcgcgactgtctcggccgacgatcataagccgcctgcctcatcgctggccacacaacgatccgtggcaaggaaagcacgaggacgtacagtagaattgtgaatcgccggaaaa

SEQ ID NO: 384300 - DNA, 109 bp, Zea mays
cacaactgcatgtatactttaacgtgtgtcagtggaagggttctagcagggtttctcttcccttccgccgaaaatcatcgcggatctattcagggtggaactaactcac

SEQ ID NO: 384301 - DNA, 264 bp, Zea mays
ggaagcctctccaaattccagaccagacatcacacaggtctggtttcgtgttaatgagctgctgccgcttgagttacaaaaaagtttacctgacggaccttcgccagccgtttccttgagtttgcgagatgaaggtgctcataaaagggcacatgtgatgcctagaaggaaccctcctccacctccaagagagcaatctaatagttctctatcgcatggaagctcaaaggcaggagatgcacccttaggtgcattttgggcaac

SEQ ID NO: 384302 - DNA, 169 bp, Zea mays
aagatatttataccacatctttggggggcaaaagatataaaaaataaatgtggaggtttctcggagaatgatgagtttagcattaggagtgcttagcgcacatagaaccaggagaggttgaattgcttgtcttgttgttgaagatgtcaccgtcttgatttggatagtt

SEQ ID NO: 384303 - DNA, 262 bp, Zea mays
aaacttctcccccgcagttccatctctccgtcgccgtcgtcgtcgcgtcctccgcgtctccggcgagtctagagagagagagagagagagagagaggaaggagggtggagggccgcgcccatggacgcggagcttctggagctgcagcggcagctagaggcggcgcagagcgcgatgtccagcgtgcgcctgtcagagcggaacgtggtggagttggtgcggaagctgcaggagcgaggcatcatcgacttcgacctcctcc

SEQ ID NO: 384304 - DNA, 264 bp, Zea mays
agtggatggacaacgaagttgttaacctcatgctaaggttgtttacttcttgtaatgctactcttgttaccttaatccatgagaatcctaggtacgagaagatgactctagaggaggtgcttgaaagttccttggccatgagatgatggttaaggactccaagcacattgaggatttggctcaaggaaacgtgaccaccatggagccacaaccgaccgccttgaaggccacaagtaaaaaggaggagccccaagaaacaaggaa

SEQ ID NO: 384305 - DNA, 266 bp, Zea mays
ctcgagccgattcggctcgagaaaggttttggtgtattagatgctgggaaagctatgctgggagtgctatgccatgaaagatatttgtagcagtgttacatgatggcatcaagtgctgggcaaatatttattagtttgtggtttcacttctatggaatataggagtcatgattttatgcatttgatcggagaccacattaactagagggtactttcttttttcaagattacaaagacctatgtgccgctatacctgtttatctgaa

SEQ ID NO: 384306 - DNA, 151 bp, Zea mays
ctcgagccgctcgagccgaatcggctcgagcggatctcgctcggcgctcgagactgtacactgacgagacggagacgagaacagcggcttcatcaacgccaggcgtcaggtcatagtgtgttaagacaagatggtggcgaatggcgacgca

SEQ ID NO: 384307 - DNA, 266 bp, Zea mays
caagggtaaagctggtgggccgacgattggaacccacacccaactcccaagttgcttgcttgatttcgccgagcagagatcgggtcgagtcctacgccgccgcccccgcatgctctctccgcgccgcccccaagtccaagccttccaagggcggcggcaaagctccttcctcctcggacgcctctctcgacttcgatgtcgaatggatcgccgagcacgcgcggcaggtgtctaggatgctgctcggtggtatgagtgtcatgggt

SEQ ID NO: 384308 - DNA, 259 bp, Zea mays
ctcgagccgtggaaattaagctcacttcttttgaggaagagattgatgcaaggaaagccttgctcgatcagagggaaaccaccatcaatgagaaggaggatgcagtggcgcaaagggaacagaatctcaaccttaggtttgctgagttagcgaacaaggaagaatctttggtaaagatattagatgagttaagggaggaagagaaaaggctctcctctgagagagagacactgcacattgatctgcaaaaagaaaagga

SEQ ID NO: 384309 - DNA, 257 bp, Zea mays
cggcctccctcccccaagatcctccactcgatcccaaacaaaccaacaaatccatccatcgcacatggacgcgttcttctcggcctcctccgcgtcggcgccctacggctacggcgccggcggatggagctccgactcgctcaagaacttccgccagatcacccctgccgtccagacccgctcaattagcatttcgtatttttttaaaaatatatatcagtcgctggtttcgtgcgttccagaaattctcctgcggg

SEQ ID NO: 384310 - DNA, 208 bp, Zea mays
ctctcggcctacgttgatctggcgatgcggttttcaagggtaatggggacgtgatggggaactaaggtgttcaaacaataagtggggataaggaacacggagcagcaacaacaatatcataaggagattgcagacgttggacgcatggaatgccaaatcttcagtcccctaatgatgcttcgcgctagcatcttcagttttctcggct

SEQ ID NO: 384311 - DNA, 256 bp, Zea mays
attcccgcgagccgtcccccttccctcttcatccgctcgctccgtctcccgcgctcctgccatccagtccggccactccgaccttccgtggagggagattccttgcccggtgggaatctcagggctgatttgaagactgccggcaaagatccatcgaggaggcggcgattccatcccgaatcacgacatccggcctaagcgaaggagctgaataggcgcgcatcaccctcgtcgtcctagccgtcaccggctccgt

SEQ ID NO: 384312 - DNA, 256 bp, Zea mays
caagaagctccctcacagcctcacgtcacctgctccacgccgaggcatcagttgcagcaggcgctcagctccttgcagcaggcaagcccggcggccagttccttccccagccagcttcaaacttcttcctcctggcgtagctcctaccccttgcacgcgtcgtgtgtcctttcctgtcgtgttcgcccaggtctggtctgttcccaatcagcacagcgccgtcctgtcctcttgaagctcgacgtcgcaaagtcca

SEQ ID NO: 384313 - DNA, 257 bp, Zea mays
ctcgagccgcacggaagacagattttccgaaactttaagaagataacaggaaattttggattgcgctcatcgtggattcaggaaagaaaggttcacagtattggtaaactggaaaaatctcaagtcaattctgcaagtcatcatgattctattcctaaggacttgttgcatactgaaagaatggaactttcagagtctgtacttggaaagagagggattgggaagaagtgtttacgattacaatggaagaagattga

SEQ ID NO: 384314 - DNA, 239 bp, Zea mays
gaaaagtagtaaaccccaatggggagccaaaagaaagaggtactaaagggaaacaaaatgttggtcatgcagaacttatatcaccaaaaggttcatgtgctgactttttaaaaactaatggtattacttatgcttctgaatcttccactggaattactacccggatgtcaactgtggagttgaaaagttctgaccaagataaggagattcatggaggtgccatgcctcaagctacagca

SEQ ID NO: 384315 - DNA, 240 bp, Zea mays
gtaatttaaaaataactagccaaattgattacaaactgcaatcactaaacctatatgttacattttagaatgaacgattccatgtgaattttagcacacaaccaactacccctaggtctgtatcatttttcaatttgcaagcacaaataacaaagttttctaatactatcagagaactaatttatcacgatgatgggaacagtataaaatttaccagaaaaaaatctagtaatctgtttc

SEQ ID NO: 384316 - DNA, 230 bp, Zea mays
tgactttgaatcatgacacaacatagcacaagattagttggttaaggctgtctccagtagatcctcgattttatcccctattctattttctattttaaacttcattatatctatagttttatgtcccatattttacactacctactggagacagtctaaagactgtttgtttgagctagaacttttctaaaaaggtgctactgggattttgatcttgagtagttaatgat

SEQ ID NO: 384317 - DNA, 100 bp, Zea mays
ggaatttgttatgggcaacctcgaggcatgatgtatattttatgtcaaattccacagtaacccattggtcatcattgtctcacaaattatcagaggttct

SEQ ID NO: 384318 - DNA, 99 bp, Zea mays
tctccctctacgtccagctcggctatatccagcgcgtcaccagcggggcattcccgcgagcacctgtcgggcagggacggctccccatcgaagaccagc

SEQ ID NO: 384319 - DNA, 267 bp, Zea mays
attgttgaagaataaaaagtttgctgacaaaagtgatgatacttgccttgttccaatcaccgagaaggagaatgaagcagtggaaaacttggaggacatggatcgtcgcagtcctgatcttccatcattaatggtaaggaacaagaaaccaaagttctatcataatgggtgtacacagcgaatccatgcacttaaacagcagactcaaagtacagatgcattctggaagcaaaatcagaagcaggtcactgcattaaatagctgctc

SEQ ID NO: 384320 - DNA, 268 bp, Zea mays
cagaaatgctacattcttccagcctgaaggtgcccatatttctactgctgtttcagaaatcacaaatatgggcaccttcaggctggaagaatgtagcatttctgatttctgaaacagcagaagaaatatttgcttttaccaataccttgcctgaatggctatgcaagtcacgtcaagaaaagttattcgctggtgaagcattgtttggccatgtcgagcttttgaaggagggcaaattatttttgttcccgcatcacattcaaagggt

SEQ ID NO: 384321 - DNA, 261 bp, Zea mays
cggctctcctttccttgcgcgaagcagatcggcgagattgagcccacaaatcgcgctccccgtcggctcccatccatggctgcgcgacgcgagatcggctcccctttccttgtgcgaacgagatcggcgagatcgagcccacaaatcacgggacggcatggcagccttgccccgctctcccaacagagagcgtatgcgcctttccttgcgtgacttgagatggattggcgaatccatggatccgcgaatcgcggtctgcta

SEQ ID NO: 384322 - DNA, 266 bp, Zea mays
gtaccatcaatcatcattcatcttagtagtataggcaccaaatcaaatctgcaacatcaattatctaactccaaaaaccatgatgctggtgcttgtggttcttgctttcattgctttagtatcaagtgtttcttgtacacagacaggcggctgcagctgtggtcaacaacaaagccatgagcagcaatatcatccacaacaacatcatccccaagaacaacaacatcagctaccaccacaacatcaccagcagagcaacaccaaca

SEQ ID NO: 384323 - DNA, 265 bp, Zea mays
actatatcaaggtcctaaaatcacctctatttctaactgatagaataaataaataacaaagaacccattttggatttaaagtctcttatcaattttaaaataaaattcctcaaagttatctgcttttctaaaaatatttgaaccttagggaatcattttgttcgtaaaaaaatataggaaaaatgtatcaattcatgttaatttgaataccataaaatatatagatcaataggatatggagagcgaaagggctctacgtaatggt

SEQ ID NO: 384324 - DNA, 260 bp, Zea mays
cagcgacaacgcggctgagagctgggcggtcagtggcagcgcagacaccagcgctagccatcctcgccattgccgcagcctgtcggtggacagcatcatggccaatctcaattttggaggcctggaccaggtttctctgagagtgccacctctgtctccagtggcagacgccagtgtcagcctctcgcgcactggaaccggagcatcgggcggtgcggctgcggctgcttcttctgaacttaccaacgggagttcagcga

SEQ ID NO: 384325 - DNA, 260 bp, Zea mays
cccgttccgtcgccgtcacccagcgcgccgatggagcagcagatggtaccactctgtgtgaagagtgtgaagcgaaagaggaaaagggttgaccacagcaatattattctagcattaccagctatatatccatttccacaaaagataacggtggctggtgctgcaggaaagaaaagggcagcaaccaagaaaaacactacaggtggtgaaccatcaagaagaaacaagaagcgcgaggtcgcacgtgcaccaagcaagga

SEQ ID NO: 384326 - DNA, 257 bp, Zea mays
ctttccgttgcccttttcccgttccctgccccttcttctccgtctttctccggtcggctttggagaaagaggtgatgtgaggttcccatcactcacgcctggctgggtagctagatgctcccgggccgtctttattacggctgtcgccgggctgggctgcggtcggcggcggaagggagtcttctggcggagatatgagaggattgttttagtgaggtctatgagctggtaccagaactgctcataatattcagggg

SEQ ID NO: 384327 - DNA, 252 bp, Zea mays
ctcgagccgctcgagccggaagaattgtgtctacctagccgttatactcctataacggtatcaagcaaacacagtaccatacattatgatgtttgtactatgatatttgaataagaatactaattgtaattataatgctacaaaaaaaaagaaacaaaaaccaaaaaaacaaaaacaacatccaatcaaagaacaaacaaaaggaggtcgtgccccccacttgacacaccctcacctggagcctttttccgg

SEQ ID NO: 384328 - DNA, 250 bp, Zea mays
ctgagcgctcaatcactggtcgagcagaacacaccggatggcggagagcgagctgatccagcccaagcaggacgacgacgaccgacacgtttgccagcagcaacggcaggagcaagcgaagggcgtgccgcggctggtgcagatgtgcagcaactgtctgtcaagctaaacgccacggtggagggacgggccgtcggggcgccagatgatgtgcagcgcatgcggcatgaggctcagaccagagaccagg

SEQ ID NO: 384329 - DNA, 108 bp, Zea mays
ctttttactaatcctgacttgtttgagttttgcaagccaattcactgaaagtttgggttgaacagaatgtgttgcttgaaatattaaaactcgcatctatctggtttt

SEQ ID NO: 384330 - DNA, 253 bp, Zea mays
ggcacgaaggcctaaccccctcgcccccaccagattcggggaattcgcgcctcatccgatcgtcaccggccgccgaagcgcaagaaacagcggccgggttaggactctggaggatacggcggattcaggaagtgagaatcttttcttggatttctgttcttgattgaggagaggtaaccgcatggtcttcccccatttatgtttcttttcattcacagggaccggattatttgggttgccatctgtactttgt

SEQ ID NO: 384331 - DNA, 256 bp, Zea mays
ctctcttctgtcgctcgctcggtcgctcgctcgctcgcgacagagttaggcgatcaacctcgccgcccgccgccctaatttacgtgcccaggtcttcgtccgtcccctctctaggacttcgccgatcctttctcaggcgacgggagccaacgcggttcacctgtagttaattttgtaaattattgttatatctgtagctgccccaatggaagttgagctgccaaacatccataaagctacttcgagtgaccattgg

SEQ ID NO: 384332 - DNA, 251 bp, Zea mays
aggaaatcttccaggtgacgatggttttacagggtgcatggtcaccattcgagccaggtacccatccttagtttttttttttagtcaatagaagccctgtgcctgtcaagccttggctaatccagttttgcgtttataccgggattaatgttttggtacatcgctctatcgacttttgatgggtgcattcgtctctgagcttcttttgcagggaatagagcattcgtcagcttcaaaaaccacaatctaaa

SEQ ID NO: 384333 - DNA, 249 bp, Zea mays
ggaagtactcagaggtttcgggccattcctaagcccgggctggggctggtgtgtttccgctgtggagatgcgcatcgccgtgcagagtgccagtggagtggcaggtgttcgatctgcagtcaggaccacaaggatgtggtgtgtaggaggaatcccaatgggaagctcagatgggagccggtgacttcctcctcttctcagggcactatcaacatgatgtgcagtgctgagcagcagttttcagttcct

SEQ ID NO: 384334 - DNA, 258 bp, Zea mays
ttcggctcgatgtgaaggtccggtactgtgatggtggatctttcactggtgatggctctgatgcggttagtgaatttctgtctcatgtcgccacattttgtttccttattagttcaggacacaaactaaatgtgcgtgccatgggatgcaactccaaaaatctatccttgctttgttttgtttactgaaccacaacaattcactgtctgatttccttctttttctttaggctgcaggcctttatttccgaggtcagcg

SEQ ID NO: 384335 - DNA, 106 bp, Zea mays
atcatagagaatggagtttttagccaccacaaaggctttaaactccattctctatgatatgtccatttaacaagagagaatggagtttaaagcctttgtggtggct

SEQ ID NO: 384336 - DNA, 260 bp, Zea mays
ctggtgaggagcatttaactagaactcaaacagtggcttctacatcagcgagctctgaaatttccagcaaagtaaacaagcttgagaatggggttaccaaatcatgtggtggtatgggcaatacgggatcagcagggcctccaatgcagcagctctgcctacgcggtccagaaatccgttctaacatcaatggctttcctgctatgtcaaacgccacgagtcagtatgccgggcaaggtttgtttggatcaggcatccct

SEQ ID NO: 384337 - DNA, 252 bp, Zea mays
ctcttctcgccttctccgtttccgcgaacccagctgcctcgtagccccaccacaccgccgagcacgcggtctcccgcgccgccttccacccaagcgaactacccctactcgacccagaattatcttctaccagcgctagtccgctccgcctctctactggctgccgtgaagtggggatccgtccggacttccttctttcgctgattctttcgtggcttggggttcaggcgttcagcacatgaatccaaggtg

SEQ ID NO: 384338 - DNA, 245 bp, Zea mays
gaagagttgaaagagcggctcaggcaaagctcagctgatgcaaacgtgttggacaggagtgcgttgctagatgatcctgaggccagccaagatcatcagatgccagcgccgaatggtatccacaagaaaaggaagaatcagacgcaggatgggtgggatggagacggtgcccaaagtccaaagagacgaaaaacgacctgaaaactctgaggacgactttacgaggccggtggttgatattgcag

SEQ ID NO: 384339 - DNA, 246 bp, Zea mays
gcaaaacgctctacggccttcaccattccagcaagattcgtatcactccaagcgtcacagtagccttcgctgaggttctctagcttgatccctcgttcaaagtgagatgtagcgatggcgaaggcctagtagatcccctggcagaaagattttgccttgagttcctagaaccggcccacaaagcccttgaggcagaagaccagtgactcagacccaagggcagaaggtgctctgaagcgcctgctc

SEQ ID NO: 384340 - DNA, 252 bp, Zea mays
gacgcggaagacgccgccgaatggggaggagacggggggaagcccgcggaagaaatctccgcggcccgcggaggctctgcctgtggctatggttcctgtggaagcggcagtgggggccagcgatgagaagctgtgcaagtgcaaccacgccatcactgacagtgatatctgggaactggttcattcgctaacgaccaaggatgcgtggatttgctgtgcttgtcggcgcaaagacgagaagagggacctctt

SEQ ID NO: 384341 - DNA, 238 bp, Zea mays
gcttggtataaaagtccttcaaattatgcgccgatgattgtacctcagggccttgttcaaatgcagagctggaattcatatactggtcagctgcagtcacctggggctcaacaaacttatggaagttcacaacaaggagaagctagtacaggaaatcagggaatgctgtcaccatacagacccagttcgtttcccgtgcctcaatatgcgctgcagagagagaatgtatttcctgaga

SEQ ID NO: 384342 - DNA, 128 bp, Zea mays
caggaagcaggggctagacgcggatcggcgagcatgaggggcggcggcggcggcgggatgatggacgatgaagagagggtgggccatgcggagatcccgaccagtttcggtcccgagctgcgcgcctg

SEQ ID NO: 384343 - DNA, 260 bp, Zea mays
ttgcggctcgagatcacggccccggtgggtgctgctcccacgacgcaccagttgcggcgactggttcttctccccagtcttctggttcacccgataagaaggctatcacttgatgtagggtaagccttttcctttcaagctctagatgttatgctctctactaacatattgctagtcaccaccgcgttttcggtgtgattatactgtgattttgtttgacagatcaaactagtagtttcgttgtagaatgtgtagtatgt

SEQ ID NO: 384344 - DNA, 151 bp, Zea mays
gggacattcccctcccatatcactccaaaaaaaaacttccttcaaaacttaggttggaactcctggccatctttggaccatttgatagagactaaatattttagtcttaagaaaatcaagtatttggtatgtattcattttttatctaagt

SEQ ID NO: 384345 - DNA, 261 bp, Zea mays
ctcgagccgtttaactaaatcctacaatacataccttgccagtaccaatcttgtgaatgacagaaaccaaagcatatttattttctgatggactgcctggtagagctgtattctcttgatgttcagaaatcatatgagagggcaataatctccgtggagcaactgaatgctattcttagacaggcttctaaaaccaaggaaaagtgtcatagggcctcattaggtatctatattatatcttctccaggcagatccttgggg

SEQ ID NO: 384346 - DNA, 196 bp, Zea mays
ggaattctagtagtgtgcaagttagctgttcaccggaattctggcccgcgccggctcgctctggacttccttttcgccgccgctggatgctggtatttgttgtttttttgctttgttccgcgataggattactagtggtgatttgtgtgtactctctacacaaacggaagataccacacaaactgaagataccatg

SEQ ID NO: 384347 - DNA, 178 bp, Zea mays
acctcgctttccttcacttggtttctaatacgcaattcgcggggaacccaaaaccctaatcctctctctccacgccgccagagagccgtgtgggagctcggtcctcggacttctgcatcgatctctgctatgagtgctatctaggtttctcagatgggtgacctcaaggaggttttcc

SEQ ID NO: 384348 - DNA, 182 bp, Zea mays
gctcacttgtttctaacagaaactttgttgatctaccaatactaataacttttgatacttactcaatttcctttcaatgccactttcaaataaataaaaatgaaggagagactggaatgaaactgtatttaggctgaggttatagtcaaaggaggaggcatcatatgtctactaactgttag

SEQ ID NO: 384349 - DNA, 123 bp, Zea mays
ccgtgatgtgccacttcagggtttctattaactctgtgtcaggcttgttgatggctgaaagataaaccagtgcatcactatcatcttcctcggaaccataaaccagccagacacagagttact

SEQ ID NO: 384350 - DNA, 122 bp, Zea mays
ggtggctagggtttgggagggttaatgggccgaaactccaattgcggtccaactaacccacgcgacagtgcccgaccgcaacgcaagcgtcaaatcaaataaattctactgccctagttgtg

SEQ ID NO: 384351 - DNA, 154 bp, Zea mays
agcacctgctccagctggagtccggggccgacatagtgaaggcgcacacggagtggcgcccgaagcgggcgcgtggcgaggggagcttgaggggagcttcgggggttttccggccgagaatgcatgaatgaaactcccacctggagccgaccgg

SEQ ID NO: 384352 - DNA, 282 bp, Zea mays
ttcggctcgagctgtatattaagatctaaacttctattccttgcttgctttgattacatttagttcttaatatacagtatcacattaaatttaatcaaagcaagcaaggaatagaagtttagcaaattattggcaaaatattatttaattgagctaaatggtcacttaaacagatacaattggccattgtgtagttctctacacggtctaaatgggaaataaggattggagtttgaaatttgaagtaataactgataaatgcatgtgactgctagcacatag

SEQ ID NO: 384353 - DNA, 265 bp, Zea mays
tgaaaagctaagtgtttggcagtctataataacttttggtggccagaagctgtaaaaagctgaaacaaacagggccgataaatctgtacaatcaacatattgtgaattctgaaccttttcagaacatgtttctagcagtgctcctgcagtcatatgtgacaaaatttagagatgtgatgtatctctctgttccttttgtacgtgaataatcatgttataagctttatgttgcatgaaagtaatttctttgtgcataactttaaca

SEQ ID NO: 384354 - DNA, 268 bp, Zea mays
tcccggacgttgacggctgaactcgagctcgagtcctcgcgcgaagtcgctgtgtgctgctgcgataccccggccgccgttttgcgcctcctcctcaccgcggcatggccgtgcgctatcctcctcatccttgccagtgcgctacagtcggcaacggtggcgagttccggtgccgctgctgcccgtctggagtggcaggtcctgaccagggccaacttctcgtcccagatccggctccgcccccacgtcctcctcctcgtcacgatgc

SEQ ID NO: 384355 - DNA, 148 bp, Zea mays
gctgcgggtgccccaccatccggacttcccgttcgacggccagctgttgaatccgattttccacggcaacccactcggtccgagcaacggcggcggtgctcttcgctgtttctcggacatcgctcctgcaggcatacagggagccagg

SEQ ID NO: 384356 - DNA, 147 bp, Zea mays
ctcgagccgcttcggaaggtttatgatatcttctgtcgtttggcactggctgctggcttcactactggttcaggtggctcttcagttgctaacgaggttctaatggtggtgaggaagcaggttagtaatccagacatgaagtataga

SEQ ID NO: 384357 - DNA, 100 bp, Zea mays
cgcagttccccgaccacaccgttcctccgagcccaggagcagccccgcgccaggaggaagtttgttcttttaacaatatgtcgagggaggagaatgttta

SEQ ID NO: 384358 - DNA, 255 bp, Zea mays
gatataactaatgttgtctcacgaatcacgatagggcatagcaagcttcttggaaatatcatcccgctttctgcttgagggaaacactgatgctcatctgaatattgattatgcttataccgttcacaactaatgtcattacagcctttcttcaagtttcttggtgcttcactgattctgatgcatgtattactggatccatttttaggtacttcctgatgatatccgtcgagcgttgcttgttattgtcgagtg

SEQ ID NO: 384359 - DNA, 268 bp, Zea mays
gcaaaaatagtgataaaagggtctgtattttaagtccatgattaaattttcgggggaaatacaattttagtgctgttcgtggcttcgaatctccgtcaattcgctccactcctccaaactgatccgcacaggttgtgccgctgaaaatccaaactttgggattgatgcgactgtagtaacttgttgctcagtggatggtcttgagcttttctgttccagccagctgtcaagatcaaccgagtactgtgctgaagatgaaggtgggtgc

SEQ ID NO: 384360 - DNA, 174 bp, Zea mays
gttagttggctaaaaaattgttagtgaaattagctagctaaaatagctagctaactattagctaatttgctaaaagtagctaatagctgaactattaactagaatgtttggatgtcttcggttaattttagcagcttcatattaattatagtgcattcaaacacccttgttata

SEQ ID NO: 384361 - DNA, 259 bp, Zea mays
ggtgggtacaaagacagaatcagcatattccatagtgccataatcctcggccccatagtcactatggactgtggtgggtacaaagacagaatcagcacattagattgcagccatgttttagataatggatcgaggtcgattttccatatagatcaagcatcacctttcttggagttggcaagctgtggttcatcaacttcaactgataaccaggatgtgatgaacggggagcttgtttttattgaagctcagtacaagc

SEQ ID NO: 384362 - DNA, 169 bp, Zea mays
aaactgcaggcctaaaaaagaagattagacaccgctcctcccggccccgccgcccccgcccgaaccgaactcatctcctttccgtttgggcgccaaaacagcatccgccgcgcgacgcgtctcgtcagcgccgccagccccgtcagaatgtctaagaagagggggcttt

SEQ ID NO: 384363 - DNA, 263 bp, Zea mays
ctcgagccgctcgagccgaatcggctcgagcggatctcgctcggccatcgggactgtacactgacgagagggagaagagaacagcggattcatcacagccaggcgtcaggtcagagtgtgttaagacaagatggtggcgaatggcgacgcacctgctagagggagtgcggcggcagctgcaagcctgcgcaggcgtaggaccacaagcggtgctgctgctggcggcagtcgtgccagctccgtgctccagttttacaccgatg

SEQ ID NO: 384364 - DNA, 259 bp, Zea mays
cggctcgagggtaattggagttcttgccagagcatggagatgataaatttgggggagaatctgatctctggtgggattcctaaggggctggtggaatgtgagaatttgaagttcctgaatttgagcatgaacaagtttacaggttcagttgattcttcgctgccagtaccttgcatggacgtatttgatgtcagtggaaatcagctgtctggctcgttgccagtatttatgtcaaaaaagaattgtctttcatcccagg

SEQ ID NO: 384365 - DNA, 262 bp, Zea mays
tggacatcgagtttgtaccgggaaacagcttggtagtataaccactgaagatggtcagtgggagggcgcattgagtattggacacatggatcaagatcctcattgtgatgtctaggaggaagatcctgtgacaaaaacggctgtgagaaggttaattttgaacattataccaaaggatgtcggttttttgattttgaactctcctggcgaggatccaaaaatgctatccagttttaaagatcttcttgctaaaatgtttata

SEQ ID NO: 384366 - DNA, 263 bp, Zea mays
ctggccgccactttcttctctccctgtcttcttctccatcgcgcacaggcatcccacggcagcagcagcagggagccgtgctcctctccatggcgccctcctccccttcttcttcctcaagccagcaggcacctccctctactccctgcgcgcagagcagccatggcgcccttccccagcgacgcccctctgcagctcgtccctctcctcccctctgtttttcctgtgcgtgcgcagaagctttcttccccgtcgcgcgcagg

SEQ ID NO: 384367 - DNA, 278 bp, Zea mays
tgatgaacttggacgctgttggcgtcgatctgtacgccaatcactagtgtagtaccgtcttgtggtgctctctgtgaaggtgatctggacgcaggaatgacaccttgttacgtgctggccgagtcaatctgatcgcgaggccgcggaccgtccgagcccaaaactggaccgcccgtcacttttagtgttcaactgacgccttttaggtagtgtttggttgaggagccaagtagaacggagctgttctattcctgattctaggaacggagccgctctgt

SEQ ID NO: 384368 - DNA, 256 bp, Zea mays; identical to SEQ ID NO: 258863

SEQ ID NO: 384369 - DNA, 104 bp, Zea mays
ggacgtgcactaccaagggttcctgattcccaaagggtggaaggtgatgcccctgttcagtaacctgcactacagcccggactacttcgaggacccacacaaca

SEQ ID NO: 384370 - DNA, 251 bp, Zea mays
tgctatccctgtaatcaaggatgctctctcaacaaatctcggatcactattgtttgccacagcagaggctttttctgcctatattaacacacgcggcctccatggaggtacatacgcttccacaaattatcatatggtaccagagcctacctctatccactgcacagaataatcgccatgatgaacccgtcacgagcggtctcctgtcctcggcgctaggccatcctgtgacagagaaattaaccaagaca

SEQ ID NO: 384371 - DNA, 146 bp, Zea mays
ctagcgtgtgaggctgtgtccctcggtcaccggttggtgagccatgttcctaagtagtcgtatatatgttgttggcttgggcagtaggaaggacaggtatgaactttactctgtatcaatacaatctgtccctgtttcctctccac

SEQ ID NO: 384372 - DNA, 241 bp, Zea mays
ataatgtttgcacaaccttatttgtaatggatggcgaattattttgctaaattaaataatttcttgacctttagttcatcttaaaattcaagtacttggatggtgcaaataattattcctttgtgtttctgtactattgtaacaattatttctaggccacttgttactgatatttatattcccatcacttaggttggtaactgtttattttccccacattgattacgatcatgagtgtttc

SEQ ID NO: 384373 - DNA, 249 bp, Zea mays
gttgattgcaatcttgcttttggtccctgagtttgtgtaaacttgaaaaattgtctctgttgtctgcttggtcatcttgaacccttattcttggacagtagaccagaatgatcacaccattttaatttcataattgtaatttattagattacctgcattctgttacactcgtctgctattttgttcactcctcaaatgataaatgagattgccacttttcaccaacatcctataggttgaactcgcaca

SEQ ID NO: 384374 - DNA, 250 bp, Zea mays
cactgaaactctggtatagcgatagaaaggaagttctggcttggcaaatgaagcagaaacagctagcacatgagaagcgtgaagtttatactttgcttgggcgatcacgccgttttccaaatatggctcatgcaacttctggccaaaggggtcacattgagcgtgctgctatcaatgctcctgtacaggtgattactgtctattgcaactcgctgttgaaattaattttgtgctgaaattattttctttg

SEQ ID NO: 384375 - DNA, 249 bp, Zea mays
cattcatgtagagaactaaaacagggcaacacaattaaagtaataagggcttcctttagtcaaccctcttatggagagatagattaaaggaagaaggacatttgtgaatgcttgatgactgaacacatctgagacaattaatgataaacgtgaccttttatttatttttctataatggcaaatggttacagagataccttttgaaactcagtcgacaattcgaatgtacaaacattatgtatcttcaga

SEQ ID NO: 384376 - DNA, 251 bp, Zea mays
tgaattcacaacaaccttaaatatatgtacttctaatgctttccttgaacatttgtgaccagaaattgttgttctataatttctcatttaagttcctttgttactagtataatggtgtcaacatatttcaggctggtctagtggcagctgatatagagatttctagattggttacgacgcaactactctgacaagtgtattctacttgctgtcactaagtgtgaatctccacggacagggcaaatgcaagc

SEQ ID NO: 384377 - DNA, 252 bp, Zea mays
ccctcgagccgaatcggctcgagctcgagcgcagaagttcaacaaaccggatcaaaagctaaaaaggtacggggtcgacctacaacgaaaacttatgactgggacagtttacgaaaagacagtgttttctaatggtggggctcaacatagaaataatgatgcaagggatactgttgattgggaggcagttaggcaagcagaagtccgagaaatatctgaaactatcagagagagaggaatgaataacatgct

SEQ ID NO: 384378 - DNA, 243 bp, Zea mays
cgtctggtctatatgcatatgatacagtatgggcaatagcattagcagcagagcaggccggatttgttaattcagactttgtgctgtccgaaacaaacaacgggtccactgatttcgacaaaataagtgcttataaggctgctgaaaaatttcgtggtgcattcttgaaggtccctttcacaggcattagtgggcaatttgtcattcaggatatgcagttccagttagtacaacaacttacaa

SEQ ID NO: 384379 - DNA, 275 bp, Zea mays
gtccaattcttcggtcaagtctgacgaagcaaatcgaagcggttatgcatatcgtagcaactgccgagagaccttggcgtccacggcgcaatatgttatggactcagatcacatcacatgtgagtgctcctactgaactgcaccggaaatgttgaacaccgaaaaacgcggagaacattgcactggcgtcagcttactgatggtatgtgttactcggtcggtcagggtaagaccaacatcacggcatttacttaatagaagaacatgataatagt

SEQ ID NO: 384380 - DNA, 281 bp, Zea mays
attacaaccaatctcccaaactgattatcatagttttaccgaggaatgttctgagaagacaatttctcagtcagagaccaagcatactctgtttgtgcagactgattcccagttcttgcagtgaactttttgccataaaaaatctccacttttttttcccaacggcaaaatgaacttttttgaagaattacaaaaaacaaaaagtagcacagaaccaatttcacaattatgttctctcatatcacatggatctctataggacgtacatagcttctgatttt

SEQ ID NO: 384381 - DNA, 254 bp, Zea mays
cctcgtctcgcccttctccacctccgaaggtagggtacctgatacttccctgccccgcgcatcgcatccgcggttttagtttgctggcctcggttccgatcgattcctcgatcctccctccgggcgggcgtccaccgacttcatcatccactcgccggccgaaccgatttgtttcgtttgccgttcgatccgcagatcctgcgagttcaacccgcgagtgagcatgtcgtcctatcccgccggccgccgcgcgg

SEQ ID NO: 384382 - DNA, 272 bp, Zea mays
gtagactcaggttattgggcctagcccattacacaatggtaaaaatgtaattacaaggggctaaccccaaaaccctaaatgggtagtctaacagccgcagtcacaactctatactgtacaaatgttgagactggatcgaaaattggtgaatacactcgacggtagcccctaggtgatgtcggcgaactgcaacgaggtggggacactgacaacctgagtgtcaccagcaactacacgctcgtggataaagtgtaggacgctctccacgtgct

SEQ ID NO: 384383 - DNA, 279 bp, Zea mays
tgctccttcagttgttagacagtagggggtaatctcaggggtgcaatgtactccctccgtcctaaaataaaagcatatctagtcttcataccgatctgctactgattgtgtaatgtcgttggtaggcttgggctgtacgcagtattaggtgtaggcaacttggcttttggcatctaccttgtatgtgtcgtgtatctagggctggggcttgctccttcaagtgtaagacagtagggggtaatctcaggggtgcaatgtactccctcccgtctaaaataa

SEQ ID NO: 384384 - DNA, 170 bp, Zea mays
atcagtaccatcaatcatcattcatcttagtagtataggcaccatatcacatctgcaatatcacttatctatctaccctaaccctgactatagtgcttgcggttgctgctctcattgctctagtatcacgtgctccttgtacatagacaggcggctgctactgtggtcaa

SEQ ID NO: 384385 - DNA, 148 bp, Zea mays
ggagcaagcaacatagaaagtagaatccaggatcaactatagagcatcgatggcgactagcgtatatgctctccttatgctccatgctctttgtacatgctgtacgagcgggtcaagcgaccctcaatgctcactggctactagagct

SEQ ID NO: 384386 - DNA, 252 bp, Zea mays
caaaagatgatcttcgtcgggtatgagcgaggcactaaagcatttagggcatatgacccaatcaccaagtgtgtaaccataactcaagatgtggtgttcgatgaataagcttgctgggataggtctgatggcaacaagggtggtgaaggagatgtcactaattctagtgatcttgttgttgattaccaggtagctccaaatgtggctagggcaggcattgttggtgaaacaattatggaactaagatttatc

SEQ ID NO: 384387 - DNA, 119 bp, Zea mays
atttccttctgttaaaaacagtatatggcccctgtttgtttaatcgataccgtccccacaagtgcagcaatgtctcatccctcgtgtgccgtaaagccgatatccttcctatggcatgc

SEQ ID NO: 384388 - DNA, 252 bp, Zea mays
caattgaccatatcaaaacggttacaataagcacatctgatcaattggaagagctaagtttatattgaatcttttttcactaatggctaaatagagatgagtgaagtttgagaggcttgtcataaatttattataggatagaaagagtccaacctatgagggtgtttggttccttgactaaagttaagttcatatcacatcggatattttaatgtttgccaaacataagattgatttgtcctttgtggttcg

SEQ ID NO: 384389 - DNA, 132 bp, Zea mays
attttggagcttcgatggagtggtgttggcattgaggattggtggagagtaaacagatagcaggaaagccgcagtatgctactagtgggatagatgtaattggagagactggcatacatcaacaccattgtt

SEQ ID NO: 384390 - DNA, 130 bp, Zea mays
gcattgctcatgtaggagaatggtgaacagtagaaggttatggagtcctaaagatgagcaagcctgggttcatgacagatttgatgagatggacctgcatgattttcatggtgacaatccaaaaagaaag

SEQ ID NO: 384391 - DNA, 274 bp, Zea mays
ggacgagaggaagaagagatggcgggctgtgatggagccaagtcgtcggcgtccatggaggaagaggcatgcgcggagaagaagtacggagggatggcacccaagaagcccttgatatccaaggtgctctgctactctcagctcacgctattggaccaaacagcgtccatggatagtagtctgtgtctagaagctttgatcatcatcacttccctctcatctgatccctgcttgccgcccggccgtgcctaataacaatgcaggaccacgagcg

SEQ ID NO: 384392 - DNA, 284 bp, Zea mays
gttttccttcgaagcaagtcaatgtttccctgaattggttcattcaagatctgtgtccaaggatctacatggtgcaccacctggaagttttattcaccatttagcagtggttattggcagcattagttctgtgcacaagatggcatttttttggcagtcagttgttcttgagttgaggaatctatggtctgattggcaacctgtgcctcgtatgccactggaggttgctccagatttgaattcttgtttactacatcaggaaatccaagttgtaaattgctgca

SEQ ID NO: 384393 - DNA, 110 bp, Zea mays
aaacaagaacgtaaaacccccaccacgctgtagcggatagaagagtagataggtgcgcgcgatcgatgtcgtggctccggcgatcgtcgcggcggcgggtctccaggttc

SEQ ID NO: 384394 - DNA, 227 bp, Zea mays
caaacatttcagtagaacggccattacctttgcttatgttcagccgttcactgtcgttggcttccgaactctgtactgatccatgccatcaatgaaggcagagcttgagcaggaaggttgtgcacgtgctgtccggcgtcctgttcatgtcatcttggcccctgttcaggtattccctgtccctggcatgcatcgaggttctcagattcataacgtttcacactgca

SEQ ID NO: 384395 - DNA, 218 bp, Zea mays
gcgcggccggcgggcttcgctcgtcgagagaggcgcgccgtccatggaggcgatggaggaggccaacaggacggcagtggagagctgccaccgggtgctggctctcctctccaacccgcacggccagctcgtccccagcagggagctcgtggccaccaccggggaggccgtagccaggttcggctccctggcggccagcctctcagttccacggcaat

SEQ ID NO: 384396 - DNA, 203 bp, Zea mays
gccgccaaccaagcgacggctcctcttccacgcatcctagggcggcgacacctgccaagaacacccgccgccgcgctctcccgatggcgaccagcgatgagctcgcccagatcgacatctctaaggaggagaaggacaagctggtggcggaggtgatgcgctacgtgctcttcaagacgcaccagagctccgactgctccatc

SEQ ID NO: 384397 - DNA, 244 bp, Zea mays
ccactacctgcttctgctgcttgcttgcttgtgcggtggacgctgcggacggagcgcagtaggtgaagaaggggatgaaggaggagatggtggtcgggctgtcggcgccggggccggtggggaggtggggcgccgcgccgccgcacgaatgcctggacgaggatgatggactacggccaggaggagcccttcgcgttctggaacgatctcctccccgaggaccgggacctcctcgtcgggacat

SEQ ID NO: 384398 - DNA, 111 bp, Zea mays
cgagaaaactcaaatcgaatccccaaatccttcgccggcgattccactccaagtctcgatcggaaaagcgcagaagagcaacggaatcccaattcccaaagggacaaggca

SEQ ID NO: 384399 - DNA, 156 bp, Zea mays
gagagaggaccgaggagggaaacagagaagatgacgacgaagcgcgacaccgagtcggacggcgaaggctccaaccccgtcggtggtggcgcgactccgccgcccctagccgccgcccctgtcgtatgcctcctccgctccgccggggacttcggt

SEQ ID NO: 384400 - DNA, 227 bp, Zea mays
atcgaaaacggagcgcctgatacgatagtagcagcacagctagctctcctccccagaatctcgccggattccgccccccgccgcgccctcgcttccgccgcagttccgcgtctgtgcccgcgcgtgttgtactaccggcggacggcggtgttggtggtggttggtggagttgccgacgacggtaggctatggactaccggccctccgacagcagcggaactgatgat

SEQ ID NO: 384401 - DNA, 286 bp, Zea mays
gctagttgagttttgtgatcagcgattcaggatcaaacttgataacgagagcctccctattgagcacatcacaaaaggagtcatgttccttgaccatgtgctgtgccatcgagttgtgtacccaacactgcgttacactgctacaggaggcaagatcattagtgagaagggagttggtacactgctctcagtgacagctagtctgaagcagtgcatcaaacaattccggaagcttgagtttttgaaaggagaccgcgaaccagatccacaaccatgcttccgtatg

SEQ ID NO: 384402 - DNA, 250 bp, Zea mays
attacatagccgtataacacaatgagatgtaattctgctcagtgttttgcacacattatcaggctgattgatggatcgtgtaggctgcacatttcagctataaagtgcagcctacacgatcaatcagtcccctgataatgtgtaggctgcacttgtcatctgaaatgtgtgtgcccaatcaatcagatgattctgttggtgttccatgtcaagtgttgtagcttagtttctgtgaagcaggtgtgtggag

SEQ ID NO: 384403 - DNA, 292 bp, Zea mays
cctcttccaccaccaagctcccgtctcttcccctcctgatctcagtgactccatcctctccctctccagatccccgccagctgttacctctccggctcatcgtcctcaggccaaggtcttgattcgcgatccgccgatttccatccagcgcttagggcgctaagcggtgtcccatcacctgcgggttttgctgtgcggggaggctgatccggcgagcgccttggatgaattcgcgtcggtctcggtcggtgaagctggtgtcagcacgcgccaacggggatgtgttccaggg

SEQ ID NO: 384404 - DNA, 294 bp, Zea mays
tatccttctaacttcccctccgtcgccttcgctccgcatccatccgaccgtggcgagcttcaactgcgcgcaccggccaggaggctaaaccctaccgtgcgccgccatggactcggcggtgctctcactcacctgcgcgggcctcggcgcctcgcaggaggacgaggacggggccgtcatcggctacgccaagcccgaccactgcttagataatctgaaggatctgcagagattcctgcgacgggacgacccgcagcggcgggaggttttcaagctagtctgcaagtggaagat

SEQ ID NO: 384405 - DNA, 171 bp, Zea mays
ctttcagttatctgcaccgccactggtgtcctcattgcagcacttggagatttttcctttgacctatatggatactgcatggctctaacatcagtcttcttccaggttgtgttatttccttgtgctttgttcttacaaatttattctataattcttgagaggtttttaggc

SEQ ID NO: 384406 - DNA, 299 bp, Zea mays
gagttttgctcttaggagtcttattttgctttgattcaagcgatagcgtacaaatgtgtttgtaatcgatctgaaactgtcaattatgctgaacttcagtttactcattttgtcttcccttctgctaagtgaacaaatctgtattttctgttcaaattggactctgtctgacgcttgcttaatatatagtctcaaatttcctggcgagaacttcatgaggaaagccacagcaggtgttgagtgaacaggagaactaacagggtgataactgacaagggcaagcagcctgtggcacatat

SEQ ID NO: 384407 - DNA, 280 bp, Zea mays
caaccgttgtttccggctggtcctccactggccgctcctgagtcagtcgcggattctcccttgggtctggagtggaatggaggttaatccgatcatggggtgatttcctcttttaactggatcagcgcaccggagctcaaaggtgcctgtagagtttattacaacaagaattttgggttcgacataatccccatgtcccgcaacaagtccggccatgcttcaggccgtaacccggtgttctggtccgatagaatgaacgaatatctaattgattcgctgc

SEQ ID NO: 384408 - DNA, 276 bp, Zea mays
aaatggcacttgtgcgcaagaagaataacttggacgagccgtggatctatgtaatctgtagggaagcaggcatcaaatgctatgtgttggctccagatcctccaagccggtgctttcgaatcatgcatgtcattgaacccccatgctcagggaggaaaggtgttaccattgaagctttagacaaaaagctatttcttctgggtggctgcagttccgtgtatgatgctacggatgaagtatatggttatgacgcatcctgaggtcgctggggctcag

SEQ ID NO: 384409 - DNA, 171 bp, Zea mays
tgacgaaccgagcaccaccgccactagaacaagccagcccaaaaccctatctccggcgcgccaccgcgagatccggtgctcccgcgcgatgtcggaggcggaagccgcggggtcgttgtcgaggcggcgaatggaggacgaggagggggcggcggcgatggaggcggatgc

SEQ ID NO: 384410 - DNA, 276 bp, Zea mays
agaccctgcctggtccaagcgagtagcgattagcctgtcgttttctgcttcttgatttttcttcttttcttcaattttttctatggttgcgttccgttgttgctgcagttttttgagattcctggtatagtaatgagattcctgatatggtaatgcgattattttacattttctggttaggatcttgctgacgtgagaattgagatcgatctgaaaggcttgattgtgccttccctacatcatctcatctggatgtctcttggaatccccaaaaag

SEQ ID NO: 384411 - DNA, 302 bp, Zea mays
agctagatggtgtcagctggcctccaaggtatgctgttggcttggacaacttcaggaatctgaggttctgcgaagtgggtacaacactcgagtttagtatgggcgccatgccaaggcttgaacagctgcaatttggagtttatgcagggtattggagttgggaagagaatggtgtgtcgttcgagcagttcccaacaaaggatgtggtcaaagttcttgacttgggcctagataacctccttttacttgagcaagtcagcgtccttgtcgacggctcaggtgctactgccgcacaagtgcag

SEQ ID NO: 384412 - DNA, 280 bp, Zea mays
atcgagggtaagagccagcagtagaagaattagcaaagtcaatgaaaaggttgctggtagagtgaattcattgcaacaactaaatcagggtccgcgtacaacgttgcaagattttgcagttgctgtgcaatctgatccacatttgcttggtccaaattggcccacacaaatcgagaaggtacaggcaatgtcatttggaggagaatgatacatagtggcctgttatagctgatgaacatgaacttctctaaaggagatgctgtatgctggcattgaagta

SEQ ID NO: 384413 - DNA, 280 bp, Zea mays
ctgaaccacgtcgcgagccagccatacaccgctgagcgcccgccgcccgcgtccgtgagctcctcgacggtgggcagcgggtcgccgcagctcgtcaggacgccgtccagaaggagaggcggtactggtaggaggagcgcgcagtgcgcttagggcttaggcccacaggctgcattgttgcacgcatgtctggaagagcagcaagatacgtcgtcagctcagtcagatcagatgaggccgggtaggaggaggtagggatgaaaacggtcgaaaacgatcg

SEQ ID NO: 384414 - DNA, 278 bp, Zea mays
ccgcctcacccgcaagccccgcctcatcgcgctcctcaggcgcttcccgggcgtcttcgacgtcgtcgaggagggcgtctactccctccgcttccgcctcacgccggccgccgagcgcctctacctcgacgagctccgcctcaggaacgagtccgagggcctcgccgtcgccaagctccgcaagctgctcatgatgtcgcaggagaagcgcatcctcatcgagaaggtcgcgcacctcaagcacgacctcggcctcccgcccgagttccgcgacaccg

SEQ ID NO: 384415 - DNA, 275 bp, Zea mays
actttctcttagctactataaatggattatttttaaccttgaagtggtgctaccgttacaaataaaagttacttgagccaaatgcttgctctggaatcacttcggactatcacctagagcagttgccacatgcagcaccaagattacttgcacgttacaaattggctaggactgacagacaaccttgttattgctatcctccatgtagtatcgctggtaggtgaatcagctcctccagaaatgcttcagaagttgacatatctggctatcagaca

SEQ ID NO: 384416 - DNA, 274 bp, Zea mays
aactgcatacctggcattaagaaggacctttaggcagacgctcgtggaattctacagggagcaccctgagggagatgacattccagagcacgagctgccacacccattcaaccgagcgagatcgagcttgccccaggacgaacaaaggactgctcctgaatcttcgtccccactcaagccatctgatgtcaatggacagcagcagaccgctgctgtgatgtcgcacatgtcacagtcgttcaagaggaggttctcgcagagatctccgatcggc

SEQ ID NO: 384417 - DNA, 273 bp, Zea mays
aagctggcacactcctgaatggaaccccagagtacctcctgtgtggaagggtccctggattttccctaacacccaccgctcacaaccttcagccatgctgatggcagagaagataagaacttggagcccatttctcactggagaggaaaacttgtcatctggctttgcggagaaggttccaccttacgctcgtagtacattatctttactatgtgctaggatatcatatttagaaggacaaggaaatgtagaatacttgaatgagcttgtatt

SEQ ID NO: 384418 - DNA, 274 bp, Zea mays
gatgatgggagcaaagatcatctgccgcagcctgacgccttctttgtctgtgtagacctggcatgtgaaggcctcaggcacccagcagatgatgggagcaaacatcaagcaccacaagcactacatcctaccccccactggttataaaagatccctggcaaatggacacctgcaagcggacactgatcaggaatccaagcctagaccttacccctccgcaaaaaccctttcctggcatctgtcttcggagaacagcaccaaagcaaacgcacat

SEQ ID NO: 384419 - DNA, 283 bp, Zea mays
caaatagcggacaaggatgggtttgaaacatgtgaacaagtagcttgttgcacacacatgtttcaggattcaagtggtttagttcaaagagacgtagccttgctgcgaagttctcaaaacaaattgtatctgctactacttgatatggtttttgatggacaagaaaccatgccaagaattttgggcagctatagtctgcaaagtctagaaaaagtttcaattgggctgggactacaggcgctgagagtacacatgtcagatgatacaactcatctattcatca

SEQ ID NO: 384420 - DNA, 346 bp, Zea mays
  unsure (1)..(346): unsure at all n locations
ccacgcttcctcccgctccgcgccgctcctacaggctctaaccatggcggtcgcaccgagtcgcgcggcagcgaggacagggcttcagccgatgcgaaccaggagaagcggtgngtgctgtctgatgtcgaggttgggaaagctcttgggatgggcaagttggccatgttatcttgcagatgagaaagagagtgagatgtagcttggaggttctggtcagagcagctcagcatcacagttgacatcactgcgacgtaagtgagatcaagtcatctcgcacctatatctcgccgatggactctagacagccaggtactatctgaaagctcaggtacgatagactgca

SEQ ID NO: 384421 - DNA, 257 bp, Zea mays
catgttttgaattttatgacaattccagtcatcattgcatgtcattcagagtatccttatacttgaattccgattttctgtttcaattccacaaacttctttattattcttaagctaatgaagtaacttatgaagttttacagcttaatatataacttaaagccattaattttctgagcatttataaacagggatgatgatgaaggcaataagatagggaacatgaaaccattggggaggcaatacagttttcttcg

SEQ ID NO: 384422 - DNA, 217 bp, Zea mays
ctcgagccgatgcacctttttctcttctaaatgatttatttcagtggcatgcttatgaaatatgcagcagcagcaacaacaacgaagccttttcccaagcaagttgggtaggctagagttgaaacccaacagaagccacaaattcatgcttacgaattatggatgcactttttttctagtcattaaatagtttaatgaagaagatctctatgtattt

SEQ ID NO: 384423 - DNA, 292 bp, Zea mays
atttcggattgtggccatgtaattcatctcagatcggtcggaagaagaacagttcaatctcggttcatcagaagaccatcaagcctatgaagaggctgatcactacgctaagaggaaagcagccaatatttgtgcttccactggtgctagaactgtcaagagaaaactagaagcaagtaggattccacccaatgatttggttagaagaacaggcaaagaacagaaagtacccgcttatgaagttcgtcagttaaccaagaatgagttgcctctgaaggtgtctgctaggaat

SEQ ID NO: 384424 - DNA, 297 bp, Zea mays
ctgtaacggtattggatcgtgctcccacaaaggttatctttagtcttcgaccctaacgacggagaaaggacgcaagagtcacagcgtattcagatgcaatagcgaggctgggagcagatggttagcgaacaccgtattcatcagcatgagcaacatagatacgcacaaactctggagatacgcgaaaattaagactctgaatgtctgggctgacctggggcttgcgagtaggatagcttgatgtttgcaaagagctctgagtgtgggagatagcccgacttggggtgtgtatcgact

SEQ ID NO: 384425 - DNA, 300 bp, Zea mays
ctttgaaagtgctaaggatatacccatgttcatttctgctaaaaattagcttcatatgcatcattgaaacttcataaatcaattcatcatctacaaccattcagcacagccttgccaacactcatgacacagaaagttagtgtagaaatatatggcagggctagagcatttcagttatactaccaggtacagatacacaattattttctcttgtcactaacatgtgttacagaacattaaccatgtattgtactttacaatattgtcttatgcacgatatctttgacgctgctggatggc

SEQ ID NO: 384426 - DNA, 270 bp, Zea mays
gcaggtattatcgctgtctcgcacatgatcaccaagtcagctcatgcaagaatccctttcgctgcatccgttgtagcactcccggtcatctggagcggcattgtcgctttcggtcctcctctctcgtccgtcaagttaactcctccgtgcaatgtgatcatcctctgcaatcgaggaattaggctgtggttatgtcatgccttcgctaagtatgttgtcagctgccgccatcggcaagtcaccatcgcagagatatcgcgattctccgta

SEQ ID NO: 384427 - DNA, 271 bp, Zea mays
acagcgtcggggcaaaaatttcaccgcccttcggtgcatgcttccgctaccgcttgccgaggctgcctacaggcctctcgtcgagcgtgaggaagggaggagttggaagaggaggaacaggagttcgaggtgaccaatgagggcgatgaggttaatcacgagacaggaggaggcagtggagcaaccaaggaggcagcggcaacgggatcgggtcgattcgcgcgcgactacgtctcgctcagcgtcagggagcacgtctacgaggtgatag

SEQ ID NO: 384428 - DNA, 294 bp, Zea mays
aatttctgaggcaaacacatagttttttctactctataacagcagtctgttcatatttactgttgaacatgggttacctgaagactgcagaaagaagatgtctaactttttcatgtacttctggcagtttgctgcaaagatatgtcttctaacatcattcagagatacctgttttgttgaaattgttccacaatatcaagctccacagagagagatttggctgagtttctggtccgaagttcactataactcactgtacgatgctcgagatctccctagcaaatacaagcgtag

SEQ ID NO: 384429 - DNA, 306 bp, Zea mays
ctcaaacatgtgttcagttcccacttgagcttcttggttgcaatggcactgccattcatgcatataccgagacatctacaagctcacctcctgcgcaagaatcctcttacttaccaccgtagtttcaaaaaagacatttcaagccccaactccgtcctggagccacatagtgaagagctccacaagatacatcttggtctttcctctggtgtggaggatgcaacaaaatgggagcatataaacataaagagcatagaaccagatggtgcctatgtgattgctagccaactaaatctcgttgaggaa

SEQ ID NO: 384430 - DNA, 296 bp, Zea mays
ctcgagccgagtgccaattgcgtggtttttgccgaggaagttgtttactggttaatcttcagctaggatggtgggcgcgcctccgcaaggaccacaatgcctgttctggctacgtgctgatgaacaacaaaaatgatgctgtattttgcagaaccactgttacctgcaacagcatcagcagcagcatgtgcaacccaaaaggagccgtattcccagtagaaattttgtactggacagaggcacggttccaaaaggttcggccctaaaaactgctctgcaatgtcagtggtccagcg

SEQ ID NO: 384431 - DNA, 107 bp, Zea mays
acgctctgaaaagagtgaatttcacaagttacagcaactgcgagatgaacaaggcgaattgtccagcagtgatggccagctatactatgcactaaagcgtgccactg

SEQ ID NO: 384432 - DNA, 235 bp, Zea mays
agcttggattgcaaaagagtcaacaactgcagtgcacctttatacagcaatccctgtggtgatttctcttatcggtttaataacatcaacatttcagattccatcaatcatgatgactcaataaaacaggaacgatgtaactctattgctggagagaaagcgataaagtctattgctgatgggttgctagatactcaaggctcatgtcatgctagtactgatgattcagtaagtg

SEQ ID NO: 384433 - DNA, 243 bp, Zea mays
cgcactaccgccttcttctcttgtctcgtcctcctcgcgactatggccgccgccgccgaggtagaccccagccccaacccgccgccaactacagcctccggcctctccaagaccaagacgcgggaggccgaccgccgccgacgccgccgcagcaaggccaagaagaacaagtccgtcactgaggctgatgcccaggacgctgacgggggagcttccagctccgacgccaaggagaacgccgat

SEQ ID NO: 384434 - DNA, 306 bp, Zea mays
acttgagatggaattgctagaagattataacaaaaggttatctaaggcatcaccaaaggaaaggaaaataccgaacttgcatgttacacaggcgggcactgcagaagtgttctcaagaaacacagctgaagtctccaggtgttcattggcagcaactggagaatgttttgatgattctgaagatcttggaagttcaagacacgctgatagtgtacttggcatagatattaaagagtgtactgggtgttccatatctacatcttcatcagggcacaagcaagttacgagaagatttgtgttcggatc

SEQ ID NO: 384435 - DNA, 301 bp, Zea mays
gagatctataaatgccggaagcacgtagaggaataagtctatgtcaccaccaacctattgaaggttgaagatattatgcccctaacctatccaaaatcatgtaaacaactgtctgtcacagtttgaggtggttttgtctatgtggcgtggtgacaccgtatgtctatgtggactttgacctggacaaacttgcttgtggcattccaactcaatttgtaactgcacatcactctagtagtctttctacttccatcagctttagggtccgtttggatttagatatattgcaccccaattccag

SEQ ID NO: 384436 - DNA, 248 bp, Zea mays
aaagcttgggtttagtggaattgaagtggtaaccaccgcaagcattttcgctaaggaaccaaaccaaatggacatgtttctagcactgccagaaatctataagaaggattacatacttcagatgctcagtggtggacaatgtatccaatattcagccggttagtttgtattcagcatgataatggtcggctagatatttgtagacagtagtgaaatgtgtattcagtagtgaaatgtgtgaagattat

SEQ ID NO: 384437 - DNA, 223 bp, Zea mays
ctgggttagaggattgcagaagacgagtgcgaagaaaggcaagcgaaatgcctgtcgggtttttagcacagttcatttcactgggattttgaagcatttctgtctgaacacaaagcctgttctagtcctggcggaacacactgggggtgggggcgggggaagatgcggtaatgagaccggttagtcaattttgatctaatattgttgacaattctgtaaagtt

SEQ ID NO: 384438 - DNA, 280 bp, Zea mays
gttattttttcatccttaaaattattgtccatgtttccctatttcaacttcttttttatggtagctctaactcatgatatttcttgatatgaaatatttaaaatttggttgaactaggggggtggttcatcattttgttatagactaacaattgtcaataactccatattgagataataagaaccacatatttaattttttgcacatcaatgattgaaacacatcatagggctacagacaatttccataaattcgatatgaagaccagtataccgttgtc

SEQ ID NO: 384439 - DNA, 298 bp, Zea mays
  unsure (1)..(298): unsure at all n locations
atctggagggtttaaagttggcggagtacaaggtgtatttaaagaagaatggtcttagccaaactgggggcatggacacttgtgtagacagaatagtactccattggaggttcaaagatgcggatccaaggagaatttatcctcggtcatccttttgtatcaactgtaaaggtgatgtttgtaggggcgatgccgttctattcaaacagaaggtgtacgagaagattggaaaaggcatgcaaattgtataggtaatcgtatctcanccggcaaagtcatcaaggaaagttatggtaaa

SEQ ID NO: 384440 - DNA, 286 bp, Zea mays
gctattcatacaggatcacatgaaaattattgaagacgacggtccaggtgcagccttctatgccagtgctaaggccatgactaatggaaatcacactttctatgtgagcaaactgatacagaggttggctagattaagtaaatatgatacaatgtatcacatgcacaggtaatggtgaaatccaaaatctgggagagccgacttctattttctgcatgctggatataccatactttttccacctatatatacttcaaaactggttttttagtgtcacatttggttt

SEQ ID NO: 384441 - DNA, 288 bp, Zea mays
agcaatctggtcgcacagcaatactaagattgtggcggatggtatcccggctgattcatggttacaatgatgacctgatcactggagtgcaagctgtaggaagtaaacatcatccggatatgtaggtagtaggcattaacagtgttggttttgtttttgtttttgcatgtaggcttaagatgtttgaatgcataaagcagtccttttcaggtggaaaaaaaaaaaaaaaaaaaaaaaaaaaaaaaaaaaaaaaaaaaaaaaaagaagggagggagacctgggaggagg

SEQ ID NO: 384442 - DNA, 296 bp, Zea mays
aaccagaggctcttaggggactgcctcttgcgcctcctatggttggcccacctgcttatccatactttcaagcccagcctgaacctgaacctcagcctgatcctgagcctgatgcggaagaggaacgtgtcaagctgctcaagcagatagagttctacttcagcaaggagaacctatgctcagatgtgtacctgaggcagcagatggatggtcagggctgggttgatttatctcttatagctggcttcaaaaaggtccaagggctgaagaaggacctacaatatataaaagagacg

SEQ ID NO: 384443 - DNA, 298 bp, Zea mays
atctcacatgagatagaacttaataaacatggtcttttgccctcgcactgtcatttgagtggatcaaagatatgtgatgatcaaaccaaatcaactccaaattcagatatgggtcctttggattttgacatcaccaacaaaaggcagaagacttatgggaaacactcttgcatttttggagatgcaatgacacctatgaaatgcttgtccaagatacatcccttaccggctggacaggataatccatgcgatgttttacagcattgtcatcggggcccttcagatcctgcctctctta

SEQ ID NO: 384444 - DNA, 295 bp, Zea mays
gggagtctcttctcatctttaaccactggactgtatctgactttcaagttgacttcggtttgaaaaggttcagtcattcttggccgcggtgaaagcactgtcacgtaaagatgtgcattatgggtcttatgcgactgcagaacaggtctctctacatgaacgatcctcgggagtcgcacctgagcatggtcaagcggattcttcggtacctctagggtattgtcgactacgggcttcatcttcagcactcctccacacatgaactgattgtctacaccgatgttgactgggccgg

SEQ ID NO: 384445 - DNA, 288 bp, Zea mays
atctacgtttgcgaggaaattgtatccggtgtttctatgtcaaatcggctggttcctccctttctgcattcctcgcccacctcctgacacccatctcatggttccgccaccaccttggacgccgatgtgtctggttcctcacgcttatccactggaggtaactgcttatcttggagacgcattatcgtcgatattagcactctatcaccaactacatgcctcagcttcttcactagttcacctcggcttattttcttgctcttaaactcttcatagcaaccaataatc

SEQ ID NO: 384446 - DNA, 288 bp, Zea mays
gctcactcaccttccttactactgctcactagtcactacacaccaaccaaaggaaggcccctcgcacctcttctgtggctgtcgtcgtttgcctttccgtccgttagccaagccatgggcaacttcctcaacacggcctccaagcggagtcaccggggcatgcttttgccggaggaggaagagagcctctcggagataagaaggataagccagctgcttcgggaggaggaggaggacggctacgaggtggtgggtatgcactccgtctccgagcagctggtgcaggag

SEQ ID NO: 384447 - DNA, 270 bp, Zea mays
acttcctctcaccagcagaccgcgccgccgcagcgccaccgctctccggatcatcggccgtccacctcctcctcctcctcgccctgtcacaggccgtccctgctgaggtgccgtccacttcctctccctgccgccgtagctcgcacaacacccatctcgagctcttccttcttgccacaccgtcggctacatcggctcgcgctgagaagggacgacgcaatggacctcctcgagaagatgatgccgctggtatgacgtggtgtctcggta

SEQ ID NO: 384448 - DNA, 249 bp, Zea mays
  unsure (1)..(249): unsure at all n locations
cgagccgctgaactcaagcaaggcttgtcccagatagaggccacnctntccnannannanctnaatnacatnatccntatacctgatncacaccaanatnncaacctcaactatcacnactttctnatattcttcctccanaantnanaacttanactgctnnatacaaaccccgcctcctcanctncctnactcttacatncactcntnccttctaacnnngctctgcttttatagtnnggttaaaaa

SEQ ID NO: 384449 - DNA, 295 bp, Zea mays
ggggtttagtgagctgcagaccaccgtgtacttgtacgagttgcacaacatcaactgggttgtcaaagcctcggcggccgtgttgctcgctttattgccaccgaaaccaagggttatgctcttcgatagcgccaacttctacatgttgtccgcaaccaacaggattcttgtgtgtgattttccatcctcaagtatctcagtcatggagctccccaatggggtggagaacaagcccggtggttgcatcatgctttccaggggagatagttctggaatctttctgatctatgtcaaa

SEQ ID NO: 384450 - DNA, 295 bp, Zea mays
atggttcaaaagtttccctattccttggatgtatcatatgcatcggggatgtcatattgaagaatcagtataataacatgcttttactagggaacatttaaaagaattgacggttgaggatcattttaaatgttccctagtaaaatgatttattcttgatggttcaaaagtttccctattccttggatgtatcatatgcatcggggatgtcatattgaagaatcagtataataatatggactatttggagtggtctttaaatcagcttggatgttggtgcataaggctgcaacac

SEQ ID NO: 384451 - DNA, 278 bp, Zea mays
  unsure (1)..(278): unsure at all n locations
ggcaacgacacaatcgtaagatctgcagtctgcacgctgcatagctccgagcgacaatgacaacgaagtcggcagggagcacgacagggcacagctacacacagcatacgacgacccnggccgaagaagagcttgagaacaangaagatgcccctgatgatgtcataggtggagagggtgaagatagggaacaggaaaagaccaagcgtgagggataaacaacaagatatatgacgaagtatgaacgtgcgcgcattcttagtacacgagccttgcag

SEQ ID NO: 384452 - DNA, 272 bp, Zea mays
ctcgaccgtataaatcctagtcgaagcaagggagcgcgcactccactacccaacctgatcacgaagatcgcgtccacagagacagtagccgcgtcatggcgaccccgccgccgccgctcccgcccatgccgccgaggcacgtctcctgcggctcacttctacaggaactgcaggaactatggggagaaattggtcaggatgaaataaacagagataggatgatactgcaactggaggaggattgtctcatgtttacaagcaaaaagtgatca

SEQ ID NO: 384453 - DNA, 278 bp, Zea mays
cacccttcccactcttctccctcccatctctctcgctccatcctgggtcctggcgtaacgccgccgccgcagggaacagcaacgccgtcgctccctttacctcttcagcctgctcgccttcctaggaagtggacgccacatgcgccgcctggctcctcctctctccttccccttcccctttactgcgtcgaatctttgctccattgaagctgactgtttcatcctccattaatggcgcggcagcccttcttctcccctcccggcgccctctctgctcc

SEQ ID NO: 384454 - DNA, 271 bp, Zea mays
acggattctccacaaattgccctggatccgttcgtcgctgctctcttatctgctcttccatccaagcatgtatgcccacccccaatcggaccatcgccggcctcctgcagctaggctgccatcacctccttcaagattcattggctatcgtctttgccattggcgtgcacatacgtgtacagttgggggtcgagcagccagctgctggacgaggatggatggatcggaagatgcatgcaaggatcgagcagcggggtgtccaaatcgcgcg

SEQ ID NO: 384455 - DNA, 221 bp, Zea mays
gagactatttgcatgcttctgtataaatgataattagaaggaaatttcatggattaaaccatgggtttaatgcagtaaggaaacttacaatatccctttatatataacatgcatcttgttttggatttgtgtcattttttaatatagctgattgacttcacaggaagcagcttatttgaattctaatacataggtgtatatttggtattagttattttgag

SEQ ID NO: 384456 - DNA, 133 bp, Zea mays
cacagatacgcgtctactctagttgctgcgcgtcatttcgcagaggtagttctctatcagtgaggatgccagcgaggagcgcactgaagccagcacgcgatgagtcgcctcctatggcggcagaaccttgccg

SEQ ID NO: 384457 - DNA, 275 bp, Zea mays
gttaacaatagattctttagtaacctcttttatgtgcaaagcactaagaatgcactgaccgacatatcaaaataggcagagtgtggcaccttggtctgtcctgtctcaatcaatagtcaccacatttgtcatatgttagttacttgatttattgtttttctgaataaatgctgatactgctatttataatttgcatggctcttcatagttatgaacttatggcaccattggatttgtatgggaacaagtactctcacaacagatctttatctatt

SEQ ID NO: 384458 - DNA, 264 bp, Zea mays
cgacgaagagccgcagaggagggggaggtgctgggtgggatccggcggaccgctcatgtcgagcggcgcggacggatcggatccctgcacgggccttgacccggggacgatcccagagctgccggcccatgagcctcctctgctgcaggctccgtcgccggcgcacgcagcaggaggtggtggtggcgtcgcagacgaggcgccgttgccagcgagtcacatcgtgatctcgcggccaggcgaggatgttcagatgcccgatgc

SEQ ID NO: 384459 - DNA, 299 bp, Zea mays
gtttcctcgccgcagccgcaaccgcatccaggtgggaacctagcggcattgcattgcacgaaccacttacctgtgcaaccgtgcatgctggtttgtgaaattggtgttttcgtcacagggactgcttaggggaaggttcttaaggaatggggcgcttgaagaggagcgaccaccatctgtggcagcgagggagcttgggcagttgaggcagagccatcgtatgcccgccttgagaccagagagtattgcaagtagtcaagatgttagccaatctgatgcttctgtggttgagagtgtta

SEQ ID NO: 384460 - DNA, 296 bp, Zea mays
ccattatcagcctgccatgtcgaagaggaaaccacgtgcaaaagcctacatgttgggggcgcgtgctcgcatagttcatggcgttgccgtgaacaccatggctacccttgccgcgaccgcctataagagagatctgaggccacaccatggcgtggcacacttcctcgagctcgatccatcgttgccctccgtcgatctaccgctcagcaccccgggaggccagccgagccatagccgatctcggaggacgaccagctagagcctgctgaccaggagcctgacgttgaggagtacgc

SEQ ID NO: 384461 - DNA, 119 bp, Zea mays
tccttctgtatctaagctttccgccattttcccctttatcgaagcatcaagacccagaagcaagcctggtatacaagcattgtgttcactacatgtagctcttgataaagccaaagggc

SEQ ID NO: 384462 - DNA, 292 bp, Zea mays
cacccactcatccgtccgtccatccaatgcgatggtgtgcttggcgcgccggccgctctccgccgccgtacctgcgggcaacctcctcggcatccatctcttccggtgccccgacgccgttggcatcgtcgccaagctctcggaatgcatcgcctcccgcggtggcaacatccacagcgtcgacgtcttcgtccccgacgacaaacccgtcttctactcccgcagtgagtttacctacaatccaaggctctggccgcgtcatgagctccacaaggatttcctcaatctctcc

SEQ ID NO: 384463 - DNA, 287 bp, Zea mays
attcagtatgtcgtgatatttagtatttattataaacctcaccataaaaacatgagcgttagttgtgcctatcttaatgtaacacattttttgtacacatcttgaccttttccgtttgatgccttgctttcaggtacttgacatttcgtgcttgatgctttgtttcctatgcagattatgaacataacaagaggtcagcgccaggttatacatcagctcgacaatctgacaaatctgcttcacgagcatttggtcttaacacgccagactaataataccgccagcag

SEQ ID NO: 384464 - DNA, 276 bp, Zea mays
gtgatgtgatgtgagtattatatgccttaaatctccttatggatggtgtgttgtggctgctgattgtataggaattatcttgttttgtactgtaaagaggtaaacaaccatacaagtgatgatttggttgtttgcggtcagcctaaaaaactttagtaatcaattacttcgtgcttgttaaggttaaacatttggtagggtgcatgtatgtttgtctaaaaattcttaatatatattttgctatggtttgtaaacatactgcagtagaaataagca

SEQ ID NO: 384465 - DNA, 276 bp, Zea mays
gcgagtattcttttaatggggatttatcaggtgaccaaaacgtcgcatcattttctacagaaaagctcagaaatcgcttgcacgtcgaaggtgttggtgaggcagttattaaagactgtgaacagattattcagtcagaattttcgcagtaccaaacacagatgaagcagcgttgcgaagagtatttgagttttattggcagtcttccacgggaagttgaggtagttaattcagtagattcaactgtccctgagaagtcacagctggaactgttca

SEQ ID NO: 384466 - DNA, 280 bp, Zea mays
gtagaatcgaaactttttttcaagcaagcaacaagttggcgaccctctgcagccagcgatcttatgatctcagtatcatccgaactgtctttacggaatcctagtcttggtgctcgtgttcctcaactccccgtgcaggttattgcagtatctcctcacttatattatggaaattctccaatttatcactatgatatggtaaaaccattcctggagatacttacactcgaagctactaatatgagcatcgaaaaccttacattaactgtccttgctcctg

SEQ ID NO: 384467 - DNA, 186 bp, Zea mays
cagaatggcaacagttcctgtaaagtctgaacctgcacatcttcttttttgtatgtatattgcccggggaggtgggaggtctgtaccctggctggtcgaatttcagtatgtgctttgctgatatgtactgtatgctagaagatgctttttatcttagataaaacgggaataaaaggcggattgggc

SEQ ID NO: 384468 - DNA, 135 bp, Zea mays
agaagcctccgctccttaatgtgaaactacatgaagttttaaacttcatgcaatatgaaattccatataagtatttatctgcaagttacagcttgtgtggtttgtctttggaaataaaaatccaggttctcacag

SEQ ID NO: 384469 - DNA, 287 bp, Zea mays
atattttatcttctatatcaacagtgttaccagatttgacattctatattatttcttaccgctcgtgagcacgtgaacgcatagacataggaatcagcacagtgcatagaggatcaccatacaccctctatacatagcggacgcatgccattctctaaattttagtggaccttttagagtcccttgttggagggttaaaggttctaccaaacctctatatttagagtacataatccttttacaggttcctgccggagccagtcttaggcagcgatcctactgatcga

SEQ ID NO: 384470 - DNA, 179 bp, Zea mays
gctgcagcttctgcatacacacactgcaagtctccatgtccggcgccacctgagtcctgagcctgctctctccgtctctctctccctactcttcccctcgaccttccgtctccttggcctttttattcaccgcagccgcagcacccgtgcactaccacacaaacagacacatcggtgac

SEQ ID NO: 384471 - DNA, 319 bp, Zea mays
atcatatcttgttcaaaggactgctctatattttaatgtcttattgaaacgttttttaaaatacctatctcgttcaaaagggtgctctatattttaatgacttattgaaacgtttttttaaacaatatcttactgtcatgtaatgttttacagctttgccctacctttagctcatcaatcatcaagaacatcctggatgtctttttaccagatgaattttgtccagatcccattcaaggttctttacttcaagcactagagttggaggaccacctggaggttaacaagggcatacggtcgatcccgtgcagcgcatcgc

SEQ ID NO: 384472 - DNA, 296 bp, Zea mays
ctttcttttattgatgaactctttcagaatctctgcatcctggcacaaggcattcgtggactatgaaaaactatcaacctgtatgatggacaaagtttacaaacttgaacaggagaagaaactattggaggaacagtcccaagaccaacaaaatgagatttataagctgaaggccaatctggaaagctgtgagaaggccatagatgactgtactcttcaacatgaattggagaaggatgccattcttttagagctcctacacctccagaaggaagtatctatcttgtcatcatctt

SEQ ID NO: 384473 - DNA, 292 bp, Zea mays
atcacatcatattgagcatccattgagagaatcatttatttaatattgtgaaccttacttgaatgtcattaagatataaatgctaagatcaattaaggtctagtttaattctcatagaagcatatatggactaatagtaatatggtcaagtcaattcacgattcctcatatcttattcactttggcttgaccaatcctcttaatcacttcaacctctattctgatccctccataaatataaacataaatatatatataatccacccaccactgcgcaaatgctgcaatacta

SEQ ID NO: 384474 - DNA, 284 bp, Zea mays
cctcgacttcctaccagatcccatactgcccctagcgacgcgtccacgcaacaacctaatcaggagaggagggagaggaggaagaaggcgaggccaaaaatcccctacccctcccccaatcctagcccaataatctctcaatcaggggattcttaggtctgatcaagtcggaggattcggcagggcgcaccatgatacgagaaggcgtccgtctccaaggagctcaacgccaagcacaagaagatattggaaggtcttctacggcatcctgagaatagagaatg

SEQ ID NO: 384475 - DNA, 283 bp, Zea mays
  unsure (1)..(283): unsure at all n locations
agcaaataaagggtgggtgtgtctccacctatacatatagtataatagtgaggtacccgtagagaccatataaatcagagggttttatatttcaccatttgataagaaaatactcgtattaggaaggttcaaaaaggagaggatattgtatcttctatatatcttacttggtgctttatcattttcaaatgccaatcagtgaacaccaaatttcaggtttgttaaatgcctgttaccagtcaggaatgagatattatcttcagataataaatanaataactgg

SEQ ID NO: 384476 - DNA, 229 bp, Zea mays
agagaacacatgatatgtgcatgtatatgtgtaatcttatcatgcactcaatggttggaaaacgcactccagtgctaagaaaataaccagaagccaatatatcgattcttatatctcggtttatgttaccaactgaatatggtgtaatgcataactttttccagtaaataaactggttattttttgttcatttcaaaaaaaataaaacaaaaaatcaacattaatgagg

SEQ ID NO: 384477 - DNA, 292 bp, Zea mays
  unsure (1)..(292): unsure at all n locations
cttttggtgatggcgggaagaatcataagctactatgaatcctcagctagcattgtagtagtcaccttagatagctactacgtggtcaatactagaacagagtagtactaacatgacaatgaatacgataataatggtgtaaataaaaagtatgtactactctgttctagtattgagcaactactagttaattaaggtgagcacaacaatgctagctgaggattcatagtagcttaaangtctnttggtgatggcgggaagatcgacttttacgtagcaacggataaaaaca

SEQ ID NO: 384478 - DNA, 288 bp, Zea mays
atcgagccgcatagatattagtatgaaagataaaaactagaatgctatgcctgtcagaggagctttcttcagtttcagatactgctctgctttattagtcatccagccgatggataatttctatacgtgtatcgcccctgcactttcaaacacatgttcattgtatccaatcacataatttttttcttctcttagatttactatgtggttgtggccccagtttggtttgtaggttaatttgtatactcatgtgattttagtttttccgtgtattttatgttcatttag

SEQ ID NO: 384479 - DNA, 290 bp, Zea mays
atttacttgtatagtaatgatagtgcctttacataaccactaaccagacacaacaaagcaatatgttctttcataggttagagatcatggggtctgaaactatcaaaggattagctaaaggttcaatgactacagaatggggtagggcagatccatgcattgatactggaaaaccagtatagtggtccctttttagattgaatgaaatgcagttgtgcagagcatgtgcattgctgcaactatttttatactgcttttttactgatattgctatggagatcaacaatttt

SEQ ID NO: 384480 - DNA, 282 bp, Zea mays
atgctgttgggcatccacttacagtttatggaaaaggtggtcagatatgtctttgttatagcgcggtgccaaataactcgcccctcttcttttttgaaatatgtctatggttgaaattgttagtgtgcatcaatcagatcaatacttaaaatgtcagtggttgaaatcactactcgcattttgtcataaatcttgggaactgaaaaatcatgttagctctacctcaacaagtattgaaattgaatttgtcttcttttcctgccaaatgctccaaaatagtga

SEQ ID NO: 384481 - DNA, 281 bp, Zea mays
aaggtttcgagtcttacgacgatccggcgaagctacctttccgtcgctcctccgcaacccaggaacactgccggaacggcgaaaaggggttcgaaattggtcctgatccaggagccaatcctacagacttcacctcccaaattcttttcccgatccgatctgcaagttctccttggatcatgcatcctccagccgattcctgggaagatctgaatcctcctctcgaccatggatccacgcgccaggtatccttcgggcatgggcaacggccgcagtgggaa

SEQ ID NO: 384482 - DNA, 282 bp, Zea mays
cacgaggaaagaacgctgataaacaaatggcgtaaatctctatcgacgaagctgtggaggaaaacgaaggatctccccgtgcttgtgcatgccagatcgcctgctctacgtccgcatcccgtccctcgcgaaactcggcactcccagggttcgtttctttgtttcacctactctcgttgtttatgctactttgttaggcgcctttgcttcaggaaatggtgattgtatcgtactattctggggggaaagcgcaattatttgagggcaagttgattcatcatg

SEQ ID NO: 384483 - DNA, 260 bp, Zea mays
attaaagtctatatagattgaaatttgtaactttggttttaagtattctttccttttagaaacttcctaatgattaagatatactttaactgttctgtgttcagaatctcaaagactaattaactttaataaacattcttgcaagtactaaaaaggaaggacaagaaaggggatgaaagggataagtgtgacagaagcatgagtgaggatcaatgtcgcatgtaatggaatgactcttggattaagagcgtcagtgtgga

SEQ ID NO: 384484 - DNA, 267 bp, Zea mays
ctgcttttaagcttagtaaccagggaccgaacgcctcggcgacctgctcgaccaggactaggtgcggcacgacctccagttcatagtccccgaacggagggagacgacaagcccatgggaccggcgagggcgaggaggacggggcctagaggaggacaggccagatcgtcggacccaaggccgccttccccggcgcacctcctactcccccgagcccgcttctcttaaaaattattttcccaatcagagaagacatctgctatgttt

SEQ ID NO: 384485 - DNA, 285 bp, Zea mays
tgttactgtcaggaagctctgaagcaaagaccaccatggcctccacctacacagtgggttatgcatattgtgggtgctcaactcaggccaataccctggccatcttatggctctcgttcagttgggcaatgtttatgggggggtccaggttgtgatcaatgtttcttactgaatttcattatattaatggctttggggccttgctaaggcaacaggctaatctgtcttttgtcaagaagaaagggtggttggttttattgcaatttttatccggtggtcagcaca

SEQ ID NO: 384486 - DNA, 294 bp, Zea mays
cagtcctcacatcgccatccttgacacgcgttcggagatcgacgtcgaaaccgccgcaccggagtccatcctcgccgtgttcgcctgcaccagagccgctcgccacctacctcttccatgccctattgagccgcgcgcccgtgccatctccgttgagatccaaggtgagcatcctcctcgtcgcctcctcccctctaccatccccttcccttgaacataacaggccctacagacagattccattttagtagaagcggtggatcgacaactgcgcctcgttggtctatcttttgt

SEQ ID NO: 384487 - DNA, 122 bp, Zea mays
  unsure (1)..(122): unsure at all n locations
gatccactagcgcggtagagtctgctcagcagcacacttcgacgactgaacgcgtcgtcggccgtagctgccgctctattatgacaccatcgncgtcgacgataatcgacagtttgtgcgat

SEQ ID NO: 384488 - DNA, 248 bp, Zea mays
  unsure (1)..(248): unsure at all n locations
cgcgctgcttgctgatctctctacggatcagatgctcctcagatcataatagcctgccagacgtgatgctacgtccacgtcggctggccaccaagtcagcatcgatatcgtntcgcagtccgagcacctgtgctacgtcagctgcagctactgcaacaccgtgctcgcagatgggtgatcgatccaataggatgatggacacgatgactgtcgagtgcggcgactgcaacgatctctcctacctcagt

SEQ ID NO: 384489 - DNA, 283 bp, Zea mays
cgaacggcgcactcaactgctcatagaaccaaaacccctctccgtcaccgcggtggcaacctgccgtcatcgccatcgccgcgtgcgttctcgaacgttcttgtggcctagaaatacacgttccccaggccggcgacgcgacgccgacgcggtcacgccttttttttcagccggctggttcacgtgttcgacgacggcgagcgtctgtctaggagcaagatggatgggaacaggatagctcggttttcggtcacctggaggggcagccaacttgatgtggatg

SEQ ID NO: 384490 - DNA, 234 bp, Zea mays
caagggcgtccaaagcccctgtgctcggcgtccttcttccacctccggccgacctccaccttcctgctccatgggtgcccagcagcagcgcccctcccctgctccacagcagcagcagctcgaccctcctctcctcgctggcgcaaacctctcccatggcgcgctgcagcagacgccctggagcatccccgccatggctcgcgacccggcttcctccctgcttgcgtgctgctg

SEQ ID NO: 384491 - DNA, 249 bp, Zea mays
tgttagttgttactacgtattcctgctgtatttattctaaaaatccagagaggttagctggatatcttggtgcagggcagctgtatatcctgatgcaatgggacgatctacttgctagatattatgatgttacattttaactgatcgttgtttggtgactctctaatattatgtctagtttattagagcatcaaattacatttccacatcttgtttatagtggcacaggtgatacccattgattccctt

SEQ ID NO: 384492 - DNA, 155 bp, Zea mays
caaggagcggcggctagggtttcgcggtgctgtggcggccgacgcccgtcctctactatccgtggcgaccatcgtcggctatccgcggagctgtggcgatcggcctgtgctcctatccgcggttgccgaggaaagtactatgttgttgatgctgg

SEQ ID NO: 384493 - DNA, 206 bp, Zea mays
ctcgagccgctagtttgatcatggctggatgatgtggaagaagagcatgatcttggaactgatggtggtgatgatcgtcccgcgggatgttcatggttggttctactttaatcatggctgggattaggactcataatcataatatcgtgaatgctaatcccagccatgatcaaactagagccaatcaaaaacatcccaagatcatg

SEQ ID NO: 384494 - DNA, 222 bp, Zea mays
attcagtgaaaaacttcaacccaggaatggcgatgtcttggacaagagggttagagcaaggtgatgttccgaggactggctctcaattggtagagagcggaagacttgcaattgcaagcaaggcgtagaccggtggaaagggtgatacttccataactcctgctctcatccgcgaactcaagagtacaacagtgatcggggctggcatcctcatggagagtt

SEQ ID NO: 384495 - DNA, 287 bp, Zea mays
  unsure (1)..(287): unsure at all n locations
gcctagcccgacgaccagacgcaacacgatggcgacggccatggcctcgccggacctagccgcaggcgacgggaacgacgatgtacaccatcgctctctgtccgcagcctgactggcctccggtgcggcatacgatccgcgaaaagnncgcaacctcctccaatctgtaaggacggtgtgcgagatgtgccgaacggcgaaggaagcgaatgacgagatggtggcgcgggcgttctccgtgatgggcaagctatttcagcgatgcgccgccgctcccacgcaggccg

SEQ ID NO: 384496 - DNA, 163 bp, Zea mays
ggatgccataacatttgcatcaatcccatcttctctatttgttgtcgcatccagttgtcccttgctgcgagaacaaatagagaagatgggattgatgctgctgttatggctaggctgagaattttgaagtctcgacctgataatgaaacctcaatgggcgatg

SEQ ID NO: 384497 - DNA, 284 bp, Zea mays
aaacaatcagctagcacgggtatatcagtttttcagcgtttaacagaaggactcgcgagcaagctctccaatgatgagtggggaacggtcctgttgtgcttcaaagaatcagcagcacatacatttgttgtgtttgacaaaatagttaaaatgatgaaagtcattgaaattccagatagaaatgaatcttactctgaagctgagcaatattcagatcatgacatatactatgatgaagaagaggaagccaatatggaaacggcgtcttatgcaatgtcagaatg

SEQ ID NO: 384498 - DNA, 144 bp, Zea mays
ctccaaacatcgtccccacaaatttcacaccattctcctcaggttgatcagcacagtctgttgcaatctcaagtcaaaaccgggacaccattgcattcagctaactcaccatttgtcccatctccatcccctcctgtggcccca

SEQ ID NO: 384499 - DNA, 214 bp, Zea mays
gtagccatttcaacattgtaggatccttttattttcatcctatacaatctgagatgttcttacaggatgaaaataaaaggatcctacaatgttgaaatggctacatattacacattgtaggatccttttattttcatcctgtaagaacatctcagattgtataagtaccgccgattttgtgccgagccgtaaaaagagcaaaccttggctctgg

SEQ ID NO: 384500 - DNA, 164 bp, Zea mays
  unsure (1)..(164): unsure at all n locations
cacttcacgctttcacacttcacctccggcgttccgcatctggggtncaatacgnacgtcgcgtccataccgatccgtgtttgctcantccctctcctcncactcgctatttgctccaagcgagcgagctaggcgttacgccggagctggattgggcggtggtg

SEQ ID NO: 384501 - DNA, 310 bp, Zea mays
  unsure (1)..(310): unsure at all n locations
gtctcgacttgttgacaggcttgatctntcttggagcttataccaacctgatttatatcttgttggaagtttgggactcacatcttaaccttgctgtgtgctgttgtacaccattgcagaggttgcatgcttaagaacggcatcagtgttactggctcagctggcatcgaaatatntgcttatgtccttgaactattttaaagaacttttactaatgcttttgttttgatatctattcttgttattatttgagattatcctgttatgtcactttaatgctctgttcttcgtgacagtgtgttaaccctca

SEQ ID NO: 384502 - DNA, 272 bp, Zea mays
  unsure (1)..(272): unsure at all n locations
cagaggagtctatccttgagagcgatgttattaagcaagggatgcactcagatgacatgaccanagagacagatctanacactggggaagctacagaatctgagaagtgtattagtgatggtcccatangaaagtgcataacatggtgatagtgcaccattgagcaaggaaggcaaatcatttctggcaatgtgaatgtgcagaaccaatatcgagggaggatctanaagaagcattcanaaaatttggagctgtccggtatgtggacttca

SEQ ID NO: 384503 - DNA, 291 bp, Zea mays
cagcagccacatgcatatgctaggagcttggcacgatttgcatcaacattgggggcagttggcagggatgtggcagcacatcgtatcagaacggcactcccacctgggacaagtttcggcgcaagatcggttgtagatggtgagcacctcaaaatctcagtgggctctgcagcatcgactaatcactctctgagcacatggtcacccatatgcatcaagaatgatgatcgtcacagtctgacgtctctatgggatgtatgctgaggcattaatagaatcaacatgctctac

SEQ ID NO: 384504 - DNA, 170 bp, Zea mays
  unsure (1)..(170): unsure at all n locations
gcagagctcgcaagcggagaggctacagnacggtatgggtcactccgcggcctcaccgccgcgcgtctcctcgcggcggccttcctgctctccgttgccgtcacggccgccagagctcaggacagaaccgagcacgaggaggagttcagctacgtcgtcggcgacgagaa

SEQ ID NO: 384505 - DNA, 304 bp, Zea mays
  unsure (1)..(304): unsure at all n locations
gaatcggctcgaggtatacttcttctctctctcagtagtctcnctcgcagctagagtcgtcgtagcagatcagatctcaacacctaccgaccaacagctgcttgctcgggacgggaaccggagttggattgcgatggcgctgcagtacgtggatgcgcacggcaggcgcgccggatctcgccgactgtatgcttcctcgccgactctaccagcagaagctaggcaccactcaccctcagctcgaccattctacagtccagccgacagacggagcactatcatcagctctacacaattcatcatg

SEQ ID NO: 384506 - DNA, 327 bp, Zea mays
  unsure (1)..(327): unsure at all n locations
cacgaggaggggtcggccatgacggggaaggcgaacganagaagcacaaggccgggcaggcggaccggctggggcaggacaagggcgggcacgcgaagctggcgtgccccctctgccgcaccccggcgcccgacatcaagtccatgcagatccactgccgaggccaccacctccaagcccaagcccggcgtccgcggcagcctcaagaagtaagcttgctggcttggttggctcgcccgcctgcatagggcacaattcccttcggtttcaatcccatccgccgacccgatctataatcaatcaatcgccgctctccggcctggcggc

SEQ ID NO: 384507 - DNA, 260 bp, Zea mays
gtctggggctcgggagaagagagcacgggaagaaggagggaggatgctgagcgtggttcgggtacacctgcgctcggagatcccgatcttgggctgcgagatctcgccgtacatgctagtgtggtggtccgacggtgcagtctccactaacgatgtccctgaaaccgcgcccgctgatggccagttactgcggtacagatggtatcgcatacagagctgatggaaagtccctatctgcagtgtgcatctaatggaacaag

SEQ ID NO: 384508 - DNA, 326 bp, Zea mays
atctatatgtgacctgcaaaagataaatccttaaatagtaggtcaattgcgaagatttgttagtgatgatccgatgatcaagaaccggagcaccttcaagattggaactgcagggtggtcgggttctcagataagaatgaatcatagaaagttaatgtgtgcatccatggttgtggtcttgacatcggcggagcggacctcgctcgggaagctgctgcagccggtagactattgattggaacttatgtacctaaaagttctccacatgtagatgagtgttatcgtcatagatatggggtcatccctgttttgttcccatggttgaa

SEQ ID NO: 384509 - DNA, 320 bp, Zea mays
caccccgcacggtcgatctatcttgttatatgcgtgcatggaggggagcagcagccagctgctggagacctgccttcctgctagcctctacgcggttactcctcctccatgcgcccatcctcatccccttcttgccccgctgccgaaccagcagcacatgcttctgcagatgccgtttgtcaaggagcaggctgcgaataatcatggcctgatgctctcttcggaccaccaccaccacagcggcctcctgtacccgctgcttcttcccggcatccctttctgcccctccgtcgccgccgcctgcgagaagactaccacca

SEQ ID NO: 384510 - DNA, 262 bp, Zea mays
gagagccacagaaggcaactggaggtttgaggagggcgcgataggcgagccggcgagttcgggtgcttttcatggggtcggagatgcgaccgttgggacctgggaaacagcgcacttcgagttcgggggcggctcccgcgacggcggcagccacctgagcaggatgtttaattggaacgacgagcagcagcaggcaggggatgcaatatgggctgagttcaatgacagtggggaccatattgtgcacaatctaaaagtgtag

SEQ ID NO: 384511 - DNA, 324 bp, Zea mays
ggggctacgaggctcctcctccccgccgccaggggctaggacgaggcaggagacagaccgacagccggcgatgtcaccgccgacctgtcagaactggagacggggcccgagcaggaggcgccggcggaggtggatcccttggtggaatggtggctgctgttccggctccggtcaagaagtagcggaacctccccaagactccagatccgggcgattgcgatctcgccgaggacactgctgtccacgaaccgcttcgtgtgcaaggtgtgcggcaagggcttctagcagaactagtgctgcaattgcaccgccgcggccacaacc

SEQ ID NO: 384512 - DNA, 228 bp, Zea mays
  unsure (1)..(228): unsure at all n locations
ccgactatttcgggtaaaccaaaaagcgagtccaaggacaaagagaagaagcatacacagcataaagacacngagagggacaacgacaaggaccatacgaagcacgaacatcggcataaagatcggagtaaggacaaagataaagacaaagacaaggataagaaaaaagatcagagtggtcatcatgactctgattcaacgaaacatcatgaaaagcagaggaagcac

SEQ ID NO: 384513 - DNA, 286 bp, Zea mays
ctcgccactcatccaaccaccgcccaaacgtcctcagtccataggggatgacctctatctcgcccgaaaccggcttctgccgccgccggcggggcaaggtcatgcctttccaccattaaatggcccttctccgttccagctccagccttcgccaccgctgtcccacggggcatataaacaaaggctctcgcggaggcggcgcacagcagttgctggacgagctggcggcggcggcaaaggccgcgaagctggcaattccattggcgcgcgagagatattggcgcgg

SEQ ID NO: 384514 - DNA, 282 bp, Zea mays
cgaacactgccatggccaccgccgctgccgacgacgatgtcaagctcgaatccttcctccaatggctccagtccaacggcgccgacctccgcagctgcacgatccgcgcatgcggcggcaagggcttgggcgtcttctccaaccgccgcccccgagccgggctccaacgacggggtggcgatggtggtaccgctcgatctcgccatcacgcccatgcgggtgctgcaggacccactcgtcggcccgcgatgccgcgcgctcttagaggacggagtcgtcgac

SEQ ID NO: 384515 - DNA, 302 bp, Zea mays
gcgtagtaggtcggaatcggtcgagtcgagcgactcgagccgctggtttgttggagcagatgctgcgcaggctgataaacagttggcatacacccttcttcttgctgaaaacatttgccagaaacatggcgttatggttgagaatcttgtatcagaaatcgttgacatgggactaggaaaacaaatatctaaaataagaccatccctttcatttattggagcagaggaaataatgagtcgtgtgacagcacaagttgcggaaagtagtgagctgaatgaagtatggaaggatatcctgaacg

SEQ ID NO: 384516 - DNA, 279 bp, Zea mays
gtaattggcagggaattccaacacagatttgtgctcgaccgactcgagagtttgtcgacgcttgaagaaggacctaatgtgagcttttacacacttgatgaacagcttgagctcttgagcaaggtgggggcatttttgtacccactggtcgtagttttgttggctattactaatcgtgtgcagatggccccattcacctctaccaacaggtgttgaatgcaggggatgacatgattggtgttgagttcttagaagaagattatggtggcaaggttctat

SEQ ID NO: 384517 - DNA, 274 bp, Zea mays
gtaagatgctccagctcatcctaagttaaactcaatgaagctgatcgaaggatatttcatgagagctggttttgtatcagcatttaaagatatacatgagagacttggggaagtatggccaaaaaagttttccaggttagctctgttgtaaaaggatgtaagggttaaggttatcaaggctgatatacaaggaaggatagaaaaattggagagaatgaagaagaagggtattgtcacagcaagaaaatctaaaacaagagcacgacgaggaaat

SEQ ID NO: 384518 - DNA, 272 bp, Zea mays
cctcgcgcgcgggagccctcccgcgtgcccacgcggaggatcccgtcgcggctggtgcactaccacctcctctccattcgccactcccacgtgctctctcgcgcgtcccctcgaccatagatagggtttgctcccttccttcctcgccgcccgatttgatctcgtcccttccgggctccggctaggctgctccgtctctcctcctccgccatgttctcgcacggcgctgattccgcccacgacgccgggaccgttggcgtcacagcggcgtc

SEQ ID NO: 384519 - DNA, 273 bp, Zea mays
gtcgggcgtgcctcaagtgctgcggcgtctgccctgcgtgccggcgggcagtgccggcaaccagcagacctgcggcaagttctacaccgactggaccacgcacggcaacaaaatcaagtgcccgtgactccttgtgcttgatgagagcagcatgagtccatgggcggcgggcgcgccactgcccacactggcgcgcacgttttgtatgatccgaccccgtcggcgtagatgtgcgagcctgtagctatctagcttagatgtacgaggttgatg

SEQ ID NO: 384520 - DNA, 218 bp, Zea mays
ccggtgctgttcttgcctcctttgcggggctgggaaccttgagttcctcctatctgtttcttgggttaagaggcgttttttccccttattttctggcgactggtttctggtggtcgtgtgcgcgcccccaccttctgtctgactggtgtttggtgtccttgtggtgattcttcttcgttctctctgtttctgtaggaggataccattttggatctttg

SEQ ID NO: 384521 - DNA, 263 bp, Zea mays
cttcagtctgaggttgtggctgctgagaagaagcacaactttgctgtcgcagaggttaaaagtctcaggatggaattggccacgttgctggctgagaatgaggctgctgctaaggcatttgatgctgagaaggctagacttttgggcgagttggagagcctgaagaggaagttggaggaaatccaggcagacaaggaagtagctgaggtaacaacccgtgagaaggatgctcaggccattaagttgagggccaattggaggag

SEQ ID NO: 384522 - DNA, 101 bp, Zea mays
gtgtacaatgcgatgctccgtaggacaacgggcactggagcaaagattagctgagaagcgggctgcagtcagcagtgcagagggcgtcacatcactggatg

SEQ ID NO: 384523 - DNA, 234 bp, Zea mays
cctctcccagaggaacaactgaacagcatggataagatatttgaaggcaccacaaacttgtctaacggaatttcgtttcgagctcctggaaaaaatggatcatatgccgccatggacaatgtggatacagtaccaactaattcaccttcacagaaaaacgctggcactcctagcaatgacatagaaagcaagacccacccatctccggcaaatttgaccggaccagagcaaagt

SEQ ID NO: 384524 - DNA, 172 bp, Zea mays
tgagagagagagagagagtgcgtgcgaatgcggagttactcggggactggtacgagcggagagagggtgggcggtgggggaagcgagtggaagaatgggagccaagagcacggagagtgccccgggatcttcacctcccatcattcgagtgtggagtttgtcctacttccgg

SEQ ID NO: 384525 - DNA, 170 bp, Zea mays
atgaggagctttgagatttaagaaccgaaagtaaacactgccaaccactcttccgtcttcaaccctttggcaaccagcaaacaaataccagtaccgctccactacttgattgccgcctcactggcaccgctggtccgctcccagttccagtgacactgcaccagaccacc

SEQ ID NO: 384526 - DNA, 167 bp, Zea mays
aggacgacttgccccccatctcccagtctcgccccgtcgaaacgagcacactacatgcgacggaaaacctgctcccctcccccctggtgtcgtgcctcccagcgacagcgattggctcggctcgcgcgctccgctccgcacacgctagatccgcgatcgcttggggt

SEQ ID NO: 384527 - DNA, 185 bp, Zea mays
ggatcgagccgattcggctcagctttggccaccggatagctaggaaccggcgatcgccaggaccgaacgacgatgcagggactctacggctacgacggggcggcgtcacgggaccccaagccgcggctgcgctggacgccggacctccaccagcgcttcgtcgacgccgtcaccaagctgggcgg

SEQ ID NO: 384528 - DNA, 297 bp, Zea mays
agcttgtgcttgttagcgcccataacaacgagatcatgcgggacgtggcaaagggtgaaaattctagcgtgcaagaactgctagtgactgatgtcagtcaagacttggagaagcaggtagtgtggggctgatacgtccaataatgcgctagtgactgatgtcagtcaagacttggagaagcaggcagtgtggggttgatacatccaatgatgctgagagggtgagtgaacagcgagcggtcatgatggcacaagctacctccccttattatctgatgattttggattcaagctgaaa

SEQ ID NO: 384529 - DNA, 302 bp, Zea mays
ctaccggcgcggcatgtccacctacttcgagatggtggcgcacgggcagggcaagaccatgagcgtgtgcctagcgcgccgccccgacacggcgtccagccccttcatctccgcgctcgaggtcatcgacctcgccgactccatgtacaacaccacggacttcagcaggttcaccatgaccaccgtggtgcgcaccgcttcggcagcaagggcgatatcgtcagatgacccgtacaaccggtactgggcgccgttcgcggacgccaaccccatggtggagagccatcctccatctcgcccga

SEQ ID NO: 384530 - DNA, 301 bp, Zea mays
accagcttacgggatgagtttttgcagcattttcttcgtgaggaacctgttgttgggattgaatatgaagcacagttacaaaagactcttcttccccatatttcttctgcggaagtggcaaaatttgcagaaaacttttcaacggccagcagctgtgttatcaagatagttgaacctcgagctcatgcttctttggaggatctgaaagcagttgtgttgaaagtcaacagtatggaagaagataaatctatttttccatgggatgaagaacaaactccagaagaaattgttgcccaagctc

SEQ ID NO: 384531 - DNA, 287 bp, Zea mays
cagcttcgcagcccgcgcccctaaaaccctagccccggcggatcgcggggcgcctctggtcccagcgacgcggatcaaggacgggagcgctggcgcctcaggaatgttctcaaagagtggtggtaaggatgggagtaggcttagcggctgtagtagtcgagcctcttcagcttccatgcctccaagtgtgaagactgaatgtgaaatcctgcaatccgccaatgttaagatcttcaccttcaataatctcaaggcagccacaaggaatttccgtcctgatagtgttc

SEQ ID NO: 384532 - DNA, 290 bp, Zea mays
attcgaagcaatataacatgattttaatatttgtgattgacttgttagatccattagtcattaagactatatcgtctgcatattgtatatgagcaatacctttctcatttaaggatcctaagacacccacaattaagtgaggacattggtacaaacttgtccacccttgactgtttgcatcacccactttcaggctggtgtcttaaatttaagtagctaatctgttactgcctgttatgcatttctaatatacatcatttttattgagctgcttccctaattatgtactt

SEQ ID NO: 384533 - DNA, 308 bp, Zea mays
tgtgaatttgagagcaaccatttggtcgggacgcttccagctgacaatggtcaggacatagcaattgctggtggtctgaaccttgcatgatggagatcgcattgaactgcttttaactttcgctgcactatataccatcgtttggcttcatggtgtatgactttcaggcactggagtttctaatggtaatgatcaaggagctcctgctatctcatggttgtgcattcgacctctacaagtctacatcaccaaatcaaagcatgtttgtcggatctgccgtgcactgaacaaaagtcattcactgcgaa

SEQ ID NO: 384534 - DNA, 190 bp, Zea mays
aaaggagattactcattctgctcccgacaaataatgacagtgtggatgacaaggggcaattcaaaggtgtactgactgagctagagatcttgattctgcatgaacaagttccatatccagtgtaatttgatttgcataacgaaaatcttgataacctgctggcagatatccataaaattgcctccacagg

SEQ ID NO: 384535 - DNA, 290 bp, Zea mays
ttcttctgggcgcaccaggaaaaaaattgatacattcctcggcagctgcgcgagtcctctgttgatacccccggcgacccaaagcccccgtccgagcagcagcagcagcagcctaacaggattggggatttttttttgcttcgtgttctccttctcctgctgtaggcgttgattcgggtgatgagagatgggcttcttggcgtgcttgtgccgatgccctcaggacggggacgacgacgagaaggagggggagcagttcagaatcaaccaccaggtcgcctcagtggact

SEQ ID NO: 384536 - DNA, 288 bp, Zea mays
gggaactcaaaaatagatgttgaatcttcacatgaggtatgctttatgaacttaacacagcaagtttatgttccaccacacttaactattcaattaaaccacaccacagagcacaaatgttttaccatctaatactcctgaaaattcccccatcgcattagaaacgccaacgaaaaggttcttacaactcctttttttctctttttaactttaaacatttactttaccaattaccatgacaaatattgttccttaatacattcctcatgaaagaaatattgtcacagg

SEQ ID NO: 384537 - DNA, 268 bp, Zea mays
gtttctgccagggaatagcttctctccaaaaccaccgcattgagaaccaggcagtttgtacgacaaactactctgtgtaacatgattcagatttcagaggtagcaggaatgttgttgattcttctagggtagctgtacatttttttaaccattctgtgcataaaggggagatagcagtacagttattcaaaccaatcaaggaggttggcaacatggtggcaagatacatatattggttttggttagcaatgtttggttccagagacta

SEQ ID NO: 384538 - DNA, 214 bp, Zea mays
ccgcaagcacgttcccgtgctctcgcagctcgcttctccagaggcgactagggtttgaaggctaccgagagggtgctactgacccaactcctccgaccgcccgcaggcgaaggagctctccgccttcccgccctcgtgtcatccttcccatcgcgacccgcgaggccacgagcccacgagctccagctcttgttattcggaagggttctggatt

SEQ ID NO: 384539 - DNA, 289 bp, Zea mays
ggaggcacaagggagctgcattacaattcctagaaaccatccagttccccagatcccagaggaacctgcgcatctgttcgcttcagctagtgttaaatctcatgctggagtagagataatgaatgaatgctcagatatcaaagaaaagatagttcttggaggttataagcaactaccagagagcactgtgtcacacagattgactgcatcacagaatatgagcagcggaactcttcccagtaatctttctgcatcttatgccaaaactcaaggatctgctggatcacac

SEQ ID NO: 384540 - DNA, 210 bp, Zea mays
ctcgagccgcgcccacacgcacgtttccactccgaccgggccagagccccccgccggccaccgggcagtttccgttcgctgttgcgatccacctcctgcctgcacatcccctcccccgggttcgagccggagggccaaagagtagatctgcggcggcggccagaggatggccgtcaactgggagctgcggggctgctgcgaccacgacca

SEQ ID NO: 384541 - DNA, 240 bp, Zea mays
gttcttgataatggaacacagattatcggttcaaatggctacaaattgggtttctttgacaccatcaaaggctatttggttagcttctgggattttctgattgatttaatcagtggcaaatcctgcaggctgaacaaatgtcggagcttttttgacttcagctgccatgcgcagtacagatgcataacctggctcgtcatgttggtgctgctactttttatgttacccgcagcgcaattg

SEQ ID NO: 384542 - DNA, 255 bp, Zea mays
ggaaagtgttgcagatagatgtctctagtttaacgagctcaagtgctatgttgtcaattgactgtgagatggtcctttgcagtgatggcacaaaggctgtggtcagagtatgtgttgtagacgacaagcttaaggctaagttggacatactcgtaaacccatcgaagactgttgctgactataggacacacatcactggtgtatctaagaaggatttagaaggagtcacatcatcattagttgatgttcatgtat

SEQ ID NO: 384543 - DNA, 266 bp, Zea mays
tgatgacgctcccggaaaacctaattgtcccgcttaacccgagtagaatctttagcatgacagggctttggagtcctgctcttgctagatctatgcacgcagagtcctggcactagagatgcaaaattattgcatgtagaagaacatatatgagaagagatagaggtctcctaaaaaggagtatctatgagttgagttgtgacttagctgagagagtagaagtggtgcacgcacttatcataggtgcacaaagagatggttcacta

SEQ ID NO: 384544 - DNA, 295 bp, Zea mays
gtctgccctaaatgggtggtcaaggctatcgacaaaatcagaaggggctttttgtggaagggcagaaaagatgttagaggtggtcattgccttgtggggtggaataaggtctgtaaacccctaagtatggggggtttgggaattcacaatcttgaaattcttggttgggctttgaatctgaggtggctgtggctcaagaaaactcaaccagacaggccttgggctgagtttgatgtgcaagtccatcctaatgttactgccatgttctcagcctcagtttgctccatagtagggg

SEQ ID NO: 384545 - DNA, 266 bp, Zea mays
gagaaacccgcagagggcgatagaggtcagcgcgattcggagatgggcatgggcgacgaactgtgggacgactcggcgctggtcgtcgccttcgaccgcgccatttccacgttcaatgaaatgcattgcaagagcaggcgagcaacgccaagtaaggatgcgaagaaggaacacgctgctgctcctgcagcagaagaagagcccattatgctggagcatggatgagtgcagagagaagtgacaatgtgacaacgccgacattgagc

SEQ ID NO: 384546 - DNA, 205 bp, Zea mays
gtagccgtctgcctcctcgctttccctttcgtccgtacgccgccgcctcgcaccgccgacagtcctcagtccagaactccagatcgagcctccctctccccagatcgggtcctaggctacagcagccgccgcatccgtcaccttcacaccgcgtgcgtgctctctctcccccctgcccctctccgtgcgacgactgggtgggcta

SEQ ID NO: 384547 - DNA, 172 bp, Zea mays
ggggagggggtccaggccgcttgttcttgccgcgtacggttcttccaagaacccgcggcggggatggatctctacgatgagggagaggagatggccttacaagacggggactcctgcctcgcgccacgggacttgcggggcagatgcgaggtggacttgcagtgggcggatg

SEQ ID NO: 384548 - DNA, 286 bp, Zea mays
gtttctggcaagcattattgcaggatctgctttagagcagctaaaaagctatattcatcagtcagcaaatgagtatgtctttggctagccttttatgtcatgccattcatcattctcatccttgtattgtgtactgatacattatagagatgcattaaataattacaagttggggaattattcatcatctatcccatttggcttgatgaaaagatttgggataatcatagagatgcattaacataatgctttgagataaatatatttaagatagagatatttatca

SEQ ID NO: 384549 - DNA, 271 bp, Zea mays
gaccgttccgccggcccgcccgtacccgcctgcgcctacacatcgctgctccaggtccccatggcgacgactacgcaacccaccgcggggatgcgggatcccctgctccccacctccaccgccgcctcaccgccgccctacctcgacccgcatcccgccgactcctacacctacacggtcctccttgtccccgttcgcctccaccgcggcctctgtcgcggcggccgttgcatcgtcccctgcctcaccgttctcttccttctcgcgctcg

SEQ ID NO: 384550 - DNA, 278 bp, Zea mays
gtcgatcgatcccttctaggggaggggaattcaggacaggaggaggccaggttctcgccccgcaataggacgccgatcgattccggatcttagctcgagagtccggtgcccacttctcggtgctcgttgcaggattttacgggtagtccaaagaaataagaaacatgccagagacttatgttgatgagcaaccaaagggtgtgtctcggaatcgtccacctgcacatatgaatggtgatgaagaaaagtttatcctggccactcccgtgttgactggg

SEQ ID NO: 384551 - DNA, 163 bp, Zea mays
gttcttcgtagcgccgacgctccatcttctgctccctcccattgttgcgctcggcacgcgggtgacggcggcagcagcggcgctcaggatctgtctctcagcgacggcatcagaggtttcccgtcccgcttctatcaagtggcatcgagcactcgcctcgggt

SEQ ID NO: 384552 - DNA, 276 bp, Zea mays
ggttcctaaggcctagtttggaaaccccattttcccacgggtttttcattttcccaagggaagttagaacattttcccttgggaaaatagaaatcctttgggaaaatcgagttcccaaactagccctaagtgtgcttaaagccttaaaaaagcctgctgagttttcctgaatggtgtatcaggtaatgagatgggttcataggtttactcctttggccatggtgatgatttgaatacataatatttgtactcatattagttcgcagtgatggcttc

SEQ ID NO: 384553 - DNA, 278 bp, Zea mays
cggaatcgagtctgaagcacagagccatcagagactgaccagagccgagaccaaggatcctgtctcctgtgcactccggcggccggaccacggcgagtacgggacgtagaagtcgccccgcccctccggatcgtgttgctcgggaaattgcttccgagtagttcccgacgccgcgggcctctaagccgctgcctccgacagtctcgtgagtccttgactcttgagaatcgagggaacgcatttacggacgcaagactggatctgaagaggcgctgacg

SEQ ID NO: 384554 - DNA, 123 bp, Zea mays
gcctcgtagataaaccagcactactcatccgtcgccccacgcccccacggaagtttcggcggcgcggcgtgctcgtgatctcaaccattgcgtgcctccgctccggtcacccgtctccacgca

SEQ ID NO: 384555 - DNA, 188 bp, Zea mays
agctgatcccatactgctttgctagatgcctaacagctggtgtaaatgtctctacaccagctgatcccatactgctttgctagatgcctaacagctggtgtagagagatttccaccaggaacattgccttcacttgagaaaactgcagactctagtccaagggacttaccagcggatggaactatatt

SEQ ID NO: 384556 - DNA, 293 bp, Zea mays
tccctcttctctcctccccttgctcttctctggccgccgccacttgccaggacttcctgcagcagagcgcccctgcagctccttgcacctgcatcctacgcgcgctccagccgaccacgcccaggaaccagtgcagcgctccatcatcagtaggtgactgacggcacatgcgccaccatgccaatcatccatatgatccgtctcccacatgcctgcccgccgtaggctgcaaacgggcagggtcgttgtgtctacgctgcggctgcggctaccgacggcgtcctgattggact

SEQ ID NO: 384557 - DNA, 252 bp, Zea mays
ggctattagagggaactgtccattttaaagaattggatgagattattgaagatgcaaaagcaggattggagagtgaggttgagccacttgatggaatgtcggcaaagaatgcacatggtatcgtaagcaggttctcagctggtatcgctgtgcagaaactgatgctctacagcaattcaatgagctgactagtggttgagttctcctgacctgcatcttcgagattcattacctggtgcctgtagatttaaa

SEQ ID NO: 384558 - DNA, 101 bp, Zea mays
  unsure (1)..(101): unsure at all n locations
cggctcgaggtgcccgcacgccgcacggcntcgtcctcctgtgatgccatggtgatttggagttactcttcttgtctccatggattcattcccagagcggc

SEQ ID NO: 384559 - DNA, 281 bp, Zea mays
gtcggctgcttctccaagccggaggcaaggtcatggacagttgaaggatcagtcagatggaggaacatatttggttatggtgacatctgggatgcttcgggagcatatgggtgggaccagtcatcagagataagcattggagtatccttaccaagattgagatcgataccaaccccctcgactgctcgggcatcactcttgtctcatgactggctgaaattttcatcatacaaggaacgtctgcttggcatatcctttggtttgctttcggacatgcacca

SEQ ID NO: 384560 - DNA, 220 bp, Zea mays
ttggcgagagctggaagaactccgaggcggcctcgaatgcgcctgccatgacgggcttgctgacgcagtggttcaccacctgtcaatcggcaccacaaggatatggtagcgtattgatcagcattggcactgaagcatcacaccagaatccgaggtttgcacaacatggagtttgttgacttgatcactggtgagttgccgcttaaagttccatggtaag

SEQ ID NO: 384561 - DNA, 263 bp, Zea mays
aatttgaaggtacaaacatacggtatagtatgcattgtttaatagtttaatacagaaataaaagaatactgagaagagtacatcatttgatcaatccttatgaactttcagttatatgttttagtagtcacccatttaaaagaacctaaacgcctatggctgagttgattctatagctttgttttttttctaggattagctgcgacgaggctgttttttcttggaacagttacattatcttttggtagggtactgcttgattt

SEQ ID NO: 384562 - DNA, 293 bp, Zea mays
aatgaaggtacaagctcaaatttttttgacacaagtgcgaaactaacacttgacgataagccaacaatcaataaaggtaaacaagtcagcagtataacttttttagcacccagatataatgatgctgatcccccaaaatacttcaaagctgctgatgggaggcctgccagttataaccaatttctttaccaaggtcagaatagttcagctggatggattgcacgaagtcctctggaaccttctgttatcaataattttgctagagttgaccgtccacatcattcgaatctggg

SEQ ID NO: 384563 - DNA, 210 bp, Zea mays
  unsure (1)..(210): unsure at all n locations
cgctagtattaatcaacgaatgtaagatagggaactttctgcttctatgtcattgccttcagtatcaacgctgcatggagaaaggatggcagccttggggcntccttacttgctcctcctttcccaatagagcagtctttctgtcctgctctctgctgcccctcccaatagtacatgtacccaggctggttcttgggcaaggtagtgggg

SEQ ID NO: 384564 - DNA, 170 bp, Zea mays
gccgcccgctcgctcgcctccgctccggcagcgagctctatctctcgcgacgagcagcagctgccaccgacgcacgcttaccgggcaatacatactggtattggtagtgtgatatctataagaagtcaagatggtgcagttcacagctgaagagctccgcgctatcatgg

SEQ ID NO: 384565 - DNA, 239 bp, Zea mays
ggctttgctctgcaaccatgagctccctgtacgacgtctcctgcttcgccgcaaaacttgatggcaacgtcttcgccctcgccctcttcctgtcgccggtggatgcatcgctgacgaatgcgttgctgctgctactcgcctgctcctcgctttctgcacgccgtcctccaggccgacgttcaagagggtcctcaaggccaagtcgacggagcagttcgatgggctgccctacctgctgt

SEQ ID NO: 384566 - DNA, 185 bp, Zea mays
gatccgtcgacgtcgacgcgttcagccagtgcagctcggtgtacaacatagagaaggccgggagctcgtactccgaagattacagctacagcagctccggtccggctaggaaaggcagctcaccgtatgcgtattcagcgtcgccgctggttggcctgcctgagctgtcgcatctaggctggggc

SEQ ID NO: 384567 - DNA, 183 bp, Zea mays
atccacacccccaccaaactaccgaagcggaagggggggaaaatccacgcgacgacgacgcgacgatacgaagggaagggtcgcaggagcgagacatgtccccacccgggtccaaactctagccacctcccccgtcagtgtccccagatctcgctgcagtctgacccgcctcgcttcgatgtg

SEQ ID NO: 384568 - DNA, 298 bp, Zea mays
tatgctctttaatgtttgtgacaagccatagaaccaagggacataaggattcaggctacattggacttgttcacgagaaaggggtactttcttcagacaagaatgcaatccctcatttttgccttgcaaaacttctgcagaagttattgaatctatccactacaagtgaaagatatctcatagacgcagcatggttgttgattgaaatggtcaacgatagtaatacgaaggagaaattgaggaaacttcctgtgttgtctctgggaaggatggctaaatcttcttccctcccagattc

SEQ ID NO: 384569 - DNA, 247 bp, Zea mays
atgttttcttctgtttttcggattgaactttaaaatcctagcattttggccaaaatcctggatgtacccattgagtgcttaatttcaggtatcttggtgccttcctgtaaaactgttgtttcagttcctaattttcaaatttgttgcgcttggtattaacttctgcttgtacccatgaagttatttattaatgctttgttggactgcattttcaaataagttcctgaaacctgtgttttatggtatg

SEQ ID NO: 384570 - DNA, 161 bp, Zea mays
  unsure (1)..(161): unsure at all n locations
aagccacgcggattcttccttctgcgtttatgcacctcctcgcacccgcactgcatgtatgtggtagngtggtcgtcttcgaagctccctcccggcctcacgggctggatgaaacgaaccctcgttcgcactccttataaccgaacggccgaacccagcaa

SEQ ID NO: 384571 - DNA, 104 bp, Zea mays
gcaacatccggactgtggcatcctttgtttatgaagatgaaataatcaagaaagcagaattgtcactgcaagaacccttgaggatcaccaagattgagagcatg

SEQ ID NO: 384572 - DNA, 153 bp, Zea mays
gtaaaggaaaatgctgaaagaacaaatggcgattttcgcattgtagcaatcgatactggtgtgccccgccgcccccctgtggggcgacgtgtcaaagatcatgagaggtaccccaaagttgtggaactcattttgaatagttcggactactca

SEQ ID NO: 384573 - DNA, 220 bp, Zea mays
gtagagatgacccaagagatggtcacagtgatgttccaatgcttcccaatcaccgtttgatgtctcaggttggagggaatgctacgcatttggttactccatctgaaattatatcgggcactctctcgtcttctgaaaacaatgatgcttcaaaatctgatggaggaaaacgtcaagatgtttcctgcagaagctctcgtgttccagaagtggaaccaaa

SEQ ID NO: 384574 - DNA, 235 bp, Zea mays
gtcattcgcgcgcacacgcggtcgcagctgcggtgcccggctcaacgccgcggagatggagggcgacgccaccggagctgacggaggaggcggaggaggaagtggtgagcgttctagcttcgtgatcggcctcatcgagaaccgtgacagttgcaattagtcacgctctaaaacccctccgcattttccggttgctcgatacatccgtgcggattttgttaatttctctaatgac

SEQ ID NO: 384575 - DNA, 287 bp, Zea mays
gcgtgataaagatagcaccgcacctataacaagtgtgtcctggtccaggtatggccaccgtttgcttgcctctgctactgacaagtcattgacactttgggatgtgccaactggggaaaaaattgcacgtattactacttcagcagactccattacgtgccagccttcaacctggttctccaactccatctatttgtttggcatgccctctatcttctgcacctcttcttgttgatttgaatactggaagtactacagttctccctgtttctgtatctgagaatggt

SEQ ID NO: 384576 - DNA, 284 bp, Zea mays
gcagcagcggctgcagcaccaccagccgcagctcgggaccgtgccccatctcctcgccggcggctcgctggcgcagtcagcaagacctgcaccgccccgctcgcacgcctcaccatcctctttcaggtacaaggaatgcactcagatgtggctacaatgcgcaatactagcatatggcgtgaagcatcccgcattgtctatgaagagggttttcgagctttctgaaaaggaaccttgtaaccatggctcacgggttgccttactcttcaattagtttctatgcc

SEQ ID NO: 384577 - DNA, 228 bp, Zea mays
ggttgtgaagttggagaatggggacgggcctgtgacggtgggcggctcggtggacgagggtcgaggtggagatggcggtgacgacaaaggcctggctggtcagaatcagcctgctgtgaaccagcttttgctggcgccggctgaggaggatctggcattgtccaagatctcagataattccttcatgttcgattacaccactggtggcgatgactcggggactgagga

SEQ ID NO: 384578 - DNA, 280 bp, Zea mays
tgcatttctccttatgctattttcaaatatcatatttgtggcagagatgctatttaggcgacagtggctggatgaacaatctgaaaggatatactggaaaccgtgtggtgctcccatatactgttttagttttagttgcacttatatctgtggctttttcactgtacctggctgttacaccattgagatctggaagtcatgaagctgaatcccatgaatggtctgtgcattctcagagagaacgcttgaatacttctcaagaaagagaagatgttaaggt

SEQ ID NO: 384579 - DNA, 276 bp, Zea mays
ggaaaaagacatcctcagcaggatactgtaaagaagagagtaggtgctaaaggagtaaaacatgaccaaatcatttacgctgctgatatacataaaggcaatctaccaccaggagcggctgatgtagggttttcttttcctccacctttgcattctgggaaaaatcatgtagtctgatgctaaatctttgtggtcaaagaaggatgaactgtattgcattaatgatcctgatgactgtccaaaatggcatggtatcaaatgatatgcttgccacat

SEQ ID NO: 384580 - DNA, 215 bp, Zea mays
ctagccgctgcgggtctgcctgcaccgcgtcgcgtcgccactgcgccgacccgccacagccccactagcctgactccaccgccaccctaggtataacctctatttccgcatcatggtcgtagatcacgtaacccagttaggcgtctcccgttcgaaagagatacggtgtagatatgcagatctttgcatatctacaaatgtatcagtttcgaatt

SEQ ID NO: 384581 - DNA, 290 bp, Zea mays
gtctatcgtatgtcgttgtctctccaattattcttcaaaatacatgcctgtgcattaccatgtacgtaaatggaaagcaaggtagagttgttctcagccgtgcgtgtagggtgtgtgtttgatgaaatatcctaccaaattttttctcatctattaccattacatggcgtgcttaacacatattcatggaatcacggttgcaagacatttgtattgtgttgttaagcaccttgcatatttgatacattaattgttgtgcatatctaacatgtactaattgtgctttttgc

SEQ ID NO: 384582 - DNA, 251 bp, Zea mays
tgagataacttgctgaacctaaaaccaacagttcgactggccatactttgaattccaagtcagcaagcgtggaccgcccgcggagaaaaagcatgccacaagatagccagacaaagaaaatttcagctataatgcagcttgaccagagtaaatcagcaacactaccagaactgaaggtcagatactcgcaagctcctgctgttgtgaaaaatgcagtagctagtagagagaaaaagaggtttcagctggag

SEQ ID NO: 384583 - DNA, 260 bp, Zea mays
ggttgatgcagagatgtcgggaagctactccgaatgatcgccctacatttgaggagatcattcctgaaatatatgatatccagggacaagcagagagaacatcaggggaaaggagccagacagaggaggaccactcatgtaataaagattgattgacaccctctgtgactacatgttgatcaattgctcgcatcgggcggtaaaatgctgagacagtagcatatcatcagttttgatgccatggataaaaagtagtcgaa

SEQ ID NO: 384584 - DNA, 260 bp, Zea mays
  unsure (1)..(260): unsure at all n locations
gtaaacacccatcttggagtaggtgagtattgttatttagcggtggtgctaagaggtttaaataatgtttaatgatacagaacaacaagttttaggtttttattgctacacaatctagtacaaaaacagggccttttagtcccaattaagttggggtaggctagagatgagaccctacggaaaggacaactcatataaaatatanacaagcattaacactcccccatcacataatatcaggcgtatgtttcattgtgacg

SEQ ID NO: 384585 - DNA, 283 bp, Zea mays
gcaagtccgagggaaagggagaggaagccgaggcggccgtggggagggacgagaagatgaggcgtgcgatggaggacgagcggttcgcggcggcgcggactgacccgcggttccggccgatgcggaggaaggaatccaaggtggcgctggactcgaggttcagcagcatgatgacggacccgaggttcgcctcgtcggcggcgcccgtggacaagcgcgggaggcgccgcaagaaacgcgagaaccccatgctgcattactatctcaaccaagaggacttgga

SEQ ID NO: 384586 - DNA, 270 bp, Zea mays
aggcatgcaaggctatttggtacctagctcatgctgttgacattatgtccattggtgcacaccatttttcatttcccttagctaattcatggcgacagatacattcaatgcaagagcaaagttcaaaggcagattcaaactctaccaatctgattaacatatttgtcaaatcatttctcgcctcacgaccaattcaggttgcagtttaccactgcttgcataatggtctagaatcagctattcatgcttgtcttcagcttatctcaaggg

SEQ ID NO: 384587 - DNA, 284 bp, Zea mays
  unsure (1)..(284): unsure at all n locations
ctggcgcctgcagttcggaaattggaggatctccagtatttgtaagtctctcacacaacgaccggnctcggtttgcgcggagttcgacgttcaaccgtttgatctctgataattcttcacgtatgcgccatgtcttcgcctgacactgcccgctggtaggtgtgacactgcctcgctactgaacgaggacaacctgtaggtgaaactncggatgaggagaactcagtgcaaaggtgaacccgagtgagtgttnacgctacgttcagcatatgggtcctatgcta

SEQ ID NO: 384588 - DNA, 274 bp, Zea mays
gtagctagtaaaccacaagcagaactgatgatgaacaatcttgtgcttgaagtgcttttggcaaatctccatgtgactcaatcctctagagtaaaggaaatctgtcttggaatcctgggaaacctagcctgtcatgaatctctagtaaatgttatcagcctgcacaatggtttgactgctacggttatggatcagctatttctagacgactctgcttgcctttctgaagtattcaggtttttggctgctgttttacgtaccagtgtgtctgttt

SEQ ID NO: 384589 - DNA, 282 bp, Zea mays
atcgacctccgcccattccgttcgcggttgcctccgcatccgcctccgcctccgcgcctatctgaatccagagccacggcagggtaaccaaaccctaggccctcgcgctcgtggtatccatgggcttaccgcgtcccggtggggagcccggatccagagctagggttccgtcctcggcggcaacgccatggagtgggacagcgactccgacggcgccggcagcgtccgcgtcgacgagcatgaagaggagcatgagcacggagaggaggatgacgagcgggg

SEQ ID NO: 384590 - DNA, 280 bp, Zea mays
ttaccacctataataaattgcacgagatttgccgcgaggttgcatctccatcccgcatcgcgcatcgcatccaccggccactgccgagctttctttctttctttcttttttctttgagaagaggaagaagatgggaggcgcgacaaaaagggtgccgcgcccccgcatcgcccccgacgccggcatctctccctcgctctccttctcccgatctgatccgaagcgcggcgtcgacgacgacgacctaagggcacgatgcattcgaccaacctgctgctgg

SEQ ID NO: 384591 - DNA, 301 bp, Zea mays
ctcgagccgcacgatcaactgggctgttaccgtcatcggctcacgaagaggaaaactaaggagaggtcattctgatttatcctgagtcgcatggggtattatagctaaccgattccgtaaagaaggctcttagaaacagcatgctctatgccatgcgagtggagagtgttatgtggaattgggggcatagaaacgctcgctccagttagaaatgtgtgtttgtgctaaatgtgatctactagtcctccattctccgtggtttcaatttccttcaattcttgtacggacacttagcttgagc

SEQ ID NO: 384592 - DNA, 307 bp, Zea mays
gtttcccgtacaatttttgccggtcctgtcttcggtaagacggattccgattccgttgttttcttgccaaatccttcgcagcttgggggcggtttcgctccggttcttgcgcttcggctccaggccatggagcagcggaggtggctcgcggtagccgttttgatgtgcctgctggtgctttgctccgggagagaactgaagaccaaacatgtgcccatatatgacccagtgctggcccggacacttgctgaatatacttctgctgtctatactgctgaccttacccaactgtttacatggacatgtg

SEQ ID NO: 384593 - DNA, 192 bp, Zea mays
  unsure (1)..(192): unsure at all n locations
ggaacttgtccgaagataccctgaagctatacttctctaggttgagcatcatgcaggtttgatgaagacattaaaaaacgccagttaggtcatggaggattgaagcactatgacaggatttaaccatgatatcatatgtattatattataatgtgtaatcttanaaaaactagtcaaattatcatgtaagac

SEQ ID NO: 384594 - DNA, 288 bp, Zea mays
tatgaaaccaaatttaaagctgcaagtaataactagaaaaactgatttgacaccagtgacgtttaaacttatcaaagggtgccacttaggcccttgaactttgtaagtgctttttgggtccctaaatgtgttttatggtgcactacacatccctaaacttgtaacatggtgcatcacagatctatttttttggaccataccgaccattgtggtacacacttaacaatttatggggcctagaaatgtgttttcaaagtttatgggaccaaagtggctcctcttaacgac

SEQ ID NO: 384595 - DNA, 280 bp, Zea mays
  unsure (1)..(280): unsure at all n locations
ctngatcccaaaatctcaaaccgtcaaacgggacccgacacctgagatacgcgcatggcgtcgccgcgccgcattccctctgttgctgccagatccggcaacaaagagaatatatctcaagatggagatgctcccttggattttgcaaccttgcctaaagaagggcctgccactacaaggcggaattagcagcttgcaggtttcatcttgaggacacgctttgcctggaatcctgctttttaaactcgaagaaggtgttttggataactcggagctttct

SEQ ID NO: 384596 - DNA, 227 bp, Zea mays
atttgttgcgattcagattcagaagagccacgtggaaaggacattcccctaaaaggtatggagcctattactagttgtggaccaccagatatttctcgtccattccaaggaacacccaaactgcaatcttctacaatggtctcgttcaagaaaagttgctgataacatttgttccctgagccattttgctgtggatgttagttgggatcagagttgcaactctctac

SEQ ID NO: 384597 - DNA, 260 bp, Zea mays
tgggttgcttgagaattttggtgtttcagtttctacttggacttttcttttgtctaacaatacatgtgctattagtattgctcgtgatctggtctatcatgagcttactaagcatataggtgttgatgcctattacacgtgtgcacagatttagtatgatacgattgaccttcgttgtatgtttatagagctttagttggctgatttcttcacaatggcgcagaccagggctcagcataggttttatatctctaaactca

SEQ ID NO: 384598 - DNA, 312 bp, Zea mays
gacctatcttatttcagtagatgaatgatggcgacaaaagccatccatccatatggcgaaccggatggtgattcgatagtttagccgacacatcggaaacatttcactcgtccttcataaataactacatggtactaaagactgactttcacatgctgaacacaacagaatgaactcgctagacttctgtaacatgtagttatttatgaaggacgagtgaaatgtttccgaagtctagcgatttcattctgttgtgctcagcatgtgaaagtcagtctttagtactccctccatttttttatatttgtcgcg

SEQ ID NO: 384599 - DNA, 309 bp, Zea mays
ggcattgccgtggcagcggcaaccgtgtcgccgaagggacgctgccgtccgcgtcggcgaggaggctcgtcgacgcgttctggcacaacatgggcagcggcggtctgcttgacggggacgcggcggcggcgcgccggagacacgtcctgtggagcggcgcctccacgaaggtgtccaagaggtcgagaagtaagagcaagatcttggagggtgatggtaagggaagtcggcgcaacggccatgctcggtggctttcagcagatctgatgagtaacgacagtgcaatggaggttggtacattctctcaag

SEQ ID NO: 384600 - DNA, 233 bp, Zea mays
  unsure (1)..(233): unsure at all n locations
atccgcctcaacagtccaaccctccggatcgacgtaagcgccggcgacganatgaaggtctccgtgaagacgctcaagggatccagcttccatatcgaagtggatcctaccgacaaggttgccgacgtgaaaaagggtatagagagtatagagagcaggctactatcctactgaccacaagtgctatacacagcggacgtctcaagacgtacagatggaggagaccagtagtg

SEQ ID NO: 384601 - DNA, 109 bp, Zea mays
  unsure (1)..(109): unsure at all n locations
cttatctgatgccaaagctcacatatacagaaggacacttgagaaatcatttaacactgaattagcttcagtccctagcaaagcagcatttctccanactctttgcgaa

SEQ ID NO: 384602 - DNA, 291 bp, Zea mays
gctgctttgcgcagtaagtaatagcaagagttatagcagacggttttattttgtagtacgcaagactttcgaagtgggtgtaagttctcctagagtggtggcagaggggggatggcgaagaaatgcataattctgacatcgcttttcgggccttccctggtaaagatggggttgttccacgttaagaagggtcattggcccagattgagaaaccactgccagagcccaatcctgagttcaacccattggcagccaaagcagcaaccatcagtctatctgcatttggagggt

SEQ ID NO: 384603 - DNA, 293 bp, Zea mays
  unsure (1)..(293): unsure at all n locations
accaccgatgcccccatctaaattgcttaataaaaagggaagcaacgaaaatggagattctgatgtcaatcctaactcagttgctgctgctgctgctatgaaggaagcaatgcaatttgctgaagccagattaaaagctgcaaaagaattgatggagataaaaggtgtcagctctaaattccgtaagcggccagttcatcacaaaagcacaaaatcaactgaaattaaggaatacaatgcacctgataaagcacatctatttngagacaagctggatatgagaagattggtaa

SEQ ID NO: 384604 - DNA, 284 bp, Zea mays
ccaagggacccaagccaaactagctagcctgcacttgcacccttaagacatacagcgagagagatgatgagagcggccgtggtcggtggtggcctaagcgggctagtggcggcgcatgagctggcaaggaacggctgcgcacgcgtcaccgtgtacgaacaggaagaccatctcggcggcgccaagaacgtcgccgtcaatggtggatcaggccctgttactggtcgacctcgacttcatggtcttcaaccgggtgacgttctcaaacatgatggaatggtttg

SEQ ID NO: 384605 - DNA, 280 bp, Zea mays
acctcatctgccaattcagccccttgttcaaaatcacagcatcagcgacacaagcggcacaaaatctgccggatagctcttcatctcccaaccaacctgccacttttacacaacagaagcagaagaaacaacaggaacaacagcagtctagacaaaatgagccacaaaggaaccgtggcagtcaacaagctaagcttatgaagagtttaggacgaggaaacatgatggcccagactcctccaattgactgcacaccaaccaatgctgcttctactccatc

SEQ ID NO: 384606 - DNA, 106 bp, Zea mays
tgacgcggcggtgtgccgcaatcggccaatcctcctattctacccctcaactcctcaagcctactccgataacagcgggcgctgggagcaaacgaaaactaaaacg

SEQ ID NO: 384607 - DNA, 281 bp, Zea mays
  unsure (1)..(281): unsure at all n locations
gcggcccctggcggcgagccgcgctgtgcgagtgtcggagatggcggggcttcagcacctcggccgtcctgggccgccggacacccccgctggggccgatgcccaacagtgacatcgacttgagcaacctggagcggctggagaagtaccggcgcttcgaccgctaccggcgccgagcagagcaggaggctcnaggcccgcactggtggcggacctaccgagagtatttcggggagaagacagatcccaaagagaagatgatattgggctgcctccaccca

SEQ ID NO: 384608 - DNA, 288 bp, Zea mays
ggctcatgcagcatatggtgagtttcaacatgagaggcatgatgatcttgggagggcctataggcgatattagctgtgaatagtggtgagttatttagttaattacccatttcagatttttgatgttaagccctgcagttctaatgtagctagagataatcatttcgttgtttgagcaattggtgtcctgctaggtaagctaattaaagagctgtgactgtcaatagctacaggcttgggaagcctccgtcttattagaaaatgttgaccaaatgttcccttcctaaa

SEQ ID NO: 384609 - DNA, 273 bp, Zea mays
accggatccattttcctcttcggggagcggattgggtagttgcctgcttagtggagtagttcttggcgtggcggctaactattgtgaattttgttttagtctgtcctgttggcttcttccttccgcttctcctttctggccgccgaaggcaaaccacgcggcttgttcttattgaatccatcaaggacgcaggaaagataggatcttcggctccgattctcggagcaacagcgcgaccgcagcgggttttggtgcttcctttctttaaggttg

SEQ ID NO: 384610 - DNA, 300 bp, Zea mays
caatccaatcccttaaccccgcaccgaatccagccttcgaagcttcctcttcctcccggtcccggtcccggtcccggtcccggagccctgttcttggtacttaggacaagacgctacgagaccctcgagattgagagctcgctcgctcgctcggtgtcttcgccagctgcccaccctccttcctgagtgtccccccgctcgagcctcctcttcctcggactgatgggcgaccatctcgcgttgatcgtggaccggctgctgacagagtcgacgctggaggcggcgatcggcggtgggaag

SEQ ID NO: 384611 - DNA, 220 bp, Zea mays
  unsure (1)..(220): unsure at all n locations
ggctgagaacaatgataacatgcagtttccccctcatggtcttccacacacattctgcttctaangaatgcccccctatgtggaatccagagtactggcagcatacgcgctacgacccatctagtggagccaatatcgactttagcagcagcccacttacaattcccagtatatcacgggaacagtatgtcgtaggaggtcttgcacatatgggcccatg

SEQ ID NO: 384612 - DNA, 153 bp, Zea mays
agtacctctcagcatcttctgtacataaagagatttaacttatattcatttattagagaaatctctttatgtacagaagatgctgagaggccataaaaagatttctctaataaatgaatataagttaaatcaacacaaatttcgattttgaac

SEQ ID NO: 384613 - DNA, 294 bp, Zea mays
ttcggctgtgaatagctgggagctctagttagtttatatctgttcaaatctctagtttgcagtcatttgagaaacggaggagatcatgttcgttaaattgtgtgcttgttgctctggagttaaattaaaactgaaatttagaagctgcatcaccagtttcaggtcagaagaatcaaaatctactcttccaattatatggggcctggcatttgcctgccactggaatgagcattaaaacttgagaatcgatccaacttgtacgaaagggggcaattcaaatctgtggctatgcgg

SEQ ID NO: 384614 - DNA, 259 bp, Zea mays
tttagaatggttacacaaataataaattctcttaggataacccacattcatactgtcttctaagcctttgagttcctaaatgattttgtaaatttgtatacctttgagttcctagatgattttgtaaatatgtatactttaaagttcactgtgtcacattcactggatttagcatatatgaaatgtcatgtgactgttagagtatctactgtaaacgtaactttaatttgcctcatgtaattgtcatatctcaagctta

SEQ ID NO: 384615 - DNA, 294 bp, Zea mays
  unsure (1)..(294): unsure at all n locations
acttcgatctcttcactgccaccatccctctgctcgtctcgccgtcgactgtgtcctgtctgtgctgcagcgcagggaaagttagctcctgctcctgctacgatgcctcgaccccgcgcctctccacctcctccatcctcctccacgtggttgtgctcctcgagacnccgacacagtctcctcgtcgacggcagcaagctgtcatgtccttcgccaacataaaccgtgcgtcgccgcttctcacgggtacgtcgcacgcagatcggtcaactgcggtcggtggcacgccactcg

SEQ ID NO: 384616 - DNA, 259 bp, Zea mays
  unsure (1)..(259): unsure at all n locations
atcgagccgggtaaaattagtgttgttcatgtgaagtctaagtaaaaatacaaattagtgtgtgaagggcgcaatcgatatacacatttataccaggtttgattattgtggtgaatgtgtttgtagattgtgtacggtaattctaacgcgcgaaataatttgtataaatattagtaagtctatgtgttagttctcacttggtcatttcatttctancaattgttaaagagttagaataattcaatatctagaacgcggc

SEQ ID NO: 384617 - DNA, 227 bp, Zea mays
gcagttcatgaggctgtctcatctgggaagatagaggtggtgaatatgctggttgagatcggaactgcaccatcagctgaacaggttagacaatttgcagctcttgtgtcagatggcgcagagaagcccagttatctccatagctttgaatgtgtttctaggacgtctgcaatggtctcaagatggaaacaatatgttactcgctcagagagattggctgttccaaa

SEQ ID NO: 384618 - DNA, 204 bp, Zea mays
actagttctagcagagcagccgcatcgaactctacctgcctttctctcgtccctggcggcggcggcaggatggcggttctactggagacgtgaagtgtgacccacgatttcaggctatcgccactcaagtcgcagtgactctgtggttaatggaactcagttagagtcctcttagcctatgtataataggtgactgtagcagag

SEQ ID NO: 384619 - DNA, 219 bp, Zea mays
gctagctaggaagaggtacggtgctggctaagctagctagatccatcgtccatggagctgagagcagcagctacctatatatctagctggttttctaacgacgatgacgacgaccgcgggactagcatgatgcagctagctgaagacagttgccctgcgactgtcttcagctcgaacaagatcgaccggcccggacaggaatgttcgcgctacgttgtc

SEQ ID NO: 384620 - DNA, 272 bp, Zea mays
  unsure (1)..(272): unsure at all n locations
accgcgttcacggttcacgccaacgaacccaacttcagaaaaagctcgttctgcccccatccttcgcatcgaaacaaaccctccgtctccagaagaaagcccaatcctaaatacccaatccctcaaaggaangacgactctccctttccttctctgctggctccgatttgcagtcgctgcccggatccgaggaaacaagtcgtcgtcttgctccaccgtccgctcgccgccatgagcttcatcttcggctagaagccgactcctgctgagct

SEQ ID NO: 384621 - DNA, 250 bp, Zea mays
  unsure (1)..(250): unsure at all n locations
cctgaagggtgtgaaggatttcctgtggaagcacgggggacggatgcgatcaagtggtctcgcttaggatttcagaggatgtgcttgccaagtgcgagaaaggccctgaatgcttgagcacaggaacgaagaaggggactgaagagctgattggaccatctctgaagcagatanaagcaatggtggctatggctctattagtacagcgtgtcatggagcttccagttctggaagtgcttcacattctgct

SEQ ID NO: 384622 - DNA, 265 bp, Zea mays
agagcatggaggtgatttggagatgccaggtgatagctgtgttaattctgacgaaaacgctgtgctttcagaggatacactggtgcaagcagatcaattgtgttccagtgatgaggtgcagaatgagaacacagaagctgtaaccatagacagtcaggttgagctttcaggagatcagggtgggtatcttcctcagtcgggtgttgattctggagttcaaccaggggagaaggtagagagtaaagatttgcctagaccaccgaga

SEQ ID NO: 384623 - DNA, 286 bp, Zea mays
  unsure (1)..(286): unsure at all n locations
agcatgtgctgctagagtaaccaaggcaaatatgctttctttttcttgcagcactgtggtttatcgtttcggcaaacaatgtgggctgctgagtaagaggacatatctggtgcaccaatcttccatgtgcattagatatgttctcgctgagtaatccacctgtggcaaataaataaagcagtcagttctcagtctgtcatgatttcaagggctgtttggattactcagcgagaacatatctancatgagtggtgatgatttatatgtgcagcatgtgcaccatctt

SEQ ID NO: 384624 - DNA, 302 bp, Zea mays
ggagagggatcacacagaattctccaaagccatgctgaaacttgtgaatgatcatgatcttgctgttagattgggtgaacaagcacgtgaccatgtggtgcaaaaattctcgaccaagacatttggtgatctcctcaacagctacgtcttgaacatctaccatgagaggatggaatgatctataatactgggtcagccatgccatatgaaaacaatttgttcaatacaaggttttttttgcacctttacgtctaatctgattttgatagacacacataatgacaatgacactccattgaagc

SEQ ID NO: 384625 - DNA, 196 bp, Zea mays
gccaagctgagcttactggcggcgagctggagaagaacgaaggagcatggccatgccggcggcgctgcttctcttcctcctagtactctccgccttcgaggccggggagcttccacgctgctcggctgctgctgcaggtaaactcggcagtcctcgtccatgatgacttgagtgcggttcaagacaccagccccat

SEQ ID NO: 384626 - DNA, 290 bp, Zea mays
ccgccgcctgcgggcccgccccggtgaggctccgtctgatcttcgaaaacagccgtctcctccgacgtgtgcagaaggatgaaggccttcggcgctgctggcttctccttagcccagagctcgccaccgtcgccaacctcgctgctcatgtcgcagcccgtttccgccttcgccgcacctgcccacgcggcgttgtgctctcaatggatgggtttaccttgccaccatttgagtcaacctgcatctttagggacaacgatattataagggttaaacaaaaatcctgtacg

SEQ ID NO: 384627 - DNA, 296 bp, Zea mays
  unsure (1)..(296): unsure at all n locations
atcgcgtgtagtgtctagagcgactggttcagcctcttgggcgggctttagtcgcagaccactcgagcggacgtgaaacaggtagagacggcgaggtcgccgtggattacgagctcccatgtggcgcactctatagcgtcaacctcagcggtgcatccaacatggtgaccatagcccgggtaatgggagtaaaatataccttgcgaacttgtacgatgatcatgctctccgntataggaaagtgtggatgcaccacactctattggccacgataggtcaagagctcaacagaaggg

SEQ ID NO: 384628 - DNA, 175 bp, Zea mays
agtcaactccacttctcttctccgcgtcacatcgtcttcaccgtagccgacgcttcaaccggcatccatccattgatgacgagcacgacgagatggaactaggcactgggatccaggagtgcatcctcagacggtctccgctctgtagacagactcaagggtttgcatatagaca

SEQ ID NO: 384629 - DNA, 309 bp, Zea mays
ccttccttccctgtgctgttcactagatgcctatcctgatttgatgagatcttccatatactcacatccttgtttgttctctcctttcgtagcttagcttgtgccatctttttataccccatcaattcttaccaacacgacttccgaggcgatttcaatatcaggaattggaatttctggcataattgcctttggatgtaaattagatgtacactgttgctagtcactagagtaaaaactttgtatgccagtgtgacatctaataacattaagaggttcttgaacagaaacatttgccgcttttgttta

SEQ ID NO: 384630 - DNA, 226 bp, Zea mays
ttaccaaccagagggaaggaggaaagaagatgaggattggattctcctctacccttgcttccttgttccatgtaggttcccctatctagctaacgaccgctaagctttcaggtagagatcaaaacgaactggaaaattcacgatttatccggtatcatatatcgtttttccttagacctatttcgcaattgcaggcacaaaacgggaacatggcagacacgatata

SEQ ID NO: 384631 - DNA, 297 bp, Zea mays
gataaagaagagaaagctaccagggcttacaatttagctgctctcaagtactggggaaccacaacgactacaagttttccagtatttgcatatatttcagttcacttctcaagaattatactttttttcctttatcactgcttcctttggatattatacgatttatttttcatgcttagatcagcaactatgagaaggacctggaagagatgaataatatgtgacgacaagaatatgttgcgtcacttagaaggaacgcgcggtcaaaatcaagatttcaggaaaagcagtggattt

SEQ ID NO: 384632 - DNA, 219 bp, Zea mays
ctagctagcatgcacgccgatcaccaatctctggcgtaatcttgttcatcttcgatctcctccatctccattcatcctctctctcgctgtgtgaggagaactgcctgaccctgctccctcttcagctactcctcgcgccccgctcgccattcccagacttcttttcaggccgcgatggaagactaagcccgtgagatgatggagctcaagacgctgcgt

SEQ ID NO: 384633 - DNA, 206 bp, Zea mays
gtcagagtcaccattcgcttagatccacacgggttggtttcagtcgaatctaccgttttgctaaatgattatcaaacgaatggatgttctactgaccatatggaatgtggatagcacttgtgatgagatttgtcacaagtctagaacgtgtaaggtctatccagcggcattaactgccgatcttctttgactatatggtgcaatga

SEQ ID NO: 384634 - DNA, 296 bp, Zea mays
actagctaagggcagagccaaatttggggattcttcaactgaagccttgtatagatatagtttgaaagatgatgaacgaacacagagaggaggatgccttgagaggtcaagcagtcaaaaaccagaaggcgatatgggacaagaccatggaaatgagattcttgctgcagaaggcgttttctacttccaacaagttaccccaggaatccatcagaacaaggttttgcaatcatgataagcagatagagcaagcatatgatgatcttttgaattcgacgaaacatactttgagcagc

SEQ ID NO: 384635 - DNA, 296 bp, Zea mays
gatgggtctagggtttacactgttgtggttgtggagattgatgatgcagatggtatgagggttgtcgttgggaagcaccggcatgcttgggtggttggaaaagctgatgaggttaaggctgtctcagttattggcaaggtatttgccaagtatttcatgaatgggggtattgaggagggtgaggcatgcattgggaaaggcgagttcatgccagttggatcagatggcaatgtcgttctatcctttagcttgctgaatgctgatccaggtgattgggtgtatgattgggactttga

SEQ ID NO: 384636 - DNA, 291 bp, Zea mays
cagaatcgccaaggacagcagcctcctggaattctcaagaaacctactgagggtgattcaaactcatcaaaacaagtgaaccttgtcgaacctcttcttgaaaagaggaggtaactctaaaaacgtagccgataaaacgcatggaatcaagccggaagagcctatggtttttgctattataacaagaggtaaatatagatgaactcgttgtaaattccaacaggagcttttggtgtcatggacattagtcatgaattctctctccccctctcacttctcccctctttggtt

SEQ ID NO: 384637 - DNA, 297 bp, Zea mays
gcaaatactttgttcagcttctcatttgtgccttccataatgtaccgtatccagtgtctgcttctttctgcaaagttgaaaatccagttgggcccaagaatgcaacagttcaacataacagctatgaagattctggaagcacttacaacaaaggaatgccaggagaaattttcaatggaatcattagaaacacttggagattctttcattaagtatgttacaggccaaaatctttttaacaaatacaaacatcgagaggacatgctaacctctatgagagaagaaaaggtctccaac

SEQ ID NO: 384638 - DNA, 293 bp, Zea mays
  unsure (1)..(293): unsure at all n locations
gcacaacatgacgcgcatccaccgcctccgccccctcttcctcttcgttctcttggcgtcgctgcaatgcggtgcggcgacggcggcggctggatacggaggtggcgccgaggggttctgctcggcggagcgntccagcaagtgctccggggatcagccgctctactggaaggtcacccatcccaacctcgcgcccgcgcacctccaagatttacctggcttcacacgtagtgttttcaaaagggatcatgctttaataacaccagagagtcatgtattcagtcctttgcctg

SEQ ID NO: 384639 - DNA, 119 bp, Zea mays
aattcgtagcaggaaagtgtgaccagacatattggatttatgtttcagtgcatgtacataaatccaattcgtagcaggaaagtgtgaccagacatatttgatcctggtgcttcattgtt

SEQ ID NO: 384640 - DNA, 183 bp, Zea mays
gacggcaagacggccactcccatccaacactgttccagacttccagtccagcgcccggctaatagccaagcagagcttctccctagcctttgcttgctcttccacagcgcaaagctccgagatgatgatcaggcgcggcagcagcaagatctcctcacccctcgccctcctctgcctcctcct

SEQ ID NO: 384641 - DNA, 245 bp, Zea mays
tgggatttctcgacctgtgtgtttaggtcttcttaatataatgcctggggctgtcttacccccgcaagttgatttttttccaagaattaactcggtagcaatgcattcaccattttatgctggggaaacataatatactcatataatgtatggatcttccattgtcaaaactctacacaatatttttccaagatttctgtcaccattttattattgaattttagggtgaataagaggatttgtca

SEQ ID NO: 384642 - DNA, 287 bp, Zea mays
  unsure (1)..(287): unsure at all n locations
ctgcagaagctccgtacggccgtgtcgccctccattgaccatggagctgtgaaatcttgcgtgagcccttacgcatcttacgagccttccacagttccacctctcgactgntggacactaggcttgactgccccatgccgtatccaccagcacgagtggagatactgaggcacgataccgaccacttcagaacccgatttggtggacacctacgatttcgctagtacttaatcccaattacatcgacaagaattgctcctctaagttctatgggagcgtctctgatc

SEQ ID NO: 384643 - DNA, 272 bp, Zea mays
ctcatatctgatgataagttgtgggaccagaatgcctttaatgatcttgtacgcaaaaaatttggacagccagttcaaggagatgatcgtgtatattgttatgatgggaaactgaagctgggaatgctaccggcaagtatattttgcagcggtcatacatattttgtgcagggcatgtataagcagctatcatttggaaccatatgctgttcatactacttttcagtatgcgggtactgaaggaaatcgccatagattgcgagaggcaatgc

SEQ ID NO: 384644 - DNA, 111 bp, Zea mays
cccacctcaggcgctataaggcatatgtagaaaacaacgatggaaccagacgactggacttgacggacgaagtagactttggtaactcagagagcctaagaggacgtgttg

SEQ ID NO: 384645 - DNA, 238 bp, Zea mays
gagcactcacttcagagctggaatcatgtacgcgtccagtgattcttccgacgagccgcttttgaagtccaacatgttctctctcggtggctccaagttcttcggcgcagtcagtagaagcatcaacctgggtgggcagagcgctcttgctctgcgtctgctcctcgctgttttatcgtctaaaattgcttccagtgcgaaccggccgtttggagaagagttccgggaagctagaagg

SEQ ID NO: 384646 - DNA, 285 bp, Zea mays
catactctaaccttcaaaaccactataagccctaaaagtaatgccaacacagagccaaatatattaccttctataacagctccaaaaacttctctaagtccactgtctgtaaaaactgctggggagtctggagatttgcctacattaaccatgaagaacagacaggatggtcagtgcatgccatctttggggaacataagaggaccgggtgcttctctgcaggacaaaggtggcatatgttgaggactcgacaaatcgtcctttaattctgaacattccaagcct

SEQ ID NO: 384647 - DNA, 269 bp, Zea mays
ctttctctcaggaagttaaccaaggagcagctgcagccacttatcgataggcttgcggtcctcttacctaattggagggccgacttgatgtctcatgctggcagagctatccaggtgcagcatgtgctcacggcaacagttatatatcacgccatggctttggatctgcctaagtgggctatcaaagctattgacaagattagacgtggctttatttggaaaggtcgaaaggatgtgctcggtggccactgcttagttgcttggggcaa

SEQ ID NO: 384648 - DNA, 259 bp, Zea mays
gttggagaactgcagtgtttgtgactatattcaacacagtgaacactagtctgaatgtataccgatataaagatgccttaagccattttgtaattgctcgagctgtcacgggaagtctttttatgatagacgtatgcctgcgtggcctcgtggctggtggcataattggaggcttgctgggcactcctgtaggaggcctgctgatggcatttcagaagtactctggtgagactgttcatgaaataaaacagaaggatcg

SEQ ID NO: 384649 - DNA, 298 bp, Zea mays
  unsure (1)..(298): unsure at all n locations
cacatgcatgtcgtaggctgccgcccacaccgtgcaacatcgcaggcgcccactaagtcctcatgacgaccaccgggctacgtatcgaagccgcgctccgcacgacagacgagccgtanaagttctacggcggcccggctgtgctctacccgtgcggccacggcctcagctacaccaacttcagctatgcttccggcaccaccggcgccactgtcaccatccacatcggcgcctgggagcactgcaagatgctcacctacaagatgggtgcgccgtcgccgtcgccagcctgcccggc

SEQ ID NO: 384650 - DNA, 295 bp, Zea mays
gtttgtattcgtgcttgtgtgctggtagaatgcaggtagtttgtttgcataaacccaaagctaggtcatgtcctcgtttagtgaaccataacccaaatcgtcatcaatcctccaaaaattcctccaagtctccaagcatggatgagttcgagtttctcgttactactccatgaccgcttagataagctttttattggatgtaaaatgaacgcagacttaaaataaggatctcgagtacatgttctcgttgtttaatatgtgactcttttgtagtcattttccctccaaaatcatg

SEQ ID NO: 384651 - DNA, 289 bp, Zea mays
gcacccccactggtaatgccgtcgaagatgaagctggatgttgagggggtgcctggtcgggcgcccccactggtaatgccgtcgaagatgaagctggatgttgaggaccaggagctggctgacggcgcggtggtagaggaggtggtgcaccctgtggtgcgcggcttcgtcaaggactgggacgccatggaggacctactcaactacgtcctgtacagggatattgggtgggatattggggacgagggccagattctcttcaccgaactcctcttcacgccaagactct

SEQ ID NO: 384652 - DNA, 158 bp, Zea mays
gatgctattaaatgctaacaaccaaattatctgctgataaattggttgttagcatttaatagcatcaggtctcaacttaaaaggtaacaaccaatttatcagcagataatttgacttctgttgcactattttctgagcacataattgactgcctctgc

SEQ ID NO: 384653 - DNA, 288 bp, Zea mays
cccgctgtcaagctgatttgtcctatatttctcatttttacagaatctgtagttcctttgtgatgcaccatggttcttaaagcgttaaggcgaggcgcggcgttccaccaccttccggacgcctaggcgacgacaatacgaggcaagccgatgccttattatcatataaaggaataaaatggcagcaggatggagggagcacaagaaaaaagagagggagggagaagggagaaaaagagaagaggaaggggaaggacaaaaaggcctgccagcccaccagctcagccc

SEQ ID NO: 384654 - DNA, 262 bp, Zea mays
ggaaagaagaagaagaagaaaggagtttggttctgattcaacaaaacaatctcacgctcggaacatttgcacagctagttttgttgaatcataaccatctgcgtgtcccgatttactacgggggaaagaagaagaagaagaaaggagtttggttcttgcttttggtgtcctgatgtaatgtaacgagggccgcgccatgggctcattcaaatgtttttttttgttttaatagtccgaggaatgaaatgatggcttgtacagc

SEQ ID NO: 384655 - DNA, 295 bp, Zea mays
caccctgataggcagtcttatgctgaaattgtgcaacgcagagtactgctccaaagtgcgtttacggctgcttttgactttgttggacgaattctcagaaggtgttcagagctccatgatattgcatcaagcttctatctgccagccattttggtctatattgaatggctggcgtcccatccagagttggctgttgattcagagatggaggaaaagcatgcaaatgccaggtctttcttctggagccaatgcatctcatttatgaataagttgatccttaccaaccttgcatctg

SEQ ID NO: 384656 - DNA, 254 bp, Zea mays
cacgtagactcccccttccacctcgttcgcctccctggagacgagcgcctcgccgctcaggtcgccaaccgcagcttgttggtgaacggggtctacgagctctggggctatggcactacctacgaggacctggagaagtcggtcacggagtaccccgacgagagcaagcttccgttcctggtaccggaaagcagcttcaagatcgttatcgacagcttcggcaaggtgatcagctcccaagagcagaccgagat

SEQ ID NO: 384657 - DNA, 270 bp, Zea mays
ggtttctattcatttcatatggttgcctgaaatgtactacacttatttagttaaatatgttctattttttgtgcgagtaccttcattgtacagcatgggtaccgactggaaccaagttatgacacaatatggaagttacctatccgaggatgatgccactcagtttcagaacactgcatttgctccttcgcctgagataccagcccagggatcaccagcaccacctccagtgaagaaggctcctcaacgcacaaagctagcaaatttcac

SEQ ID NO: 384658 - DNA, 264 bp, Zea mays
gttctgcatagtattctgtgcagttatttgattgattcacattttcaaatgatcggttgaaactctgttatgcttgactagactgaatctagattgtttactaaaattgggcatgggttttaattgtagtggtttgtagctatctgtcattgtacactgattcaagtgacaacgatttcttttctgtggatgcattttagtaggattggccaccaaggtcgtggagtatatgttgcccaattttaatgcagtctggtgggatat

SEQ ID NO: 384659 - DNA, 210 bp, Zea mays
aaaaaaataaggaatccacaatgctggcattcatcagcaatgtcttttgaagataattttcacactcctctgtcatgcaggctcaggaatacattatcttttcatatatgatcgaatgctggaagctagggaagagacggataaatggatttacccttaggaaacaacaagttcatctcctcgaaattctataatatcatcttagcatcc

SEQ ID NO: 384660 - DNA, 263 bp, Zea mays
attctatagaagaaattgggatcttccttctgtttttcctggaaaaactgcagtgcttgtgtcatatcatttcctgttacttccttgtttaatttagttctgtagttacttacatctttttttttgtacggcaatgctgtcatacctcctctcagttaagacattatagcaatcatctttcgagtaggtatgttgttgtggttcaatgttcgtataactcctttttccatttcagtcatgtatttatgtccgctaaacatgtt

SEQ ID NO: 384661 - DNA, 305 bp, Zea mays
aactctgataatcgagacctctcctacctgcctcccttctctcctctactgcgccttcctacctacactaacatctagtatcagattagggttcgatccctgttccactccattgcctcatggtgccatctacttcttcctccttcgattcgaccctcaccctcgctctggagcaccaaacccgatccctgcttgctgaactggataagtggttccagtccatcccctcgcaggtgggaaatgcgggtgtccgccctggagtccacggcggcggacgcgtccagatccgtctccgagttctcgtc

SEQ ID NO: 384662 - DNA, 281 bp, Zea mays
cagaatgttatccaaaggaaatattttgattggccatagcttacatagagatttatgcgccttaaagattgattactctcaagttattgatacagcatacatatttaagtatgcaaatttaccaactactgcatcaccttccttgaacagtccgtgcaaggctattttggggtattcagttcgagaagaaggagaaccacataattgcttgaaggatgcagaagctgcgatgaatctagttcttgcaaagcttaagaatgagtttaatgaccccattgaaa

SEQ ID NO: 384663 - DNA, 280 bp, Zea mays
catttagctgcaaataaatggagcatgtcattactgtgcttgttgattccctgttttctattaagtctaagttctgtttatatgaatatttgtacgtaagattgcattgttcttttgtatgaggctgcatatggcgaggcgatgtctagtcagcacggaccagacttattgatcatcaggctgtgtatgcaagtggtggaaaagctcatggaaggtacacaatgtttgctaacgttatcgactcgagccacgtgagggttcagtgtggaggttcatcgag

SEQ ID NO: 384664 - DNA, 184 bp, Zea mays
gttgcatccactcagttggatctaatcttactcgtactagggagctactagagttgtagtagaatgtgttcatgcagagcgggcaagaagctttcacagtgggtaaggattcaaacaggactccaacaagtgtgcatgagcgggttgtacctatttgtgccctggaaactggagttcttggaaa

SEQ ID NO: 384665 - DNA, 226 bp, Zea mays
cgtcttgagctgaagaattctgagcttaacaatgaacttaatgagaaggaattgtacttggagcagttggcagagcgggcacgcgctgctcagttggaaagggatcagcggatgcgtaagattgaatctgtgaggaatggagaatcattgtatgatgttgaaaatattgataacgaccaagacgttggctttttggagggctacgtatcaaaaatatagctgttgg

SEQ ID NO: 384666 - DNA, 276 bp, Zea mays
cctctcttctgtcaacactgaagcgatttaagaactgacttgggtggatcaaaataactatggtgattccacaggggcaaacagttctgcaccagccaatccacatctgttcaccttaagtagagaaactggggtgagtcaatatttactcagcctcagtgcctcagaaaaggtgtagaatgttatcttattagctgctttcagtcatcctgtaaatagttcacacaccattaatagggagactcattcaccatggtaataatctgcaagtctggg

SEQ ID NO: 384667 - DNA, 274 bp, Zea mays
gacaaagaggagcgccacaggcagcgcagaaaatcagtacaccaatgatgtcaggatcaacaaggaaaaccatatctttttaaatgtgaactgaacatacgttcacggaagcaagaacttttactagagtattctgcagctgacacttggagcaaggaatttgatgctatttagaattcttcattgaaggtcttgatttggttcaataatcattttaagaaactaacctcaaaaacaggcaagctaatatctttctgagtctactgctggtgtc

SEQ ID NO: 384668 - DNA, 299 bp, Zea mays
gaaatatctcgttatatgcaatatagtggttgagttcatatgggtgaagtagccgtggcttgggaaacctaggtctaaggtacaaatgatgcgaggactgcttaggtaaacatgtatgtctaatgggattggggttcgtgatggtggagtaaacgcgtcgtgtagcagagtttggtttgaggtgtatggtgatatgcctctatggtatgtcatgatttaggcaccgtagtgttcaggatgtagacgttctatttattgtgaattttaggtttaaggcacaagatatgtactgtataatt

SEQ ID NO: 384669 - DNA, 297 bp, Zea mays
acatcctcaagaggccaccttgcatagcttcctcacagaacttttctctgttcctgaaaggcaatttcggtgcaggtctcatagaataagcacatcttacagctctgggcaggctattctagtcacaggtcctcatggtccgggctccagggagcacctggaagcagattgtatcccccgagtatcacttttcaggagcagggatgaagtggcagctgcctgctgcagttatctgtcacattcactaccctgaaacaggacacactcttcaagaatcaccaataaccagagttcgct

SEQ ID NO: 384670 - DNA, 271 bp, Zea mays
aacacgggaactctatatacattactaaataatgttgtctattcctattagcgacacaggttaaacctcgtaaccagggatgggccaaaagggcaaaatcccacgctagtgaacccaaaactcccaaggtcacggggattttggaacttaagccccccgagaacgtggaaaaaaaggtcccccctttaaaaccggggaaatttgagggagttataacaaaaatagggtgtacaccgtttgggccagaaatttttaaaacaccgggcccaag

SEQ ID NO: 384671 - DNA, 278 bp, Zea mays
cttagtattgcctttgatacgctgcaggtaattaaatcagggcggatcgaaatgtcactcattttgagtcctttccaatggccatttggcctggaatctttattttggttaatactagctgtctgttacacctgttgtatggatcttaaatatcgctacattctgaaacactatatgtggacctttttgtcattcacaattaattatctctaaagtagatgcaaatcattcaacagatcatcaagtcatagagattcctattataagccctatgaata

SEQ ID NO: 384672 - DNA, 108 bp, Zea mays
ctgagttgccgggttatcttgaagctgtaaaacatctatgcctgattgacactcctgtatgcgttggcataacccgtcatctggggtagtaatttgcaggatattttc

SEQ ID NO: 384673 - DNA, 279 bp, Zea mays
ctgcatggttagggataacctagaagatatttcctagagtttcattagttgtttatggctgtattattagttgtattgaccttaatgcatgccttttggtttgttggcatttttagttcaaatctcaagtgccacactattatttggaacttgcagaagttattccctttgtatatacatatatgcatctacaggttttacatcatttcaaatttataaacgattttattttcataccattttcaactatgaccatgtatgcaatatctgtttgatgtt

SEQ ID NO: 384674 - DNA, 117 bp, Zea mays
gtcagatcagaatgcactaggccactgcgcgtctgaggctcagaccctgctgtggttagctttgggtggccaatgggctgggaccctccatgatagttttggacacttcgatcacct

SEQ ID NO: 384675 - DNA, 305 bp, Zea mays
acgtgccctacccagcctcacctgcagcctcacccccctgggcctggcgctggtgctgtggacagtgcttgggccctgctgacccccagcggacacaagagcgtgctcagcagccaggtgtgtgtacatacggggtctctctccacgccgccaagccacgcgcgctcccgacccgtggggcacgccaggccaggtcctccctgatggacgcctgccgcccgctacccccatctccaccgcatcatgtttacagggttcggcggcaggtttgttccagaacgccgcctctcacccagatcgcggta

SEQ ID NO: 384676 - DNA, 284 bp, Zea mays
gcagaccatgtcttactactagatgtgatatccccgagcaaatagtcttggcatattcactcgaccttggttcactgctggaaccttcttgtgcaagaatgatcatcgtaaaattgttgccagcacaaataatcatcaggtccgcttatatgatactgcattgcaaagaagacctgccgtctctgatgattttagggagtcaccaatcaaggcagttgctgctgatccacatgggcatgatgtctatattggcacaggaacaggggaccttgcttctttcgaaa

SEQ ID NO: 384677 - DNA, 235 bp, Zea mays
acccaagtcatttgcaacgaaggagttgggtaccccatgctgatggaggtagtccatgatggtcgcctgagcctgtcgatggtatgtggacccagacccaagaaatgacccatacgcatgaactacctccatcagcatggggtacccaagtcatttgcaacgaaggagttagtttggttcctggcttctgccttgctagctctgcctgtcttcgtcatatacaggcttgtagtag

SEQ ID NO: 384678 - DNA, 274 bp, Zea mays
acgaagactgccaagaaaggcgaggagaccacggtggccaagagcgagaagcgagggcaagaatctaagacgaatgccaagaagaaaatcttaggacgctcacggaagtgtgcccatgccgaacctgatggggagaaccgaaacggttgcagcagcactgatgcagacgagaactcacttgcagaaactgctgcctccgatcaggagaggaaggtggtgctgcaggaattgagaatcgaggtggatacatcacgagctgacaattccaatgaca

SEQ ID NO: 384679 - DNA, 292 bp, Zea mays
ctattctccaatatgatggtactaacatttaattctctctctagatccaaacggcccctttgtttttggtaacattacctcttttgagagattctgtgcaacagctgatgaacagggaaagctcgagagctccaccatctttgttttggcaacattaccctctccgagaaattctgtccaacagttgatgaacagtagaagcttgagagctcgccagtccccacctgcgaaggagaggcaaagaacgaaaggaggggcggtgccatgtactggctagaggaggaatcaacga

SEQ ID NO: 384680 - DNA, 278 bp, Zea mays
gtactctactacctactaagtagttcagactttggagataacattccttgcacaatattatggttttggcttgttgtcctcttgacaactgttttttgtagatccataccaagaaaagaaactggttagagcataaaaggttaaataagttcgcctattgtagctacaaccggaaaatgcaaaacaggtttaaaaaaattaaagagcttggttccaagagaaaggaatgcaatccactgttgcttgaagaaatttgatggaaaaatggatgggttgat

SEQ ID NO: 384681 - DNA, 220 bp, Zea mays
atcaaggtggaatcaactgggttcactttgatgccaagctcttataactcttccagcaacaagaacaataaggatagtacataaattgtaaatatttctcttgcctggtgttaattcatagcttgtagctggaagagttataagagcttggcatcaaggtggaatcaactgggttcactttcctgatatttccaagttactggcgcaactagaccttctg

SEQ ID NO: 384682 - DNA, 266 bp, Zea mays
tagaaaataaacagagttgtctttgttggaaactttttacgtgtcaataccctctcaatgaaacttttggcatatgcactggattactggtcaaaaggtcaactaaaagcattgtttctaggacatgagggttactttggagccgatggtgcacttctggggctgcaaaatttcagctaaagcatcaggtctctctctctgctattaatgtcttccaagaggaactaaaaccggaggcattattactgcattgttggtcactggga

SEQ ID NO: 384683 - DNA, 198 bp, Zea mays
caccgacgtcgagaacaaccgttgtttccggctggtcctccactggctgctcctcagtcagtcgcggattctcccttgggtctggagtggaatggaggttactccgatcatggggtgatcatcctcttttaactgtagtttcttcctcgtgtaggatcagcgcaccggagctcaaacgtgcctgtggagtttattaca

SEQ ID NO: 384684 - DNA, 275 bp, Zea mays
gagacctccagcgtggctgcatgcagcatgccatacttcagtggcatgtctctcacaattgacgatatggaatccctacctaatgaaaaatacgaagataaaatgagctcccaatatgattcatcagaaaggccagttttgtgcattggctgcggtctaaaatcagttctgtacataaaggaatccatgaaattcccattctcggagattcaaactgcaacatcgggtttttcaagtgaaaatttgctgggtgagggtggatttgggcatgtgta

SEQ ID NO: 384685 - DNA, 275 bp, Zea mays
agagaagtctgcagaggaagaaaagagagcgaagggggttaaaccgcggaccgcggaggcggagcaaagcacacgccatccatccctggcccgtctgccgtcgcagtcccagtcgccctcctcttcgtctgtggtctccaccccgcgcacacgcacagttcgtcgacgcgagcgagggccagccgtccagggcacggaagtgggagctcgcagcttctcgtcggcggggggtgggggctgagtcgcgggagtgatctagtggtttcgtggtctgc

SEQ ID NO: 384686 - DNA, 304 bp, Zea mays
gcttcaggcttcaggcttcaggcggacacatccctcgcctcaatagctccgccgctggcgactagtgaagagagctccgaggtggtatcccgtgtagcgcatagattccggactctagtcgtcgcggttctcgcaaggtccgcggatccgcgccccgctctggatctccgcttgatttgttgttctggaaggtatggcacgaaacttgaccgacaacaggaccagaaatacactagttatgattgtgatttttggtctctgttccttcttctatctcttgggtgtttggcagaaaagtggttct

SEQ ID NO: 384687 - DNA, 299 bp, Zea mays
atccacaactgcctcagttatcaaagagttacatgagaatcaagtgagtcccatttagtcctgtaatttcatttgactgttatcatgctcggaagctcttgttcatagtttagagttgtccaattctttgcccaatcagtctgctccaggctgttcaatgtacatggccgtagtaatgttaccatctccgcatctcctgattagtttgagctctggtatatttgttcaacgtaccggggcgcaaatatgttatgaacttctttggaccattcttaacttgttatgtgtgcactgaggtt

SEQ ID NO: 384688 - DNA, 301 bp, Zea mays
taagatctaaaaccagccatccgtcttctgggaagaagaggtatagtctcccgatcctagttctgcctctccagttgcatccttcgtcactcactctccctacatcctgtcacgagactggtgttcagacctgagagacctttactcccatggttcagatgtctttgcagaggagcatagccgtatatcctcgttgctccttatctgattcgttccatcgtgtgggtggttcacgaagaagatgggcctcttgtaggtcccagtcatcacgttttgcttataatgcaagaccatccccaat

SEQ ID NO: 384689 - DNA, 333 bp, Zea mays
  unsure (1)..(333): unsure at all n locations
tcgcgtgcccgcgtccgtccgctcggccttcggctcgcgctcgggcctgcccgctgcgtttccgcgtctgtctgtgcggcggcgtccgcccttccgtggcgtcgcctggtcacggcgcgcgcgccgggcgctgcccagcttgcgactcgggcggcctcggcgccgtgtttgtggtctggcgcggcgtcctctgcggcggcctgggccgcggttctctggttcgggccgcctgggtgggtggtcgccccgtccggtccgggtcctgtcgcgcctcgcggcgccgtctccgngtcgggttgtttgggcctgccgcccgcctcgggtggtcggctc

SEQ ID NO: 384690 - DNA, 190 bp, Zea mays
gcttctgactgaaggttccattgactatgatatcatcaacaacgtaccgacacctcgtctttcaagaggaaatacagatcggtttcttgctgatccaaacaggtctcctaaaaccaagctcggggccaacatgccttcacgagctgaacatctcgcccgcaagagcgactgcgaaccgcagctgatcgga

SEQ ID NO: 384691 - DNA, 286 bp, Zea mays
tgaaggagttaattgtttttccttaagcaacacgaatgtcactagatcttggaaggacataagatgtcctgtggttgagtgtgataaaattattactgaaagaagtggagaggaacatgaacacagacttggctccaagagattgggacagggattcgctgaaaaagcctcttataatggtgaagtgttgtatgaaactaaaaggagggagttgatcatacaaaaagagtttcagagcccaagggaaattctaaggagaagtggggagcttcttgaggcggtatgt

SEQ ID NO: 384692 - DNA, 277 bp, Zea mays
tccttccttccgtcagcgcacatctctagggttttagcgccccatttccgcaacgccattcccgatcggatcgcccccttcccacccgccgccgaccagatcccggcgcgagtgctacccaaccctccggcgccgccacccttgctctcagagggtcggtctccaccgaaagcttcgcacaaatcccctccgtttgtcggtgccatttgttgcatagattgtgttttcctcctcatccgtgcctcgcgttccatttctgccgtccccgaaaatgcca

SEQ ID NO: 384693 - DNA, 260 bp, Zea mays
caccattctcgcgccggtgaattcgcctaataccgatggaattgacccgggtagctagagaccagttagcttcctttgacgctgagaagtgagaagcacatgtgtctgattctgaatttcattgcctgtgcgtgtgtgcagattcttcctcgcgtgtcaagatcgaggactgctagatcgtctccggcgacgactgcgtcgccgtcaagaacgggttggacgaatacggcatcaaggttaacatgcccgacgagcacatc

SEQ ID NO: 384694 - DNA, 304 bp, Zea mays
agctcttagaacacgaaacgtgaaggagacagaggaggaggaggaggatcaatctgccccgttcttggctgcgaggcgatctttgtgccacccaccagagcgcgaggggcttcattcacctgatcctcgcttcttcttcttccgtcccactggttcgcgttgattgcatttggaggagggggcagtcaagatgagcctcggctcctgggctgctgctacaatgatccggagatgcggatcgatccggacaccgtctaccccatccgccccgactgccgcgacgacgcccccaagacgcgcttca

SEQ ID NO: 384695 - DNA, 295 bp, Zea mays
agccgcgctgcccagggtcgccatggacccgttcgagtactgctacaactggaccgccggcgcgccggagatccccaagctggaggtaagcttcgccgggtcggcgcggctggagccccccgccaagagctacgtcatcgacgcggcgccaggggtgaagtgcatcggcgtgcaggagggcgcgtggccaggggtgtcggtcatcggcaacatcctgcagcaggagcacctctgggagttcgacctcagggaccgctggctccggttcaagcacacgcgctgcgccctatgatga

SEQ ID NO: 384696 - DNA, 167 bp, Zea mays
cagacccctacccatcccgcagctccgccggccgcccgcaccgccccgccccttcaccccctacctcttcttgcgccgtcatcccgatcccctacgctcgctgaggcattatgggtaaatcaagcaagaggtccagtgttaaggctgaacctgttgctgcctcattc

SEQ ID NO: 384697 - DNA, 294 bp, Zea mays
ctcctccaagcacggattaggagtgcatttattttgattctgcgaactgagtaactgattctaaagatgggtgtgaaggagatgtatcttcaatattacaatagttacaaccagtacctacgaagaagaagggtgctcatttgcactaccatttgtgtggtttttttgtggtataaactgtctatattacataagaagagtatcaaatatggtcctttgttacaacgagatttggaacgagagaggcggctcaaccggttgtttaatgggacagaagccaattgtattagtgag

SEQ ID NO: 384698 - DNA, 274 bp, Zea mays
gctaaatgaattgtactacgctggaagccatggaatggacataatgggccctgttaggaagactactgactccaatggcgtggaatgtattcggtcaactgatgtgcatgtgaaactactttctagatctttaccctcaatttaaatgtttaacttgctttcttagtgtgtatcttcttatcctcctcgtagggtaaagaagtcaacctgttccaacctgctagtgagtttttacctatgatcactgaggtgtatgaaaaacttggtgagagtg

SEQ ID NO: 384699 - DNA, 131 bp, Zea mays
aaaggatgatagtattgtagatgagaatagcatcactgatatgtctaagttcaccatctctctcataaagatgtatagaattgcgccagatagtagtaaggataaccttgcctagcacattagttccatgt

SEQ ID NO: 384700 - DNA, 289 bp, Zea mays
aaaactaggggcaagaccagatattgacagcaattatgcttttcattcttcctttggtactgctgagactattttggaagatatatcaagtatgaagatttccgatggtgaagatgagaacataacctgtcatctttcaaagagcttgggtgataaaaacttatacgttggaatgaatggacatacacatttgagtaattattttccaggagtccgtaacactgcattaagtactggtttaagtacaagagcatcccattttgttcataatgcaccaaaactacattca

SEQ ID NO: 384701 - DNA, 290 bp, Zea mays
aagacagatagctgaagagactgataaagatgtttcgtctttggttttccctattgaagagcatgaagaaaaatatgcagtgagccctatagctgttgagaagagcgtcagtcgggaagccagtgcatgtgaatctgcaggaaaacccctaactgtcatcttttctaacgatctccacaccaaacatctgctacatgattgtgatgtgctaattaaggagactggtgaagatgttttagctcaggagaattgtaatgaccagcctgttctggcccagactgacctagaaa

SEQ ID NO: 384702 - DNA, 291 bp, Zea mays
gccaagaaggaaaagtagcggcggcatggggtcgcccaaggcggccaagagcatggtgaagcaacgcatctggcgtcaccggctcgtcgcgccgttcgctgccgttctcatcacggccgtcgtcgtattctccggcctgttcgcgcaggacccaagtgccacctcggagttcactgccgtcaacgcgggtaacaccctgccagtgcgcgataagtcggaatccacagccagaggatctcccaacaaggaggatcttgcaacagctgcatttgagcaagaattggatgttgg

SEQ ID NO: 384703 - DNA, 289 bp, Zea mays
accaaatccaccggtcttgcggccccatcttccgctccgacgatcccggggactttccagtaagtagcagcctcaagcaccaattcgtctctctgcctaagttaccaagggcaccccagttcgccgaggtggatcggtagcaaaaaccgatactggtacgtcgccatggaggcagtttgatttggtggacctaacggccttccggatctcttgggagccacagcgatggcgcgcggcgctacgctttctccttgttctcgcgttgctcgccgcgctactcgccgtcgtc

SEQ ID NO: 384704 - DNA, 105 bp, Zea mays
cttgctgcagaaccaatatcggtggatttcacattactgattttctgaggcagcttctctgtctaaaatatccctatcacacggcaagtatttcatgggaaaagg

SEQ ID NO: 384705 - DNA, 290 bp, Zea mays
agcttccgacctcgtagcgaatcggaccggggggctagggttccggtgcgcctctgcaatcggacgcgaggctaggctgggcatggagggaaccgctgcggcccggaagaggtcccggccggagacggcgaacggggctgccgccgccgggaagcgctccaaagtacgattgggtgcccgtttggcgagggatgtcattttctgcactttgtccctggtggttacccggcagttgcaaaaatgctgaatctaagtagctctgctgtatctgcgcaatcaaagactcatgg

SEQ ID NO: 384706 - DNA, 287 bp, Zea mays
gtggaggatggtctcccaagataacagcagcaaaggctcaatatacgttcctcgatctatgttgtcaactcacaaagaagaacccgaggatgataaatctccaagattggattcaagttcagcggaggatgcccagattgtctccagtgcatccaactttcaggatcaggattttatgctggagaggtttcaacagagtgttgcttcttcgcctgatagttcatcttctaatccttcaaatagcaacactggtgattctatgcctgtatattctgacataaatttgt

SEQ ID NO: 384707 - DNA, 289 bp, Zea mays
caggttctctctaagcggaatccttgtgttcttgagagagagagagagagactcagaaaggtagcgcagaggtgagatttgtaacctgtaataagtgacttgtggcgctgaagatcgaaagtcagagaaatcttgtggatacaagctccacctccaaggaatgataatggaccctcgtcctcgtgacgatcccaacctcggtgctcgattgcccaccccaaatccacccgcacctcacatgattagcttctccctccagcagccacagcttcagttcttcccttcgtat

SEQ ID NO: 384708 - DNA, 284 bp, Zea mays
aataggtcctcgacacagttcagcagagatgctggctctatgcccaaggtgtggacaggaaaggaggacataaaagccataactaaaactgttcgctcagttgtacgccagatgctaatatttaatactctatatatagaatactgttgaagacgcttctaaagcactagagtattgtagcactgatggaaggccttcgatgaaatgtttccctgaaagttgcatactacatcgctgaagcactacaatattgtaacactgagggaaggcctttgtatcatgac

SEQ ID NO: 384709 - DNA, 283 bp, Zea mays
atcattatttaactaggaatacgctgcctgctgtgatgtcacaacttggccctatttaatggccttgtgtgtgcgttgccgtcgtctactttcctttctcgctcgctccttccttgcaaccatatatcgaaaacccatctgccttcttcttcgcgagatccagggagaaactgaacactgcacgccatgaggtgctcagacggatcgatcaagcagcagtagcaagcgcggttgtgcatcatgcatgcatgcttgttcttcttttcttttgatttgttgctgg

SEQ ID NO: 384710 - DNA, 158 bp, Zea mays
aacgctcccacgcgtccctcctcgcgccccaaacccagagaacagtgctcgcgccagaaacgtcgcgctcgcgccgcacctacgtcaggatgcgcgcctctgctgctgcaccagcggagcgaagatagaccgtctgggtgtggaccgagacccggaag

SEQ ID NO: 384711 - DNA, 293 bp, Zea mays
acaccagaccctcgcaggagggagacgggggagagcggaggagaaaccacctttctttccgttccagacaagctcccagccttgaccgccgccgccgccgccgctgtgtgtgtgtgctcccttagtagttagtccctgtcgcgtcccggatcggagctcccctccgtgcacgggacaccgccggtccgggcgtctccactcccccccggatcgatcagctccgcctccgcaagataggcaagcaatgaggtgcctgcctgtcttgcatggagacacaaagagaaggatccagt

SEQ ID NO: 384712 - DNA, 287 bp, Zea mays
gatgtttagtacatatagtataaaaggcaacataacacttaaacaaacacacacacaaacagagagtattttctttgtaacaaaaaccttgccttttatactatatgtactaaacatcaattatagctaataaaaggcaaggtttttgttacaaagaaaatactctctgtttgtgtgtgtgtaaccttaagtgttatggattattcattttttgtaaatttagtgatatttttatttgacctgctgcacacctagctaatagttcatttctctgttggcatagcaag

SEQ ID NO: 384713 - DNA, 276 bp, Zea mays
accaaatttaagtcaaggagtgctacagtccatccctggatctagcggacggctgtgtttggcgctaaaactgtttcgcgtagagatgactttaacgtcagtagctgcaccttaagagctaccctatacgtgcactgtacaaggggagagggaggctcgccgcaagcgctgcggacagcctacgctattcattgaatagatctctcctcatggattccctccattttcatatcatcaaaccagccctaccagtccaaggtttttctaaggaaattt

SEQ ID NO: 384714 - DNA, 155 bp, Zea mays
aatgcatcatattggactctatatggccgaaggaaggggtgcaaagatagttgacagggtggttattgaaccacgaatagaaaaactttccctcgtcatagtgatgttgctagggtttccttccattgtaacaaccatatatatatatatataga

SEQ ID NO: 384715 - DNA, 279 bp, Zea mays
agtcgtggacgccatgggccgaggccgcaaccgcaagccccgcaacttcgccacgttccgcctctgcccgcgccccggggctgccgatgcctccgaacgcgtcttcgtacgcgtcgacgacaacccctactccgtccccgggttcgcagacgatgatggtctctcgtcctccaccgccgtcacgggagacggcggcgagcccgacccgtcctcctccacctcgaccgacgagggcgaggtccccctgcccgagcacgtccgccgagagatcatggagct

SEQ ID NO: 384716 - DNA, 287 bp, Zea mays
atccaaacaagggttgaccggcgcgcaaagcaaatccattcgcacccccgcagcgttggaacgccaagattgaatagatggtggtggtggacaaagaaagcttagtgcctggtggcggcggcatctgattctgatttctggagactccctcctttttttttagcagtattcaaggaggaggggtggctagatctgctgtagcggatgccaacagaaatggacaaggaaagaggtgccagcgcataaggagaaaggggcagatgcgtctggtggcctagagtggaata

SEQ ID NO: 384717 - DNA, 251 bp, Zea mays
agtgatttcaaccagagtctcgggcggcaatctgtgcgttgttgctttggccatggtgctgctactgtaatccgtcggtgccagcgaaacgcggaactagatggctagttcacagcatgttgccatggttgtttggcatggctggcccggcaacctattttgtactagaggtgctgcatccttgtgttcctgtgcccaaaaaaaaaaaaaaaaaaaaaaaaggaaaaatagaaaaaaagaggtaggtggag

SEQ ID NO: 384718 - DNA, 303 bp, Zea mays
aatgacatgaccaaagagaaagatctaaacattggggaagctacataatctgagaagtgtattggtgatgtccccatagaatgtgataaacatggtgatagtgaaccattgagcatggaaggcaaaatcatttctggcaatgtgaatgtgaagaaccaaatatcgagggaggatctaaaagaagcattcaaaaattttggaactgtccggatgcgccaacagagtgaaaccctaggaaaacatgccatgcactttcttgctggttatatttccatgttttctacacagggtccttttcagaca

SEQ ID NO: 384719 - DNA, 298 bp, Zea mays
acgcggcaaggtgagagggcgagttagaggctggcagttaccgtgcaaaggccaaggccaaatggcgcagagtccgcttgcgcggagctcgcagaacaagcacctgggatgtgattccaacgggcaatcctgggaggatgtgtataagcataagttggagcagaagtatcttggtcaaggagaggatgataggaggagcaagctgacaagagataaggatgataaagcaagtaggagcaatggttctggttcgtttgggaaagaccatgatcgaacctcgttggttggatcagatgat

SEQ ID NO: 384720 - DNA, 293 bp, Zea mays
agaacacagctccaggccaaaacctcgccgcctcgccggcctccgcctcaattccatgcctcgccaatcagatccacgctcctcgccctctactatggactcccgcggggggtcctcagcggacatggagctggcctggcaccttctcaccgtgctcatccgcctcggccgtcccgccgccgcctcggaactcaccgccgccgctaccgtcgcagcgccctccatctcgacgcgcgtcgtcaagcagatgtgttgcttacctaggtcaccactatggatctctgacgacggcg

SEQ ID NO: 384721 - DNA, 290 bp, Zea mays
aatggctcgaacgtcatggaaagcctgaggaagtgatctgctgctgacttgattagtggatgctacgttattaccacaacagctcatcgagagtaccgaagtccgtagtacggcaaatgttaacacgcacgaactggaatcatgaccaagggatattaccttctgatcatgctgaaacgatcagcagtcacgttctttgcatcatatgccacgtcaaatcaaggcacttgcctctgaaatctttgtggtcaagtcagaccagcacttcgacagaacgattgatggatgcc

SEQ ID NO: 384722 - DNA, 289 bp, Zea mays
tgctggacccaagttatcacaaaattcaactgatctggaacatgaggttgcaatgaacctttgctttttgcctaaacaaacccatatttatatctggtatatctgccagtttgtagtgaccatccttctcctagtcttttggccaacaaatggtctcggttctcttccttgcatgaacacattcatgagcttcatgaggtcggtgggcgccgaactgctttcaaggaccaaggaaaaagatgacgaggacgatggtgattatgatatggtatttgatgcggaaggatcc

SEQ ID NO: 384723 - DNA, 284 bp, Zea mays
  unsure (1)..(284): unsure at all n locations
ttcttatgtaaaggagctaaaggaaaggctaaaggacaacatgaacaaaataattgtttcaccaaatgaagcagcagcctctaacagtgaagcaaataagtatattatttcccaaataaaggaggcacaggaagtcaagcgtgcagccataaatggtttgaacaatatgattcgatatatctagaacttctcactttaaatttgtattagctttatgcatttttcagttctctatttgtttgatcgcttgcatctgntattttatgtgttttaatgccacattt

SEQ ID NO: 384724 - DNA, 311 bp, Zea mays
actttctctggccctttcctctcatgcttttcccatgtttcttggctcgaagcagtccccactagctagaggtctgaccatggaatgatggaattgggttgataaggacgaggaaagagtgtcacagaatatgattgcttgtgtcgtggacgacgatgatcaccgctagtaaagctagatgcatggtcgactgttgcactgtaatctataaaaataaaatactgtacaactagtagaagttgatattgcttatatctaggacactgctaacgcactctgccaccatgaaactaacttgttaacaaccatta

SEQ ID NO: 384725 - DNA, 289 bp, Zea mays
  unsure (1)..(289): unsure at all n locations
aggtcttatagttttcagctaagccgctcactgcaatcaactgctgaaaataatggaattgatctagtcaagagcatgaattatgctgttcttgagcagaaatcagaagctattggtgatttttcagaagaaaataacagccctcctgaggttaccaacactgtagcacttgatggcaaccatgctgatgatctgaaagttgatgcgttcattccttttgcagaattatcactatgcagacacctgttatctgaaggcatgngggaggatgctgcttgcagtgcatttg

SEQ ID NO: 384726 - DNA, 284 bp, Zea mays
ggcacggccggcgcgttcgacttgatggaggggcttgtccgggagatgcggcgggaagggcatgaggccggggctggcgtggtgcggtcttttgtcgagagctacgcgcggactgggcggttcgacgatgccgtggacctagttcggaaccagctgaacaccttcggggttcaggcggacacggcggtgtacaaccacctcctcaatgtccttgcggaggggagcaggatgaagctcctggagtcggtctacaacgagatgactgatcgcgggattcagcctga

SEQ ID NO: 384727 - DNA, 167 bp, Zea mays
actagttctagatcgcttgctactcttgcttttgtattgttgcttaaatgataaaacatgtactgagagatatttctatttactgtttgattatatttgtgatgtatggacatgtggctactagaagacaatatttgttttgagtatgttgatgaaactacaaaata

SEQ ID NO: 384728 - DNA, 301 bp, Zea mays
gaaaggcctgccagagccactttggcttctcattctggaagtcatcgcagcagtttcattgctttgcttcttaacactttgtaccatgactggcctccgaaggtgcagagccagatcctctgggtctgagaccagtgttccatggacaagagctgtaagcaggaaggagaacaccgtaatctcaatcgatgatgacctcctggtaaatgtgccaaagataagccggcaggagctggcagaggcttgcgaggacttcagcaacataattggatcgtctcaggagacagttgtgtacaaggga

SEQ ID NO: 384729 - DNA, 279 bp, Zea mays
  unsure (1)..(279): unsure at all n locations
catgtggttaaattgttgtagacctgtagtggatgttttcacatttacccgcctgaaaccaagataaaatttttgttggtcttggctctcagatatactgctcacccagaagttggcacagttctcagttttttattggacaaggattatattaagtttagaggccaaataacactactgtttggtttgagcagctattatttgttttttggtaggtttgtgcattttggagagaaagtgaagtgccattgcgaacagntgaactgccagggatacctg

SEQ ID NO: 384730 - DNA, 282 bp, Zea mays
aacccaatcccctttccccacggaaccgccagccagcaaagaccccgccacgcgtcgacggaaccggagcccccacgcggaagagagatacgcagacgcacctggagtccagtgcccaacgccgacgaacggcggaggtaccggtgaagcccctcggcgcgagccgtcctcacccccgaaaacgctctcccgaacccaggacctcgacgggcgagacccgcgcctcgctggtgtggtgactggtgacgacgagcggcgaactcaggagggaagaggcctagg

SEQ ID NO: 384731 - DNA, 149 bp, Zea mays
  unsure (1)..(149): unsure at all n locations
ctgatcaagtgaatatatttgagcagatgatacgtatctacagcaaaaacagaaaagcagnataagnagntaataaggattgcaaccaaatagggagcaacagagatggaacttcagtatgtatacaatcctgattatcgacttactct

SEQ ID NO: 384732 - DNA, 202 bp, Zea mays
ataacctaccatggtactggtaacagcagcatggatactaatatgattagccatgcctgttaactccaagtctatatatgatctcaaacgatttgataacgtcacagagttgtttcatcgaagttctaatgacagaattggttttcaagtcagctctagtaaagagcctgattctaccattgctggtgtaatgtcagaatac

SEQ ID NO: 384733 - DNA, 312 bp, Zea mays
atctggagccgcaggaatactgggatgcattttcaagtatgccacctaattcagatagtaatacgaagattagcaaggaccagatcgattcagcatccaagagtgacccaggaagccggaaaaatgagtcctatgacgctgattttgagcttgtctacaaagcaatcactgggggagtggtccctgcattttcaacttctggggctggtgatgagtcccatcttccagcgtagggaagtagctggagtttactgaggcacagtttatctccaggtcgctactcgtgtttattcagagtcggctcaatggagg

SEQ ID NO: 384734 - DNA, 233 bp, Zea mays
tccagacatccacccaccagagccggtcgatccgttcgaaacgatccgggaaagattccacgacttgggacttctcacattcccacaccgcactgtgccactgccgccggcccgccgcactagccgttgcttcttgcttctcccttcccgttcccaaggagttgtcctcgccggcggatccggggcgccgctgcaagaggaggaaggaggaggagaggatacgagaatggcgt

SEQ ID NO: 384735 - DNA, 114 bp, Zea mays
aaactgccttacctagtgcctactgcctagggaaggaccgaacgagaggtgcgcggatggtagcgtgcgagtagcagcagcgccgcgggactcttctcatacgccgctcgcctg

SEQ ID NO: 384736 - DNA, 191 bp, Zea mays
atgaagtttacttgcatgcagttacgtctctatacttatcctgacataactgaaggaactgcatgcaagtaaacttcagttatgtcaggataagaacagagacgggtgcatcatggcattggctgttgtgagaaatgaaacctaagatctgcgcaataaattccagactatgcttcagcttgagcagcaaa

SEQ ID NO: 384737 - DNA, 184 bp, Zea mays
ggtagtaggtgaagctagtaccgaatacgactacccaggggatttcggtctttgattgagggttcactactagcagtatacacgacacaaataccgaaatcccctggggagtcggagtcggtagtaggtgaagctagtaacaaggttggcgaaatattattttctggcctgactgcctatatat

SEQ ID NO: 384738 - DNA, 246 bp, Zea mays
tagagcccccgcgcttctgcaggcgagcaccccgccaccagtcggagatgaacgcgtccatgaaatccagccatctactccagcaaggacagtgcagagaccgcgagggatatcatcaccacgtccggccaaatccaacccctcaaaatcccggacgctgttgctgcgctcgcacaggctgctgcaaaggcaaatgatcttccagggtggccgttgttctcgcctcctaaggtgcagctggacaat

SEQ ID NO: 384739 - DNA, 217 bp, Zea mays
agccagtcaaggagcggccggccttgtcgactccatctacgccacgctcccgctggcgcaggcagacctcgtgctctccaacaagctccacctcggccagttcgtccacgtggaccgccgcgctggagaccgggctgaagaagagcaaggcgtcttccatgggggacgggcggaagcaaagcagctgctgttgcccgcagtcgttgatgctgcgggt

SEQ ID NO: 384740 - DNA, 212 bp, Zea mays
taccctccagagcaacaaaaaatatattatcgaatactaaagcattttcctcatcgatagaatatagaattttaaaaagggagcgaaataagttttaaactttttgcagctccgtcgtccaccaacctcctccgatccggccgccgcagcgtagccgaattgtcccgccgccgccgccgcgttcttcgccggacacgccacccaccaccacg

SEQ ID NO: 384741 - DNA, 322 bp, Zea mays
tacgaactcggaatctgctcgagaaagactatgaagaggtctgggaagcttatgattgggtagcatccatgtatctataactgtgaccgcaactgtgaagagacacatgctgtggctcatggcctcgagatagaaaaaggttaaattgcaatcgacaacaatctggttgggcagagaatcctgttcgcagagtgtttgagctcatttggtccttggcaaagtcgatgtcgttgacgaacacctgcattacgatatatgaacagcgtaggaagtttgtcgaaaagcgaagggaatcatccttcactatagtccaaaaacgtcg

SEQ ID NO: 384742 - DNA, 303 bp, Zea mays
agcgacgaagcagtcgcctaggcagctgacggtggcagctctagcatgcggtcggcgctgtcagcctgccccgcgaggtcgaggagggagatggagcgggacatcatgcgcctggcgacccaggcgccaaggcggaaggtgctgacgaggaggtctgtctccctcactttgtgattttttgcattagattagacctgttgcttaggaagttgtatctgagagaagaactatgaattgacatgttgtcaaagttttcgcttcccgtgaaaatgcatactctcaaggtctgtgttgacattgtga

SEQ ID NO: 384743 - DNA, 119 bp, Zea mays
taccgaggaatgcgcccatccggacccagacagaactcgccggcgcctgcaactccaccgttcggcaagctggagggagatgaggggttcgtcgcggaggccggttgccgtggtgatgg

SEQ ID NO: 384744 - DNA, 196 bp, Zea mays
ggtgttgcggtgccaggaggcgatccagtccatggcgttccctgtgcctgtgccgcagagccctgtgggggtgctggacgcgggctacctcagctacaagagcgaagacgatgccgcggcagcagcgactgctgcttcacatggggcctctggctcttcaagctcctctccggtgaccagcaagaggagaatactc

SEQ ID NO: 384745 - DNA, 280 bp, Zea mays
cctagcgactggcaagatcacacgaagaaccataaacctttgctaagaaatgtgcaacacagcagtcatacggacgtagctgctgaactgaagatcatgaggatatggtcactgtaccttgagaaacccaggaggtaccagtgagcgctgcgaagtggcccagggacgacaagtctgacgacgccatgatgtcgttcatctgcaaagatatacaagacgcagaaccagatcaaaaactgtaccgatcagaatccaaacatttgaaggaagtcgcagcggc

SEQ ID NO: 384746 - DNA, 183 bp, Zea mays
cactactaccccgagcatcctccccaacatcgcccacctggtccgccccaacaccatctccctgctgttcagcatgggcgagtggatgaaggacgtatgtgttggatctccacatactgagcttcgtgaacggggcggagcgggaggagcaggagtggaggaggatcttcctggcggctgggt

SEQ ID NO: 384747 - DNA, 120 bp, Zea mays
gggaaaagagaacgtgagatttgggaattggagatatcacaagccctgcagatttctttccgattgtcttgggacttagtgtaagaccaagtcttgtccatgatagagcatgttcaaatt

SEQ ID NO: 384748 - DNA, 118 bp, Zea mays
ggctgctcgcaagcttggtgctgatcttactgagctgcgtgtgctgcggatggaacatgatgcgaaccagcggcgtaagaaggaaaaacaggtgatggaggatgacacaatgaagcgc

SEQ ID NO: 384749 - DNA, 274 bp, Zea mays
agagaacttggtgacatccatgttttagcgagggaaggagcgactgaggatatagtgaagtttctggcagcgggtgtggaagtcaacatgagagatactgaaggtagaactccgctgcactgggctgttgaccgtggccatcttagtgctgttgaggttcttgcaaaagcaaatgcggacctgaatgccaaggtaagctggaactactgtatacttattgcgtgctactattcgtggcagatctcatctatttgatgagtaacatggagaaata

SEQ ID NO: 384750 - DNA, 106 bp, Zea mays
acacagcagccattttgatctccccgcgagcgctctcaatcactatcgactggcgacgaatccgacaacgccgccgctctacgcgagacgcccaggtcttcgccaa

SEQ ID NO: 384751 - DNA, 300 bp, Zea mays
  unsure (1)..(300): unsure at all n locations
agntgctagtcccagtgacaaactcgaagacatctaatagtctgaagacccttgtaccgtgtggagcaaaggacctggaggtttcagagaagaagggtgaatcaagcaggttccgtggcgtgcgcaagcgacgctggggtcgatcggaagccgagattcgtcatcctgtagagagaaaccaggaagtggattggctcgtatgactctgaggaggctgctgctggagcatatcaggcgtatgcaaaacagatccgtgaagagttgctagtctgcaagagacaacggtctgtatcagaacgt

SEQ ID NO: 384752 - DNA, 145 bp, Zea mays
acgcgagaagtaggggaaggcggtgctccgccgcggatgcgcgttgatatcgcttcgcagaacctgactcaggcagccagctgcagaagagttgaggcgaagtcgtgctgctgggtctgcaaacgcgatggataacgtgcagccg

SEQ ID NO: 384753 - DNA, 296 bp, Zea mays
cgacgaggagaagcagaagcacgaccagcaggtgctgatggagcaccacgaccagcagctgctgctggaacactagagaccaccatatgctgctggagcagaaagagcagcagaagtgtgattgccaggaagtggaggatgaacactcgtcagcaccaagaaccagcagcagacgaaggagtggaagtcctatgttcattgaaccacgagataacatatcaatttcaaaggtaccagcagaaactaagtcagcagatgacgaatggacagccctatgtccattgaaccactgtgtg

SEQ ID NO: 384754 - DNA, 288 bp, Zea mays
tgcgccaagagggtgcaccgagaagacgtgctaaaccaacggagagtagacgtaccgcattgagaagatgtgctcaaccaacaaagcagaataggaaatgtgttgcgatttcactgagttttgtaggagttcgaaaccagttgtttaagttttagctggtagagcaaaagagcattcactttcaaggggcttttattggaacctcttgaacaacagacattgtaatgataaacagctttagaaatgcgccatgcctggtgtagcagtacaccagcaccccgtctctac

SEQ ID NO: 384755 - DNA, 160 bp, Zea mays
atttaacatttaggctttcagcttgtaaattgccttaatactaacagcaaaacaatgtaaataccgccttttgaacagagatttgcctaatcaaagcaagggtctgtttggaagtaaaaaaacaaagaaaaaaaaaaaagggggccccccaaaaatgaac

SEQ ID NO: 384756 - DNA, 221 bp, Zea mays
aaggggaagagttctcgacttctcacaagtcacgacagagagaggcggagttgcggagagtgtgcagaacaggagcatgaaagtggagatcagcgaagcccacgacaccattcgcttcagcatcgacaccggcgtcaaagccgagctcgacccgccgcacccgcgtacatctaccatccaatacggagaccaagttctgagcggacaagaagaagttcggg

SEQ ID NO: 384757 - DNA, 305 bp, Zea mays
ccaatttacagcgtctccctcctattctgtagcgcgacggcaccactaaaacctagcagaggctcgtgccgccaccgccagccgcaacaaggaaggaaccaggaacacgatgcccaagtccaagcgcaaccgcccagtgaccttatcgaagaccaagaagaagccaggtttggagcgcaagggcaaagtagtcgccgagataaaagatgccgtggacaagtacaccagcgcctatgtttttacctacgataacatgaggaatcagaagctcaaggacctcagggagcagctcaagtcttctagca

SEQ ID NO: 384758 - DNA, 103 bp, Zea mays
gcagctttgaacaaatcagtcatagcactgcctatagcattagccagtgaccagattagggacaacgtcttggcacagaattgcttatcaagggacatttccg

SEQ ID NO: 384759 - DNA, 131 bp, Zea mays
  unsure (1)..(131): unsure at all n locations
ttttctgggagcaacgaacatgctttgtgctttggtttcaggagactagactcttgtagtaaacgctacaaactggcaatctttggggcnaatttgctacaagagtctagtctcctgaaaccaaagcacaa

SEQ ID NO: 384760 - DNA, 213 bp, Zea mays
ctcgagccgcttttggctgtataagagaggattacgcaccgtttcattttacactagtaacagataagtagtagtatcaaatgaaacggtgcgtaatcctctcttatactacgactgatctgttactagtgtattgcgcgcgcctatgcgccatagctgaatagcaacttgaaatgttttatgaggataagagcagaaaaaaaaaaagggcgg

SEQ ID NO: 384761 - DNA, 220 bp, Zea mays
ccaagggtttcgtgtcaggaacaccgagttatctttggccaaagatgggtctatcagagggggcagaaccaaggcatttcttgtgttttgtcttgtccaagtgtggagtcccgatgccatcttctgatatgggttaggttagttaatttggaacgattttgtcaattagagtgactggatttaaggtccaaatctgaatgaacatggggatgttctgatt

SEQ ID NO: 384762 - DNA, 255 bp, Zea mays
ggaaaacccaaagtcggagagcgcacaaggtgaggctgctgccggtgcgatggctggtcgcggtcgaggtgcaatgcgaggacgtggtggcaggggcatgcgcaggcgataaactgggtcaagtagatcatgaagagatgcaccaggcgtttatcagtgtaccgtccgctggatgtgttatagtagacctgagctttggattctaatttgtttgacatttatcttggtttattggcttgtcttttgaacaatgag

SEQ ID NO: 384763 - DNA, 279 bp, Zea mays
  unsure (1)..(279): unsure at all n locations
gtagtatcgtgtctatagtggatgttgaatagtgtattcgtgggcgcgggaattaatttcggaaaggaacatgcaagggtatgatggttgtgtatcgtgagtaggacttgcgtgtggagatctctgggtaactaatggatgctggtgtgatatgatatgcgatctgtagtcgctgagcatatgctcccatntgnngttatggagntgttttgnggngattagtcggntgatttgatttnaagtttttcttagttttccatgaaattttggttcatcatg

SEQ ID NO: 384764 - DNA, 130 bp, Zea mays
  unsure (1)..(130): unsure at all n locations
gcagcaccaaaaaccctaccaccagttctagaccatcccggctctagcttccccacacaatgtantgtgntcgtgggctccggcggtggctagattcagggtgcgggagtcggggtcgtcgtccgagatg

SEQ ID NO: 384765 - DNA, 208 bp, Zea mays
ttattgtccacattggattggtttgtagcatagttacaggtttctgcttttgtatagagcatatagtgctgtgttttgatgggaaaactgactcgtatggtccgccaagttttaaggtgcatatggtttggtccacatgtaattacctgtggatttgactgttataaactggccaagtgaaagaatatattgaagactgagattgttg

SEQ ID NO: 384766 - DNA, 133 bp, Zea mays
gcggaaacgtgttatgatgtgtatataaaaaacgtagcatgtgctgcatgagcttcagtggttagagctcctacaggacgttgctgcagcacatgctacgttttttatatacacatcataacacgtagcatgt

SEQ ID NO: 384767 - DNA, 293 bp, Zea mays
  unsure (1)..(293): unsure at all n locations
tgaagattgatttcctcttattcgcccttctgtctgcattatataatatttacaatggtataaaaaatcatatatgaagcaaaagggcgtcatcaaatttaagtgcagcttcatcttttggatttgactttgcagtttgtagggaactgcttcagcgtccttttttcatctgaacctgagggaagcaatttcccttcttttttcactttatattttatgaataatgatacgcatgatatgatgatgggatgatgatatgacatatgatgtttggtgcnacagatgatgatgat

SEQ ID NO: 384768 - DNA, 161 bp, Zea mays
gaattcaggagctctttgatgcagcagatggtgtggagtagtagtggcggcggtacagacagcaagaatatgatgagtagtagtttgatgccttgtgccgaggagcaagaagaagagggctccaacaagatgcccccttaatcttctccttccatgctcct

SEQ ID NO: 384769 - DNA, 287 bp, Zea mays
gggagctgttagagtaagaaaaattattattctttactaatatctgttttgagttagattctagtaaaaaaaactgaacggagtattcaaagggaactacgaattttgtgccccatctggcgatggaaaattcgccattgaaatccctggtggcagagcccgagcagcgaccgccgaggttgagacttgagagacctatgaaaccgcgaggcgccgcacacaaaaaaacccgcgggttccgagaatatgcgaaaacaggcgtgggggcgcggggcggtggcgcgctt

SEQ ID NO: 384770 - DNA, 186 bp, Zea mays
gataactaggaggttcggcatgggtacatgtattgtcattattgtttgtcgcgagtacctttgtaaatttagaaatgagtctaaccatattttcttagttatgtgtgagatactggaggccaccaaagctagaaatacgttgattactatatattaatgcagagcagggaaccaagctgatcttta

SEQ ID NO: 384771 - DNA, 299 bp, Zea mays
gtttttaaagatatttgcttccaaaacacaatggatttatgggaaggggtgtgagctttaaagaacatgtgtttttaaagatatttgcttccaaaactcataagatgaatgccgctctgaggttcaacttcctgaggaatgggggtccaggtccaggaggccaccttgctttggtaactctcggagcaagctgatatctagaaggctatagggaggtgaacaacctataaaaaatattctaataaaggcttgaattaagaactagagactggataaaaacttatatgtgagaggcatat

SEQ ID NO: 384772 - DNA, 298 bp, Zea mays
aaggctctgaaccgacaaatttggatgtttaacagacctgtaaatggttctgtactctaaaatatagtatatagagaatacatgcatctcttcatctccaaacataggccggaaagaatccaccaaaagtttagagaacggaaggcatcggcaagaactgaaggccgtacggtcctactctatacactggtgcttatttatggtgtttgcccattcacatgcacatgaccggtaaaaatcaagatagaatgtgaaatagggtacactattgctatagaggatgaaatttagaggacat

SEQ ID NO: 384773 - DNA, 320 bp, Zea mays
caaagaactcaaagcaagaggtgcttgctactactgcaaaaatgaagaacatattattcgcgaatgccccaagaagcgtctagaccaactaaagaagaagacggtgaagcaagacccaaacaataacccagaagaccaaccattttataagtatgatgatgaaggtcgcttgattagtatacattttggagcaaagaagtaaggaagttccttaagtttggaggagttcaatgtgaactaagaacctacaaataaccatgtatctcctttgctttcgtgctagcctttcttaatctcgaggacgagatctttttaagggg

SEQ ID NO: 384774 - DNA, 313 bp, Zea mays
gacgagaagacggaggcgaaggacagcagctccggctgggagctgctgtactgcggcgggacgagcttcgacgccatgggtcggaaggtggtgggctgggcgcagggcaacctggtgtcgccgactcggctgcccccgctcgtgggcgttgatatccgcttcgttgcctctggatgcactgcttgccactgtgttgctttagatgctggaggcagatgttatacatggggtcgcaacgagaagggacagctagggcatggagatactcttctgcgtaacctgccgactgttgtttctcaactatcaaaataca

SEQ ID NO: 384775 - DNA, 294 bp, Zea mays
aaaatgcagtagctagtagatgagattaggaatgtttcagctggagctgaaatctcttcgtacagcagaaactgctagtgtaaaggaaaccaacggtaacatctcaaggatgaacagcagcgacgataatgtggtggttgagaagaccgttgtgatgctcgaagatgaggcggtcattctacattctggaagaaatgcagcaaaggaaacttaaccctcttgacaggacagagcatcccaatcccagaatccccctagctcgcctgtcaggctccgctgtctccagttatcttc

SEQ ID NO: 384776 - DNA, 307 bp, Zea mays
atttccagttgcattttctgacataaatattgtactcctgcagaagtttcatttttatttctcctttgctgtccctatttgctcaatacgcctttttggaccaggttttatcctggccatatgtatgcctattaatgcgctcttttgtgtgcgtttagatggacccgaagtttctgaggaacttgaggtactcaaggaagggcaacaagaagagtggcgaggctgagtccgaggagtaagatgatggtgattgagtttgtggcgacaaatgcatctcttgtatcgctaagagtcttagctgtgaact

SEQ ID NO: 384777 - DNA, 175 bp, Zea mays
taggatagtcaattctaaggacgatatggaagataagacaaccctacatcagccaaattcctttgattaaatgtgtgagctggtttatatgcatgagtgtgatacttctcaggcaagatgtgttaagaatactggggactgtaggcctatggtaataataaacacgtatttgatg

SEQ ID NO: 384778 - DNA, 302 bp, Zea mays
aaatacagagaaccctgaaacttcctaaggagctcaagggaacaatgaaatctttacgcatactgtcgggggttgagattgtggagggatcaacagctgcatcagacttcagttacttcactactctgaggaagctggcaatttataggatccaccacaatgaagatatattcaaaaatttgctgtcctcgatccagtacctcagtggttattcactccaaactcttttaatcgttgatgagtcatctgaattcttcaagaccctggagtcaatgtcgtcatcccatctaactgacctgaga

SEQ ID NO: 384779 - DNA, 200 bp, Zea mays
ggttgaatgtctccagcactatgcatccctattttctatttattgtgtacactcactttcagtaatgtgtttcaaactggtgttttttaaaaaacaaatcaatgtaaggactgaagttgaggtagcaatgtaataaagttaatttgtttatttttttgtagcaaaaaaaggtagcgggacaaaaaaaaaaagggggggcc

SEQ ID NO: 384780 - DNA, 298 bp, Zea mays
agcaaactggtccacctgcctgaagagttgttaaggcttccggacggtggaccagtttggggcacttgcaaagcgtcagcaccctgagacatatcatggatccacactggtccacctgccacaagagttgttaaggcttccgaaactacgcagtctggctcttatcgcaatgcctctgggttgctaccagaaaggtgaggttcctcagggggtgaagatttcagagtcagatgatgagaaagttttccagcatcttcctatttggcggtggctccacctgtctgccccgccgcatttg

SEQ ID NO: 384781 - DNA, 293 bp, Zea mays
  unsure (1)..(293): unsure at all n locations
gaatggaattggcagacgtggcagcagttgctatagtctactgtaatatctcctcgcgcaatctatgtcatggctgtgtcctgtttgaaattctaatccgctcacagtgccacgcgacatacgacgggtagcatggtttgatgttgctgatctttctgaggatgctcctgatgacattgagggaatcgatgcctcagcagcacatgttgcgaatttgtggtcaactgaacctgctgacatcaaacttggtgttggcggctcnagtatgggtgctgctactgctctgtactctg

SEQ ID NO: 384782 - DNA, 312 bp, Zea mays
attaaagaaaggcacactgcctaatgaagccagtaacagttctgttatatatacacgtagaacaggggaggagttcgatcaggcacttgattttcttgctgaaatgcagctggcaagtctaaaatcaagtgaaatctcctgtgatgcacttgtacatggcctttgtgccatgggaagaccttctgatgctagaaaggttttggaaatgctaaccaccttgggatctgcaccatcctatggcatgtttagagttgtttgttgataactattgcagaagtagcaatctacagaaagctgcggcacttctgcatg

SEQ ID NO: 384783 - DNA, 124 bp, Zea mays
ggagattagggggtcgatccctataaatagacacgccgtttatctatttataggcgatcgagctcctaatctcctatacaattatagtaatgcttcgagtctatcaaatgggttggtcatttac

SEQ ID NO: 384784 - DNA, 285 bp, Zea mays
acagaacttgctgctaagccgattagtgccgctgatattgatgccatattcactaaagaagttgttaatcctgccagcaatgctgtagagtcttctcaaacagtgggggctcaaatggtcagtggaaattgtcaagaaagtgttcacgacgaatcggacagctctgacaaccatggaaagaatacagaatcgtcagatcagacaactgatatggtggaacgtgagactggccttgctgcaaaactggataagttggagaatggtccaaagatcagtgagagtaat

SEQ ID NO: 384785 - DNA, 294 bp, Zea mays
cacctcgtgaaccccaccgttgcggagagagagagaactaggggaaggaattgacgccgccaggatgagtccgtcgcgtcgccggtgaacctcttcggtgcgggcgaatttgcttcggcgtgtggctaagtggagtcgtagtcgtcagggtttccgccagcgccggcgattggagtcgtgcgttggtgcggtgggcgaattgctcgccgccgtgtcactgcaagcgagttccgcccctccccgtggaccagcgtcgtccgccctcggccgtccgttgacgagcaagcacatgtg

SEQ ID NO: 384786 - DNA, 281 bp, Zea mays
agacacacttgtaaaccgaattactagggtctttgacaaggatgatgatccttttgcaccagatcgagcacaggtgtcatgcaattcaaaatcaaatggtacaatgtttcttcgcgagtatccaattccaaggaattcaagtaccgtatgtatttacgatacacgtggctggtcaaacgacctagagaaaaatttcaaaatgctgcatcagtggatgacaaaaggaataagccatggggagacaacaatgtgggatgatgatgaaggcaataagataggga

SEQ ID NO: 384787 - DNA, 278 bp, Zea mays
gaaattatgagagccattttaatataattccctccctagaaacataccttttatggaatttttatcactaaaccacatgttatttaaatacgtacatgtttaacataaatacatacatataattcacatgcatacttaacacttatgttaaatatattcaatgtatatacatatgtacacactatatgcatatatacatgtgggtatgtggtatgtgtgcatgtgtgtgtatggccagctacataatttgtgggactaagggcaaaatgaaactgtac

SEQ ID NO: 384788 - DNA, 196 bp, Zea mays
  unsure (1)..(196): unsure at all n locations
tataaactctggagctatagcatggaaatcatcantgaacgataccatattctatctcccgttcaatgcgtgcgtgcgcgcgcagacacgacgcatggtggccggaggatagaatatggtatcgttcaatgcagattgccatgcgatagatccagagtttatctacctggtagcaccatgacacgatggcccgttc

SEQ ID NO: 384789 - DNA, 282 bp, Zea mays
cggctcgagccaataacccagttaggtattatagattagtatttttgctagttgcctacctactgagataaataagcacaatcttgcaatggatccaataacccagttaggtattatagattagtatttaagtttgctgtagattgtgtgtgtgtgtgctaagtaaaagttccatgattcacaattttagtattaacccatgttgcaaaagctgttactggccaacagattgtaatgatgtgtaccatataacacaagcattaactaggcattaacgtttgt

SEQ ID NO: 384790 - DNA, 282 bp, Zea mays
tggagtagtgctaccgctgacaaggcgagtgtgggagcaggggaagcatcggcgcgagctgctggttcttttgaagactctgctcagctatcaagagtgacgaaggatcatacgcacatggtgaacggaagcccccgagaaatccaaagccatcagagttgcagtggaaggagtcgtatcaaggttcaaatgcatggaaatgacgtgtgcagagctgtggatttgggaaatctggatgggtacgagcagctgatgggtgagtgagtgatgtttgagatcaaa

SEQ ID NO: 384791 - DNA, 185 bp, Zea mays
atgacagagagcaaccaaatgcagactaatcttagttgattttgcaagtagtgacgtattgtaaattcatattcatgatattctttcattcaccatctttgttgcaaaggaaaaggatggaaaagtaatatatactttggttaaaaaaaaaaaaaaaaaaaaaaaaagaaaaaaaaaaaaagaaa

SEQ ID NO: 384792 - DNA, 274 bp, Zea mays
gacacgcaagaaggcaagtgccacgaccgcccatccgcagtaatgccttgatccgccgatggtgccgcgcggcggtaggcaacgctacttcttgccgcatgaactgatggatcatgccacctccgctggtcggatattaccggggtcatgcactgcacaagacaacgatgcaacaaatcctatgtcgcttgtcatcatggttgcacttccctaatccggtttgatcccgacggaggtttgcacactagaagcccttttctcgattttgatgaga

SEQ ID NO: 384793 - DNA, 133 bp, Zea mays
cgtatttctcaatctatctatacggttcatgtggaccgaagaaggtacagagagaaacttgaaggggagaggaaggagatacaggttcatgttcatttgggtgtcagttcatctgattggctagaagcaaaat

SEQ ID NO: 384794 - DNA, 166 bp, Zea mays
gaggcggtctattggtagtgtcagtgtgcttctttttgtctggcgcaacacaaaagaaggaaacaggcaagagcaccgaatggctgcatgcgtagtgaatcttcgatgcaatcgtatagcaaagaccttgagttgggtggctctccacacattttcacttacgagg

SEQ ID NO: 384795 - DNA, 289 bp, Zea mays
ctatgccctgcacccgcagacggggagctcgcgtcttccttcggatggtggatgcatgcatgcatggtagacacgccggccccaaccagaattgacaagtggaagcgtatgggtattaccagcaacgacgcggcccctcgtgccgtcctcctccgcttcttgtttctgctcctgcataggctgcaaatgcctggaatcagaggtagaggccacccagacggcgaccctcgcggtggacgcctcgccgcagcttgctcggaagatccctgatacactgttcgggatcttc

SEQ ID NO: 384796 - DNA, 287 bp, Zea mays
  unsure (1)..(287): unsure at all n locations
atcaacttgttagtatggagttcacaattgaaacctttcttgctagagtttatcttgaacaagagatgaaaaatgtcatccattcaggaaaagggaaaacaagcatgcgcaccaatggaaacacaaagataactctttcttagtaatgtgccaatgctttcagtttactctgtcgcttactctgatcggatctaacgcagccgctcaaatatgccacggtgatacttttcaacgtgancatgtgggggtgctacgtcaacagcctcaaagctttgtcggtcctccag

SEQ ID NO: 384797 - DNA, 210 bp, Zea mays
agaagggaaagcagaggtcttgggtcggtccaagtgggcagtactaccgtgagctgccttgccccagctgtaggggtagaggttacactccatgcaaggagtgtggaatagatagatcaagtttggactgccctatgtgcaatggcaagggcgatccaacttgtctaaaatgtagtggagaatgtgtgatatgcaaagatcttgtgatga

SEQ ID NO: 384798 - DNA, 164 bp, Zea mays
tgagaatctgtttggcattaagtgaattttaatgtttttgtttttatatccttttagctcttaagtgatgaacactgttgacagtgaagaacctttcgtaatggttttcagtataactaatacggatgtgaagctttttgctctttagtcctgagtatgctaaa

SEQ ID NO: 384799 - DNA, 106 bp, Zea mays
cccaaacaacctggacatcaataagaaacatttacaaacgcgagacagaggccatcctaccggagtttctgagaaccatttgtggctttgaagatggaatatgctc

SEQ ID NO: 384800 - DNA, 259 bp, Zea mays
taggagttcttcgttgccatgcgtacaaagaacccttaaaccctaatcctcccccgctacacgttcgcttgatctttacggccgccgctactcgttcgccatggttgcctgctcctccaggctcctaaacctcactctgagctcctctttactccgctcctgccgcctcgcgtccagctccctacttcccgaccgcttccgcttgcaaccggggtcgcatcactccttcgttctgctctgctgtcccgagtttgtcgat

SEQ ID NO: 384801 - DNA, 163 bp, Zea mays
cttcaatcaggccaaagcaaaaggaccacgccatcaccatatttttaaaattcaaaacttttagtctgccaaattggtactctttcatgtaagagaaccctcttgccagctaagagatgaaaacattttcatgacaaaggagagaaatttcctttactagggg

SEQ ID NO: 384802 - DNA, 151 bp, Zea mays
cgtcgtcgtctcactcaccccggcatcacgcctccctcaacagataaggtcacgcccttttccgacattcacacgggggacaagatgtcagcggccatggcctcgattccggcgacgaccttcgccgtcatcttatccgtcgtcttctgtg

SEQ ID NO: 384803 - DNA, 146 bp, Zea mays
tgagaaagtacacagcgtgagtgcgctgtcaaggtgtttctgcgccatttgctagtgtgttctgttcttcttctaccttccgtgttttacatttcttgcgtgtgtgagccttgagagttccaacaattggtactggaaccatttta

SEQ ID NO: 384804 - DNA, 291 bp, Zea mays
gtccagagatgggaggagctccccggcgtccccgccttctactcctctcggctcgttgagattacattcagattcggatttttgggacaccctcggcaagatagagaatctggagcactcttgaatgctaatcagacagcctgcccatttctttctctgtcttagacacaaggccttctcatggccagagacttgcctcatctgcccgtaactagacggaaaatcctgcaattcaagttcctgataccgtttgttcttgttctttctgtgtctgttattgctgtcacccag

SEQ ID NO: 384805 - DNA, 208 bp, Zea mays
gtgatttgaaataattgggaataaatagttcgtgaatccctgaagcgtgcatatatatattcctgccaagataaaggtaatggagtcgtcacgcaggttccagccggccgtcatcctgcttctcctgctcaggaatgcgagaagtacagtgagcgatttgttggggcatgcatgatcgcagacaactgcgccaatgtgtgccgcggtg

SEQ ID NO: 384806 - DNA, 264 bp, Zea mays
gcataaaactggcaaggacgccccgtagctccctttgatgcgcaaccgagcacgccaattctggccagatccaggcgtccttccgccgctctgatatgaataatccttttttctttcatgaaagaccaccgcacgtcatggttcatagtttaagggcttgatttggataattagtcatcaacagaagtgataaaaaatggtggttcttgcagcatcaatcgtttcaaagtcgggaaaagcacttgtttcaagacagtttgttga

SEQ ID NO: 384807 - DNA, 260 bp, Zea mays
ataagacaaaaagttgatgccagttggttgaaactgaccaataaatctgtggcagaagatgttccagaatctcaaggttcaacaaaaaatattccaataattctcttggatgatgataatgatgataggggcaaggagctcgaaaattcagaggccctcgatcaagggctccatagtcaaaacaaaagaacttttgggaagattgacctgaactgtactgaattaagacaacagggacttctctgtttagatgactcaac

SEQ ID NO: 384808 - DNA, 269 bp, Zea mays
aatccgttgaggggcacccacaaccgacctccccctggcggctacatattggtaacccatcagcccccttcgtgctcgccccgtccgccagacccagtaccacccgacaatgagagatcgccgccgctatcgcacgggaggggagtgctccactgccgccggtctacggggtcaattgggggggttcaaatcgggtgttcgggccattgctgtactccggtgtttgagtttctgccgcgtcgatcaagaattagagtcagtggagccca

SEQ ID NO: 384809 - DNA, 264 bp, Zea mays
tggtcaaccgcggcactacttctggtcgctcggcgcgcgggcgttctacttctcctgccccgtcttcctctggctattcggccccatcccgatgttcgtggcgtgcgtcgcactggtctgcgcgctctacttcctcgacgtgtgcaaggactgggaggaggaggaaggcgacggccatggccaccgctgtacgagtgatgacgagaggagggcaacaacacaagggaaggatgcagagcagcaagtgtagagatggatgtgcta

SEQ ID NO: 384810 - DNA, 265 bp, Zea mays
gacaacccatgcatggccggtccgatggagcgagagggacgagacgcagccgagaagcccctcttggtaagggtgggcggcagcggtggtagccagggcggcagcgcctcctcttcttcggttgccgtggtggtcggctgcaccgccatcgccgtcgccggctccttcgagttcggaatgtcgatcggctactcgtcaccgactcagctgggcatcatgcgcgatctccgcctctcgttagctgagtactctgtgtttggctcga

SEQ ID NO: 384811 - DNA, 280 bp, Zea mays
aagagaggagggccggcgtcggcgtgcctagctcgatcttgaaccatagctagccagcatggcgcccagcagcagcatagcagtactgctgctcctcgtcgtcgccgtcgtcctctccaacgtcccctcctcgggcgccctggcctcctcgtcgtcgtctctgctgcaccagtcgtctccgtctgagagtgagactgagaccgacagtagcagcggagaatcttcttcgtcgtcgtcgtcggaagaggccggcgagaaggagaaggagaaggagcaggag

SEQ ID NO: 384812 - DNA, 273 bp, Zea mays
  unsure (1)..(273): unsure at all n locations
aancgctctaccatgtcgtcggtggagcgcattacaccgacgcacctccatagatccctaacctgtagggaggaggagaacgtctggacgctggcgctacaactcccgactcgacggcggtgaacagtgccgccctgcaccttggcccctatgctaatagatctagatgaacacctatactgctaatcaattggacgtcacataggaactcagtgagatactagaaaattatatcagcaacgtgtgctattctatctctagagtcatgtacgg

SEQ ID NO: 384813 - DNA, 277 bp, Zea mays
cccagccgcgccgccgccgccgtgaacgagatggctgcaccccttttgctccgcaactctccgcccatcggtgagccgggcacatatccaccttctttcccatgcctcctccccgacggcgctggggtctttccttttaccccgcctctactcctctgcggcaggtcaaccgccgcctctcctgttttcacgcccggcggcgtcatggacccatcccgcatccgcaacgtagcggtgatagcccacgtcgaccatgggaagacgacgctcatggacc

SEQ ID NO: 384814 - DNA, 174 bp, Zea mays
cgtatggtcgtcgtccccttctccctccgcattgcgcgaaaccccatccgcctccgccttcttccggtctccgctgctcgcttcacccgtctcgccatgtcgaccacgccgccggcggggataccatatccgtcgagtatgccaagtccgggcgctcaatctgcaaggggtgca

SEQ ID NO: 384815 - DNA, 202 bp, Zea mays
tttaatccggttgcgggacacacaagcaggaaccagcagccatgatgatcaagctgaggtactccaagaggctcttcaagaggagctcctcctcgtccaagcagcaggcggcagctcgtggcgacgacaatggcagcgacggcagcggggcgcaggggagatcgagtgggaggtgaaggccggcgggatgctagtgcagaag

SEQ ID NO: 384816 - DNA, 223 bp, Zea mays
gtggcggttgagctctcatgtcatgtcatgtcgtgtcacgccgcgcgcatgagcgagcggtgggcgccgacgatcgggctggcacaccacctgccttcctgacgcgtgccttccctcgtgctgactgctcgctcgctcaaacaactcgacagtgcagcggatttctcgagggactacgacggggcctgcctccagatgcgcatgtcctacagccccgccgccc

SEQ ID NO: 384817 - DNA, 269 bp, Zea mays
  unsure (1)..(269): unsure at all n locations
ttttctctctacatttggcaaccatttaacaactccctaaacaaaaatgttgactgcattatatagtttttgtgacttattttttatgtggataaatacaaaacaaaattacaacctatatttagagaactattggagaactcanatttttttactctaaaagccatttagcaattcttaaatctgtgatttagagagctaaatttacataactattggacgtgctctaattggttcgtgcgctcaaaacaaactgcaagtattagtgt

SEQ ID NO: 384818 - DNA, 229 bp, Zea mays
aggtaataaaaataatataaaacgatgtggaatgtagaatattaaagataaatatgttgtagataaatggcaccattcacatatttattatctgaatctaaaatgtttgaatacaatgtttaaggtatgtttataccttcgccttgacaagcaataattcccgagtgatgctcttgaaattacagaatgcgacgacagtacaggaatactgttcactatttataggcac

SEQ ID NO: 384819 - DNA, 306 bp, Zea mays
aatttcaaagcaagcaaaaaactactcctatttatatgtgcaaataagagtgacactttatccagtagctccctttgggagctaaagttttcactgatctatcttgaatcccaggctaatgaatttcatctgtacattgtactgttggctgctaaattgtggctaattttgtccaatttcatggccacgttttggtgatgctttgtcattctttgaacatatacttcataatgtatctgcaattcagatttctaaataattgtgtgtggcacaaaactgcatggatataattcagttactacctgc

SEQ ID NO: 384820 - DNA, 295 bp, Zea mays
gttcctctttccctcctcccctccgtcttggttcttcacgcctggttcttctgtcttctgttatctctgtcgtccgctccggtgaacccgcatcgttcctattccttgtgttgcttccgtcgtcagctctagtaaatcgctttgtttgccagctagagatcgtggagggcttgctaaaaaatcaggtttgttttcgtcgggtttccatttctggaagtgattaaggtgaagtaaatattctttcctcaaaacgtatacactttggtgcatctattactatacttatccttttccc

SEQ ID NO: 384821 - DNA, 295 bp, Zea mays
ggcgaaggtacgtggcgccccgcctggccctgccaaacgcatgcctgtgggtgcggtctgtggtgcgcgccatggatcggagctgctgtccacgcatgggtgcgtcgccgtcgccgccgccgctgcccatgcgctgcgacagtcccgtccactgttctgcttctgcaggagatcatacatacgtatgggcgtgggtgctcattttcagcgagcaggagcttgcggcagtgctttccacgcccgatagggggcaccatggcgctactaggactggaaaacacagactgctcgctgc

SEQ ID NO: 384822 - DNA, 292 bp, Zea mays
ctgacgggattggaggtcccgactgctgcctcaacacctcgaccacatgcatcttcttgcagcacggtccacagtcaagctccatcaagaacatgatccacatgtcgcagcgtaagagaatataatcctttttatttttcttcgttaggaaatcagcgtacacaagaattgatcttttatcaggaacgaaggaatctgttccccagttgctcgtgtaaaatacatccatccatgtgtgtcatcgatcagtggtcaggaaagagacgatcaggaagtacgactacggaagcga

SEQ ID NO: 384823 - DNA, 159 bp, Zea mays
ccacgacccctaccgagccgtccctatcgcttccgtcgtgtccaccattaacgagcgcagagagatttgtgtgagtgccgctgcggttagattctatcctggtcgtcggtccggcctcggagggagggcgaagggctaccggtgtgcagcgaacctgga

SEQ ID NO: 384824 - DNA, 137 bp, Zea mays
tgatgcttcagtttgctgatgatgatgcttatactgtctttaactactttagtttgcttgacaaactattgtgatgatggataaagtgtgatgtgatgatgaatgaaccaatttactatgcttcagtttactttgtt

SEQ ID NO: 384825 - DNA, 284 bp, Zea mays
tgaacctgctgaagctggtagtgatgacagcgatgacgatagcgatgatgatgtgatggatgtagacatggcggcaacctcttctaaaggttcaaggagtaaaaaggcagatctagcgtaaaaacatgctgctttggtgaaggagaaatgctcatcaactggaccttcaccatatgtcattgttgcatgtcgcctcatcacaccatagaaatacatctccaatttctcggcactcgcaacaccgacaactagagatctagcgtagaaacatgctgctttggtga

SEQ ID NO: 384826 - DNA, 114 bp, Zea mays
caagaacaaacctgcaagtgcaagacgcatgtagcgcacctcgtcgtagtgtcatctccctcccatttcgttccgccacaccccccatggacaatccaatccacacaaggttca

SEQ ID NO: 384827 - DNA, 256 bp, Zea mays
tgcgttgtgcacagtcgcgcaaaccggggtgatgagtggtcgccattgacgagttcgtggagatgagaaggaatcacgggcgccaatggatttgggggcgtgtgcttcatctcggtatcctggacgcagaccggtgcgcgcgcaagaccgtaccgagcgcgtactggtggccgcgggggaacagggaggacaccgggagccctcacctgacccagtggattcgccacgggccatacctcgccgtggaaggtgttca

SEQ ID NO: 384828 - DNA, 172 bp, Zea mays
ggtctatcaagtatgtcatttgatacacctttatttttatttgttattcaataaaaggatataaggtgcatgacaacaacacaaacattgtattatctatgtatctcctatgcaatcccaattttaccatgaatacattttaaaaaaaaaaaaaaaaaaaaggggggccgcc

SEQ ID NO: 384829 - DNA, 125 bp, Zea mays
ccttcctctgcatgtagatcttctagagtcccgtatacggtttcgtctttcgtgtcccacttccatggcggcggcggcgcagtgcacggatcggttgcggccacggtggcatatcgcgggactcg

SEQ ID NO: 384830 - DNA, 177 bp, Zea mays
gaagtaccagtcctgttcagagatgatgggtttcagctgccagcaccgttccgcctccctgcgcatcttcctcgtctccgtcgtcctcctgctcaccgctcctgcggggcgttgccattgctacaagcgcatcttcagcttcggcgactctatcatcgacacgggcaacttcgcgcg

SEQ ID NO: 384831 - DNA, 182 bp, Zea mays
acatatgttcctatctatagaaaaccacagtatgggcaggaaacgtccttttggccacgatagataggaacatatgtagcaccacaaacaacgtttcctgcccatactgtggatcccgatttgttccttccatcgaagggcacctttgtaccatatgtgagcttggtgcggttagggcagat

SEQ ID NO: 384832 - DNA, 156 bp, Zea mays
ctagaactagtcgaaccgagaagagctcaggccgatagggaacaatcctgaaaccaggcaatggggctgcaagaagaatttgaggagcatgctgtctaggcaaagaccttgcctgagaacacgagaactgagaacatgctgatcctatacgggctc

SEQ ID NO: 384833 - DNA, 165 bp, Zea mays
ctatcatcgacacgggcaacttcgcgcgcaggacccgataatggagtacccatttggcatgacctacttccaccaccctaccggccgcatcagcgacggccgtgtcctcgtcgatttctacgctcaagcgctccagctgccagtgataccaccaaatctgccgga

SEQ ID NO: 384834 - DNA, 174 bp, Zea mays
acgcgatggcgggagtacgcggcagcgcggccacggggctcccgcgtactcccccgtggtccccggcggcgacgggataaggatccggcggcggcccgtaacggtgcccgcggagcactacgtgggcccgttccagttccgcctcgagaacgaggggaacacgccgcggaacat

SEQ ID NO: 384835 - DNA, 285 bp, Zea mays
gacgacggaggtggccatcgaggtggtcgacacggtggcggaggctgcggagaaggtcgccggcgaggtcgcgacgcgttccccggcaacgacggtctcagggaagcggcctcggagattaagacggtcgcggatgagatcgaggaagacgccgagaaagccgaggccctaatcgagaaggatgacgagatcaagaaagaggttgattcaattgtggatcctataatcgacaaggttgtcaaagacaaagaaatatagagacaggtggtgaactgaagatgtaaa

SEQ ID NO: 384836 - DNA, 154 bp, Zea mays
ctcttctccatcgccgttagttctctcacgccacacggtcatccgatccctgtcgaccgcgttgggagcagcgcaccattggacgacaacgagagagggtgaagacagtgagaatcagaaggagaagcactaggggactgacggcaaggatgaa

SEQ ID NO: 384837 - DNA, 287 bp, Zea mays
ccactcgaccaaggcaaagatgagcaggaagggagccccggacggagaagagaacagacaaaaccccgcggccagcccttcctgcctatatgtctctctctgtcgtgcgcgacagagggagaccagcaccaacacctccggtttcttgattgggttctgatcggtgaaagaaggaggaattaagatgaagctcatcgggctatgggaacaagaatcagaagacgttcaggccgaggaagaatgcaccgtctggcaacaaaggtgtacaactaaagaaacacatcgat

SEQ ID NO: 384838 - DNA, 286 bp, Zea mays
gtgattgctcaccggagtctagaaactgcgccaagcaatttttccatcgtgaacccgctcggtcgtcgcttaatcctccgactatcaagccactgaggaccccggtgttcaacaagtggataattctgagcaagaggtcgttgaaggtcgcatctgtgtgaggcatatagcttggacctcatatacttgtgaagtgtgatcggtgtaagtgttaagctgaagctgacaagctgttgatctgttctgatttgttctgagctgtacaagcggaccaactgtcacagtc

SEQ ID NO: 384839 - DNA, 273 bp, Zea mays
ggaatggtcaagacccaaacaacaaggcctgactccaagtccaagagctggacatacaggtgcaactgacggtgagcactggtacatagttgagaggggcaatcataaaagtcgtgtttctgaaacactagtgctcaatatgtcatctctgacatggacagttcatagcactgtagaagggacggttcctcttagccagtgcgggcatgactttagtgcatagcaattacaatagttatgattatctcgtctctattggaggatacaatggac

SEQ ID NO: 384840 - DNA, 282 bp, Zea mays
gactcagcgagctagagcagcacacacgcagcttgctattagcagcagcagagcagcggcgatggcggcctccatgatctcctcgtcagctcttgcggttgctcctctgggcctgacgcccctcggccgtcgcgcctcctccttcacagtcgtcttcgccaagaagatgatctataccgacaagccctacgtgattgtggggtggcctgatcgtcgacgtcgacgccaacgggtattaggggtcaaggcaatggcgtgtaccatttcgtcgtcaagtacggc

SEQ ID NO: 384841 - DNA, 133 bp, Zea mays
aggattcggctctagatcgcaagttttctttggtcggtacatatctgtgtttcttgctactgagtcacgaaaaagtccagaagacatacgcgctgaatctagagtaagacgttactctggtcatgaaggtcgc

SEQ ID NO: 384842 - DNA, 138 bp, Zea mays
cgaccactacgctacgcctaccctcgatgtactactagctgccttcctacccgcttcccctctcctcccgacgcagtctcactacactcactacgtctccgacgtcgccgacgggacacgcgaagcttcaagatcttg

SEQ ID NO: 384843 - DNA, 246 bp, Zea mays
cttgatttggcacgcgaagaattctggcaagagtcagaactaccttgggctagaaatccgccagaaggttttattggttttaggttgcagcttgtttggtttctggattggatgattttttcctttttgtaatgtataaatgcccggatctctgcctttcagtttaagagagataaggaagatcacaacagttttagagacaaagaactgggaagctcaagcagcacccccccccaaaggaaaggc

SEQ ID NO: 384844 - DNA, 267 bp, Zea mays
gtaaataagaaagggattctagcccctccaatcaccttcggttttatggcttccaaactagaccttagattcttcagaggaagatgtagatccgttgtgcattgtgacctttggtggttgatccgtcggtttgtttcgtttcatgttgtttcttggctagacctaattgtttagtgaacctgcgtatcacgggatgcatgtcttcccagatggtacccgtttgcgtgtgagcttgcgaaatcctgggcttggtcatctttcttcagt

SEQ ID NO: 384845 - DNA, 254 bp, Zea mays
gtagacagtgatgatacagtgtacacctatagcaataaactgtggcagttttattaaaaaagaaaaagaaggagaaaaaaggaagaaaaaaaaaaggggggggccccaaataaaggaccccggcgcccgggaaatattttcggggggaatccttaagggggacagaatttccccagaaggaggcgatataaaacctggggaaagaaagagaaaaaaggtttccccgggaaaaatttttccccccaaaaagttca

SEQ ID NO: 384846 - DNA, 266 bp, Zea mays
aactaaagttaaaactgctagatctgttagaacatctcagtgctatattgacttgaatgatgagccaaagagaaaaagattaagttcattttaatttatcattattggattgatctatttcagattgctgctcttccaatatcaacattttcccttaaaatgaacttaatcttggaagagcagcaatctgaaattgatcaatacaataatgatccattgttgagttcgaaagaaggtaactactttgacatttgagctggtggaag

SEQ ID NO: 384847 - DNA, 262 bp, Zea mays
gcgcggacccgttctgcggcgaactttttcttaatggtaggggcggtgaacgttgtggacttgcatctgtctcctcctcacctgtaagcgagcgcgtccgccgtccgtagctgtggctggcgtggtgttcgacgaaatgcaaatctcggcgttgtttgcatctctcgttacattagaggcaacagacaagtagtccttatattgcaatcgtatatgttgttaacttgtcgggttggatgaactgcagttgtctttggaggtg

SEQ ID NO: 384848 - DNA, 274 bp, Zea mays
gcgacgtataggggaaacgaatcgccgcatccgcgtgggatgcgatcgccttctttcgcccaatcctgcgtgcgtgctgccgccgccgtggacgggcagacggctggacgcattcgccaggcgccagctcgttcggtctttcctctctgcctgaatcgtgagatcgctatctcactgatcgccacgacggcacacagttctgttcctgaatcgctgctactgctagcctgctgctggacgcctgaactggacaggctgtgttccaaattccaat

SEQ ID NO: 384849 - DNA, 271 bp, Zea mays
accatgacgacgatgatgataacaatgacgacgacgaggatgacaattacaacgattgccgagtggagtgcatcgaggactgcatcgactacgtgcccggcatttgttaccgccactgcgtctcctactcctgcctctacctgccaccatatagctaccgaagagcagcttgcttccggcgatgcggccacagatgctaccaccatggccatcatcatcaccaccatcaccaccaccaccatgaagatgacgatgacgatgaccaccacgt

SEQ ID NO: 384850 - DNA, 254 bp, Zea mays
gagatcaataatccgagttgttcgaaaaacaagggaaagtctatttctttggcagtccaggcagataacaatgtccataagagggaaggtgtaactggttctgggatgaattcaggagtacaaaaagagcatgatgagcaaagagcaaaccaaccatttaggactcagtcaatctccagagaaagaaggcatcgtcgtctggcacttcttcccctgtccttcggcaaaatgatcagaaacaggattcgtttgtg

SEQ ID NO: 384851 - DNA, 264 bp, Zea mays
gtgactttttccccccttcactatttcaaaatggttgtgaaatggggtcttaaaggtaagcgccctcatacatgactgaaactttgtgagaggtcttatatttgaatggacccttaatgatgtatgtggaatagaatgaagtcctgtctctgtgagagagcgtgcctcctcactcatttgtctctgtctgtgttcatagccatcaatatagtaacatgtttgctatattcttgaatacgcttgaagaaagaaatccgttttcta

SEQ ID NO: 384852 - DNA, 111 bp, Zea mays
gccaaccatacaacacaaccttctgccccatctactggagttggttcttcttcaagccccatggacgccgtggcttgaagcttggacagtggcagctatgggatgaggaga

SEQ ID NO: 384853 - DNA, 253 bp, Zea mays
aacaagcagtacggtatgatattacagcgggtactgttgtgttaggatgttgcaagcagacttcatgaagtcataacaaggcgagtggaaattcttacaagaacatgtcagtataagtaaatgatctcctgattttatgatttgaagggtgccgagtgccttttgttcttctaccgttacgtgttcagagtgttcagtatctattccacgacaacctttgatgttagtagagcttgcacctgttccaacttaa

SEQ ID NO: 384854 - DNA, 245 bp, Zea mays
cccggtcgtcctcatcccatctccatcgaactccatccccacgcgcgcctccttggacaccatccccacgaggtccatccccacgcacgtctcctccaccgccatctccgcgagcacctccgcttccttcccgcatgctcctgttgatctcgacaaggtttgcgcggggtaggcaaaaccgcctagcaacagtcgagccctcccccctcctcctgcgagtcgcggcaacccacgagcgggtttat

SEQ ID NO: 384855 - DNA, 125 bp, Zea mays
tgacaaaacattgctgtgaatgtagtgaccatgtggtcagtcgatgcgggcaacacagtgcgatggctttggcgttcgagttctacagtgacagtcgcatagtgcggtcctcccaaagtcccccc

SEQ ID NO: 384856 - DNA, 209 bp, Zea mays
atccatgcttacacacagcacggatgtgaatatgtgatatgatgagcactcctacttttgataattgtagactagttattacccagaatactaccaaagtaggagtggctcatcatatcacatatgcacagccatgcttacacacagcacgcacatcattatttggtagtatgtctgggaataacaagttcacaatgatcaaaagttga

SEQ ID NO: 384857 - DNA, 307 bp, Zea mays
cgtcgagtgatgctagtccgcgctcgctcattacagtgaggtacagttgtcgatgtgatcgaacgaggtaacttcgatcgacgatggacccttgatgaaggagcagagcatgaagtggaatattccccagccgaacttgctgtcaaaacagttgaagccctggctgcgccacccaaagatacagaaaggcagctgtctaaaaaggagttgaaaaagagggaactagcagaacttgatgcagtattggctgagctgggactttctggggaatcaaccagcgctgcacaggatgctgagaaggaaggtg

SEQ ID NO: 384858 - DNA, 284 bp, Zea mays
gtgcgagctggtaagatggatcggttggaggagcgagaacattaagaaagggggaaaggagatgggagaggcggcgaaagggaaaagagcggcaggaggaggcggaggacaggaatacccaggagccgacgcaaggtcaaggaatcagactctcactcgacaacggcagcgccagggcaagtctggaatgttgccgatgtcgaacccttcagctagtcccacacagcttacaattttctatggtggatcagtatgtgtgtgtgactcggtgacaccaggaaagg

SEQ ID NO: 384859 - DNA, 106 bp, Zea mays
cgtttaagacgaactctacagctggagataccaaggagctgaccgatcccaaggtgtctggccatgatttggcctcgttgggtcgaaaaggaaaagcaaatgattg

SEQ ID NO: 384860 - DNA, 99 bp, Zea mays
cgatcatcgacggcgactaccacgaatcggtcgaggaagccaacgcggcgtaccgccagctcagcgcctacatcgactacaagcagtgcgagggcgtcg

SEQ ID NO: 384861 - DNA, 186 bp, Zea mays
gtgggaaggaggctgtcgatggcaccgctgcctcctgcacgatctgcctggggtgtcggcaagggcaatatgggcatgtcagtatggcacacgaggagacgaggctctcggggctccaagaggccgacggcggccggcgggcatcgtctcgtcgcggcgtcgtagatacatgccgcaccggttctt

SEQ ID NO: 384862 - DNA, 306 bp, Zea mays
tacaagcctgacttcccatgttcctgagcagcagtttcctctactgcacaaccagggccagagtgagcaacaaccaagatattcttgtgagcgtgatggaaattacattttagttctctgccttcgctgtcttaagctccctgaagaatggcctccgactttgctgggatgatgagctgctgccccgagacaacaacagtcagccagaccaaaatcacttaaatagttttaacaatgtattaagttttgtcttgttacctgctgtctggcgtctgccatgttttgcctagactcggttattatcga

SEQ ID NO: 384863 - DNA, 142 bp, Zea mays
aaacttccatgaactttctatttcgctttgctgtgagaacaaagggatatggtgttattggtgcatgcagtgtgctcgttgcaaagaaagaaagttgtgctctgttaatgtcatagagagggagttcgctattctcttatct

SEQ ID NO: 384864 - DNA, 157 bp, Zea mays
atttgaaatagcaagtcaaatgtagtgaccaaattgtggaagagatttctgtcaaataggaaatgtgtaagttcgtctagaagctgatggttatgtaagttgctcaggcactcagatgacagcagattctgggttctgggagtgttctgtgcatctt

SEQ ID NO: 384865 - DNA, 279 bp, Zea mays
aagatcgagaacacacagctgcctctgcactcgccatcgccatcgcaccggcttcatgcgtatacatacaccacgcccgacgcaacggcggcaaggaacaggctccaggtagttaagagcaccccgccccatgagctctgggggcttcccatggcgagcaccatcgccgccgcctatgacggaggcatgctcccctccctctccgtggccaacttcaaaaactaccaggacgtagctctctcgattctggagagaagtgactacaccactatcagtggg

SEQ ID NO: 384866 - DNA, 137 bp, Zea mays
caaggacaggaatacgtatcgactgatgagacttccagcaatacggagcaaacagatagttaagcgtgctaccttttacttgggaaaatctgagaaaggagtatattgtgcgttgttttattgggcccaggatgaca

SEQ ID NO: 384867 - DNA, 110 bp, Zea mays
taaacattggcatcgtgtctggacacgatgaattgtattctggtttgggtggctatttgctagtttggtctttaggccaatgtttaagactgaaccaaactggtagccac

SEQ ID NO: 384868 - DNA, 287 bp, Zea mays
aaagacactgcatgcatctatatatctatgtatgcacgtatttatcctctcacgaaaggtgaggtcttgcatcgcggaatggaggcgtccggagcatggctggaccgtgcgacggcgacggcagtgctgggtttagtcctggcggtggcgtcagctgaggcggcatcgggggacgtggagatggtgttcctcaaggccgcggtggccacaggcacagtgtgcttggacggcagcccaccggtgtaccatttctcatacggctccggttctggcggcaataactgggt

SEQ ID NO: 384869 - DNA, 283 bp, Zea mays
agcagagagggagagagagaacacacaaggggaggggtggggaagggaggacgcgctggtatcgtctcccccggcagtgaaggagtagaaggaaggagagtaggagtacgaggaggacgggagaatgcgtgtacgcggcgggcgggacgacgacgacgaggtgtcccggaagctcaagagcatggacatggacaagctggaggacggcggcagggaggagatcccgcggcccgccgtcaagtaccacggctggaaggccatgccgttcataatcgggaacgag

SEQ ID NO: 384870 - DNA, 99 bp, Zea mays
gcagcagcggggacatggacctgttcagccccagccccagtggaagttgcgatattagtgcctgacgaggagacatgcaagagcagtggagagcagact

SEQ ID NO: 384871 - DNA, 287 bp, Zea mays
gtcgagattgagcaggagagcagttccgtgattagccgcggtgcattgcgtccaggtgggcggcgcatcatcggcgtggaagaaactctggattctgaggcagttacacctacaggtgcctcgctccaaagccaggtatcagagagttcccttgtgcatatggatgatggaggaattggtgctggtgtagaaagatcatgccttgaggatgctgtgtcaagtgatgagattcatggtgaacaagaagagcaggagcaagggagcaacgctaatgctgccattggttg

SEQ ID NO: 384872 - DNA, 263 bp, Zea mays
ccaatatctttgaacctcgattatgtatcccatctttatcaagcagattttgacgttcgaatcatttacttcagtctttatgcattcattgcacatatatttttagcagtcatctagtgaggttacattatccagctgcatgcaacataatctcttcaatcaacattttttatgcatgtgtatcgactaatatcagtctgtaggttgtcagatatatttgcatgttctgatgcttatactatgctttcaatttgcagcactgc

SEQ ID NO: 384873 - DNA, 243 bp, Zea mays
cgatgattacggcggaggagaagagccccgaaaggaaggaggaggagagcaccgcggacgcttttctggagatcatctgccgcgtcccggcgggggaggtggaggcggcgctgtccgcttgcagcatcggccccacggccgaggtcgaggaactggtgctcaagtcccgcgaatgctacaagcgccctaagtacgccgtccgcttcttacgctgggcgaggcagtccgtgtcgcacaccgcct

SEQ ID NO: 384874 - DNA, 128 bp, Zea mays
aagcatgcagcagtttgatattccagcactaaagattctggaacactccacattgccaagaggaattttcgcatgaatcattagagacacttggggactcttttctcaagtatgattacaacccaaca

SEQ ID NO: 384875 - DNA, 210 bp, Zea mays
cgccgccatggtgtcgagtttcattccctccgtcttctatctgtcaatgctcgccctcatcgtcttcttccccaaccgcgctaagcccagccttccctccatcaccgagatcctgcaccgtctacagttcgctggccgagctcctccctcgcgctcggatccagccactaacgcccagccccaacgcgacgtcacacacccttggcgaac

SEQ ID NO: 384876 - DNA, 272 bp, Zea mays
actatgtaacagacataattagtacagctcgtggcttgaactaatctttgatgcaggaagcatgtgatcagttcagggttatgaacgactacctgaaacctcatgttctccctttgtccctatctactcatcatcaataaattttttgagtggtggattttagcatgtttgctgcctattttggattttattctattctttggtataagacatttctctgattcctttgtatccactgtcatttataggtagtttctttgagctttgtatga

SEQ ID NO: 384877 - DNA, 171 bp, Zea mays
caaggcctctgcggttgtgggctgtgccatgactccaggccaacatgtaattatatcgccgtgcgtaacgaggtgagcgccggcgacgccgcggagatgctgctcgcctgctccgtatcatcctggctgctggccgagtgaggaggcacgggcgtgcatagaacaaagcca

SEQ ID NO: 384878 - DNA, 300 bp, Zea mays
  unsure (1)..(300): unsure at all n locations
cctgatgaaggggaacgctaccaacattcactcgcgcgcacaccggtcagttcctattcgcggctttctatggaaggttctcccgtacaagatgcggaagacggcgacaacgcaaccttgattccatcgacgaagctccgacgtcaggcgtcgcgatctgcatggcnacatccccgtcatgccgaagatctggatttgacgtcttccggtcgtcgtctgatgctctcattgcggcggaacccaaagaagctactcgcggtcgcggttgagtaaggctgcactcgctgacgtctcactaat

SEQ ID NO: 384879 - DNA, 202 bp, Zea mays
cgccatcggcagccgccacgcgcgaatgccatctgtgctacttcgctcgtcttctgtcgccggcgctcagcgcgaatgtcccatacgatactccccgacatgcacagacggtcaggtacgcgggagccggcttcattcgacgtggcagttctgcctgagcggcaatacggctccgatgcgccggagcgtcacaccactggcc

SEQ ID NO: 384880 - DNA, 160 bp, Zea mays
cacataagaacactcgtttgtgacgctggcacacaagccggtagtctgcggcgatcggtcggtggacgatggacggatctcagctaagcaatctcgcctcgtattctccggcggcgacacacacgcgcccattatatgtagtgaaataagttccccatcc

SEQ ID NO: 384881 - DNA, 167 bp, Zea mays
ccacaggcaccctgccgcgatgagccactaacggacctgagatacgcgcacaaggtcgtcggctagccggatggcgaacaggaaactgggggctgtggagagggaagcgctgaccaagttcttgacggacacggaggtggaagacgagctcgccggattcttgcact

SEQ ID NO: 384882 - DNA, 172 bp, Zea mays
agacacgagcgatcagatccgatccggaactgtgccggccagccatggagactagggttctgctcaccgcactactcctcgccttcctcctcgtcgccacccctttcaacgcccgagttgctagagctgattcggaggaagatgctgctgcagatgaggttgttgaaggggc

SEQ ID NO: 384883 - DNA, 162 bp, Zea mays
ctcacatgtgggaaggattgttatataagacaaccaaatgatgacatgagacaataaatgctataggaattatggagggataattagctatttattttcttggttagggaagagctattattagttgtagaagtaattaataacttctacattttttattgt

SEQ ID NO: 384884 - DNA, 145 bp, Zea mays
cggtcacccacgggcttgagccggggtgaatctggaggggccgggccgagcacgggggcgctttcgcacgcgaagcatagcgctagagcaggacctggtctcccgagaacaggactacttgtagatatttgaggagggcagtgtc

SEQ ID NO: 384885 - DNA, 162 bp, Zea mays
tttattaagatattcctgacgaatttattacaagtttaacaacctcgtggttctaccattaacaatgtcgagtaattcatattttatattgcatgaccaactttggtaacaggctatggggcaaagccgggtacgaaaaccaaatgtatcctcatttaccaa

SEQ ID NO: 384886 - DNA, 284 bp, Zea mays
acacaatcagatccgatttcgtagagatgaacccggcagtagacgcggaggctgacgagcgagcggcggaggagatggcacctaagaaggcagcggctgccaaaatagcggccgacgaagttgaagtggaggatgtggtggacggggacgaggcggtcgattgggagggcgacggtgacgaggacgacgatggggaagaatcttcacatcggactctcccatcgttcccctgcatcccaggccagccacggtacccgcggttgctcccttgcccgctggcacca

SEQ ID NO: 384887 - DNA, 275 bp, Zea mays
attcctcctgtatcaagaactaataacagttcaacagttaatccaccagcaggattcaatcaccaaaacctcaccagacgccatcctcgaaatttatcagaggagattggtcgtctatctggagcactccgcggccatcaacccccacgcttaaggtcagggtttctgttggagcgtcagggcgatggtgtttggggcgttcctttatcaacaaggggtagagaaggaagaaggttaatggagattcggaatgcacttgaaatgattcaaagggg

SEQ ID NO: 384888 - DNA, 155 bp, Zea mays
agggggagtcggagtcggaggaggaggacgacatcccctacggcctcggcttcttccacctggtgttctccatgggcgcaatgtacttcgccatgatcttcgtcggctggaacgcgaacgcgagccacaccatggagaggtggacgatcgacgtc

SEQ ID NO: 384889 - DNA, 158 bp, Zea mays
gagaatcaacactactcgaagaaccagagcaatttgaggacccatgctatgatccagatgcaattgcattacttgggccagtttcagaatctttagataacttccctccggacttagattgtggattcttctcgagtgatgttgctaaagaaccacat

SEQ ID NO: 384890 - DNA, 280 bp, Zea mays
catagatctcctatacttttcacatcaaaacaatatttccagtctttacagtttgagatgcgtatgattagactgatgttagacatattcgtttacattaaagagggaaagcttgtattctagattttcttgatttcataaatttatttttaaaagcagtagattattcataatgcttatttttttatggtatacatattccgcccaatgtgatcggacagatatttaagttatggtattgggaggtgatgagccaaatactagacatattctgtaccac

SEQ ID NO: 384891 - DNA, 275 bp, Zea mays
gagcgaattccattgtctgcgcttatctcaccctgtcgctcccactatctatagtgcagatcattacgagcagggctaaatacagcaggctgctcttggtcgttcttgacgcggcaatgctagcactggtgactgcgggagcatctgcggcagcggccattgtgtacttagcgcacaaaggcaacgttagagcaaactggcttgccatttgccagcagtttgactcgttcctgcgatcgtatctctggatccctcattggttcgttcggagccat

SEQ ID NO: 384892 - DNA, 270 bp, Zea mays
ttctgatttggtcccggcttctcctccttccccctcggatcggcggcagttcccgtgccctcacagtcacaggggacgcggctcgcctttccttccccgccaatccatccgctcttctcagcggcgagaagaagagatggggagcaacgccgccggcaagcctcctcctcctcctgctgctgctgtgtcgtgggagttccacgcgacggggcctcgcaacttgaccagccccggctggagggacctcatccgctccagctggagagatcc

SEQ ID NO: 384893 - DNA, 270 bp, Zea mays
ctatgatgaagcacttgacctagaagcttttgtgagcataatctggaagttgcaccctgatttacctgttgtccaaggattagccactgaagtcaagaagacagtgcaatcattagtttcacagcttctccagaaacttcgatcaaatattcagttacctgagtgcctacgaattgtagcacatctgcgccgaattggagttttcagcgagtcagaattgcgcttacagttcctgaggtgcagggaagcttggctttctggaattcttga

SEQ ID NO: 384894 - DNA, 300 bp, Zea mays
ggcagatgaaggaaattacgtacacaagcgccaactaaaactaaacccaagtcaattacttcatatatcactcaatagctgctagaacatatatgaatggttgttgtagactgatcgtaatcccagatagttatgatatacatctttcattttaactagctagcgtatatatgtattgtacgggtatctagatttttatctgtttattctaacattcgagatctacatattttgttttggccgttcaccgtatgagatcttttgacaattttaatgccaaattatgagaacttgagtcat

SEQ ID NO: 384895 - DNA, 303 bp, Zea mays
gaatctgattcttaaaccttatagtgtgaaatttagatcctattgtcacccctactcgcacccctgcctctgtcacacccaagtgctcaatgaaatgcgtaactctaccacatgttattctaaggtgattactcccctgcaaacaaacagaatccctatctagcctagaaacaaatacagcaagttgcatctcctgaaccgtacttttttcaccctgtaccgacgctaggctcatatgcccgagccaaaaaaaaaacatccaggcaaacaggcaggctgcatcttgctaacctacttccttat

SEQ ID NO: 384896 - DNA, 166 bp, Zea mays
ccggcagcagccgcagtaccaccgacgccgccgacggtcgcactccatctcatagccgatgcatatcatttctattttcaataatcaagatgcgccgtggtggtaatgccggtagtggtcaaagttctctgggttatctctttaggaagcggtgagccccccaaac

SEQ ID NO: 384897 - DNA, 271 bp, Zea mays
gggaagtgtcagcttgcgctacatcccagtctccttcctgcagctcatcaaatctttcactcttgcaaccacagttcttctgcagtcgctactctggagtcagcatttcgagtggcgcttatgctcttcgctggtccctctcgtgtggcggtatatccctgccttcggtgacagagtctaccttccacatttccggtttctgtgctgccatggttcgtcgcctggctacgtctacatacaccatcttggcagagtccctactccctggata

SEQ ID NO: 384898 - DNA, 158 bp, Zea mays
gtcctgcagcgtcctcaatctgcaggtaccaagcaaagcctaccatccactagccatagcatgtttgcgtcagagtcatctgcaagggattgggacttaaatcggcgcccaggtgtcaatatgatgttgaatgggggcttaggtcatggcctaaggaa

SEQ ID NO: 384899 - DNA, 283 bp, Zea mays
gctacaaatatcatttgttcttatgatctttgtagcttatatatattattataagactgcgcaatatcataagaacaaatgttatttaactatttatcaataatttagctatcatcatttgagagttttgtaaatatatgtactagtctatttgcatatattataagagatggatatgctagataacaaatactaggctagcttatctatcaacgcactcattatataattgacataggctagtacatgtcacattttagaggtccaacaaaatagttgatag

SEQ ID NO: 384900 - DNA, 247 bp, Zea mays
cgagaacggatttcaatgaggtaccatatgtcaagtcgatccatgataattttctaaaaagactattcaacgagctcctgcatctcaatgatgaagtgaatgtggaaattgtgccacaaatgcatgctccttctgaatctatcgatttagtggaaagtttgattgattcagaaactcctagtccctttgatttatctaaaagtgccccgattgttcataccaaacatctaagtgaagacataagtgc

SEQ ID NO: 384901 - DNA, 151 bp, Zea mays
atttctttgcatgctgtcggtcttccccatcattgtgcggatgtgttcaaagcgccgtggacttgcgtgtaacctgtaactcgtcttgtgtcgtgctgacgtaaaaaaaaaaaaaaaacaaaaaaaaaaaaaaaaaaaaaaaagggggggg

SEQ ID NO: 384902 - DNA, 196 bp, Zea mays
accaatccgatcaatcagagtatcagagccagagtgtgtgctgctgtgtgagcacaggagagctagcagtatagggcgagcttcagcatggaagagaagcagtggtagtgccagccttgtcctcggcctcctgctggccgcctccctgtcgtaccagtgccacggcgcgcgcgacgtccccgcggagaagacccct

SEQ ID NO: 384903 - DNA, 251 bp, Zea mays
gagagctcaagtgagggtggctccccatcacgcgagagccttggctcggacggggaagagtctaggattgactcggagcttcgacatcttattgtgtagatggaggccatgaaggtgattgaggaggaagaggagaatgggagtgttgccaacgttgtaccccctgctcctgatgagaatgggaccccagtcgaagaacagtcttccagattcggccaagacgtcgccgccggcctcagaaatcacagctt

SEQ ID NO: 384904 - DNA, 257 bp, Zea mays
ggggtggtgatatcaggcaagagctcgcgaagcttaagctggcgttcacagcttaaggagtctctttccgtgaatgtcatgctatggtttgtatgagttggatcagcaattcgattgagcgttgtcaaagccagagttaccaatatgtggcctgtgaagccatttcaaactttatcaagcacgggtgtgctcaggatatttttgccatgaatgatatggaatatctatggtgtacgttgcggcaaatgtgtactgat

SEQ ID NO: 384905 - DNA, 255 bp, Zea mays
cgctatctcttccctccgccctcctgctctcccgccgttgtagaaatttccctctcccacgcgtcctcccgctcccgtgcacttgtcactggccaccgtcgctcgctcccactcccgtacccatgtatcctctcaaccgtgaccagcctgtgtcgccacgttattgcctctgcctcgtcgcgccatgtacagagcgaccccattcaacgacgggtgaagaaattgggttgtggaatgcatctgcagagattcccc

SEQ ID NO: 384906 - DNA, 228 bp, Zea mays
  unsure (1)..(228): unsure at all n locations
ggcagacggcacacagactacaccacacctcctcgcttctactcagctcgtctgggatctcgtttnctgctttcggttcgaagtcgtgcacgacgatggccagcgccgcggtgtcggtcgacgagaagctcgacaagcttcgtgccgaggtcgtcaagctcgaccagatcagggagcacgataagtccgggttcatcagcctcgtgtcacgctagctcagtggggaag

SEQ ID NO: 384907 - DNA, 295 bp, Zea mays
gcgagcgagagagagtggacaagaaaggaagaaagttgtccccgcagcctatttcaccattgccgccggaagctcggaccaaagccgagcctggctgttcgtcctctgagcgattggggagaggactgcgtctaacaaagactttagcgcgggatcgaccatccgatgtgagatctccctctccactggtgaatatcatggacgccggtattcgccgtgacccaaggccagtacctcggcgggacccgcgcgctatcgtcgtccggtcgcctccacggccttgtcgctggagtcc

SEQ ID NO: 384908 - DNA, 294 bp, Zea mays
gtggcggagaggaaagtccccggcggaggtgaccccgcggactggtgctcgacgccggcttcgtcgtgccggacgccaacgccttcggcaataccttcaggtgaaacagcctactgatttgctacggtgggttcttggggatccgtacgtcgacgccaaaactcaaaggccaggcgcaagcagagaagattggggcttatctagatatgcacatatttatataatggaattaaccaatacgtgttgaggtggattttaagatgaaaactaaagtaatttttactttaatctacg

SEQ ID NO: 384909 - DNA, 109 bp, Zea mays
cgttagtgttatttattgtcactaccgcccccgggattgtgattcacggtcactacctccccgtgtcaggattggggaggtagagtcaataaataacaataccgggcgc

SEQ ID NO: 384910 - DNA, 138 bp, Zea mays
  unsure (1)..(138): unsure at all n locations
cgtcatgaggttctcctttgtaacggcanacctatttgcagtcatctagatagcaggctgctttcagacgaagaagaacaggagctgcagatccttcctgtgccttctgacatacacgtctgcatacatggatatgat

SEQ ID NO: 384911 - DNA, 161 bp, Zea mays
tgttactagttctgacactgttgtggggatagatcgaggcgtgcgtgcatgcgtgcctaacttgtaatttggtatggtgtgctggggaaggatttggtggacccacttgccagtgcaatgtcacctttgcgggctgattggatttagttctgctcaagtag

SEQ ID NO: 384912 - DNA, 153 bp, Zea mays
  unsure (1)..(153): unsure at all n locations
tgcagagagcatctggcgcagtctcttctcatgtgatgttgtgctttatatattgggggtgncgacggagtatctattattgtgtctggatgacacaattctttttgttagcaacggagacagcacactgtctgaagcatttgaatatgtaga

SEQ ID NO: 384913 - DNA, 113 bp, Zea mays
  unsure (1)..(113): unsure at all n locations
cagcacggtcctttcttgtggtctgcgtgcgtagttcctccattgtgaggctgtgtgtccagcatgttatggatgtcgtcgcgtanaatatacggtcggccgcgcggtcgcac

SEQ ID NO: 384914 - DNA, 287 bp, Zea mays
cggtactagacctagcagcagcaggcggtagaggacgtgaagcgccagttcctccccggcgccgacgacacctgggtgcccaaccccggcttcgaggtccccaaccccttcatgcccggcgcggccactccctgaacacgtacccgcgctggcgaaggtggctctcggtcgatctgatcgtcgagcgccgccgcccgccctgaacgaataatactactagctactctcggtctgctacgtatagctagcttagcttagctagccgtgcttgcctgctgcatgtacgc

SEQ ID NO: 384915 - DNA, 289 bp, Zea mays
gtcgtatcgagctaaaacccttgctctccctgcccgcccattttcctttccccttggcattcggctccactgcttctccggcgaattggatcggcgatccatcgtcgtcggatcgcaactcctgactagcttgttgctgcaggatcgttatccgccgcgcctgctgcttgggtttgttttccctgcccacggaaatggggatggagatagacatggagacgtatcccaatcttaatacttccccctcggccgccactgcctcaggcgacgccaaggcctgcgccaactg

SEQ ID NO: 384916 - DNA, 285 bp, Zea mays
gcaagaagacatcgatcgagtggatgagctatttgggaaggcgctcgatgctggaattagcattcaatgcaggtccatcaccgcatacgacattgcttttctactgttatctgggcactgcattgctattgctttagtggacaaatcgaagctaaatttgccctgcatgagtgatcatgatgtacaacagcacaacgatgagcctgactacatgggacactatgtcgtaatatgtgggtatgatgctgatgattgtgaatttgagataagagatcctgccagttc

SEQ ID NO: 384917 - DNA, 222 bp, Zea mays
aaacaacacatgccactctgatccaagttcgccatggtggagagagaaatgatgccgccaccatcgatctcctccgtgggtaactccccgacctcggggggtgttcttagcgcgtcgcgggatgctgccgcgcgtgcgtctgacctcggcaggcggggatcgcagccgtgaggtcggtgattttccgccggtgtagcagcgccgccgcgatgtggatgtgtg

SEQ ID NO: 384918 - DNA, 137 bp, Zea mays
  unsure (1)..(137): unsure at all n locations
agagttatgccaattccacttcatgactctaaaggttctgtttgccagtatgatcacatgacagtctctcctgatggtanaattctggctgtaacaagtggatcaacgttgcaatggttacttgtggaaactggtgc

SEQ ID NO: 384919 - DNA, 301 bp, Zea mays
cttagctagctattcactggatgttggcgatggggacagaacagtgggaaccctatgcatgttccgacaatggctcacagctgctagaccagagcccgggctcggaagacgaacacgaagacggcgacgacgaccagaacggggccgacgtggcagtgtcgctggacgccgttctcccagacgatctcctggagaaggttctttccttgttgcccgttgcgagcgtcataaggtccgggtccgtttgcagaaggtggcatgagattgtgcatgcgcagaggcacgcgtggagcaagacggt

SEQ ID NO: 384920 - DNA, 298 bp, Zea mays
tgcaccatgaagtgtctaaccctagtccactactccactcgagtcactcccttcccctgaatcccttgtcccctcgacggcttaactccttttggttgggcggctggcaagcgacgaccatgacccagaccaccacgccccacacggttgtaccggcccaccgtcggcatccaccggccaccataccccatgtcagcgagagggccagtaacgaccttggcacagcggcaccctgtgggcatcaccagcgccgcctaccaccgcgacatcaccggcactctgatcaggaatatgcgta

SEQ ID NO: 384921 - DNA, 150 bp, Zea mays
actcgagcgaattcggctcgagaagtggtgccgtggcgctgacctgggtacacgttcacaggagtcggggccggtggacacgacgaacctgagccgcaccgaggtgcgcgcgctcatggcggactcgccgctgacttcctgggaacgcct

SEQ ID NO: 384922 - DNA, 122 bp, Zea mays
aagaaaccaagcgcttcagaaggcggtgccccagtgaggcaaagccatccagatggttccctagaaccagtactcaagaaacctgtgaaccatgaagaagagcttcgatggatatcccagga

SEQ ID NO: 384923 - DNA, 301 bp, Zea mays
gatttgtcaggaatcgatggtccacagtctgtcggagtgtttaaatcatcaacactgcttgcccaccgtgattgtgtaacaggattagctgttggaggtgggttcttgtttagctcttcttatgataaaacgatcaatgtgtggtcactgcaggacttctctcatgtgcattgtttgaagggtcatgaacacaaaatcacagcaatagttgttgttgacaatgatagccattctctttgtataagtggagacagtggcagcggaatttttgtttggcgtgtggattccactttgaaggaag

SEQ ID NO: 384924 - DNA, 142 bp, Zea mays
gttcaagaagggtattgctgttgaccgattagttgggtttcaagatctcagaagtaaagacgattttccgactagagcgttggaaaatattctcaagacgaaagggataattgatgagaagaagaaagatgacgacgatgac

SEQ ID NO: 384925 - DNA, 282 bp, Zea mays
aacacgacagggtggagaggctgagattttatttaaggaccaagaccacccagagcataggtcttttacattcagacactgttggcatgtgttgagaaaccaacccaaatggcttgacaaactgtgtcaattggcggaggtaaaagcaagtaacaaaaaacagaagaccaccaaaaattcaagccctggaattgttgatcttaccactcaggatggccatgataaagaccctcaagagattgtcaactcatccatggatgcaccaaagagaccacctggtaa

SEQ ID NO: 384926 - DNA, 275 bp, Zea mays
ctcacaattatactaaaatctggagaagactccgctcaactcatagaactgcttctagcttcaaaggctcacattgagatcagtattcatactgaaggtgctttttatgcaaggagagccattgcaaatatgcagggaggatgcaaaccaatggcaggacttgcagacctattgcttggtgttgcactttctaatcaggctagaagtgcaatatctgatacagatagagccttctggcagtgcgagcatggtaagcccttgggaatgctgaaaaa

SEQ ID NO: 384927 - DNA, 253 bp, Zea mays
cctctttagtgggagacagtcaatttcttttgagggcatctcaagatgaggaggttgaacacatgcctatatccttacacacacggccacacttgacgctggtgacataaaggtcaatcaattcatacgcgagctggcagggtcgcattcgcccgttatgctgttcggtcgagttttctttgtatggtggcacacaactcttaacaaggaggcacaaccttatgtgcttactaagcaaggtttggatgagcac

SEQ ID NO: 384928 - DNA, 278 bp, Zea mays
gtgcagatcaagtagcggcatcaccggtatctgttcgacgactggagagaggcacacgaagaaggcgtcgtcttttgcccgactgtggagatcatcaaacggcgacggcgggaggaaaacagggtccgagttactgaacggtaggctctcaagcagcaggatgcccgatgccgctctttcccctgatctcaagataggtgaggcgtgccaagtctcaccgggtgttggggaatggagtccggacctgctgaaccctcatgtggtccgcgctatgaaag

SEQ ID NO: 384929 - DNA, 154 bp, Zea mays
cggctgtctataagtcactggtggtggtggtggactggtcatggggagtcaggtgacgagcgtttgcgtgtgcaggtgccctccccgatcaagcgcagaacagagtgggcgtggcgcgtggtggaacggaatgatatgcgtgcagtttttttac

SEQ ID NO: 384930 - DNA, 288 bp, Zea mays
gcggcatttcgaataacacaggtgagcgcgacgatgggatccctcgttaataacatcatggtcgtgggcgccgtccttgcggcgctcgtcgccggcgggtcgtgcgggcccccgaaggtgccacccggccccactattgagaccaactacaacggcaattagctcacacgactcgctgacctggttcgttcatacctatgcctgacaatgttgagacaactgcggtccctgctgtgttgagcagcattaaacgtgatgacattaaggatctttcactgaggtttccat

SEQ ID NO: 384931 - DNA, 285 bp, Zea mays
gtcaataacagctgcgtatttggcattggcttcatcaaagttgccactatcaaagttaacacgacgctagaaacactgtttgtcaggaagatgaacatcttcaacgaggccaaagtttacacttggaaaatcgaggatttctctgctctgaagaacccgtcccactcaccggagtttgagatcgctggatacacatggtgataaataatcttttcagcttgcagtacttgacatgtactccacatgactgaacgttgatatcataatctgaacttccttgcaatg

SEQ ID NO: 384932 - DNA, 219 bp, Zea mays
ggaagctttgaatgtgatgactgacctgaagaatgcacaagagagaagagaggagaagagaaggagaaggctagaagactgaggggcagcagctgcttggagtttgcgtccttcccgtccacgcagtgcagctcccagtgctgcagtgtgcgtggcgtgggcatccgtccagctgactcatcgtttgacaaaccgttgttttatttaaatatccacagt

SEQ ID NO: 384933 - DNA, 241 bp, Zea mays
attaggcttcctgatcctatgaaatcattgaagttgaactttccttctgctgcctccttccttgaagatttgaacgctgcagatggcagccctctacatcctattgtcgtgtcaagggctaatattcctgggtccccagaagttgatgtgtatttgagaaacttgaatggagcatctcctccccatagtttggtcaatcagaattctcatgcgcatgcaaaccgtcatggtcatgaagtct

SEQ ID NO: 384934 - DNA, 299 bp, Zea mays
aacacaagtgatgcaccagttcaaaaggcttgttcccagatgatgaagagtgcggttcgacaacaacgataccggctcaagaaaaagtactttgatccttttccgctacatctagtggcaaaaaaatctccaatcagatctatgactgatgaagagtggaatgaacttgtggagtattggaagagtccaaaaaaagtggagacatctcaaaaaaacaaagagaatcgatccaaagttaaattccatcaaacaactggctctcgtagctacatggttcatgtagaaactttgggagataa

SEQ ID NO: 384935 - DNA, 303 bp, Zea mays
caaaacatccaatcagaacattacattttttcctgttagccatgttacaatacttgaaaagattagcaacatatatcctgagaaagagtggtttgttctttctcttaattgttttggtggtagcttccggaatcttagtcacgatttcagttggccgtggctagaccgttcgggccaagttccttaattatggtagattcgtgttgtgagtggatttgactaggtgtggctggagctaaggataagctgcacttggttaaagctagcctgctagaagcgggttctttcgatgctgcagttcat

SEQ ID NO: 384936 - DNA, 119 bp, Zea mays
cgggaattcctctgtatcaagttccgacactggggcatctccattgtctgcttctcgaatccatggttctctgaagacagaggtgctagcaacagaggcataaattcagcattcagctg

SEQ ID NO: 384937 - DNA, 269 bp, Zea mays
aggaatttgcttggtagactggtcaagaaatctgtataagcaacagaggacaatcacatggtgcaaaagagtgatagtctagctcaagccaatagaaaaggagtgcgtctgggcattgattctaaaactgaaatgaataatgggaagagccttcaagatcgaccagctgaactgccttccagaggaaggtacaattgtaatggagttggtctatgacacggtaattctggtacacaaagaagctctaaaggtgtacctactgccgctgg

SEQ ID NO: 384938 - DNA, 223 bp, Zea mays
cgttatagaatgatggagattttgattcagtaacctggattccaccaaccgaaattctcaataatccgtacctggaaaccaaacagtgccaagtaacttttacggagcgttatgtgcaaaaaaaaaaaaaaaaaaaaaaaaaaggggggggcccccataagtgacccctcaaacccggaaattaattcggggagggacactgggggggaaacaatttccccaa

SEQ ID NO: 384939 - DNA, 131 bp, Zea mays
acatacagcgtcactctcgctctactagactaatctagcatgagctcagcctcctcctctctcgccgatctcgacatatcctagctgcgacctgacgggcggcgagctcgacgcctggagaacgagtcgct

SEQ ID NO: 384940 - DNA, 277 bp, Zea mays
  unsure (1)..(277): unsure at all n locations
tcggctcgacgcgctcctggcagcaggaacaagatgtccaatagggcacacaatcgtgttatgcctgtccgcaggcaattcgactccgtgngcaggatatcgtatcgcacaactgcaatgatggtagtatccaggagattagtgagatgagtcgcatattgaacacttatgagctacttgaactagactatgacggacgtcgagctacgatgattcgagaatgatggatgccatgtcttcacttatgcggcaacggatggaagacatgngaagagat

SEQ ID NO: 384941 - DNA, 177 bp, Zea mays
cgtagtagctcggcatcggctcgagcgagcgcttctcggacggcaagctcatcaccgactacatcgtcgagtcgctcggcatcaaggacctcctaccggcgtaccgcggcaggggctcaccgtggcggaggcgtccacgactgtcagcttcgcgtcgtgcgagtccggcatcgacga

SEQ ID NO: 384942 - DNA, 128 bp, Zea mays
  unsure (1)..(128): unsure at all n locations
ctcttctcacngatgacttgcatattgcacatattgtagagacatctctgtgcacggaatagacctgtagtgttattaacatgacatccatatggcacatattgtagagacatctctgtgcatagaat

SEQ ID NO: 384943 - DNA, 263 bp, Zea mays
  unsure (1)..(263): unsure at all n locations
cggagagcagtgttcagtgtgtgtgcaagagatagaagagcagcagttctttgctgngttattcctagactgtcttgagaatgtcatcatatctgaaggctgtcgaactcttatggtgcttcagtgtgctgtccangattatcctctgcagtgtgacacctggctgtcacttgcctgactatgatctagcacttcacattattcttcagcaggttgtatctcctntagagcattagatgngtatgataccttgatgttggcag

SEQ ID NO: 384944 - DNA, 105 bp, Zea mays
tgagatgactgtcgtgagcatcatgtggtcattagtgcaggtgtaggtgctggtagcggtggcactatcatgtctagtaggcggtgccaggtgtggtcctcacaa

SEQ ID NO: 384945 - DNA, 105 bp, Zea mays
  unsure (1)..(105): unsure at all n locations
gaatacaggggattcatgctcaggcctgatggatccctgtatntcatgtccaactagcctaaggcaggaatcccttgttatttatagattaagggcttgttcggc

SEQ ID NO: 384946 - DNA, 146 bp, Zea mays
cagcaccccgatgatccgtcaggcgtggtagaacgcgtgcgaggcgacgggggtacagaagatcgtcatcacgccgggcaactacctgacgggcgggctggagctgaaggtgccctgcaagtcatccatcatcatccgtctcgacg

SEQ ID NO: 384947 - DNA, 230 bp, Zea mays
gcaggacccaatcttgtactttagggatcaggtgatgttcgactcgacgtcgacgatgcggcgtgactcgatggtggcaggggtggacccaggaatgacctcggtgtgccagatggagcagcaagcccccagcgtggactggcagcaggcgtacacgtcggcggagttcttctccacgctgatccggtcaaggccctacccccttgatgatcagatgcagaacgacatgg

SEQ ID NO: 384948 - DNA, 181 bp, Zea mays
agtgaaagctctcttcatcctcctcctcctctcgaattccgtctcttgtccctgtcgtcctcgcccggtttccccggtttttgagaggggaaagaggaggcggaggagagggatggggagggacgagaggttcccggtgtgggaagccgcgctcggcgccggaatcgcgccgcttcgcgct

SEQ ID NO: 384949 - DNA, 183 bp, Zea mays
gtgccctcgcagcggcgcatcgccggcggggttcggatgcagtgcgccacggaccgcgaccagatggcgctcttgttcaaccggaagctgagcctggaggtggtcaagctgtccgggaagataccgcggcgtcaacatcttctacgtcgacctctgactccgtactcgccgacgtggtccagc

SEQ ID NO: 384950 - DNA, 132 bp, Zea mays
ccctaacatcacggactatgctacggaatgactttggcagcttctagtcggcaagctgccaaagccatgcctaacatcacggactatgctacggaatggctttggcagcttgtcgaggatgaagctttgagg

SEQ ID NO: 384951 - DNA, 270 bp, Zea mays
ggagattgttgccaacgtcgctcctcgtcttagccattgtttggaccccgcggtgtggacaagggcgttcgcacgaaagcatcgatcgagtacaaggaaccgtcgggcgcatggtcaatcagagtgccaagaattcctcaccggcgtgaatcaccgccaccgaatccgccttgcgccgcggctatgcatctctacacctccatctttgttctgccaggaattgtggaagaagtccctgcgtatactatccgtggaaattgcccccacttg

SEQ ID NO: 384952 - DNA, 274 bp, Zea mays
aggaggatcaagaattaggccacaaaagttgtcaccgatcaggaaaaggaatgcttgaagtattatgtgtcgtgttgttagctgaattttaggcctcaattggtcgttcctacttcatctcactactggaatgctagctgttttggtggtttcagtaattaggccacaaggtgaacgcctgctatgttgagatgaagtaggaacacctgctgttttgctgttttgtttgcctaagctagctgttttgttactgcaaactgtgtctgtgtttcac

SEQ ID NO: 384953 - DNA, 270 bp, Zea mays
ggccgttcgtgcgtgccgtgagggagagagggaggtgctcgcgccgccgccgtcgcaggcggcaattcctgtcgttcgggtcccagggtggggtcgcgaatggccatcaacctgcgtggactacgtgcgcgcgagccctcgatccgagaacctttggagctcgcaaacagggagcacccgacctcggcgccgtgggccattcattgccaccgttgacctgcgcattcgctggcgatgtccactcggtgggagttccagatggggcggcaa

SEQ ID NO: 384954 - DNA, 307 bp, Zea mays
aggaaaccgagaaggctccggataccaacagcggatgcgtcaagcaggacgacgacgagaagaagacggtcggaaccgaagcagttcattctcctcccaagagggaggtctccaacccgatactctcgtctcacaaacctccctgcaacatctaccataccggccagttaagctccgggcttcttatcactgaccggccttcgacgagggtgcgctgtgcaccaggaggggcgtcgtcgctcgggtttctgttcggtgaggagcatgagaaataacagacggtctcagtctaaaatctagaagacgg

SEQ ID NO: 384955 - DNA, 297 bp, Zea mays
cgttccaacttaagtaacaccatgaaacaggtcatatagatgtgacactaagtcttgtcacatcaagttgtggagtctcaatttatggtctcttggacacacattttctaacctgttagtcatattacagatggtctggcgctaagtcacacagcatcaaaccatcagtagggtactactatttatcaggttctgcaagtttgagctacccctccctaatcacacttattaatgaaaggggttgcatttagacccgaccagttgcctccaagagcacaagtgcatgattagacacat

SEQ ID NO: 384956 - DNA, 303 bp, Zea mays
  unsure (1)..(303): unsure at all n locations
atggcattctcaggcagaacctgctggtgttttaggcctcgtcgcctcaaggatggagaggatgcgcacatatgctgagcagaccaagcagctggaagattactacaagaagcagaggacaattgtggaactgaagacatctgctcgcccggtggagacatggcaggggctcgtagccgccctgcacctccagcatctggactcgcacccgacaccgcacaaactcaccgcgtanatatcattattaattttgctacctccgagtagagagtctanaggatcagaattccgatcctgcctgca

SEQ ID NO: 384957 - DNA, 299 bp, Zea mays
cggcaagctcatggccgagcggcatatcaccgtggaggcggtcttccaagccaccatgatcctggtcaccaccgggcgcgtgatagcggatgcgtgtagcatgacgacggacatcgccaaaggcgctgaggccgtctcgtcggtgttcgtcaatcctcgaccgccagacgaagatcgacccggacagccctgaggggtacaagccggagaagctcatcggagaggtggaagctgtaggggttgatttcgcgtacccatccaggccagacgtgatcatcttcagaggattctccttgagc

SEQ ID NO: 384958 - DNA, 252 bp, Zea mays
cgcatcgcacgagctacggatctgcggcccgacgactacgacgacggcgatgtatcggacgaatcattgcaagcaacgacgtcagaactaacgtcgacgatccatcctgcagcatccgatcctatccgatgacatggtcttacgtcgcgtgcctgctgcagctcctactgatcacggtggtgaacgtcctcccttagctcatcgatctcatcatcatcaaggtgtatccgctatactgatcggagtaccgga

SEQ ID NO: 384959 - DNA, 301 bp, Zea mays
tgatgatgtcactaagacaagcccggaatgatgctcgccatttgatgctgtcatttctttgggccggtctttgtattggcatctcacattttgtcagagccaacggccgcacgttcactaaccgacctaggtttcacaagtcacgccattgatggatgcaagatgaccgtttgctcgtcaagcgacgtcatagattgtcatcattcatcgaacttgttgacacaaattggtttgcatgaagtgttgcattttttttggcatggtacttgccctttgtaataagttttcttccatttcgtaa

SEQ ID NO: 384960 - DNA, 150 bp, Zea mays
gtgacatatatatgcctgaccaattgtcattatttgctattcatatatgttactgggtgtatttaatagctctcaatttatgcagttatgtttgcagttgacaaaaaaaagacaggaacaagaaaaaacgaaaccaaagaaaagaaaaag

SEQ ID NO: 384961 - DNA, 209 bp, Zea mays
  unsure (1)..(209): unsure at all n locations
gtgcgttcgaggaagggagttaattggatgtacgagataaaggtttaggttaagtagatgttgatgcaagttggtgaaatagttgttaatgctatgatagtaggctagttgtataagagtactgaagtgatgtgagttgtgaacagaataatgggggcgtgnggaggttgnagntanaatgcaggaatttagtaaagagatgagaaagg

SEQ ID NO: 384962 - DNA, 131 bp, Zea mays
aggatggcgtggctggagaggagggattgccggagggggaggccaagggcgagggagtagagatcgagcaggagcccttcgccgtgcccacttccggcgccttctacatgcacgatgaccggtttcaagag

SEQ ID NO: 384963 - DNA, 290 bp, Zea mays
ctgacatacacgtctgcatacatggatatgatcaccgtcatcttcgtagcaatgctcttctctggggacttcgtatcagtctgctgtgcagttgggttcttcaccctatggactttgtgctgcctgcaatggcacttatcaagacaaacgatgactgataacctagggttgcagtgtgctgtgaagatgctccgctctgctgtcgcaatcttcttcttggtcataggtgcccttgcatgcatcggcgtcaaaacctgcaagttcttccatgatatgtgatgtgatgaact

SEQ ID NO: 384964 - DNA, 290 bp, Zea mays
cggcttctccttctagggattcatcttcctctcgtcttccctcttcctctccgaggatacaaggcgccgtcccagctgtaggcttggcgttgctgctcgatcgcgctcctgtctagatccaggggcaatcccccttatcaattacaactgggactggtagaggtagggtcgccaccatgctggaggagctgctcatcttcacccggggcggcctcatcctgtggtcgtcctgccgggcgctcggcgccgcagccctcaagggctcccccatcgacgccctcatccgctcc

SEQ ID NO: 384965 - DNA, 291 bp, Zea mays
gcagtttagcacctctatctagttcttctctcttcagcctcggatccacgcgagcaccatacccctgcaaataataaggttaccagcttgcaggcagccacaggcacggtacttcagagcaatacactattacttcctctgccaggattcaggcacagtattgtatttggaattattgaacagtgtatttctcgtacaattcggctcataagttttttaagattcatcacaggcttcaactacaacttggctagagaaattttagaagaaggtatgtagctggtttgttta

SEQ ID NO: 384966 - DNA, 287 bp, Zea mays
  unsure (1)..(287): unsure at all n locations
ttgagtgctttgtatgtactatactacatattatttatnccnacatccagataacttatacattcccaagaaagatcagtcctgatggaaggtgttcaggtaaaggtgggctgccttttccccttgtccttatttagcgatgccgacgggcatttaacacccacctggaattcaacagagtggtccggggcgaaccagacatgggacggtcaccagcagtgccgggctgggctctgcggtgcggtccacgggagagcaggcctccagctggaaaggccaggcctgga

SEQ ID NO: 384967 - DNA, 286 bp, Zea mays
ccccaactcgtccagagttagttgtagctatagacctggttgttgtagcgcacgcagtagccataggaaatacggctgcttgctgccaagatgagtggcggcgccaaggcctacgccgccgtcgtcctgatcaggatcatgtactccggcatgcacgtcatgagcaaggtggccctggatcagggcatgaacccgctggtgttcctgttctaccggcataccactgccgcgctcgttctcatccctgtcacctttgttgtcgagaggcggaaagctaagccggtta

SEQ ID NO: 384968 - DNA, 276 bp, Zea mays
tttgatgtagattgtatccatcgacatttcatatgttatgaagacatgcttattttgatggcttttgtgaatcaagtcatatcatgctgcattttcttgactagtgatctgtcaaggtaatgaagacttagcaggtacttttttttttcaaaagccatcaaaataagcatgtcttcataacatatgaaatgtcgatggatacaagtcacttcaaacattcaggacggtaaggaagatctgagaatcagcaaggagcttgggaccttaggctcgcca

SEQ ID NO: 384969 - DNA, 252 bp, Zea mays
gaaccattagcaccctgtcggagcgatttgtcgtgagcagtggcgacgcaggttgtggccatcatcgaagacctcttggcgccgctgttggggcctcggtgttgagttgtggcgtcaccttgaacctctggggacatatctgtgaccttggcgggagttgcggtgcatcgtgaccgagttaattcctcgccgtcatcacaccgccgccgcggatccgcccactgtcgtggtccgctaaatctccggcatata

SEQ ID NO: 384970 - DNA, 290 bp, Zea mays
ggcaagcacgggcggtcggggcgccagcaccaccactggctcggccgtctccacgacgccgtagtccaagcggacggagacgaaagcggtcgcgaaccaggcagccagccagaggactggttaccgaaccggaggagattttacacacccacctaccccgtggtagatcgacgacggccagaacatgttgaattggggatggggagggtacagattcccactgttttgctaggaaataggagtatcgttggcaggcgtcggatggatggcatcaatgccgctgcccctac

SEQ ID NO: 384971 - DNA, 284 bp, Zea mays
cgacgctgtctggccagcggcgttgcccgaccacccgttccacaagaagcaggatgctgtcgcgccggcgcgttgcaggacagctaagatgcacgacgcggtcaagccggcaggggagccggatcccggatacgtcatgtatccggcatggagccccgtccgcccctaatcgtcgatttgttgttggagaacgacgacgctccgccggcaacggcgaatgccacatgcattacatgctcgcggctcccatgcgatattaagcactagtagaggaagtgtgtgat

SEQ ID NO: 384972 - DNA, 282 bp, Zea mays
aaacggagaaagatcaagcgagaacagactttagaagctggggaatatgcaccttctgctccacagcctccctcccatggatctggcagctcacaattgtctgacatacgagaaagagaaaggaaaggggtaatttcacagcatcgtatttcacacgctgatgaccttcctaggacacatggccctgacatgacaagcaagtcaagtcgtcgagagtctgaccaaatgcacgagagggaatgggaagaggaaaagcgaccaagaactgaaacgaaaaggaag

SEQ ID NO: 384973 - DNA, 293 bp, Zea mays
ctacaacttggactgcttcgaccagaagcccttcggcgctgccaccgccgccgccttagctgaaactaccagcgtgcccgcgtcacgctgacgcgtaaaaacataatgcatgcatgggcaccgcacagggcacaaatcactaacagctctcttttaaataatctgcatgcttattcgcttgcataagcatgcacacgtagtagatcgtgcatgtgtagggcgagcatgtttactttcatcccgggcggccggggttgtgtcgtcgtgcgagttgccgtgaagatgtactatgc

SEQ ID NO: 384974 - DNA, 109 bp, Zea mays
cggaaaggtgacgcactccttttcttcaaccttaacccagagggcagcaacgactcggtgatgctccatggctagttgctcggcgataaaaggcgagtgatggtcggct

SEQ ID NO: 384975 - DNA, 285 bp, Zea mays
ttagcaatgagctctcctctcaagctgacattggttcaccacagtaccacgctgtaatgagattgttggcagcgagtcagctgatcaatcaggcagtaggtgatgctctgagtggtttgctttaagtagaggcaatttaacagttaaaggaagggcaattcaagaatggtgtggactatatagtgatttgcccagtagacaactgaaagtgaaagttaaagatcgaagtgtggattgtcacaacagatgcagagacaaaagttagccaaccttctagtttgcaag

SEQ ID NO: 384976 - DNA, 286 bp, Zea mays
gttcttctgaattgctttttcttaatgtccctcaagaccctcctcagcctggctttcccaaagggcaggttcttaaaacctgaggggctcgcttcttttatcctgtttccaggagcctcagaatggttcaggcccttgccagtcatggcacccgcctgtcactgtggctgcgtctggtaaccacagattgggggggccacgcctaaacagtgtccgtgcatttctgagaaaagtttttccagatattacattctgcttttctacatttctcattttccatgtgggc

SEQ ID NO: 384977 - DNA, 279 bp, Zea mays
cctttccatgtcatcgtatctccagccaaacaccgcacgggttcagagagagagtgaggcgggggcagaaattgcccgccagctccgctgtcaacttcgcctgacagccgggcactcgcggggtgtctcgtgaggttttcgtggccgtccggggaggggacgaccgcggtagtgtctggaattcgacgccggactttggtctccgccgtgcaccgtgggcagccaggtctacgctttgggtcgcgtgcggtcacgaggatccgacgaatcaccctagta

SEQ ID NO: 384978 - DNA, 134 bp, Zea mays
cgctgagcccagcccagaatcagaggagagcgaaatgatcttgataatccggaagaagctgtggctaccaaaagcaggcccgcaggattccggtcacgtagttcttctcgtacctgttcctctcccagcacctg

SEQ ID NO: 384979 - DNA, 183 bp, Zea mays
cctatagaaagataatactgcaacaaaaaagcctaattaagttttagattttgtttcatgacatagatcatacaataggatgttcaggttggccatttttcatatataaaaaaggcacatgttaaattggccgcatacaaattgtaattgagggcacattttgattactgatagttctttctt

SEQ ID NO: 384980 - DNA, 307 bp, Zea mays
gtctcacgctcacggcgtgcggcgcttctactcccctcttcccggcgtgggcccgccgccatggcaacctacgcgccgccggccacgccctggacggagattccgctgtgcctggggctggatgttgtgacctggtccagacagagacagcattcccatgtcatgtcaccaaccatgcgtggacaagtgccaaggggcacagtggcattggcatccctgacggcgttcacctcgatacagagctggaggtcaacccgggaaggcgtcgtcaattccctgatggcaggttttgcgttttctgaatctg

SEQ ID NO: 384981 - DNA, 240 bp, Zea mays
cttcggaacaacatgtatgggaagagggtcctgtcgaaaacctgcctgaagagcaggaagccctgatcccaacaatcccatggccgtcctgatcgcgctcaagtgtagtacaaatcctgtaataaggtagtgttatctaggaatggggagggggaggaggaggaggagagtaggtctggggtctggttggaggaggaatccacattttgggccagtgtagaacgctcccatgcgtgttgt

SEQ ID NO: 384982 - DNA, 124 bp, Zea mays
tcgtacgaggttctgaattgacacaccggctaatgcatgcatgggtgtacgcttttgtcttttgctcggagacgacggatatgcaggagctttactggatctggaggattagcgcttcacaggg

SEQ ID NO: 384983 - DNA, 233 bp, Zea mays
caatgtactatcacaataagacgaagatgccaccaccaccttgctcttgcttctctgctgtctctgttcccttctcctccttcaaaaccataacaatgctcctcctcctcctcctcatccttcagcaactgtctgcggcagctccatcgtagccatccaggagaggaggtacgcggacgccaagacgtccatgagcgccgcggtggatgcgcccgtcacctgcgaggatgagt

SEQ ID NO: 384984 - DNA, 231 bp, Zea mays
ggtggtgatcatggaggtcacgtggttccaggtggacctggactatgagttcgacgcgcccaggtggttcgaccttgcccaagacgaggcgccgctggatgccgctgcggcgcaagagtggatcgcctccgcccccagctacccgccctctcccttaattgctaagatgttagctgaggatcttgggttacaaaccattagaagcattgcagatacagatgatctgcattg

SEQ ID NO: 384985 - DNA, 251 bp, Zea mays
cgaaatgctagttttcagaaactaagtgacagattcaagtacagtacagaaactattcacaggcatatcaaagcatgctttgatgcagtcacaccaatgactggtgaattcgtcaggccaccttcaattcaagctcaccggaaaatatcctctgatacacgttatgggccttactttgagaactgtattggagcaattgaaggcatccatgtccctatgacaatatcggacagtgaagcagctccataccg

SEQ ID NO: 384986 - DNA, 143 bp, Zea mays
ctttgggatccccagaggtggaacagccccactttagagtctaatatactccattcacgtggcagaggtggcttgcaggagtcaagattcatcgagaagcttgtcgaggacgagactcagatggaacgcctcgcagacaactg

SEQ ID NO: 384987 - DNA, 227 bp, Zea mays
atcagtatttgttccgcatcatcagtatgatgccttggaccggaaaacaggtacccgtaacttagctcaaccaccatatcagcaccaagatttgttgctaccaagccaacaaaatcaaggtacaattttgggaaaccaagttcatcctcatctgccccaacagttacatccccattcccatcctcaccatcaggagacttttagaagctttgcccctggcatgactg

SEQ ID NO: 384988 - DNA, 254 bp, Zea mays
tttggctctattttcggtataaagttatttagattgagtgactacagggtacaattcgtggtttacttcgcctacataaacttgcaagtttcatttgcttttcttatggcaacattcttttcaaattgcagaactgctagtgtgactggatatctcttcacaattggttctgcctattcaggagaatatttattcaggcctatttttgaagatatgtccctctcaagaagctggagtacactcatggagttgtt

SEQ ID NO: 384989 - DNA, 288 bp, Zea mays
  unsure (1)..(288): unsure at all n locations
gcgctctcttatctttcctcacatagaagttgattcagaggaagaaatggatgttgatgaagaagatgtgcaagagctgcgtgatcacattagcaagattcactcttcatctgaagagacattggatgactttatggatgcagaaagtggaggacaangcactccttgntctgtgggaagaagtgaagatgatcaagtaatcatagatgattttgaaggtccacaacaggaagagcaaaaagaagtatctaacaatacaaatgctaatgaagacctcggttctgacag

SEQ ID NO: 384990 - DNA, 248 bp, Zea mays
agcggggatccgaggggtggggtggaggggaccgagggacgaggatgctgccgtgatggcgctgtagctgtgctgctgcgcgagcggcggcgaacgaaggatgcgggaggccgtggctttcgcgaccgagtcggtggaaaagctgctggtggtgatgcagcggcactgcgcctcggccacctcgtggatggacggagagctgatgcgagcggtgcggatggagcatgagaagaagggcatggccgccg

SEQ ID NO: 384991 - DNA, 218 bp, Zea mays
aatttttggaatatattctagaagaaattagtggtcaaaggttaacattgaaaccgtggaaaggcaaatgtggcaaactatttttcaccagagggagtaaatccttagttttgatcactctaaccatgcagtacatatactatctcttcttctgctgatgattccaaatgatttacacaatgttctaattcccaaacatacatgccatgttctaattc

SEQ ID NO: 384992 - DNA, 134 bp, Zea mays
gtaaagggtgtcataagtgattcgttctcattgtgctatggtggcatggatattggtggcggtgctatggtactcggtggaatgcttgctcctccagacatgattttattcaaactcggatcctctccgcagcc

SEQ ID NO: 384993 - DNA, 169 bp, Zea mays
gcaactctacaccttcaggttgagctgaacacattatgttcaaactttcagaaatggatagcatcccacaaagcatatttgcagagcctaaattcatggctactcaagtgtgtgaaggcactacaaaggaagaggaagagttccaggaaacagaacatcaaagctgatc

SEQ ID NO: 384994 - DNA, 169 bp, Zea mays
gaatctcacttgggtgtgccaaatgcgttatcagtgccagatgactaggattcaggaaacatgcgattcaaattctttgaagcttctcgagaatattacagaaatggacaggagcattgcaagcctcaatcgtgaagtggaagggctaaagaattgtagatcaattcca

SEQ ID NO: 384995 - DNA, 168 bp, Zea mays
gtttcatcgtgttcaagatcaacgagaatctgcagcaggtggtggtagacaagcttgggggaccaggtaaaagctacgatacattcagggcctacgttcccgccaacgatgtgccgctacgcgatgtttgattttaactttgtcacggatgggaactgccagaagagc

SEQ ID NO: 384996 - DNA, 166 bp, Zea mays
atgttaaacaaggacacatcattattgtaccacacatggaagcgttatgacaagctaccattattcatctacataagtgataattatagcttgtcataacgcttccatgtgtggaacaataatgctgtgtccatgtttatgttaaacaatcgatgcctggaattta

SEQ ID NO: 384997 - DNA, 166 bp, Zea mays
cgatggtgcatagacatcagatgcaagcaatgtgaacatacatatgacacactttgtattggatgtttatcggggcaggcttgtacaagatggctatggctactgaccaacagccagcgccgaggagcacaaggattgcaatgtatcatgttcttgatcgttgtgg

SEQ ID NO: 384998 - DNA, 188 bp, Zea mays
gaagcatatgaggaagaagtcatgccaaccaaacagtcatataaaaaatgtggagatcagcaatcccagtcaaccaaatggcaaatctgaggaagtaagcatgaaattggatatgagaaaaggcaaagaaaaagagagtgctaaatctgacgatggcatgacgttgggtgtgaatggaggcaatccaa

SEQ ID NO: 384999 - DNA, 149 bp, Zea mays
cgatggcggaattagcgacatcatcggatggattggtggacgaagaagcgagtcagctggaaccaggatattggagcactggaagtagccatggtctgcatttcacaaatgagcaggacataagaaggggaaaggcggctcttgtttcc

SEQ ID NO: 385000 - DNA, 286 bp, Zea mays
atgctgctgtgggggaaggagacagaccaggagcggggcacgggcaaagagcgggaacagctcgagacggactgcgagaagcaggcgaagaaggtcagcgactgtgtctacgaagcgcccaagacgacgaagtgactgccgccggccatgagcggcagacggctcaatcaagcgccatgccgtgctccagttcggttctatatttgtgatgtacagagtcaccgatccggtctcgcctcatcagctatgtatatatatgcatatgcaatgcggcaacagacagacg

SEQ ID NO: 385001 - DNA, 293 bp, Zea mays
agagatggctaatatttccgagatttttattgggttgatgtgttcatatgattttattaagaacaacagtaaaatacaatgaatcctggaaagcaagttgtgctaagttatataattttagtaaaacgtattcatgtctttgatactgatgtaattctgaatttctgatgtgagattccaacttaagtacctaactgctttcccagttgcctgaacttgtagggtatttaccattcttatgtcacttctctgaacttgcatgatattcaccattcgtaatgtcattataatag

SEQ ID NO: 385002 - DNA, 279 bp, Zea mays
aaaggttttcgtggagcctggttcgaggcgactgttgttaaagctgtcggcagcaagttcctcgtggagtatgctacgctgaaggccgatgacgggaccaagcctctgaaagaatctggagggcaaggtctgatgtgccactgatggattcaaactacttgacgaggtcgatgccttctgcaacgacgcgtggtgggtcggtgtggtatccaaggtcctcggcgagaagaggtgcacggtctacttcaggccttggaaggaagagatggagttcgagca

SEQ ID NO: 385003 - DNA, 133 bp, Zea mays
aattttatcaacgcttctcctgctggttactccgcgcgccttctctttctctcacggacgtcgatcgtgttcttcaggacgggctagctagctccctccctccaagccatggcgacgccggagcacaaggggc

SEQ ID NO: 385004 - DNA, 176 bp, Zea mays
gcaaaacaccttcacgacaccgaccgggagggagatttagaacaccctatgcggacttcctcaagtgcgatatgtagggatggatggcctcggaccatggcgtttccttgccggtacgggtccgtcgtcgtgccgctaaggttgggcaacctgggcatgcttcgaagggctggcat

SEQ ID NO: 385005 - DNA, 177 bp, Zea mays
tggaaatcgggagggagaccggagacgagaccgccggagatggagccgagatctgcaatctacagatccggcgccctccttctcctcgccgccatcattgcggaggtcgtcatccccgcatccgccatcggagacaagtgcgccgcctgcaaactgttgctacggactggagattgg

SEQ ID NO: 385006 - DNA, 170 bp, Zea mays
ggcggagcgatgagatcgatcgcccgacccccctcacgtccggggccgcattctctttccgtcccggggaaaaaagaaggaaaccgaaccttggcagcggcgtgccggcaggcatgtcagcgacggtagccggccacaggtccagattccggaaccgaaccaccgtcccc

SEQ ID NO: 385007 - DNA, 172 bp, Zea mays
gatactgaatcataagcacaggtgttgttgaggttgaactaggactgcttgttgttactgtcctagttcaacctcaacgtctcctggcttatgattcgtatcagacaagcagtccttctgcatatacttactgtatagttttattttaaagctattggcccatgaagcctct

SEQ ID NO: 385008 - DNA, 174 bp, Zea mays
caggcctgtcactctagtcgggttctcgctgggggctcgtgtggttttcaagtgcctgcaggagttagcgcactgggaaataatgtggggatcgttgagagggcggtgctcatcggtgcgccggtctcagttcaaggtgagatgtgggagcctgccaggaagatggtcgccgga

SEQ ID NO: 385009 - DNA, 170 bp, Zea mays
gctgttgcagttgcaggtggtgtctggtcgcttgcggtagccggtaggcgggttcgctgcgggtggtcggcggcgcgatggtttccttcgagatgaacgacctcaagaagattgggctgggcttgactggatttggagttcattcacattgctcgggatcattatgttgt

SEQ ID NO: 385010 - DNA, 176 bp, Zea mays
aagcaatccttgatatactgtaccatgctatctcctgtttaggatttcaaggattgcttcccctcagtcactcccatcgcaacaggagatagcatgaaacagtatttggttcaggtactgcaatgctgggggtcatatctcatatgcctgttccgatctgcatataataatagggt

SEQ ID NO: 385011 - DNA, 169 bp, Zea mays
gaacatactggagcatggtattggagtggatatgggctaacgtaattggagtggactctaacaagcacatggaaaattaggcaaggagtgctattgtgtctgctggactcccatcatcaagcttcacattcagaagaggttcttgaagccttgccagtagaagacaatt

SEQ ID NO: 385012 - DNA, 166 bp, Zea mays
caccagcagttctgagctagctatggcgatgatgatgagagcattggcagcagcggccatcctggccacggcgtttgcactgtcggcacgagccgagcccccgcggtgctgcgccaactcgaccacggcgctctgcacctactgcctgtgctgcagcagatggggc

SEQ ID NO: 385013 - DNA, 308 bp, Zea mays
tggggcggagaagagaaagacgacccacagctgattgatggtgtagcaatcgtactagacgagatgagcatgcctaggagtacttatgcattcacaaaacggatccacggcgattgtggagcggttgacataacggtatcacgccttgactttgcagttgaggcgacgatacaacttcacgtatctgaagtagagggcagcttcagtttgcgtgcgggctgttttaccagtgggttatgtgaagaaatccagatctttaagggcaccattagtgagccgcgtgccttgaggagatgtgttgttgctgc

SEQ ID NO: 385014 - DNA, 329 bp, Zea mays
aggggcgcgagttaaactagtggcgccgccatttccgtagtgagaacagggagagagagaaagaaccgagctgtgccatcgccggtgggctcgtcgtggtcgctgccccagtgtcgtgccgtgaagctccacccgtgcgtggagaattattgtggcctcgtcacgattgaaccggcgcccggggctcaggatttcttcaccggagactgtgaacccactgtcctccatggccagcctccctgcagactccttctctgacgagcacgccactgtgagatctgaggttcaacaagtagagatagctgagcaggagctcattgaaagagaag

SEQ ID NO: 385015 - DNA, 175 bp, Zea mays
ctttgggaagacaaatggggagtgcctatctgcccaaatgacaaagatatggcgccaccaagtaatatagttctttttggccctttttttcgtctacattcgaagaaatcataatgaatgttgacatacatacaaaaaacattcataaattaattaatggatgcatgtttaatct

SEQ ID NO: 385016 - DNA, 99 bp, Zea mays
caatcttttaagacatgcataagatcatagtgccatgaggctaacatctgagacttggtgttttcagattatctccggaaaatcatagtgcagggaagg

SEQ ID NO: 385017 - DNA, 286 bp, Zea mays
cttacaagatgttgcatacttgtatagcttataaagaagacattgaaacatatgctgatgcagatttaaactataaatgggaacctacagctgaagagtgggatttgtttattgcaattgaaccttttcttgcatctttagctaaagttaccactgcattgtctgcttcttcatatcctactgcgaatctattctatcctcacattgtggatataaaaattgcattgagggcagcaatggtctccaataatttgaacttgagaacaatgggtaatgctatgatgga

SEQ ID NO: 385018 - DNA, 112 bp, Zea mays
  unsure (1)..(112): unsure at all n locations
gtagtaactcggaattcgctcaacgctgcatacatcgacggcggggcgacccgganctacgctcgaggaatcacctagtctcggcgggttctcgttcttggaggccttccat

SEQ ID NO: 385019 - DNA, 213 bp, Zea mays
aatattcatcatcttggtgaacgatacaatggtgcgccaaactgctatggttgtcaaatgtttacactgttgatgtactataagaacagcagaggtcgtagctatcgtaggcagattggaaaaggatggtgcgtactgcaaaagagaggacatcttgcttttgtgctcgcaagaaggatgcaaaggatctgtgatgatcagctgctgttttgg

SEQ ID NO: 385020 - DNA, 99 bp, Zea mays
acagttttcatcacaccatgatgtagcgatggacttgataaatagtgtaactggagttgacgaggaaggacgttctcgccaaaggattctttcttttgc

SEQ ID NO: 385021 - DNA, 301 bp, Zea mays
acagagtttcgtttgagttccagcacaatgtatgtggccgttcaatatacgcagaaggaactgttgatgcagctatgtttctctacacaaagattcaatcgggtgcgagcaagaaattgtatgacatgattgatgtcttgagagaagggaactgagatgaggtccatgttggcgtcagatgagctttcatgtaccaatttgcaagctcaattccaccgtgaattaggttacttttacaatgtacccttcccaatttaccagttaactcactttcagttttgaattggctgcttcaatgatg

SEQ ID NO: 385022 - DNA, 297 bp, Zea mays
agctcactttgtagagtgtagcggtacggctttctttctcctcttggcaggccgctcacgcttctgctcttctgatgtgagcttcgaatccaaccagcgatgggcgatggctactcttttagcccgaagctcctcgctacatggccaggtaccctccacaactgaaggatgagatcgaaaaacaaattggtgacatgttgatgcaaggtgtcattcagaagagtcatagccccttcgcttccccagttctattggttcggaaaaagacaatacatggcgcttttgcgtggattacag

SEQ ID NO: 385023 - DNA, 263 bp, Zea mays
aacttaattaactatgtcttgctgttgttgtattgcagtagtatgtacactgctagactcactatacttttcttattaaacattttgtttcagtgaaccctatagcctgggcagttcctacaaaacatgagggtgatgccaggaagaagcttcttttgccgatgagacacttgcatcagaagtagtgctatcccggaagaggtaaataggaagctctttgtcagtagagccaaaccatctctctgatgaacttgaaccaaagt

SEQ ID NO: 385024 - DNA, 185 bp, Zea mays
tggttttatttatgcaaagatatatggtggttttgagaagatacagtcttcaatctgtgatcttgttgccgttgccaggctattaaatgccactctggttattcctgagatacaagcaacaactcgtacaaaagctagttgcatgcaaaagcgattcatttcaaaaaaaaagataaaaaagtcaa

SEQ ID NO: 385025 - DNA, 292 bp, Zea mays
ctccgtaccatggcggctatcgctgaagatcgtcaaccgcagcatggcgtcaacagagaagctgcgacgaaggcggtacacacgcagttacagatggagcgtacgacgaaacgtgacaacaggagtcaagaggagggctcgtctgctactgcctggttaacagcgtgagtcacctgagccgcaataaccgtggctttaccacgctgccagagaggtacgacctgccgacgtccgaccgacgcgacgacgacgggctcgaccaggtgaagctacccgtcgtcgacctggcggg

SEQ ID NO: 385026 - DNA, 185 bp, Zea mays
aagctctgtacaggtgatggagatcgttgttgcggattcttatcgtcttcctggttacatacttacattattgttatgatctgatcagcggtaggttttgtatacgctgctcattgattcgtctgcctgctattttcgtaaaaaaaaaaaaaaaaaaaaaaaaaaaaaaaaaataggagaagaaa

SEQ ID NO: 385027 - DNA, 188 bp, Zea mays
ctttgattgatgtatgcgataatccgagggttgagattcacgatgagtggccatttcgttccttcagcagcaccgtggaggaacttcttcagagactatatcaagtcattcgatcctagctcgactgtcaatcaagagagataccctcgccttcaacccaaaatcgggaaagggaaagggttcttaaa

SEQ ID NO: 385028 - DNA, 236 bp, Zea mays
cggaagtgcgggcggttcatctaataacatcagtgacgctgaaaggacattctttgttgagctttgggatgtctcaggacacgaacggtacaaggcatgccggtcgattttctatacacaaatacatggtgtcatatttgtttacgatctctcccagaggcagaccaagacgaatctgaatcactgggcagtgaaatgctgaaactggcaccttttcagctccattgggatctggt

SEQ ID NO: 385029 - DNA, 197 bp, Zea mays
actgctcgagccggggtgcgcgcggtcacggccacggtgcccatgaagccgccgcagttcgcgaccgtgaagaacgtgaactaccttcccaacgtgctgtccatcatggacgccgaggaccgcggcgccttcgcgtccgtgtgggtggacgacccagggtacgttggcgaagggccccatggtgaacgttgcggtcg

SEQ ID NO: 385030 - DNA, 189 bp, Zea mays
cgggaggctgcgcacgcgccatcgaggatgtgcaagacagggagttcacggggaggatttgcggtgctctctgtcgcagccagcacagctgttgttggatgtccaagggtgaggatgagactacacatacacggaggtcgtgtacactggagttagtactaccatcgacggctctctgtgatataacat

SEQ ID NO: 385031 - DNA, 180 bp, Zea mays
gcctatggcaagccagacagataaatcaatgcccggcgctcgaccttcggcaggagccaagctagcgttggcaaagccaaaggtttacgatgatggtctggataaccacaggaagctggaagcagcgaagcgcaagctccaggagcggtaccatgcagcggagcatggttcgtggtctct

SEQ ID NO: 385032 - DNA, 248 bp, Zea mays
aataattagcacactatatttggcttgtttcttctaactttatcctctaaataattgcagctgctggtacttcaggtcgccctcgcacctttatgaagacatgcaattgacaaagagaattgatcttttttatgggcgaagtgtcgaagatggctttgggtgaagaaatgtcttgttagcatcagtaaatgcgacttcacaaccctaacaagcttgtgccttaacaccagaggttacaagaagttgga

SEQ ID NO: 385033 - DNA, 199 bp, Zea mays
caagcctgtcacaaacagccgtgacactcaggagatacgcctcgaacaaggccttcagatgctcaagatattcaaggatctgtcagccaacttcatctcgagacttgcttcatgagagcgcagagtgtgcagtagagtcaacgcacatcaagcgctggcatagaccttgcacggagaccgactgtatggaccacgcgac

SEQ ID NO: 385034 - DNA, 140 bp, Zea mays
  unsure (1)..(140): unsure at all n locations
tgcgctagtgtgatgccttctcctagttcattgcttccggttcgcaatccctaatcctgatctcacttaagcgttcgngagtgctctccagttgctaaagactgtcagattgagttatagtctcagtacacgggtgttgt

SEQ ID NO: 385035 - DNA, 1777 bp, Oryza sativa
  unsure (1)..(1777): unsure at all n locations
tagtatgcagcgcacaagccccagcaccagcaagctgctactcatcatcagcgagagctagctagctgtgtgtgccacttacactgctgctgctgctggttctagctaagctcaccgatcgtcgtcttcgtcatcgccggtgacctggtgaattagtcgagagagatggcggcggcggtgacggtggaggaggtgaggagggcgcagagggcggaggggccggcgacggtgctggcgatcgggacggcgacgccggcgaactgcgtgtaccaggccgactacccggactactacttcaggatcaccaagagcgagcacatggtcgagctcaaggagaagttcaagaggatgtgtgacaagtcgcagatcaggaagaggtacatgcacctgacggaggagatcctgcaggagaaccccaacatgtgcgcgtacatggcgccgtcgctggacgcgcggcaggacatcgtcgtcgtcgaggtccccaagctggggaaggcggcggcgcagaaggcgatcaaggagtgggggcagccgcgctcccgcatcacccacctcgtcttctgcaccacctccggcgtcgacatgcccggcgccgactaccagctcgccaagatgctcggcctgaggcccaacgtgagccgcctcatgatgtaccagcaggggtgcttcgccggcggcacggtgctccgcgtcgccaaggacctcgccgagaacaaccgcggcgcgcgcgtcctcgccgtgtgctccgagatcacggcggtgacgttccgggggccctccgagtcccacctcgactccatggtcgggcaggcgctgttcggcgacggcgcggcggcggtgatcgtcggctccgaccccgacgaggccgtcgagcggccgctgttccagatggtgtcggcgagccagaccatcctcccggacagcgagggcgccatcgacggccacctgagggaggtcgggctgacgttccacctgctcaaggacgtgccggggctcatctcgaagaacatcgagcgcgcgctgggcgacgcgttcacaccgctggggatctcggactggaactccatcttctgggtggcgcaccccggaggtccggcgatcctggaccaggtggaggcgaaggttgggctggacaaggagaggatgagggcgacgcgccacgtgctgtccgagtacggcaacatgtcgagcgcctgcgtgctcttcatcctcgacgagatgcgcaagcgctccgccgaggacggccacgccaccaccggcgagggcatggactggggcgtcctcttcggcttcggccccggcctcaccgtcgagaccgtcgtcctccacagcgtccccatcaccgccggcgccgccgcctgagcgctccgccatggtcgccgccggccggcctacgtacgccacacgtcatcttttatcatcgatcataaaaaaaaaattatatatatatcgatatcgatatatatatatttcctaataataactactactacaataacaacgttatcgaattaaaaagttattcccttttgccgtgtgttggtagggataaaaagtgaaaaaaaaaattattactttgttttgcatgtgtcatgtatgggtggtttggttggtagtagcatatatatgtatactgaaaagagaaagggaggtcaattaagtgtcatggatggtgaggtttattgtaaacctgtgtaagagatgcttggctgttactattcaatttgaaaacttaattaattttgtgtacctaaattgatgtgcaaaaaaannnnnn

SEQ ID NO: 385036 - DNA, 1865 bp, Oryza sativa
tcccgccgccgccgcttctccactcgccggtgacctggtgaattagtcgagagagatggcggcggcggtgacggtggaggaggtgaggagggcgcagagggcggaggggccggcgacggtgctggcgatcgggacggcgacgccggcgaactgcgtgtaccaggccgactacccggactactacttcaggatcaccaagagcgagcacatggtcgagctcaaggagaagttcaagaggatgtgtgacaagtcgcagatcaggaagaggtacatgcacctgacggaggagatcctgcaggagaaccccaacatgtgcgcgtacatggcgccgtcgctggacgcgcggcaggacatcgtcgtcgtcgaggtccccaagctggggaaggcggcggcgcagaaggcgatcaaggagtgggggcagccgcgctcccgcatcacccacctcgtcttctgcaccacctccggcgtcgacatgcccggcgccgactaccagctcgccaagatgctcggcctgaggcccaacgtgaaccgcctcatgatgtaccagcaggggtgcttcgccggcggcacggtgctccgcgtcgccaaggacctcgccgagaacaaccgcggcgcgcgcgtcctcgccgtgtgctccgagatcacggcggtgacgttccgggggccctccgagtcccacctcgactccatggtcgggcaggcgctgttcggcgacggcgcggcggcggtgatcgtcggctccgactccgacgaggccgtcgagcggccgctgttccagatggtgtcggcgagccagaccatcctcccggacagcgagggcgccatcgacggccacctgagggaggtcgggctgacgttccacctgctcaaggacgtgccggggctcatctcgaagaacatcgagcgcgcgctgggcgacgcgttcacaccgctggggatctcggactggaactccatcttctgggtggcgcaccccggaggtccggcgatcctggaccaggtggaggcgaaggttgggctggacaaggagaggatgagggcgacgcgccacgtgctgtccgagtacggcaacatgtcgagcgcctgcgtgctcttcatcctcgacgagatgcgcaagcgctccgccgaggacggccacgccaccaccggcgagggcatggactggggcgtcctcttcggcttcggccccggcctcaccgttgagaccgtcgtcctccacagcgtccccatcaccgccggcgccgccgcctgagcgctccgccctggtcgccgccggccggcctacgtacgccacacgtcatcttttatcatcgatcataaaaaaaaattatatatatatcgatatcgatatatatatatttcctaataataactactactacaataacaacgttatcgaattaaaaagttattcccttttgccgtgtgttggtagggataaaaagtgaaaaaaaaaaattattactttgttttgcatgtgtcatgtatgggtggtttggttggtagtagcatatatatgtatactgaaaagagaaagggaggtcaattaagtgtcatggatggtgaggtttattgtaaacctgtgtaagaggcggccgcgttcggttcacacgtgaaagtgcttcgaaaggtgtcagcaggtgcgcggagccggagccggcatgttcgcccgctgggccgagtgttcgcccacttctgagtcttcgcctttagagagaaatccgtgtccgccccagcaagaaaacggtgcgcgttattgtactaacgcgcgacggagcaagaaaacgtatgcgcgtgtacggaagcgcaacggctttcgcgctcatcccttgcttcaaaactacaggttttagcccagagtttgc

SEQ ID NO: 385037 - DNA, 1641 bp, Oryza sativa
  unsure (1)..(1641): unsure at all n locations
aattttttnactcctctttccccctcccttcttcttgcttctaatcccccaagcaataacgaggcgtcatctgactagttctcttctactctccctcctctagtcctcttcttcttctactttgtacgcgccactcactctccgagcttgacggcggcggcggcggcggaggtcgtcgagtggtggtcggggagatgggtcaagatgaggtggaggtaggtgcggagaagaaggatcaagaactaccggaggtggaggtggtcgaggaggaggaggaggagggatccaagaaggcggcggcgggctgcgactactgcggcgacgcggcggcggtggtgtattgcagggccgacgcggcgaggctctgcctgccatgcgaccgccacgtgcacggcgccaacggggtgtgctcccgccacgcgcgcgcgccgctctgcgccgcgtgcgccgccgcgggggccgtcttccgccggggcgcgggcggcttcctctgctccaactgcgacttctccaggcaccgccacggcggggagcgcgacccggcggcgccgctccacgaccgctccacggtgcacccgtacaccgggtgcccctccgcgctcgacctcgccgcgctcctcgggatctcctactccgacaaggcggcggcggcgaccgcggcggcggggggcgacgacggtgggtggtgggccatctgggaggagccccaggtgctcagcctcgaggatctcatcgtcccgaccacctcctgccatggattcgagcctctcctcacgccatcttcccccaagattcagaactcgccggatgggaaggtgaatgaggaggtcatacgacagctaaccgagctcgccaattcagacggcggcggcgcgcagatttgggctcatcgcgaggcggcgcaggccggcgatcatcagttaccttcatggggaacaacaacacaacacaacactggacatggcaatttcggtactgcaaacagcaatgaggttgcaaccatgccgacgcctggttatgagaatggtggatgggataacagcgattaccctgcgctaaatgatccgtgcaaggtcgagttcacatatgagcaacctccagccagctcagctgaagcatgtatttcatcatttgttcagatgtctgaactttgccccagcatgagcaatggtagcagcatggaggaaacccaccagacaaaccctggaaatggcacgccaatgcaagttctacccaaaatgccagaatttgttccttgccccgacaggaacttggtcatttctcgctataaagagaagaggaagacaagaagattcgacaggcaggtccggtatgagtcccgcaaagctcgtgctgatagcaggctgaggattaagggccgttttgctaaagtcaatcagatttgagccttcatttctgtaatatattttgcatcttggacatgagtaatactaattaggaccaagcagatatagtacaagaaaaaatatcagcattttgtatgtaactatgtacccacccaggggctacgccacgctgaggagaatttagtttcatcgaatctctgtatatagtgttgcatcgaactcagtgatactatttacatgcaaaggatattgtcattaaaaaaaaaaaaaaaaa

SEQ ID NO: 385038 - DNA, 1224 bp, Oryza sativa
  unsure (1)..(1224): unsure at all n locations
ccacgcgtccgcccacgcgtccgccgccgctgagctctatctatctactagttagtttagtcgtctcgagggtaaattgagctttgtgtgcggttttgaggggagtacatcggcatgaggatccagtgcgacgcgtgcgaggccgcggcggccacggtggtgtgctgcgcggacgaggcggcgctgtgcgcgcgctgcgacgtcgagatccacgccgccaacaagctcgccagcaagcaccagcgcctcccgctcgacgccgcgctccccgccgccctcccgcgctgcgacgtctgccaggagaaggcggcgttcatcttctgcgtggaggacagggcgctcttctgccgggactgcgacgagcccatccacgtcccggggacgctctccggcaaccaccagcgctacctcaccaccggcatccgcgtcgggttcagctccgtctgtagcgccaacgccgaccacctcccgccgccagcgcccaaggggaactccaagccgccggcaagcggcatcgctgctgctgctgctcccaagccggccgtgtccgcggcggcgcaggaggtgccgtcgtcaccgttcttgccgccgtcgggctgggccgtcgaggatctcctgcagctctccgactacgagtccagcgacaagaagggctctcctattgggttcaaggatctggagtggctcgatgacatcgacctgttccatgtccagtcgccggccaagggaggcagcacggcggcggaggtgcctgagctcttcgcctcgccgcagccagcgagcaacatggggctctacaaggcgagcggtgcacgccaaagcaagaagccacgggtggagatacccgatgacgacgaggacttcttcatcgttcctgatcttggatgagatgttgttatgtaacagtaatgctatgcaagtgatgtaattttgtatgtatgcaaagaacactgccatctcggttgtactaagtgtgctaagtacatcttactgtgggcgtatgtaattgtaagacaatttgggcccaatacttatcagcatggtgttgggcatgaactatgatgtactatgacatgacgaaagtttgcttgcagcgtgtgttctgttcgtagattattgttgcatatgttctgttcatagaatttttctgtcagatgcttaccagtgatgtggagaatatcattcataatacttnatnnnnnnnnnnnnnnnnnnnnnnnnnnn

SEQ ID NO: 385039 - DNA, 1197 bp, Oryza sativa
ccttcttctgccgctcgttttccattgccgacgcgcacacgcagctgcgcagccacacctttgcggctgtcttatcttgttcttgagttgtgttcttggttggggaggaggaggaggagatgaagatccagtgcgacgcgtgcgagagcgcggcggcggcggtggtgtgctgcgcggacgaggcggcgctgtgcgcggcgtgcgacgtggaggtgcacgcggcgaacaagctggccgggaagcaccagcggctgccgctggaggcgctctcggcgaggctcccgcgctgcgacgtgtgccaggagaaggcggcgttcatcttctgcgtggaggaccgcgcgctcttctgccgcgactgcgacgagcccatccacgtccccggcacgctctccggcaaccaccagcgctacctcgccaccggcatccgcgtcggcttcgcctccgcctcgccctgcgacggcggcagcgacgcccatgactccgaccaccacgccccgcccatgggctcctccgagcatcatcaccatcatcagcagccggccccgaccgtcgccgtcgacacgccctcgccgcagttcctgccgcagggctgggccgtcgacgagctcctccagttctccgactacgagaccggcgacaagctgcagaaggagtcgtcgccgccgctcgggttccaggagctggagtggttcgccgacatcgacctgttccacaaccaggcgcccaagggcggcgccgccgccggccggacgacggcggaggtccccgagctcttcgcttcgcaggcggccaacgacgtggcgtactacaggccgccgaccaggaccgccgccgccgccttcaccgcggccaccggcttccgccagagcaagaaggcccgcgtcgagctccccgacgacgaggaggattacctcatcgtccctgatcttggttgaatcttgaagaggagttcgttccagaggagaagatcctcctcctgtgttcttgggttttgccatgtccttgtgttttctgcttgtatgctagcttttgtgtttaacgttagtcctgctcaactgtgacatatttgagccactctgcttccgtcccatgccatcagtgatcaatctgatataagtttttctgaaaatgagctccaggctctgctcttatgtttaatcttccgagattaccagtacagaaagagattaccagtac

SEQ ID NO: 385040 - DNA, 797 bp, Oryza sativa
  unsure (1)..(797): unsure at all n locations
ccacgcgtccgcgcacgcgtccggcaggagtacctgtgagaaggaagtgctggatgaatcttctgcggagcgcacaggacgatgttctcacgcaacgggcacgagacgatccacctgacgcgatcgctgtccggaggcaaacaacggtacctcaccacgcgtatgaaactcggttaaaagtggacgtggagcgacaacgaggaccacatgacaggcgcagcggccaaggggaactccaagccgccggcaagcagcatcgctgctgctgctgctcccaagccggccgtgtccgcggcggcgcaggaggtgccgtcgtcaccgttcttgccgccgtcgggctgggccgtcgaggatctcctgcagctctacgactacgagtccagcgacaagaagggctcttctattgggttcaaggatctggagtggctcgatgacatcgacctgttccatgtccagtcgccggccaagggaggcagcacggcggcggaggtgcctgagctcttcgacttgccggagtcagcgagcaacatggggctctacaaggcgaacggtgcacgccaaagcaagaagccacgggtggagatacccgatgacaacaannacnactacatagctcctaatcctctctcaaatcatgttatataacactcntgctatgcaagtaatgaaaaaatgaangtatgcaaagaacactgccatctcggttgtactaagtgtgctaagtacctcttcctgtgggggtatgtaattgccagacaatttgggcccaatacttatcagcatggtgttgggaagtg

SEQ ID NO: 385041 - DNA, 514 bp, Oryza sativa
  unsure (1)..(514): unsure at all n locations
ccacgcgtccgcccacgcgttcgcccacgcgtccgcccacgcgtccgggtaaattgagctttgtgtgcggttttgaggggagtacatcggcatgaggatccagtgcgacgcgtgcgaggccgcggcggccacggtggtgtgctgcgcggacgaggcggcgctgtgcgcgcgctgcgacgtcgagatccacgccgtcaacaagctcgccagcaagcaccagcgcctcccgctcgacgccgcgctccccgccgtcctcccgtgctgtgacgtctgccaggagaaggcggcgtttattttctgcgtggaggacagggcgctcttctgccggggctgcgacgagcccatccacgtcccggngacgctctccggcaaccaccagcgctacctcaccaccgcattcgcgtgggttcagctcgctgagcgcaacgccgacacctccgcgcaggcaaggactcagcgcgcaagcggatgtgtgtgtgtcagcgcggcggggcagaggcctacgctgcgcgcg

SEQ ID NO: 385042 - DNA, 1376 bp, Oryza sativa
tttgttccctccacttcggcctcttcttcctcctccatccccatcctccatcggatgcactagtagctggccttgtaccctacctagcttagctacccacccatgtcctcctcctcgtctcctctcgctgtctgcctttgacttggaggcctagctcgtcgatcgccggccatgcgggtgcagtgcgacgtctgcgccgccgagccggccgcggtgctctgctgcgccgacgaggccgcgctctgctccgcctgcgaccgccgcgtccaccgcgccaaccgcctcgccagcaagcaccgccgcctcccgctcgtccacccgtcctcctcctcctccggcgacggtggcgccgccgccgcgccgctgtgcgacgtgtgcagggagaagaggggcctcgtgttctgcgtcgaggaccgcgccatcctgtgcgccgactgcgacgagcccatccactccgccaacgacctcaccgccaagcacacccgcttcctcctcgtcggcgccaagctctcccccgccgcgctcgccgaacagccgctcccgtcctccgactgcagctccgacgacgacgccgccgccgccgccaccgaggaggagtaccactcctccgccgcatccaccggcgccgcagtgagcgcgcctcttgacgcctccagcaacggcgccggtggcggaggaggagtaggagggagcagcatctccgactacctcaccaccatctgccccggctggcgcgtcgaggacctcctccccgacgacgacgccttcgccgccgccgccgcgcaggcggggaaagagaaggacgagcgcgtgccgttcctcgacgccgacctgttcgacgtggtcgccggccggccggagaagaagggcggcgcgtgggcgccgcacgtgccgcacctgccggcgtggtgcctcgacgaggtgccggtcgtcgtcgccgcgtcggcggcgccagcggcgacacctgtaaaggcgaagcagggacacgtgcgggacagccactggagcgacagcgacgcgttcgccgtgccggagttctcgccgccgccgccgccggccaagagggcgcggcccagctcgcagttctggtgcttctgaacgccgccgccgccgtacaatctggccgccggcgagctcgacgaacacctcgatggatcgatcgaacacctgtgtaatcactcagctggtcactactacaagtagcaatcagcaagcttgatgtgccactgttactagctgctgctgtttaattagtgagtactaagctactactagttaattttggtgaaaactatgctactttgttactatataatgaagtatgtgtatcaaactaaactgagatgttggtaattaattatcgtattttgtaaaaa

SEQ ID NO: 385043 - DNA, 1433 bp, Oryza sativa
gagggagcgatccaatcgcgtcgctaaaaccctagcggctggctgatttgggggattgctcgtcggagagatgaagatccagtgcaacgcgtgcggcgcggcggaggcgcgggtgctgtgctgcgccgacgaggcagcgctctgcacggcgtgcgacgaggaggtgcacgccgccaacaagctcgccgggaagcaccagcgggtgccgctgctctccgacgacggcggcgccgcgcccgccgccgccgccccggccgtgcccaagtgcgacatctgccaggaggcttctggatacttcttctgcctggaggaccgtgcacttctttgcagagattgtgatgtttctatacacacagtaaactcctttgtttcagtacaccaaagattcctactaacaggtgttcaagttggccttgatcctgctgatccagttccacctgttgctgacaagcatgttaagagtgctggtggttcagtggattcagcaactaaacatttgcaaaggaatcctacagacttatctggtgaaaacagtgcatctttgcccagccaaaatgtaatcaatggtaattattctaggcagagttctgttacaatggccaagacaggacaggtcaattggactatgagcaacaacacaattagatcaatagaccctccacccaagtattcatcagaggaaagtccagcacttctgctagctagccacactagcaccatggcagcgtactccagtcaaatcagtaaggatagtgatcggatctacaacttaccattcacaggtggtaatgggtcagatagtctacatgattggcatgttgatgagttctttagtaactcagaatttggctttgctgagcatggttcttctaagggtgacaacgctaagccagggagtgctggtggatctccgcagtgccgtctggctgaaggcctgtttgtcgaaggacttctaggtcaagtgcctgacaatccatggacagtgcctgaggtcccctcgccaccgacagcctctggtctctattggcaaaataatttgctttgcccttcgtacgacagcaccatgttcgtccctgagatttcctccttggagaactctcagaacaacttcactgtatctgctggtttgaagcgccgaaggaggcagttttgatctgccgatagcatcagacaccattcggtttagttggcaggtcacgttgagaggagggcttcttgcctgcctgaccaaagccacaaaacacagggatggatgatcatccagtggtcagtctaaaaatatgttgtaatgtttgtgtttcgactatacgtttgttgctgaagtttaaaggcgagggaattgttgtgagatctgggatgacagatttgttgttaccaattttgtgaatagtgaaaataaaaagagcatggataagatcaaaaaaaaaaaaaaa

SEQ ID NO: 385044 - DNA, 1380 bp, Oryza sativa
  unsure (1)..(1380): unsure at all n locations
attgacgtcttcgcacaggcacccagccatgctgaagttggagccggagttccccggcctgccgcagcggtgcgactcgtgccggtcggcgccgtgcgcgttctattgcctcgccgattcggcggcgctctgtgccacgtgcgacgctgacgtgcactccgtcaacccgctggcacgccgccaccgccgcgtaccaatgggcgtggtggctgcccccggcgccgggggagccttcgtcgtccgccctgcaggcggtgtcaactcctcctggccaatccgagagggcaggaggtgcgactacgacgatgacgacgccgacgccgctggggaggaagacgaagaggcgacgtcgtggcttctgttcgacccgctcaaggactcctcggatcaggggctgccgccgttcggcgacgcgctggtggccgacttcctcaacctcggcgggggcgccggggagaaggaggacgcgtcgtcgagcaaggactgcagcagcagccacgggaagagcagcgagggcagccacgagttcgccgtgcccggcgagcccgtaccggagcgccagggcttcggggcggtgagtatggacattaccgactacgacgcctccaatttcaggcgcgggtacagctttggcgcatcgctcggccacagcgtttcgatgtcatcgctggagaacatgagcacggtcccagactgcggtgtgccagacatcaccacctcctacttgaggtcatccaagagcaccatcgacctcttcacggcagcagctggctcccctgtggcggcgcacagcataatgtcgccaccgcagttcatgggcgccattgacagggaggccagggtgcaccggtacagggagaagaggaagacgaggcggttcgagaagaccatcaggtacgcgtcgcggaaggcgtatgccgagacccggccgaggatcaagggacgcttcgccaagcgcagcgacaccgaccttgaggtcgaccagtacttctccaccaccgccgactccagctgcggcgtcgtgcccacgttctagcgagcagcttggccgcacgcctggaagacaatcaaagaagctcaggaatgaatatattctcccactgtatagtacatcttggttgcttagctatatatatatatatatatatatatatatatgtataattcgccgaatcgcctctaaatttgtgggaggtatgaggcttcagctgtaggtatatatagatgctagaaagatgctccttgtaaaattgtgcaggagtaaatgtaatcatgtagtcatccctccttctccaatcctttacaatacatttctgtttttttattcagcttaaaaactacgttttgttttttctcccgataaaaaaaaaaaaanaaaaa

SEQ ID NO: 385045 - DNA, 2058 bp, Oryza sativa
cccacgcgtcccgctcgctctccctttcgcgcaccagaaaagtcgttttttaattttcgagtttccgtggaagattctcgatacctgtccctcgtcgtcgtcctcctccgccggccgccgccgacgaccgcagcaggggtggatccggggcggcgccgattcgtatcctggtaggatcccactgaattcaactgttgaacaaaaagccaggaaggtggctgttcttgtggcactcagtgctagtggaagtgctccagtactgtacaggaccatggatgctctttgtgatttctgcagggagcaaaggtcaatggtctattgccgatcagatgcagcatccttgtgcttgtcgtgtgatcgtaatgtgcattcagccaatgccctttcccgacgccatacaagaacccttctttgtgatcgttgtgttggacagcctgcagcagtccgttgtcttgaagagaacacctcactttgccaaaactgtgactggaatggacatggggcagcatcctcagctgctgggcataaaaggcagaccataaactgttactcggggtgcccatcgtcggcagagctctcgagaatctggtcctttagtatggatatcccaactgtagctgcggagccaaactgtgaggaaggaataaacatgatgagcattaatgacaatgacgtcaataaccattgtggtgctccagaagatggccgcttgttggatatagctagcacagcactcatgagtgatttacctacaggagacaagttcaaacctttaataggttcttcttcaggagatgggatgaatcttctgccacttaattcagatcagccagctgagccagtttcaacgacgcctaaggcaccctgtgtcacagacaaagatatgttcaatgatgggagcgtatatggagacttctgtgtggatgatgctgacctaacatttgagaattatgaagaattattcggtacctctcacgttcaaacagaacaactctttgatgatgctggaattgacagttattttgaaatgaaggatgtgccagcagatgaatctaatgagcagcccaaacctgtgcagccagaatgtagcaatgtcgcatctgttgattctgggatgtcaaacccagctgcaagggctgattccagccattgtattcctggtaggcaggctatatccaacatatccctttccttctctggtttgactggtgaaagcagtgctggatattttcaagattgtggggtatcgtcaatgatccttatgggtgagccaccctggcatcctcctggtcctgaaagttcatctgctggaggcagcagagataatgctcttacacggtacaaggagaagaagaagagaagaaaatttgacaagaagataaggtatgcttctcgtaaggctagggcagatgtgagaaaaagggtcaaaggacggtttgtaaaggctggcgaagcatatgactacgatccgctgagccaaacaagaagctactaaagcctttcactcgattggtttcgtccagtgttcaagtagcaattttcagcagctgatttgatgttggttgcacggcaagcatgatcactggagaacacaagcaattgcggcagaccttgcaattgaaaacggggaaaggaaaccaaacgctgtgatcaaatcaaattaatgaaataaaaaaggaaaaaataggatgcaaacatgcgagaagctcatggatggtaatgctccattttctcctgtacagttcatgcatcttcagttgcttctggttgagatgtctgaatcactctctaccatctgtgcattaatcaaatacaaatacatgggcctaccgcacgacgacgaacgcacctgcttctgttgtgatgttttgtgttgcggctgtcaggctggatctctaggtaacatgattaattatactactgatggaatttgcaccgctgtaatattatttacgaatcacaatctgccgtgggattgttcttctgtcgtgtatgtatgtgtatatagatggatggctgttaagaaaatattgtgacgattataaagtttacctttgt

SEQ ID NO: 385046 - DNA, 594 bp, Oryza sativa
  unsure (1)..(594): unsure at all n locations
ccacgcgtccgggccaggaactgagaagctccatacaagtaagcagcagctagttgccgacaaggccagagaaggaagaagaagctctcatcatcatcaccatgtcgtgctgcggtggcaactgcggatgcggctccagctgccagtgcggcaacggctgcggcggatgcaagtactctgaggtggaacccacgaccacgaccaccttccttgccgatgcaaccaacaaggggtctggtgctgcttccggaggatcagagatgggggcggagaacggcagctgcggctgcaacacctgcaagtgcggcaccagctgcggctgctcctgctgcaactgcaactagaagaaacttatctccatccaattcatcacctgatcaacgagctaccagtaccactacatatgccatgtactagctacctagcttgcatgcaagtccttaatttgctgctagctagctagctacctaccttagcgtctcatgtatgtcatgttgccgcctggcccctaaataaaattccttacttaatcgcaaaaaaaaaaaaaaataaannnnnnnnnnnnnnnnnnnnnnnnnnnnnnnnnnnnnnnnn

SEQ ID NO: 385047 - DNA, 1093 bp, Oryza sativa
tcacctctcccacacggggcgtacgtgctaagctgcagcacaacccaaagccatatatctccgataatggcgaactcaccgacgctgacaatgctggtgttcctagctattgggctatctctcgtcctctccgcagccggcgtgtctgtggagagcgtggtcaccgaggcgttcttcaacgggatcaagaaccaggccccgaacggctgcgccggtaagagcttctacacacggcaatcgttcctgaacgccgcccgctcctactcgggcttcgccaatgaccgcaccaacgacgactccaagcgcgagatcgctgccttcttcgcgcatgtcacacacgagactggacatatgtgctacatcaatgagataaatggggcaaacatggactattgtgacaagagcaacaaacagtggccgtgccagccgggcaagaagtactacggacgcgggccgctgcagatctcatggaacttcaactacgggccggcgggaaagaacatcgggttcgacgggctaagggacccagacaaggtggcgcaggacccgacaatctctttcaagacggcgctctggttctggatgaacaacgtgcaccaggtgatgtcgcaggggtttggcgccaccatccgggccatcaacggtgcgctcgagtgcaacgggaagaaccccggtgccgtcaacgcaagggtaaactactacaaggactactgccgccagttcggcgtcagcccggggggcaacctctactgttgagttgcatgcacacgctgctcggctcatcgtgatcgactgaataatgaacagagtaataataatgaataaaacgtttggtgcgtacgtacattgcatacgtgcacggtacgtacatgctggaagctaagtgacgtcaaagagtttagtactaaaaagtgatctttctattcgatgttactctatcttagggcggagtaagtataaatgtgtaataagaaataaaatgttaggatcgcgggatcgaaagatgagtaaacatgtgtaccggtggaccacttaaataattatttctccaacccaagtactttcatgcttttccatgatcaattcaatacgt

SEQ ID NO: 385048 - DNA, 1142 bp, Oryza sativa
cggacggacgctgaattcgatcgagaatcaccatgatgacaagtagaatgttttcggcaatgcagatgctgatcatggtggtggtggcattggccgggctagctgccggagcgcgcgccggcgacatcgcgatctactggggccagaacggcaacgagggcacgctggcgcagacgtgcgcgaccggtaattacaggttcgtcatcgtggccttcctgcctgtgttcggcaagggccagacgccggtgctgaacctggccggccactgcgacccggcgtcgaacggctgcaccggcgtgggcgccgacatcaagtcgtgccagagcctcggcatcaaggtcatgttctcgatcggcggcggcgtcggcaactacggcctgtcctcccgcgacgacgccaagcaggtcgcggcgtacctgtggaacaactacctcggcggcacgtcgccgtcaaggccgctcggcgacgccgtcatggacggcatcgacttcgacatcgagagcggcgggggcatgtactgggacgacttggccaggtacctcaaggcgtactcgcggcaggggagcagcaagaagccggtgtacctgacggcggcgccacagtgccccttcccggacgcgtcgctcggcgtcgcgctcagcaccggcctgttcgactacgtgtgggtgcagttctacaacaacccgccgtgccagtacagctcgtccaacggcgtgggcaacctggcgagcgcgtggaagcagtggacgtcgatcccggcgggacgggtgttcctcggcctgccggcggcggcggaggccgccggcagcgggttcgtggagacgagcgacctggtgtcgaaggtgctccccgtggtgaagaagtctcccaagtacggagggatcatgctgtggtcgcggtactatgacgggctcacggggtacagcgacaaggtgaagtccagcgtttgagctagccagggtaagctcgtgtcaggtcggcgttcgcgtagaatcacacgtgccgcgcgttccctgcaagatggagtagtttctacacatttcagaacaaagcaaacatgtacaataagatggccggcttgtatactcatttagaagcagaaaaaattgtgagaaatttacgtgttaaaaaaaaaaaaaaaa

SEQ ID NO: 385049 - DNA, 1108 bp, Oryza sativa
  unsure (1)..(1108): unsure at all n locations
gcttccgttccctggccggtgggggaggatcaggcgggggggcggcggggagggggaggagatcggtctcggtcgatccgcgcgcggcggcgatggcgcgggagaggcgggagataaagaggatagagagcgcggcggcgcggcaggtcaccttctccaagcgccggcgcggcctgttcaagaaggccgaggagctctccgtgctctgcgacgccgacgtcgcgctcatcgtcttctcctccacggggaagctatcccacttcgcaagctccagtatgaatgaaatcatcgacaagtacaacacacattctaataatctggggaaagcagaacagccttcgctcgacttgaatttagaacatagcaagtatgcacatttgaatgagcaacttgcggaagctagtctccggcttagacaaatgagaggtgaggagcttgagggattgagcattgatgaactccagcagctagagaagaacctggaagctggtctgcacagggtgatgctgacaaaggatcaacaatttatggagcagatcagtgaactccagcggaagagttcacagctggcagaggagaacatgcaactcagaaaccaggtatcccagatatcaccagctgagaagcaagttgttgatactgaaaattttgttaccgaaggacagtcctctgaatctgtgatgactgcattgcattctggaagttcacagtcgcaggataatgatgatggctcggatgtatccctgaaattagggctgccttgtggtgcatggaagtaactgaaaggaaaaaaaaagcatccttgcagatctggttggagtcgttgcggcatccaggggagaaacgcttgtgttattcccaaacccagactgcaataatataatcttgcgttggaagcgagatcagttaacctgatttatcatccttgtggctgcatgatgcgatgttccgcttgtactgttcgctaggatcttgactaaactttgagatctatgtgccgtttaattatcccatcgctattggcactccttatgcgatacatcatatatgcactttgttgctatcttaattatgatgcgtcttttgcagcgttctaaaaaaaaaaaan

SEQ ID NO: 385050 - DNA, 1272 bp, Oryza sativa
gggcacgattgctttcacgagttgggaatccgttgctgtcgtacgtctcgtctatggcgtgctgtatgtcctctccttctttcttcctttccaaataagcactcctcttcttcctcctcctcctcctccgccggacgcgtgggttcccaactcatcgatccatcagtagctagctagctagctagctagctgcattgtccggcgagagagatagctgctgcagggggcggccatggggaggggcaagatcgagatcaagcggatcgagaacgcgaccaacaggcaggtgacctactcgaagcgccgcacggggatcatgaagaaggccagggagctcaccgtgctctgcgacgcccaggtcgccatcatcatgttctcctccaccggcaagtaccacgagttctgcagcccttccaccgacatcaaggggatctttgaccgctaccagcaagccatcggcaccagcctttggatcgagcagtatgagaatatgcagcgcacgctgagccatctcaaggacatcaaccgcaacctgcgcaccgagatcaggcaaaggatgggagaagatctggacgggctggagttcgacgagctgcgcggtcttgagcaaaatgtcgatgccgccctcaaggaggttcgccacaggaagtatcatgtgatcagcacacagactgaaacctacaagaaaaaggtgaagcactcctacgaggcgtacaagactctgcagcaggagctggggttgcgcgaggagccggcgtggttcgtggacaacaccggcggcgggtgggacggcggcgccggcgccggcgcggcggcggacatgttcgccttccgcgtggtgcccagccagcccaacctgcacggcatggcctacggcggcaaccacgacctgcgcctcggttgatatatcatcgccgccgccgccgccgccgccggcggcctgctcgtcgccggccggccggccgccggacaccgtatcatcgctcgatctagataacaagccgacgaataaattgcagtgctcgtgttacttacctgcatgcgcatgcattattatcgatcaacgcaagaacttcatttcatttaccaaaccacttgatgtgtgctatgatccagcggttaaaccgtgtgttgtctcttgacattttgtaccagttactgatgatgttgtattatgtatgcgtggtgtgcaactgtgcttggattattctacccttatttgccacgcttgctttattagctttggccacccaaaacgggttttgcggcggc

SEQ ID NO: 385051 - DNA, 1296 bp, Oryza sativa
ctcctcctcctcttcttcttcttccactagctagttcgtcttcctccttcagctagcttgtagcagctaaggttaggtcggatcgagatcgggatcggccgccggcgagcggcgagcggcgaggatggggcgggggaaggtgcagctgaagcggatagagaacaagatcaacaggcaggtgacgttctccaagaggaggaatggattgctgaagaaggcgcacgagatctccgtcctctgcgacgccgaggtcgccgccatcgtcttctcccccaagggcaagctctacgagtacgccactgactccaggatggacaaaatccttgaacgttatgagcgctattcatatgctgaaaaggctcttatttcagctgaatccgagagtgagggaaattggtgccatgaatacaggaaacttaaggcaaagattgagaccatacaaaaatgtcacaaacacctcatgggagaggatctagaatccctgaatctcaaagaactccaacagctagagcagcagctggagagttcattgaagcacataatatcaagaaagagccaccttatgcttgagtccatttccgagctgcagaaaaaggagaggtcactgcaggaggagaacaaggctctgcagaaggaactggtggagaggcagaagaatgtgaggggccagcagcaagtagggcagtgggaccaaacccaggtccaggcccaggcccaagcccaaccccaagcccagacaagctcctcctcctcctccatgctgagggatcagcaggcacttcttccaccacaaaatatctgctacccgccggtgatgatgggcgagagaaatgatgcggcggcggcggcggcggtggcggcgcagggccaggtgcaactccgcatcggaggtcttccgccatggatgctgagccacctcaatgcttaagatgatcatcgtcgtcgtcgtcggccaaacagctgccgtatgcaccgtgaatcatgggagcaaccttgaatgaattgaagtcattggtatcgatcctagcgataatatatatgattctcctaaaatgaaattgatctcaaaaaaacaaacctagcgattaagctattcttatatatgtgtttgcctgctgccccctaccctacaggctacatatgatttgcaagaaattaattatgagcaaggatcaggatgtgtctttgtgtaatcatcagcacgtacctagtgcttcctactgatatatatgcatgcaattgtgtgcatataaatatatttgcatgccatgctcccgtgatggttaattacaaaaa

SEQ ID NO: 385052 - DNA, 1168 bp, Oryza sativa
  unsure (1)..(1168): unsure at all n locations
ggaagaaggaggaggtgtagggagaaaccggagcaacctcgaagctagtccaaactagtgggaggttgtctttccggcaagccggagcccggagctatcgatcatcaagctttctaccccgaccgacgaggaagaagacgactgatcaattgatcaaaccgatctctccatagctaggtagacaggaggagaggaggaagaagagggggagaggagacttatcttgatcgatggcgcgaggcaaggtgcagctccgtcgcatcgagaacccggttcaccgtcaggtcaccttctgcaagcgccgtgccggcctgctgaagaaggccagggagctctccatcctctgcgaggccgacatcggcatcatcatcttctccgcccacggcaagctctacgacctcgccaccaccggaaccatggaggagctgatcgagaggtacaagagtgctagtggcgaacaggccaacgcctgcggcgaccagagaatggacccaaaacaggaggcaatggtgctcaaacaagaaatcaatctactgcagaagggcctgaggtacatctatgggaacagggcaaatgaacacatgactgttgaagagctgaatgccctagagaggtacttagagatatggatgtacaacattcgctccgcaaagatgcagataatgatccaagagatccaagcactaaagagcaaggaaggcatgttgaaagctgctaacgaaattctccaagaaaagatagtagaacagaatggtctgatcgacgtaggcatgatggtagcagatcaacagaatgggcattttagtacagtcccactgttagaagagatcactaacccactgactatactgagtggctattctacttgtaggggctcggagatgggctattccttctaacactaataatggcctgggggatacttgtgttcattactagtgtgtaatatggttaataatgcttgtgttgctgtttgctttgctattctgatgtaccttatttagacaagttcccgcaggaagtgtcttttagtattgtatttgtcttgggctgtggtgctttgtttttccctaaagaactcttgaggagctctgttgttgaaccatttcaagtaattgagactattgtttcctggaacgtttaaaaaaaaaaaaaaaaannnnnnnnn

SEQ ID NO: 385053 - DNA, 1074 bp, Oryza sativa
ctcctcccccacttctccccaccaccacaccaccacacacacgcacgcacgcacgcacgcctccgttttcccccaccgacgagaggcggagagggaggggagctagggtttttcggggcggggatggcgcggagggggagagtgcagctgaggcggatcgaggacaaggcgagccggcaggtgcggttctccaagaggagggcggggctgttcaagaaggcgttcgagctcgccctgctctgcgacgcggaggtggcgctcctcgtcttctcccccgtcggcaagctctacgagtactcctcctccagcattgaaggtacctatgatcgctatcagcaattcgctggagccaggagagacctgaacgaaggaagtacaagcatcaacagtgatgaaaatgcaagtatacactccaggcttagggacataacggcctggtctctccaaaacaatgctgacgagtcggatgctaatcagctagagaaactggagaaactgctgacaaatgctttgagggatacgaaatcaaagaagatgttggcaaaacaaaatggtgaagggagtaggagcagagcaaactccagtggctctagggggcaggaggaaggaagtgcatgagcaggaagcacaggtgtcctgtgcataagtttggcagtgcatgcacctcccaaattaaaaagctaataaaaaaaagagaaaatggtgcatgctctgtttgctgccagtttctcccactgattgatcccaggtagagaaaagagttgccatggcctctggctctgcttgttagatcaagggggggagatggaataaaaggatggggaagtattcaggttcttgtaatgaagacctatgctgtggtgttttagcaatgtttgatatgtgtgctacctgtgtttgactggttgtgttgcttgatgtgtcatctgaccatgatactgaaagcctgataattgcactgacttgtgtatggagtttgtttcaacctattggtatgaatctgtttgattctgtaggaactgtggtttgctgtttgccagatctgattattacgcagtgatacaatctgtcctt

SEQ ID NO: 385054 - DNA, 1117 bp, Oryza sativa
  unsure (1)..(1117): unsure at all n locations
cgaggaggagagggaggggagagaagggagagggggtcggggagaaagaagagcgagcgagcagctttggctacggccaaaccctacagcgcctccaccaccactccttgccttttttggccgcagccgctcgtgtggttggttggttcatcggcgatcgaagatggtgcgggggaagacgcagatgaagcggatagagaaccccacgagccgccaggtcaccttctccaagcgccgcaacggcctgctcaagaaggccttcgagctctccgtcctctgcgacgccgaggtcgcgctcatcgtcttctccccgcgcggcaagctctacgaattcgccagcgccagtacgcagaaaacaattgaacgctataggacgtatacaaaggaaaatatcggcaacaagacagtacagcaagatatagagcaagtaaaagctgacgctgatggtttggcaaagaaacttgaagctcttgaaacttacaaaagaaaactgctgggtgaaaagttggatgaatgttctattgaagaactgcatagcctggaggtcaagctggagagaagcctcattagcatcaggggaaggaagacaaagctgcttgaggagcaggttgccaaactgagagagaaggagatgaagctgcgcaaggacaatgaagagttacgcgaaaagtgtaagaatcagcctcccttgtctgctcctttgactgtccgggccgaagatgagaacccggaccgtaacatcaacaccaccaacgacaacatggatgtcgaaactgagctattcatagggctgcctggcagaagtcgctccagcggcggtgctgcagaagatagccaagcgatgccccattcttaagtaacaggccaggaataagctggatctctgcgttgagaaaggagatgatgctaggcatgcaatgacaccaaaccatcctaaaaacagaccacgctgtatattttacttacccgtattgtcgtccatggatgcgaaatgctagacgcatatgcacccacccattcagcaccaccaggcagaaacccttcgatcggcagactccactacccatctaaatctaaatcgagagatctcaagtgnnnnnnnnnnnnnnnnnnnnnn

SEQ ID NO: 385055 - DNA, 1496 bp, Oryza sativa
tagctatcatatattctgcgaatccaacacaagcaccgcggcgtagtactactacttgcgcgcgcgtgttagattcgcgtgcgaatccaacacaagcagatcgatcacgcacggtacgccatgggcgaggcggtgaaggggccagtggtggtgacgggcgcgtcgggcttcgtcggctcatggctcgtcatgaagctcctccaggccggctacaccgtccgcgccacagtgcgcgacccctctaacgttgggaagacgaagccgttgctggagctggcggggtcgaaggagaggctgacgctgtggaaggccgacctgggcgaggaaggcagcttcgacgcggcgatcaggggttgcacgggcgtgttccacgtcgcgacgcccatggacttcgagtccgaggacccggagaacgaggtggtcaagcccaccgtggaagggatgctgagcatcatgcgggcctgcagggacgccggcaccgtcaagcgcatcgtcttcacctcctccgccgggaccgtcaacatcgaggagcggcagcgcccctcctacgaccacgacgactggagcgacatcgacttctgccgccgcgtcaagatgaccggatggatgtacttcgtgtccaagtcattggcggagaaggccgccatggaatacgcgagggagcacgggctggacctcatcagcgtcatccccacgctcgtcgtcgggcccttcatcagcaacgggatgccgccgagccacgtcaccgcgctggcgctgctcacggggaacgaggcccactactcgatcctgaagcaggtgcagttcgtccacctcgacgacctctgcgacgccgagatcttcctcttcgagagccccgaggcgcgcggccgctacgtctgctcctcccacgacgccaccatccacggcctcgcgacgatgctcgcggacatgttcccggagtacgacgtgccgcggagctttcccgggatcgacgccgaccacctccagccggtgcacttctcgtcgtggaagctcctcgcccacgggttcaggttcaggtacacgctggaggacatgttcgaggccgccgtccggacgtgcagggagaaggggcttctcccgccgctgccgccaccgccgacgacggccgtggccggaggagacggctcggcgggtgtggccggcgagaaggaaccgatactggggagggggaccgggacggcggttggtgctgaaacagaagcgttggtcaaatgagtgttgactagtgagtccagagaacggtattgaaattgatcgtgtttcgctgcgccttgcctcgttggcttcgtctatttcacaatgcgagatttggaataaatcagagcggttaatcctgtaagttcatatgtaacgtacccatttgattttttattggttacatatggttactccctccggtttcattttaattgacactttgaacaataatacgttttacaagatatacctttgactttaaaaaaaaaaaaaaa

SEQ ID NO: 385056 - DNA, 2141 bp, Oryza sativa
  unsure (1)..(2141): unsure at all n locations
gccactagggtttctcctcctctttcctctcctcctccgccccgacgcctcgctagggtttttgcctctccctccgccgccgccgctgccgcgaggagaggagggggggagagcacccagccggcgagccagccatgtcgctgcgcccgagcgagcgggtggaggtgcggcggaaccgctacaaggtggcggtggacgccgaggaggggaggcggcggcgcgaggacaacatggtggagatccgcaagagccgccgcgaggagagcctcctcaagaagcgccgcgaggggctccaggcccaggcccccgtccccgcctccgccgcaaccggcgtcgataagaagctcgaaagccttcctgctatgattggtggagtttattcggacgataacaaccttcagcttgaggccacaacacagttccgcaagttgctttctatagagaggagccctccaattgaagaggttattcaatcaggcgttgttcctagattcgtgcagtttcttaccagagaggatttcccccagctacagttcgaagctgcgtgggcacttacaaacattgcatctggcacttcggagaatacaaaggttgtcattgatcatggggctgtaccaatatttgtgaagcttcttggttcttctagtgatgatgttcgtgagcaggctgtatgggcattgggcaatgttgctggtgattcccctaagtgccgtgaccttgttcttgccaatggtgcattgctgcctctgctagcacagttgaatgagcacactaaactctctatgctaaggaatgcaacttggactttatcgaacttctgcagaggaaaaccacagccatcatttgaacagactaggcctgctcttccagcactggcacggcttattcactccaatgatgaggaagttctcactgatgcgtgctgggctctttcatatttatctgatggcactaatgacaagatccaagccgtgattgaagctggtgtttgcccccgtcttgtggagcttctcctccatccatcaccttcagtgcttatacccgcactacgaactgttggaaatattgtaactggagatgacgcgcaaactcagtgcatcattgatcatcaagccctcccttgcctcctaagtctgttgacacaaaatctcaagaaaagcatcaagaaagaggcttgctggactatttcaaatattactgctggtaacaaagatcagatacaggctgtcataaatgctggcattattggtcctctggtgaatctgctccaaacggcagagttcgatatcaagaaggaagctgcatgggccatctcaaatgctacttcaggcggtagccatgatcaaatcaagtatctggtgagcgagggctgcatcaagccattgtgtgatcttcttatttgcccagatataagaatcgttacagtttgtttggagggtctcgagaacattcttaaagtaggagaaaccgacaagaccttggctgcaggtgatgtgaatgtcttttcccagatgattgatgaagcggaaggtttggaaaagattgagaacttgcagagccatgataacaatgagatctatgaaaaagctgtgaagattcttgaggcctactggatggatgaggaggatgatacaatgggagctaccacggtagctgctccccaaggtgctacttttgactttggccaaggcggtggtgctgctcaattcaaataaatacagatttgaccagaggtggtaaattgtggccactgtgcggggtactgaattgttctggtggttcaataagctaaaggtttcaagggggccagtgttacattatttccctactggtcacggatatcatatcactacgtctgtaacagggattaaagctttgaagtctgcgtttttcatcaggctactactatgtagtgtttgcatcttttagtatggtgtgcaacattttgctacttgtatagcctgagtcgaagcttctgcaaagccgtcacaacacattcctgaacccgtctggttttgagtttcgtcaggagtgtgctgagttgcagtttgtccggacatgtaaaccattatgccttttaaattatatattgctagggtttgttcggttctaaaaaaaannnnnnnnnnnnnnnnnnnnnn

SEQ ID NO: 385057 - DNA, 1245 bp, Oryza sativa
ccacgcgtccgcggacgcgtgggtagctcacttccaagagcctcgtgacacacaccactcactatactggcccctcctcctcctcggagatcgagccggccagccatggcggcggcgacggtggaggtgacgtgggacgtggagtacgtactgtgggcgccggactgccagcagcgggtgatgatcgggataaacggcaggttcccggggcccaacatcaccgcgcgcgccggcgacgtgatcagcgtcaccatgaacaacaagatgcacaccgagggcgtcgtcatccactggcacggcatcagacagtttggtacgccgtgggcggacgggacggcatcgatatcccagtgcgcagtgaacccgggcgagacgttcgtctacaagttcgtcgccgacaagccgggcacctacttctaccacggccacttcgggatgcagcgcgccgcgggcctgtacggttccctcatcgtcctcgactcgccggagcagcccgagccgttccgccaccagtacgacgacggcggcgagctccccatgatgctcctcagcgactggtggcaccagaacgtctacgcccaggccgccggactcgacggcaaggacaggcacttcgagtggatcggcgagccccagacgatcttgatcaatgggagaggacagttcgagtgcacgctggggccagcgaggaagagctttgagaagctcctcaaccaagaacgtggagaccctgcgtcgacgatcagaagatgtgcagcgaccaggagaagtgctgaggaggagcgagtggggccgtactgccccaggagccagtgcgcccctgtcgtgttcaatgtcgagcaggggaagacttaccgccttaggatcgccagcaccacctccctttctctcctcaacgtcaagattcaagggaacaagatgacggtggtggaggccgacgggaaccacgtggagccgtttgtggtcgacgacatcgacatttactccggcgagagctactccgtcttcttcaaggccgaccagaagccggcgagctactggatctccgtcggcgtcagggggcgccaccccaagacggtgccggcgctcgccatcctcagctacggcaacggcaacgcggcgccgccgccgctccagctgcccgccggcgagccccccgtgacgccggcgtggaacgacacacagcgcagcaaggccttcacctacagcatcagggcgcgcaaggacaccaaccggccgccgccg

SEQ ID NO: 385058 - DNA, 1484 bp, Oryza sativa
cccacgcatctcgtcaacaaaaaggcgcctctaagaattcctcccaaactttttggtgttgtcaagccgtgcgtttcggggtacatcaacggcggcgatgagctcccggatggccggatcggcgatcctccgtcacgtcggcggcgtccgcctcttcaccgcgtcggcgacctctccggcggcggcggcggcggcggcggcgaggccgttccttgcaggcggagaagccgtccccggggtgtgggggttgcggctgatgtccacgtcgtccgtggcgtcgacggaggcggcggccaaggcggaggccaagaaggcggacgcggagaaggaggtggtggtcaacagctactggggcatcgagcagtcgaagaagctggtgcgggaggacggcacggagtggaagtggtcttgctttaggccatgggagacctacaccgcggacacttcgatcgatctgacgaagcaccacgtgcccaagacgctgctcgacaagatcgcctactggaccgtcaagtcgctgcgcttccccactgatatcttcttccagaggaggtatggctgccgcgcgatgatgctggagacggtggcggcggtgccggggatggtgggcggcatgctgctccacctccggtccctccggcgcttcgagcagagcggcggctggatccgcacgctgctggaagaggccgagaacgagcgcatgcacctgatgaccttcatggaggtggcgaacccaaagtggtacgagcgcgccctcgtcatcaccgtccagggcgtcttcttcaacgcctacttcctgggttacctcctctcccccaagttcgcgcaccgcgtcgtcggctacctcgaggaggaggccatccactcgtacaccgagttcctcaaggacctcgaggccggcaagatcgacaacgtccctgccccggccatcgccatcgactactggcgcctccccgccaacgccacgctcaaggacgtcgtcaccgtcgtgcgcgccgacgaggctcaccaccgcgacgtcaatcacttcgcatcggacatccattaccagggcatggagctgaagcagacccctgcgccgatcggatatcactgaggatgtttgtctactgccgaggatttgcatcactaataatcaaatcaaatgagtatacttcgtttttcagggaaagcaaatgagagctctttagctgtatcggatttggtaattgctactagtaactactaagtactgaaaaataaggagtctccttgtttgaagtacaaatctaggagattttttgaaccaactctatctgaattgggcctgtttttcgtacgccgcactgcttcatgtacatatattccatcccctatcttatgtgtggcaagtgtctttctaaattcttggatgtaatgacacctgaatttctttcgttgaactattggcagctgagttatatatactacataccattcttttgttaaaaaaaaaaaaaaaaaaa

SEQ ID NO: 385059 - DNA, 1354 bp, Oryza sativa
cccacgcgtcccagcaacacaagccaaccacaaagaattctcatttccggtaacttttctcaagcctttttggcgctctgagaatcatcacacggaagtcaagcctttgttgttgtcgtgattagtttagtttagtcaccgagatgagctcccgaatggccggagcgacgctgctgcgccacctgggcccccgcctgttcgccgccgagcctgtgtactccgggctcgccgcgagcgccaggggcgtcatgcccgccgccgcgaggattttccccgcgcggatggccagcaccagcagcgccggcgcggacgtcaaagaaggcgcagccgagaagctgccggagccggcggcaacggcggcggcggcggcgaccgacccgcagaacaagaaggccgtcgtgagctactggggcatccagccgccgaagctcgtgaaggaggacggcacggaatggaagtggctcagttttaggccatgggacacgtacacgtcggacacgtcgatcgacgtgacgaagcaccacgagccgaagggcctcccggacaagctggcgtactggacggtgaggtcgctggcggtgcccagggacctcttcttccagcggcggcacgcgagccacgcgctgctgctggagacggtggccggggtgcccgggatggtgggcggcatgctgctccacctgcgctccctccgccgcttcgagcagagcggcggctggatccgcgcgctgctggaggaggccgagaacgagcggatgcacctgatgaccttcctggaggtgatgcagccacggtggtgggagcgcgccctcgtgctcgccgcgcagggcgtcttcttcaacgcctacttcgtcggctacctcgtctcccccaagttcgcgcaccgcttcgtcggctacctcgaggaggaggccgtgagctcgtacaccgagtacctcaaggacctcgaggccggcaagatcgagaacacgccggcgccggccatcgccatcgactactggcgcctccccgccgacgccacgctcaaggacgtcgtcaccgtcatccgcgccgacgaggcgcaccaccgcgacctcaaccatttcgcatcggacatccagcaacaggggatgaagctgaaggatacgcctgcgcctatcgggtatcactgatcatcattcatcaacgggcgatgcctgctcagttcatcaccatcactgctactacatgcgtattttacatcctatttgggataaactttgttctgtgtatatatgtaaataagctattgtcactccgttttatgcctgtacctatatgcatgctgagattatgcaaattgtgaataacaatatagtaagattttttttggagt

SEQ ID NO: 385060 - DNA, 383 bp, Oryza sativa
  unsure (1)..(383): unsure at all n locations
cggacgggtctnttcgttcaacaaaaaggcgcctctaagaattcctcccaaactttttggtgttgtcaagccgtgctgtttcggggtacatcaacggcggcgatgagctcccggatggccggatcggcgatcctccgtcacgtcggcggcgtcccccccttcaccgcgtcggcgcccacctctccggcggcggcggcggcggcggcggcgaggccgttccttgcaggcggagaagccgtccccggggtgtgggggttgcggctgatgtccacgtcgtccgtggcgtcgacggaggcggcggcaaaggcggaggcaaagaaggcggacgggaagaaggaggtggtngtaacagctacttggggcatcgagcagtcgaagaagtt

SEQ ID NO: 385061 - DNA, 2058 bp, Oryza sativa
  unsure (1)..(2058): unsure at all n locations
cagcgcgccgaggagagtgggtgtccgtgtggcctactacttgcttcctcggcgcgcgcgggtgttgttgcctcgcatcctccaccaccactagtgcagccaagtgcgtgcgtgtgtgtgtgtgcggacaccgttgctgccgccgccggccgccgcgcgcagggtggtgacaagatgacggcgacgccagcggtgatcgggctgagcgcggggaacaggctgctgagcgcgtcgttcgggccgaccgacctgatgccggacaaggtcagcctcggcgtcggcggaggcgggggaggaggaggaggtggtggaggtggggacgcgatgtcgttcgccgccgcgcccgcgacgccgaagctcaccgcggtcgccgcgcacaggctcaagctctccccgcatggccgcgcgcaggtcatgcgcgcgctcaggcaccactcctccgcggcggccgcgctcgcgcccccgcccccgcccccgcccccgccgacgccgtcgcccgcctcgcgcgccgcccacgcccatgacctcgagtcctccctcgaggccatcgtgctgctgcagaggtccatgctcgagaagcagtgggagctccccttcgacgacgacaaccacgccatggccatcggcttggccgaggatgacgacgacaccagcaaggccaccgtcgtcgtggcgcggtccagtgtctcggcgcggcagaggaggatgagcgggcggcggcgggggaggaccaagaacggcgcggcgcacttcgccgtcagccccgagctgatccagagcaggaacaggatctacctcaggggcaccgtcagcaaggagctcctcacgcacaagcaggtcgtccacctctcccacaagatcaaggatggcatctggctgcagcagcaaagatcaaagctgaaagagaagctgggaaatgagccctcatacaaacagctggcgcattcgctgaagatatcaccgcccgagctacggtcaaggatgcacgagtcgtttcttgcaagggagatgctaacaatgagcaacctccgtttggtcatttccattgcccagaagtatgataaccttggtgttgagttggctgacctcattcagggtggtctgatagggttactccgtgggatcgaaaaatttgatgcatccaggggctttagaatttccacttatgtatactggtggatacgccagggtgtttcaagagcattagctgaaaactcaaaaacattcaggcttccaacttatctgcacgagcggctgattgcgattcgtggtgcaaagtatgagttggaagatcaaggaattgctccaacaatagaaaacatagcagggtcactcaacatatcagaaaagaaagtactcaatgctacagaggctgtgaacaaggttctttcgttggatcaacaagcatttccatccttaaacggcttacctggagagacactgcacagttacatagaggatcaaaatgtcgcaaatgatccatggcatggatttgaggagtggtatctcaaggaagaagtcaacaagcttttaaactcaactctcaacgagcgtgagagggacattatccggttatatcatggcataggaaaacaatgccatacatgggaggatattagcagacaattcgggttgtcgagggagagggtgaggcaagtaggactcatcgcaatggagaagctgaagcatgctgcgaggaggaaaaatttggaggcattgcttgaggattattgagttgaggggctttttgtttgagtcagatccacaaacacagcggttgtatatactcagaaaacatagggtacatccttcaaaaggcgtactgccactcacatgaaagtaattatacgtgtacattttgtgacattagggagatgcatgatcaaaatctctatgcctgtgttatgaccaaggcaatcaggaaacagagagatgatgttttccttcaaggtttacaattattctgtaatatatatgtaagtatgatttagcttgatcaatagagcaacacttaaaagttctgagccnnnnnnnnnnnnnnnnnnnnnnnnnnnnnnn

SEQ ID NO: 385062 - DNA, 1217 bp, Oryza sativa
cacgtagtccctccacacacctcgtacctcgatctcgaagcttaattactagttaacattaacaatggctgctaataagctcaagttctcccctctccttgccctcttcctcctcgccggcatagccgtcacctcccgtgccggcgacatcgccgtgtactggggccagaacggcgacgagggcagcctggccgacgcctgcaactccggcctatacgcgtacgtcatggtcgccttcctcagcaccttcggcaacggccagacccctgtcctcaacctcgccgggcactgcgaaccaagctccggcggctgcaccggccagagctcggacatccagacgtgccagtcgctgggcgtcaaggtcatcctgtccatcggcggcggcgccggcagctacgggctgtcgtccacccaggacgcccaggacgtggccgactacctgtggaacaacttcctcggcggcagctcgggctcccggccgctcggcgacgccgtgctggacggcgtcgacttcgacatcgagaccggcaacccggcgcactacgacgagctcgccacgttcctgtcgcggtacagcgcgcaggggggcggcaagaaggtgatcctgacggcggcgccgcagtgcccctacccggacgcgtcgctggggccggcgctgcagacggggctgttcgacagcgtgtgggtgcaattctacaacaacccgccgtgccagtacgccaacggcgacgccagcaacctggtgagcgcgtggaacacgtggaccggcggcgtcagcgccgggagcttctacgtcggcgtgccggcggcggaggccgcggcggggagcgggtacgtggcacccggcgacctgacgtcggcggtgctccccgccgtgcagggcaacgccaagtacggcggcatcatggtgtggaaccggttctacgacgtgcagaacaacttcagcaaccaggtgaagagcagcgtctgagctatagcctcaacctcaagcccccaagcctgagtaattaacttacgtgacacgtatacttattacttgcacagtggttgagttggactataaataagaggagatccgttcatacgcatctgtaatatagtagtagtaataagcagttatgtatgcacaacccacatggtgtactttgtgtaactctgtgtttgatcatgggagtgtatttgccgatataaattaaataaggagaatgatttgcatt

SEQ ID NO: 385063 - DNA, 2477 bp, Oryza sativa
  unsure (1)..(2477): unsure at all n locations
ccacatcccgcgcccctcgcctccgccgcctcggcggaatcgaagccgcctcctcccctctcccgctctcaccggacggcaccgatcctttccctgctcctgtctccaccgttctactcgcctcgaaagggaggggggaggatgtggtcgtcgagccaggccagcacgaggggcgtgattgaggtggggaggggtggaggcggngccttcccatttccccaagaggcccgcgccgcggaattcctccagggtcaatctgtcaaggacatatgcaattaaatcttgttcagtgagtagccgtacagggctttgccttggacaatgttatcataagaagtcttctgcttgcagatgcaagttgggatggtcttctcaaccactgtctagcttgaggcatcacttaagagtacattcatcagcatcggaggcggttcttacttcccaatctgatttcacaaaacttcttgttgggaatgaaaaaattggtgttctcttgctgaatcttggaggtccagagacccttgatgatgtgcagcctttcttgtttaatctatttgctgatccggacattatccgtcttcctagattgtttcgctttcttcagaagccattagcacaatttatatctgttgtaagagcaccaaagagcaaggaaggctatgcatccattggtggtggttctcctcttcgtcaaattactgatgcacaggctgaagcactgaggaaagcattatgtgataaagatattcctgccaaggtgtatgttggaatgcgttactggcatccattcactgaggaagctatagaacaaataaaacgggatggcatcacaaaacttgttgtacttcctctgtacccccagttctccatatcaactagtggttcaagtctccgtttactggagggcatattcagagaggatgagtatctggtgaatatgcagcatacagttataccttcctggtatcagagggagggatatatcaaggctatggcaactttgattgagaaggaactgcgaacattttcagaaccccaaaaggttatgatatttttcagtgcccatggagttcctctggcatatgtagaagaagctggtgatccatacaaagcagagatggaagagtgtgtggatcttatcatggaggaactcgaaaaaagaggaataacaaactcatgcacacttgcctatcagagccgagtggggccagttgaatggctgaggccctacactgatgagacaattatcgagttggggcagaaaggggtgaagagccttctagctgttcccatcagttttgtcagtgaacatattgaaactttggaagaaatcgatgtagaatacaaggagttggctttagaatccggcatcaagcactggggacgagttcctgcattaggttgtgaacccacgttcataacagatcttgccgatgctgttattgaaagcttgccttatgttggtgctatggcagtttcaaaccttgaagctcgacagccactggtgccacttgggagtgtggaagaactgctagcggcgtacgactcgaaacgcgacgagctgccccctccagtgactgtatgggagtggggctggacgaagagcgcggagacctggaatggacgggctgctatgctggccgtgctggctctcctagtgctggaggtgacaaccggagaagggttcttgcaccagtggggcatcctgcctttgttccactgagccgatggccctcttcaggtcagctctttttgaggtgatctaatcataattttgattcatatggataatttcccgatgctgtatacgaatggaaaaagaaagaatattaactgaatttgactacgcaccacattacccatgttgtacatatgaaatattctacggactcttagtacgaagattaacaaattgaacactggcaaaacgcctggtttcccaaggcaaaaaaaaaaaaaaaaaaccggaatatctgggtttaagagatgggattttgctgttgattgcgtggtgggggctgcggcagggttaatcttatcatgaaggctttaatcttatcatgcaaaagaagacggaaaggaagacaacaacagaagcaccgcgaagttaggctgtgaaccactctgcatgcacgattacctgtatcgcaacaatttcacctcctgtgatagtaaagggatttctcggctgggcagtgggcactcatacagttcacggtctatgatatcaagtactactatactagaccattttcgtctaagtaattttatctaggggcataatgacttactgcaattagttgtagcttaagggccttttctgagagcttcggacagctgtatctactagctaattctagaatctttcagctccttaaattgtctactccctccgtctcaatatattgtaattaggatgggattagatccattctagaactacgagtcttgttcagcnctaaaaaaaaaaaaaaaaa

SEQ ID NO: 385064 - DNA, 2005 bp, Oryza sativa
gtcagttcccgcgccgtgtgaccaatactcacgacttaaaccgcgcgctttttagccgacccgagcagccggagagtgaggcgaggcgaagcgaagggaagagcgcgaggcagagtaagcagacgagaagaacagcgcgcggcgcggtagctgaggagagtggtgcggagatggatcacgaggcggacgcgtaccggacggacctgatgacgatcacgcggtacgtgctgaacgagcagagccgcaacccggaggcacgcggcgacctcaccatcctcctctcccacatcgtgcttggctgcaagttcgtcgcctccgccgtcaacaaggccgggctcgccaagctcatcgggctggccggcgagaccaacgttcagggagaggagcagaagaagctggacgtgctgtccaacgaggtgttcgtcaaggctctcgtcagcagcggccgcacctgcgttcttgtctccgaggaggacgaggaagcgacgttcgtggaccctgcgctgcgtgggaagtattgcgtgtgctttgatccactcgacggctcctccaacatcgactgtggcgtctccatcggaacgatctttgggatctacatgatcaaagataaggagaatgtgactcttgaggacgtgttacagcctggaaaaaacatggttgctgctggatactgcatgtacggcagttcctgcacgcttgttctgagtactggaaatggtgtcaatggcttcacacttgatccatctctcggggagttcatattaactcatccagacatcaagataccaaagaaagggaagatttattcagtgaatgaagggaatgcgaaaaattgggacgagcctaccgcaaagtttgtggagaagtgcaagttccctaaggatggttcatcacctaaatccttgagatacattggaagtatggttgctgatgtccaccgtacgttgctatatggaggagtatttttgtaccctgcagacaagaagagcccaaatggaaaactccgtgttctgtatgaagttttccccatgtcattcctgatggagcaggctggaggccagtctttcacaggcaaagaacgggctcttgacctcgttcctaccaagattcacgagagatccccaatatttcttggaagcttcgaagatgtggaggagatcaaagggttgtacgctgcacaggcgaagtaagctcggtttgatcgatctggcaccatcaaggcgtgcgaatggactccctggccttactgtaacatgcatgattcgtcaggcacttcttttattcgtcttactgtacgtttgtaaaattcagtgtaatagtgttgaggcctggaacagcttcatgagcaactaaggccttttctactattatttacaaaatacatacaccgtgcatctctagcagctaaagcactaatacaacaagtcactaaggcaaacctgtgcttcctgtcttcctggcaaaatattttttcagttttgggtaccccttttgagtagatattttacggtccttcagaaagtgtacctgcggtgcgggtatcaaaattttacactaaaattttagtacctcaaggtagtttggcacttctattaaacacatgatcaatggcggtgaaggattgttctggtgttatactactggtctactgccccaagtgctcaatgtactgagcatacagatccctgcaaacttgcaaagatgtcatcttgctgttacacgtgtaaactgtaaactactcaatatatcgttctaaaatctgaactgatggacagttcatcacttacatggaatactggatggcatcccgagcagcggtcacaggcagtacctcattcacggcgacctccttgttttcattcttcttgtagtcttcaaagaaacgccggatttcctggacgcgatgaggcgaaagctcactgagatcgttgtagtggcggtactcaggatcgtccacgcagacggctatgcatcttgtcgtccttctctccctgtctcattaaag

SEQ ID NO: 385065 - DNA, 684 bp, Oryza sativa
ccacgcgtccgcacgcgtccgcggacgcgtgggcggacgcgtgggcggacgcgtgggccgtacgttgctatatggaggagtatttttgtaccctgcagacaagaagagcccaaatggaaaactccgtgttctgtatgaagttttccccatgtcattcctgatggagcaggctggaggccagtctttcacaggcaaagaacgggctctggacctcgttcctaccaaagattcacggagagatccccaatatttcttggaagcttcgaagatgtggaggagatcaaagggttgtacgctgcacaggcgaagtaagctcggtttgatcgatctggcaccatcaaaggcgtgcgaatggactccctggccttactgtaacatgcatgattcgtcaggcacttcttttattcgtcttactgtacgtttgtaaaattcagtgtaatagtgttgaggcctggaacagcttcatgagcaactaaggccttttgtagtattatttacaaaatacatacaccgtgcatctgtagcaggtaaagcagtaatacaacaagtcactaaggcaaaaaaaaaaaaaaaaaaaaaaaaaaaaaaaaaaaaaacctcgtgccgaattcctgcagcccgggggatccagtagtttagagcggccgccaccgcggtggagctccaaggctatcaatagcgggc

SEQ ID NO: 385066 - DNA, 1472 bp, Oryza sativa
ccacgcgtccgcggacgcgtgggccaagaccaggtagccgcagcgagaggagagcgcgagcagagcaagcaaccaagcagcagcagcgatggccgccgcagccacgacatcctcccacctgctcctgctctcccgccagcaggcggcggcctcgctccaatgcggcctctccttccggaggcagcccggcaggctcgccggtgggtcgtcggccccgagcgtgcggtgcatggcggccgtcgacacggcctcggcgcccgccgcgacggaggctagcaagaagagcagctacgagatcaccacgctgacgacgtggctgctgaagcaggagcaggccgggaccatcgacggcgagatgaccatcgtgctggccagcatctccacggcgtgcaagcagatcgcctcgctggtgcagcgcgcgcccatctccaacctcaccggcgtccagggcgccgtcaacgtgcagggcgaggaccagaaaaaactcgacgtcgtctccaacgaggtgttctccaactgcctcaaatcgagcgggcgcaccggcgtgatcgcgtcggaggaggaggacgtgccggtggccgtggaggagagctactcgggcaactacatcgtggtgttcgacccgctcgacggctcctccaacatcgacgccgccgtctccaccggctccatcttcggcatctacagccccaacgacgagtgcctagccgacatcgccgacgaccaaaatcttgaccaggtggagcagaggtgcatcgtgagcgtgtgccagccggggagcaacctgctcgccgccggctactgcatgtactcgagctcggtcatcttcgtgctcaccatcgggacaggggtgtacgtgttcacgctggacccgatgtacggcgagttcgtgctgacgcaggagaaggtgcagatccccaaggcaggcaagatctatgccttcaacgagggcaactacgcgctctgggacgacaagctcaagagctacatggacagcctcaaggagcccgggccgtccgggaagccatactccgcgcgctacatcggcagcctcgtcggcgacttccaccgcacgctgctctacggcggcatctacggctaccccagggaccagaagagcaagaacggcaagctgcggctgctgtacgagtgcgcgccgatgagcttcatcgtcgagcaggccggcggcaagggctccgatggccaccagaggatacttgacatcatgcctacggagatccatcagagagtgccgctgtacatcgggagcgtggaggaagtggagaaggtcgagaagttcttggcttgactgcaagtttcatatacgggggtgtttctaaaaaaaaaagtattgtaactaaattataatatatttgtagaaattttcttttctgatggcgaattaattaaacccattgtgaaggatttcatccctactgttgataggtcgaggctccttctcactagtcctg

SEQ ID NO: 385067 - DNA, 1961 bp, Oryza sativa
attcgccacgaaacccaacccgtcaacgctgccgctgaatctcactttctctctctgttcttggtgcttccgccgccatggctgctcccagcgtcgccgtcgacaacctcaaccccaaggttttgaattgtgagtatgcagtgcgtggagagattgtgatccatgctcagcgcctgcagcaacagctacagactcaaccagggtctcttccttttgatgagatcctatactgcaacattgggaatccccagtctcttggtcagaagccagttacattcttcagggaggttattgctctttgtgatcatccatgcttgttggaaaaggaggaaaccaaatcattgttcagtgctgatgccatttctcgagcaacaacaattcttgcctcgattcctggaagagcaactggagcatacagccacagccagggcatcaaagggctgcgtgatgcaattgctgctggaattgcatcacgtgacggataccctgcaaatgcagacgacattttccttactgacggagcaagccctggagttcacatgatgatgcagttactgataaggaacgagaaagatggcattctctgcccaattcctcaatatcctttgtactcagcctccattgctcttcatggtggagctcttgtcccgtattatcttaatgaatcaacaggctggggtttggagatctctgaccttaagaagcaactcgaagattctcggttgaaaggcattgatgttagggctttggtagttatcaatccaggaaatccaactgggcaggttcttgctgaggaaaaccaacgggacatagtgaagttctgcaaaaatgagggacttgttcttctggctgatgaggtgtaccaagagaacatctatgttgacaacaagaaatttaactctttcaagaagatagcgagatccatgggatacaacgaggatgatctccctttagtatcatttcaatctgtttctaagggatattatggtgaatgtggcaaaagaggaggctacatggagattactggcttcagtgctccagttagagagcagatctacaaagtggcgtcagtgaacttatgttccaatatcactggccagatccttgccagcctcgtcatgaatccaccaaaggctggagatgcatcatatgcttcatacaaggcagagaaagatggaatcctccaatcattagctcgccgtgcaaaggcattggagaatgctttcaacagtcttgagggaattacatgcaacaaaactgaaggagcaatgtacctcttccctcagcttagtctgccacaaaaggcaattgacgctgctaaagctgctaacaaagcacctgatgctttctatgcccttcgtctcctcgaggcaaccggaattgttgttgtccctggatctggatttggccaagttcctggcacatggcacatcagatgcacaatcctgccacaggaggagaagatccccgcgatcatctcccgcttcaaggcattccatgagggcttcatggcagcgtaccgcgactgaattgccattcaccattgaacagatggggagttctatacaagcctgatggattttccccaggccttctttttttttgtccccatgatagcatcatcgtgtagaccaaaacaaaataaatcaaagccagacatgcttttttttagtgtgctaatcacagagggtactgaaaaactgatgccttcgatggcaaattgaggagaaatttacctgccatttcgttgttgtgcctgttactgtataaatgttaagattttggtgcagaggcagctatagttttgagatgttggagttggctgaactgtatgagaatggcttgatctgattgtgagacccaccagctattcatctctgatttgaatagcgttggttggtaggagtgctgctgaacaaaatgctctgaataaaatgagacctttcagtgtcttttactct

SEQ ID NO: 385068 - DNA, 682 bp, Oryza sativa
  unsure (1)..(682): unsure at all n locations
ggggttttgnnggggancccggggacatagggggtttcgccaaaaatgggggaattttttttttgggtggaggggggtacccaggggaaattttatgtggaccaacaagaaatttaattttttccaggaagatagggggcaatccattggggatacaaaggagggatgatttcccctttagtatccaatttcaatcgggtttctaagggataattatggtgaatcgtggcaaaagggggaggttaacatggagatttacgggctttcagtggctcccagttagagacgcagatctacaaagtggcgtcaggtgaacttatgttccaatattcactggccagatccttgccagcctcgtcatgaatccaccaaaggctggagatgcatcatatgcttcatacaaggcagagaaagatggaatcctccaatcattagctcgccgtgcaaaggcattggagaatgctttcaacagtcttgagggaattacatgcaacaaaactgaaggagcaatgtacctcttccctcagcttagtctgccacaaaaggcaattgacgctgctaaagctgctaacaaagcacctgatgctttctagcccttcgttctcgagcaccggatgtgtgtctgactggttgccagtctgccagccataatccatctgcagaggagacggaattcgttaga

SEQ ID NO: 385069 - DNA, 1875 bp, Oryza sativa
cgaacacgcggagagagagagagagagagagaggaggaggaggagacgacgcggcgatcggcgagaccggaatccggcggcgacgccacccatctcccccgccgccgttggccgcggctagaagtagtgggggggggggggggctcgccggcgcgcgggcatcggcatcggcgtgagtagatcgtatcgtgcgagtggtggatcggaggagggtgatcgcgatttgtgaggaggggggggggggttgggatttggatttggatcgtggggatcagggggaggaggagatgggggtgctgtcgaggccggaggaggtgttgccgctggtgaagctgcgggtggcggcggggcggatcaagcggcagatcccgccggaggagcactgggccttcgcctacaccatgctgcagagggtctcccggagcttcgcgctcgtcatccagcagctcggccccgacctccgcaatgccgtgtgcatcttctatctcgtgctccgagccctcgacactgttgaggacgacactagcattcctgccgcggtgaaggtgccgatccttaaggaattccatcggcatatctacaaccgcgactggcattattcatgtggaacaaaagactacaaattactgatggataagtttcgccttgtctccacggctttcttggagcttggtcaaggttatcaagaggcaattgaagaaatcactaggctaatgggagcaggaatggcaaaatttatctgcaaggaggttgaaactgttgatgactacaatgagtactgtcactatgtagcagggctagtggggtatgggctttccaggctctttcatgctggtgggacggaagatctggcttcagattcactttcaaattcaatgggcttgtttctgcagaaaatcaatataattagggattatttggaggacataaacgagataccaaagtcacgtatgttctggcctcgagaaatatggagtaaatatgtcaataaactcgaggatttgaaatacgaggaaaattcagaaaaggcagttcagtgtttgaatgatatggtgactaacgctctgtctcatgctgaagactgcctccaatacatgtcagcattgaaggatcatgccattttccgtttttgtgcaatacctcagataatggcaattgggacatgtgctatttgctacaataatgtgaatgtctttagaggagttgttaagatgaggcgtgggctcactgcacgagtaattgatgagacaaacacaatgtcagatgtctatactgctttctatgagttctcttcgctgatagaatcgaagattgataataatgatccaaatgcttccctaacgcggaaacgtgttgatgcgataaagagaacctgcaagtcatcttgctcactaaagagaaggggatacgatttggagaagtcaaagtacaactccatgctgataatggttgtacttctgttggtggctattgttttgggcatgatatatgccaagtgattcgtcctaggtggtccattgccctcaactagacaatctatgcgcatcagatttcttatcagcgccaactccaaagcacatgcagcaattataagtactgactgactgcaagaatagactgtacttctatgaagttggatctcttcacctatctgttcaccctaaaccttttcatggtttataagaatgcgggttgtttcttgcaaaattttgggtagaatggtgcaaaaaagaatttgttcgataatgaagatagctgtggttttgttagcttgtgttatattgatgtaatttaagatcatgcgagtgtttattttcccggcgacattcttttgtttattcattatatgcagtatccatttatcttggctctcaa

SEQ ID NO: 385070 - DNA, 1626 bp, Oryza sativa
gttcttctgaggatgacatggacccaagtggccgcgaaaacgagccgcctgagatcgacactcccctccctctcgccattggagctagacagctcgagctccaggaggaagaagagagagagcctagctgctagggtttccatcggatttggttttttattttctttttgtttcttgtgtgtgttttgatggatcagagctttgggaatcttggaggaggaggaggagcaggggggagcggcaaggcggcggcgtcgtcgttcctgcagctgccgctgtccacggcggcggcggccaccgcgtactacggcacgccgctcgccttgcaccaggcggcggccgcggctggcccgtcgcagtaccacggtcacggtcacccccaccacggcggcggccaccaccacagcaagcacggcggcgccggtggtggggagatctcggcggcggaggccgagtccatcaaggccaagatcatggcgcacccccagtactccgccctcctcgcagcctacctcgactgccagaaagtcggagcgccgccggaggtgctggagaggctgaccgccacggcggcaaagctggacgcccgccctcccggccgccacgacgcgcgcgacccggagctcgaccagttcatggaggcgtactgcaacatgctggccaagtacagggaggagctgacgcggccgatcgacgaggccatggagttcctcaagagggtggagtcgcagctcgacaccatcgccggcggcgcccatggcggcggcgccggctcggcgcgcctcctcctcgccgatggtaaatctgaatgtgttggttcttctgaggatgacatggacccaagtggccgcgaaaacgagccgcctgagatcgacccgcgcgctgaggataaggagctcaagtttcagcttctgaagaagtacagtggctacttgagcagcctaaggcaagaattttccaagaaaaagaagaaaggaaagctgcctaaggaggccaggcagaagctgcttcactggtgggagctgcactacaagtggccttacccctcagagacggagaagattgcgcttgcggaatcgacaggactagatcagaagcagatcaacaactggttcatcaaccagaggaaacggcactggaagccatcggaggacatgccgttcgtcatgatggaaggttttcacccacagaatgctgctgcattgtacatggatggcccgttcatggcagatggaatgtaccgcctcggttcgtgaacctcgatctcgatcatcggcgtgtttgatgagagatccaatgccaagataaattgatcatggaatgtattcagcatgcgttgcaatgcatggacattgttatggaatttttggtttatttacctttcaccgtggattgacaaggtctcgatcatgttagtgttgacggcccatagttctccagtaatgttgttgtttttcctttcgatggcttgtaaaagtttaggcgtatcggaatttcgatcaacttgctcgtacgctggtaattaatttggtgatggtctatatgttgtatggttgtgcgtttcagattggtgttcaaagttgcctatctgaaacaattatatatatttatattgcttctcatttt

SEQ ID NO: 385071 - DNA, 1600 bp, Oryza sativa
tgctgctccagcagcagaggctgcagtgcaatccgctgccaaattcctcttcttctccttcctactagcttttctcttcttcttcttcttcttcttggaaagctggaacttggagctgcttaagcttacacctgctgattcatctccagctgctgctgctgctgattcagtattattatgtgtggagatgtacagtagatgaggaggaaggaagtagctactggatagctagctgagctgagctaagctgagctaagcttcttggctaggtaggtagctagaggtgaggtgaggtgggggaagaggggattggacatggaggatctgtacagcatccacccgggaatctcccgcggcggcggtgggggaggaggaggtgcggccagcgaggcgtccggggtcgccggaggggggagctcgccgccgcatcccccaccgccggcgacgacggcggcggcggcggatctgacggagctgatgaaggcgcagatcgccggccacccgagctacccttccctcctctccgcctacatcgaatgccgcaaggttggtgcgccgccggaggtgaccacgctgctggaggagatcggccgggaggggcgcggcggcggcggcggcgcgacagccggcggggaaattggcctcgatccggagctcgacgagttcatggagacgtactgccgggtgctggagcggtacaaggaagaactcacacggccgttcgacgaggcggcctccttcctcaccggcatccacacccagctcgcctccctctgtggcggcgcgccgccgcccaccgacaactccgatgaaatggtggggtcttcagaggatgagccgtgctcaggagacgccgatgcagcagattttgggcaagaacacagctcccgcttggctgaccatgagctcaaagagatgttgctcaagaagtacagtggctgcctcagccgcctccggtccgagttcttgaagaagaggaagaaagggaaactaccgaaagacgcgcgatcggcacttatggactggtggaacacacattaccgttggccttaccccacggaagaggataaggtgaggctggccgcgatgactggcctcgacccgaagcagatcaacaactggttcatcaaccagaggaagaggcactggaagccatcggaggacatgcggttcgcgctcatggagggggtcaccggaggatcctcctccgggacgacactgtacttcgacaccggcacaattggtccatgatcagattgcactccaaattaaatgtagcaccttgcaacagacattggcaggtattacctgctgctacaccctctgtgaggagcaagggatgatcatatattaaaaggaaaaaaagatgaaatcaatcaataacctcatcattttgtcgaaattattgtgtatatggtgttgtaagagggagttgggatgacctgtaaaaacttgcctgcattcagctaccataacattaattaattgtttgtatccctgacaactgcatccccagttaaaaccattttagacaggaaagagtgaactatgagtaatagtaacatgtagcaataataaagatacttattttttcccctgc

SEQ ID NO: 385072 - DNA, 1349 bp, Oryza sativa
gaattcccccatgagcctctgcctccctgcctgcccccgtatgtagcaagaacaagaacaccagcgagtaacacaggctcgctacagtggtactagattaccgcttgtgcgggcatagtgatcgtctatagttgtgaattgcgatgcagcagcataggtggtgagctgctgcggctgctgctgctggtacgtagatggaggatctgtacagcatccacccggggatctcgcgggtcggcggcgcggcgagcgaggcgtccggcgtgggcgtcgtcgtcggcggcggcggcgggtcgtcgtcgtcggatctgacggagctcatgaaggctcagatcgccggtcacccgcgctacccgaccctcctctccgcctacatcgagtgtcgcaaggtgggagcgcctccggaggtggcgtcgctgctgaaggagatcggccgggagaggcgcgccggcggcggcggcggcggcgccgggcagatcggcgtcgaccccgagctcgacgagttcatggaggcgtactgccgggtgctggtgcgctacaaggaggagctgtcccggccgttcgacgaggcggcgtctttcctcagcagcatccagacgcagctcagcaacctctgcagcggcgccacctcgccgccggccaccaccgccacgcactccgatgaaatggtggggtcctccgacgaagaccagtgctcgggggagactgatatgctagatatagggcaagagcaaagctcccgcttagctgaccacgaactcaaggaaatgcttctgaagaagtacagtggctgcctcagccggctccggtccgagttcctgaagaagcggaagaaagggaagctaccaaaggacgcacggtcggcactgcttgaatggtggaacacacactaccgctggccatatcccacggaagaagataagctgaggcttgcagcgaggacaggtcttgacccaaagcagatcaacaattggttcatcaaccagaggaagaggcactggaagccatcggacgggatgcggttcgcgttcatggagggcgtggcgggtggatcgtccgggacgacgctctacttcgacactggcacaattggaccatgaattcatttttgagcaatgccgcctcttgagaaaattggccatttaggcagtaatagtaggacatggtatttggtggtgattgtgtctagctatgatcaatctttcagcaggtcagtgttattcagttcagggtaaagtaattgcctcattgttttggcaaaaaaaaaaaaaaaggcatcgtaccaaatcaaaatgtataatcgttaggtaatatatatcttggggagacctgaaaaggctgttattagt

SEQ ID NO: 385073 - DNA, 1737 bp, Oryza sativa
ataaaaacaagccattcaaaattattacaccagccattacaccagctgcggccggctgcttttatctgatttgacaatggacgtgacggccacccgacctctcttttcctactagctctcccctaccctacccctctttccttctagcagtagcctctactacagtctacacaccctctctatgcaaaacgcaatctcatctctgtgcagccactcatccgatatttccccccatttcttttcctctccactgtttccctcctcctttaattattcccccccacttcgcctagctttacaaacccccacaaatcgtcattctaaccaaaagaaatcagcaggattagccctagctaagtactcccaatagctgtgataaactgataattagccttctcttcttccttgctgagctggtcggtgtcgtgtaccaagaaaccctcatcaagcacatacgctaatggaggagcttgaaggccaccggggtgaaggccggctgcctcctcctcctccgttgctgccgtttcccaaggtctccgtgcaagtctacaccgttcctagctcgtccaccgccgcctccgccgccgctgcaggcggagctcgtcaggactgttgcaccggcgacgcgggacgacggcgacgacggcggccgcgccgcggagttcttgacgaccctgtcaaggccaggatcgtctcccaccctcgctaccaccgcctcctcgccgccttcctcgactgccacaaggttggctgcccggcggaggcggccgaggagatcgcggcggcggcgcgggtgcgggaggcgcggcagcgggcggccgcggcggcgagccgcatgccgccggcgccggaggacccggagctcaaattagtaactgaggattactgcaagctgctcgtggagtgtaaggaggagctcagccggccgctccaggaggccgaggagttcctcaggacggtggagtcagagctcgagctcaactccatcaattctgggccaccccttacagctctaatctcagaatccaaagccggcctcgattcgtcggacgacgacgaacacgaagacggcagcggcatggagatgatggaggccgcggaagacgaggacctcggcatcatcgaccctcgctccgacgacaaagcgctgaagaggcacctgctgaggaagtacagcggttacctgggaggcctgaggaaggagctgtcgaagaagaggaagaaagggaagctccccaaggaggcgaggcagaagctgctcacctggtgggagctccattaccggtggccgaacccgtcggagatggagaagatcgccctcgccgagtcgacggggctggagcagaagcagatcaacaactgtttcatcaaccagcggaagcgccactggaagcccacggaggagatggagttcgccgtcatggaggcctaccaccaccagagcaccgatgccgcggcggcgttctacgtcgacgtcgacgcccgcctcgtcggagcgacggcggcggctccggcatcggccgtgtacaccgccaggccggatcatggcgtgtggcgcgcatagccgttgctcgattcgcccgttgccgccatctggaattaatctgaactgcccttgcctgttacatatagtagggttgttgatgatggtttcatatgtttttccccaaagggaaagtcagcttggacattggaccaatcaagaaatgaaatctcagcaaaaaaaaaaaaaaaaaa

SEQ ID NO: 385074 - DNA, 1043 bp, Oryza sativa
  unsure (1)..(1043): unsure at all n locations
cacattatgtgttgcttctttgctcattcaaggaacaacttcagcagcatgtgcgtgttcatgcaatggaagcagtnatggggtgctgggaacttgaacagtctttacaaagtctaacaggggcatctcctggtgaagggactggagcgactatgtctgatgatgaagataaccaagtggacagtgaagccaacatgtttgatggaaatgatgggtcagacggcatgggctttggtcccttaatgctgaccgagggtgaaagatccttggttgagcgtgtacggcatgagctgaagaacgagcttaagcaggggtacaaagaaaagcttgtggatattagggaagagatccttcgcaagcggagagctggtaaacttcctggtgatactgcatctatactaaaagcttggtggcaagctcattctaagtggccatacccaactgaagacgacaaggcccgcctggtgcaggaaacggggttacaactgaagcaaatcaacaattggttcattaaccaacgcaaacgaaactggcatagcaacccagcatcctctggtgaaaagaccaagaagaaaagaaacgttacaggtgatggtggtgctgagcaatcgtggtagattggttcaacatgaaactagatgtaaacagtaccttttattgtgaagagtgtagtacattctctcgtgctctggtgtgacaaaatctggagaccggcccattcacaagggaattgcgatcataggcgtaatcactgggcaaagaagtcatctgaaattgtagcataagcgcacaaaactgaggtgggtggtatttgactttcgcagtatagcatcgactgtctgctaatgtgattttgtgaaggaatgttctgtataaccgatgaacggaaggaagaattgtattgtgtatgtaattgtgtatcttatttatcatgtaatatatatatgatattaggagctttaagattcggattggatatgttctctgttttgatgcacgatgcagtgttgaggtgtaacatgttttggtaattcactgtgtat

SEQ ID NO: 385075 - DNA, 1235 bp, Oryza sativa
gctcgacctcttcatgacccattatgtattgctcctttgttcgttcaaggaacaactacagcaacatgtgcgtgttcatgcaatggaagcagtaatggcttgctgggaacttgaacaaactttacagagccttacaggggcatctcctcgtgaaggttctggagcaactatgtctgatgacgaagacaatcaggttgatagtgagagcaacatgtttgatggaaatgatggatcagatggtatgggctttggccccttaatgctgacggagggcgagagatcattagttgagcgtgtacggcaagagctgaaacatgagcttaaacaggggtacagagaaaagcttgtggacattagggaagagatactccgaaagcgaagagctggaaaactcccaggagatacagcgtctactttgaaagcatggtggcaggctcactctaaatggccatacccaactgaggaggacaaggctcgcttggtgcaggaaacagggttgcaactaaaacagatcaataattggtttatcaaccaacgtaaacggaactggcacagcaatcctgcttcatcctcatcagacaaaagcaagagaaaaaggtatcgtgtcgtggacttctaacagaaattccttttacatatttttggtttccattttcctgtctctgtctgtttatgcctagaaaaagaagcaatgcaggtgatggcaaggccgagcaatcttggtagaacgtggttggagaagaagtatatatatgtaaataatgcatccattgtgaagaatgccagtatatttattgctcccaagatggcgattcggacagaagcttcctggggctaatttatacgaaagaaattatgtcatgttataattttagtcatgtgaagctatagtgcgtatatatagtgacttaccagagagtagtttttatgtttgctgttggctagtgtgcatttgtagttgggacgtgctggctgtctctctacagctcggtacaaccatgtatttataacgtgttgtgaagcatatgttgtaaaatcgtggaatgggagtgttctgcgatccccatatgttgttgtaatgttgtatattgatgaccatgctgcaacggcagcatgtttgtaactcgttatatcctcaggctcttgtgttgttacaaattacagaactatattgtctttaacgagcatctcctgttgaattaataatagccagacagtcagatttttgttggaaa

SEQ ID NO: 385076 - DNA, 739 bp, Oryza sativa
ccacgcgtccgcgaagacaatcaggttgatagtgagagcaacatgtttgatggaaatgatggatcagatggtatgggctttggccccttaatgctgacggagggcgagagatcattagttgagcgtgtacggcaagagctgaaacatgagcttaaacaggggtacagagaaaagcttgtggacattagggaagagatactccgaaagcgaagagctggaaaactcccaggagatacagcgtctactttgaaagcatggtggcaggctcactctaaatggccatacccaactgaggaggacaaggctcgcttggtgcaggaaacagggttgcaactaaaacagatcaataattggtttatcaaccaacgtaaacggaactggcacagcaatcctgcttcatcctcatcagacaaaagcaagagaaaaaggtgatggcaaggccgagcaatcttggtagaacgtggttggagaagaagtatatatatgtaaataatgcatccattgtgaagaatgccagtatatttattgctcccaagatggcgattcggacagaagcttcctggggctaatttatacgaaagaaattatgtcatgttataattttagtcatgtgaagctatagtgcgtatatatagtgacttaccagagagtagtttttatgtttgctgttggctagtgtgcatttgtagttgggacgtgctggctgtctctctacagctcggtacaaccatgtatttat

SEQ ID NO: 385077 - DNA, 683 bp, Oryza sativa
ccacgcgtccgccacgcgtccgccacgcgtccgaattggtttatcaaccaacgtaaacggaactggcacagcaatcctgcttcatcctcatcagacaaaagcaagagaaaaagaagcaatgcaggtgatggcaaggccgagcaatcttggtagaacgtggttggagaagaagtatatatatgtaaataatgcatccattgtgaagaatgccagtatatttattgctcccaagatggcgattcggacagaagcttcctggggctaatttatacgaaagaaattatgtcatgttataattttagtcatgtgaagctatagtgcgtatatatagtgacttaccagagagtagtttttatgtttgctgttggctagtgtgcatttgtagttgggacgtgctggctgtccctctacagctcggtacaaccatgtatttataacgtgttgtgaagcatgtgtggtaaaatcgtggaatggggagtgttctgcgatccccatatgttggtgtaatgttgtatattgatgaccatgctgcaacggcagcatgtttgtaaaaaaaaaaaaaaaatataaaaaaaaaaaatggtcgtccgttctagaaggttccaatgattacatacgcatgcatgcaaattaaataatcttttctatagtagaaccttaggggcggttcatttaaaggatcc

SEQ ID NO: 385078 - DNA, 1253 bp, Oryza sativa
gcggcgcacgtgggctgcctgcgcgtggcgacgcccatcgaccacctcccgctgatcgacgcgcagctcgcgcagtccagcggcctcctccactcctacgccgcgcaccaccgccccttcctctccccccacgacaagcaggagctcgactccttcctcgtacgcatctatttaatttcttcctgagttcgatgcgccatgcttgattaatttcactaggttgaatttaatctttgcatttgtgcatgcatgcatacattacatgcaagtatcataccgtacgcactagctacatgattaactagaagctatccagccaagctaactgtatatatgcatactgaaatgatcgatgcaggcgcagtacatgatgctgctgtgctcgttcagggagcagctgcagcagcacgtccgggtgcacgccgtggaggccgtcatggcgtgccgcgagatcgagcaatccttgcaggacctaaccggtgcaactttggaggaagggacaggggcgaccatgtcggaggacgaggatgagacggcgccgatgctggagggcccgatggatatgggctcggacgggcacgacctcatgggcttcggcccgctcatgcccaccgactccgagcgatccctcatggagcgggtcaggcaagagctcaagattgagctcaagcagggcttcaagtcaaggattgaggatgtgagagaagaaatattgaggaagaggagggcaggaaagttgcctggggacaccaccaccatactcaagcaatggtggcagcaacactccaagtggccataccccacggaggatgataaggcaaagcttgttgaagagactggcctgcagctcaagcaaatcaacaactggttcatcaatcagagaaagcgtaactggcacaacaactcacagacatcaacccttaaatcaaagcgtaaaaggtaaagggcagaaaaaaatgtatacctgacgtactcgctaatcaaatcaaaagaagacatggtgactcataagtaataagatcatcttaaattgtatatctagttattaattagtcagaggtgacaaattcatgacatacatactagtctgaccactggcatatgcgttgtaatttttgagcagatatgctcaagcaaattcttcttgttggtatagtttttaattttgttgtcgtgggtgtacctgcatgcatacataaccccaagactaattcatttgctgtgcatatacattgaccattctataacaaaaa

SEQ ID NO: 385079 - DNA, 1951 bp, Oryza sativa
aattgcatccgagctcacctagcttctctcttgcaaccagcgattcgatcgattccatctccaagaagcagcggctagcagcagctagtagttgccatggactcgtcgacggtgggcgctccggggagctcgctgcacggcgtgacggggcgcgagccggcgttcgcgttctcgacggaggtgggcggcgaggacgcggcggcggcgagcaagttcgacttgccggtggactcggagcacaaggcgaagacgatcaggttgctgtcgttcgcgaacccgcatatgaggacgttccacctatcatggatctccttcttctcctgcttcgtctccaccttcgccgccgcccctctcgtccccatcatccgcgacaacctcaacctcaccaaggccgacatcggcaacgccggcgtcgcctccgtctccggctccatcttctccaggctcgccatgggcgccatctgcgacatgctcggcccgcgctacggctgcgccttcctcatcatgctcgccgcgcccaccgtcttctgcatgtcgctcatcgactccgccgcggggtacatcgccgtgcgcttcctcatcggcttctccctcgccaccttcgtgtcatgccagtactggatgagcaccatgttcaacagcaagatcatcggcctcgtcaacggcctcgccgccgggtggggaaacatgggcggcggcgcgacgcagctcatcatgccgctcgtctacgacgtgatccgcaagtgcggcgcgacgccgttcacggcgtggaggctggcctacttcgtgccggggacgctgcacgtggtgatgggcgtgctggtgctgacgctggggcaggacctccccgacggcaacctgcgcagcctgcagaagaagggtgacgtcaacagggacagcttctccagggtgctctggtacgccgtcaccaactaccgcacctggatcttcgtcctcctctacggctactccatgggcgtcgagctcaccaccgacaacgtcatcgccgagtacttctacgatcgcttcgacctcgacctccgcgtcgccggcatcatcgccgcatccttcggcatggccaacatcgtcgcgcgccccaccggcggcctcctctcggacctcggcgcgcgctacttcggcatgcgcgcccgcctctggaacatttggatcctccagaccgccggcggcgcgttctgcctcctgctcggccgcgcatccaccctccccacctccgtcgtctgcatggtcctcttctccttctgcgcgcaggccgcctgcggcgccatcttcggcgtcatccccttcgtctcccgccgctcgctcggcatcatctccggcatgaccggcgccggcggcaacttcggcgccgggctcacgcagctgctcttcttcacgtcgtcgaggtactccacgggcacggggctggagtacatgggcatcatgatcatggcgtgcacgctgccggtggtgctcgtccatttcccgcagtggggctccatgttcctcccgcccaacgccggcgccgaggaggagcactactacggctccgagtggagcgaacaggagaagagcaagggcctccacggtgcaagtctcaagttcgccgagaactcccgctccgagcgtggccgccgcaacgtcatcaacgccgccgccgccgccgccacgccgcccaacaactcgccggagcacgcctaaggcgtaaacaattctgcgaccgagaccagcaatacgctggagttcgactcgatgataacacgccggagcacgtccttgttgcaaacggtgatgaaattaagagtgaaatatttccttaggaattgaatcctttgaaattaattcctttggaatttctccgatacaaacggaggtataataagggagaggcatttatacctatgtacatgttacacttttttgaaaaaaaagtgtattccatattgatgttgtc

SEQ ID NO: 385080 - DNA, 7085 bp, Oryza sativa
  unsure (1)..(7085): unsure at all n locations
ggaggaggaaacgggaagagacccgcgagagaggcggcgccccgtttcgtccccaaaaccgatccattcattcgccaaccacgccgtccgccgcgtcgccggtagagaaggccgccgtgcgtgcgggagagaagggggaagcacaaaccgcgctcggggacgagagccgcgaggcgaaggtgtggggaggatcgggacgcggcgtcggcgtcggtctcacctccgggctacaagagcgagaggtagcagagggagagtcgtgaggtgcagccatgtcggcggcgcaagggatggcctacaagctccgcaccgacgcggcgcccacgggcgctggccgcagggctcggcgcagccactcctccgtggcggcgccttaccgcgcggctaggctggtacagggcggcgtgtccatcgagggcggtttggtcggcggatgccagctcaccgaggagcgcgtcgccgcacggccgccccgcgccgccgcgcgcgacgccgagccggtcaggccactttcgacgctccccgagagcagcattgggctgtacgacccctcgcgcgagcgcgactcgtgcggcgttggtttcgtcgccgagctgtcgggcgattacaagcgcgcgacggtcaatgacgccctcgagatgcttgagagaatggcgcaccgtggtgcctgcggctgtgagaagaacactggcgatggtgccggcatccttgtggctctaccgcataactttttcagagaggtgacaaaggatgctgggtttgagctaccgcagccaggcgagtatgctgtcggtatggtcttcctgccaatcgatgagaagcgccgtgagcggagcaaagctgagtttcagaaggtagcggaatcgctgggacatgtaatacttgggtggcgccgggttcccactgacaactcagacttaggtgaatctgcgctccagactgagccagttattgagcaggttttcctcaccaaaagttcaagttcggaggctgattttgagcagcagttgtatatcctgaggaggctctcgattctatctatccgtgcagctctgaatctccgtcgtggaggaaagagggacttctacatgtgttctctctcctcaaggactattgtctacaagggccagcttaagccatgccaacttaaggggtactactatgcagatctaggtcatgaaaacttcacaagttatatggctctggttcactcaaggttctccacgaacaccttccccagctgggaccgtgcacagccgatgcgtgtattaggtcataatggagagatcaataccctcaaagggaacaagaattggatgaaagcacgagaaggtctcttagagtgtgagaagcttggcctaacaaaggatcagttttcaaaaattctaccaattgtggatgctacctcgtctgattcaggtgctttcgatggtgttcttgaacttcttatccgtggtggaagaagcctgccagaagctgtgatgatgatgatacctgaggcatggcagaacgatgtgaacatggaacctgagaagaaagctctctatgagttcttgtctgcccttatggagccttgggatggacctgctctaatatcttttactgatggccgttaccttggagccaccctggatcgcaatgggttgaggcctggtcgattttatgtgacacacagtggacgtgtagtcatgggaagtgaagttggtgttgttgatgttccttccaaagatgtattgagaaagggtagactaaaccctggaatgatgctgttggttgattttgagaaccatactgtagtggatgatgaagcattgaaggcacagtactcgaaagctcacccatatggggagtggctcaagagacaaaaaatatacctcaaagacattgtagaatctgtgccagaaactgagagagttgctcctggaatttctggttcactcacacaaaagaatgagaaaaaggaacatgcaggcgtcaatgggattgtgactccactaaaagcctttggatacacagttgaagcccttgaaatgctgcttctcccgatggctaaagatggagttgaagctcttggatccatgggaaatgacacacccttggcagtcatgtcaaacagagagaagttgacttttgagtacttcaaacagatgtttgcacaagttacaaacccgccaatcgacccaattagggagaaaattgttacatctatggagtgtatgattgggccagaaggtgacttgttggaaacaactgaaaagcaatgcaaccgccttgcacttgagggtcctttggtgtcgattgatgaaatggaggctattaagaagatgaactaccgtggttggcgaagcaaggtgctcgacataacttatccaaagaagtctggaaggaagggcttggaagaaactttggacagaatttgcacagaagctcggggagctataaagaagggctacactgttttagttctctcagatagaggattttcctcagaccgtgttgctgtcagttcgctcttagcagttggcgcggtacatcagcatcttgtggccaatcttgagaggacgcgcgtaggtttggtggagtctgctgaacctcgtgaagtgcaccacttctgcacccttgttgggtttggtgctgatgctgtatgcccttatttggctatcgaagcaatttggtgcttgcagaatgatgggaagattcctcctaatggtgatgggaaaccctactcaaaggaagaacttgtcaagaaatatttctatgcttctaactatggaatgatgaaagttcttgcaaagatgggaatttccacccttgcatcttacaaaggtgcacagatttttgaagctcttggcctttcctctgaagtcatccgtaagtgttttgatggtacacctagccgaattgaaggcgccacttttgaaatgcttgcacgagatgctctacgtcttcatgagttggcatttccatcaagagcacctccaccaggaagtgcagatgcaaaggcccttcccaatccaggggactaccactggaggaaaaatggtgaagtccacctcaatgatccccttgcaatggcaaaactacaagaagctgctagagtaaacagccgggcagcatacaaagaatattctaggcgtattcaggagctcaacaaaacctgcaacctgcgtggtatgcttaaatttaaagacactgctgacatgatttctgtggacgaggttgaacctgcaagtgagatcgttaaacgctttgttactggtgcaatgagttatggatccatttctttggaagcacatactgcccttgctatggccatgaacaaacttggagggaaatctaatacaggtgagggaggggaacagccttctcgtatggaaccacttgctaatggttcaatgaatccaaaaagaagtgcaatcaagcaagttgccagtggaagatttggagtttcaagctattatctgactaacgctgatgaactgcagataaaaatggctcagggtgctaagcctggtgaaggtggtgagcttccaggccacaaggttattggtgacattgcggttacaagacactctactgctggtgtaggactgattagcccacctcctcaccatgacatatattctattgaggatcttgcacaacttatccacgaccttaagaattcaaatcctagagctcgcataagcgtcaagctagtttctgaggctggtgtaggagttgttgctagtggtgttgtaaaaggacatgcagaccatgtccttatatctggccatgatggagggacgggagcttctaggtggacaggtattaaaaatgctggccttccatgggaacttggattggctgagacacatcaaactctagtggcaaatgggcttcgtggccgagctattctgcaaactgacgggcagttaaaaactggcaaagatgtagctgttgcttgcttacttggcgcagaagaatttggtttcagtactgctccgttgatcacacttggttgcatcatgatgcggaaatgtcataccaacacttgccctgttggtatagctactcaagatccagtgctacgagaaaagtttgctggagaaccagagcatgttatcaacttcttcttcatgcttgctgaggagctaagagaaatcatgtctcagcttggcttccgtaccattactgaaatggttgggcgctctgacatgcttgaggttgatccagaagtagtgaagagcaacgagaaacttgagaacattgatctctcattgattttgaaaccagctgcagagattcgccctggggctgctcagtactgtgttgaaaagcaagatcatggtcttgacatggcattagataacaaactcatagctttatcaaaagctgcacttgagaaggaagttcgtgttttcattgagactccaatccagaatactaaccgagcagtaggcactatgcttagtcatgaagtcacaaagcgttatcacatgaagggattacctgcaggtacgattcatgtgaagctcactggaagtgctggtcaaagtcttggcgcttttctctgtcctggaatcacccttgagcttgaaggagacagcaatgattatgttggcaaaggattgtctggcggaaaaattgttgtctacccaccaagagatagtacatttattccagaagacaatattgtaattggtaatgtggctctatatggtgctactataggagaggcatatttcaatggaatggctgcagaaaggttttgcgtgcgcaattcaggtgctcaagctgtggttgaaggaattggtgatcatgggtgtgagtacatgacagggggtactgtggttatccttggtaaaacaggaagaaactttgctgctgggatgagtggaggcattgcttatgtttatgatattgatgggaaattcagcgtccgctgtaaccatgagttagttgatctctatcatgtggaggaagaggaagacattaccacattgaaaatgatgatagaacaacatcgacttaacactgggagtgttgttgctagagatatactctctaattttgatactcttcttccaaaatttgtcaaggtattcccaagagattataagagggttttggacaatatgaaggctgaaaaggctgctgctaagcttgcaaaggaaccaaagatttcaaatggtgtttctgtaaccactaagaaagtgcaaccggagcaatcaacaaaccgaccaacacgtgtttccaatgccaaaaagtaccgaggtttcatttcatatgagcgagagagtatttcttaccgggatccaaatgagcgtgtaaaagattggaaggaagttgcaattgaatcagtgccagggccactactgaacacacagtctgctcgttgtatggattgtggaactcctttctgtcatcaggaaagctcaggtgctggctgtcctcttggaaataagattccagagttcaatgaactggttcaccagaacagatggcgtgaagcactagatcgtctgcttgagacgaacaacttccctgaatttactggaagagtatgccctgctccctgtgagggatcatgtgttcttggcattattgaaaatccagtatctatcaaaagcatagaatgtgcgatcatagacaaaggttttgaagagggatggatggtaccgcggcctccacttcaaagaacaggaaagaaggttgccatcattggaagtggtccggctggtttggctgctgcagatcaactaaacaaaatgggccattttgttactgtgtttgaacgtgctgatcgtattggtggtctgatgatgtatggagtgccaaacatgaagacagacaagattgaaattgtgcaacgccgtgtcaatttaatggcagaagagggcattacatttgtagtgaacgctaatgtaggcagtgatcctttgtattcaattgagcgcctccgttctgagaatgatgcagtcattttggcttgtggagctactaaaccaagggatctaggtattcctggacgcgagttatcaggagttcattttgccatggagttcctccatgcaaatacgaaaagtttacttgacagcaacttggaggatggtagatacatatctgccaaggggaaaaaggttgtggttattggtggtggtgacacaggcacagattgcattggtacatctattcggcatggttgcaccagcattgtaaaccttgaacttcttaccaaaccaccaagcaagagagcagctgataacccatggccacagtggcctagaatcttccgtgttgactatgggcaccaggaagcatctagtaagtttggaaatgacccaagaacttacgaagtcctgaccaagcgttttattggtgatgaaaatggaaacgtgaaggcccttgaggtggtccgggtcaagtgggagaaagtcgatgggagattccagttcaaagaaattgaaggctcaaacgagaccattgaggctgatcttgtcctcctagctatggggttcctaggccctgaagcgactattgctgagaaactaggtttggagaaagacaaccggtctaacttcaaagctcaatttggaaactttgcaaccagtgtggatggcatttttgctgccggggactgcagacgtggacaatcacttgttgtttgggccatcaccgaggggcggcaagctgctgcagctgtcgacaagtacttgtcaaggaatgaacaagatgccgcagaggacataaccccctcgggtgcaggttttgtgcagcctgttgcagcataaatgaaacaggcaaacttttcaagaccagtgcaatctaaattaggatcaacgtttttagtctttgatcacagcaagttgtctttgaaagataaggccgggctcaatagggaaaagagaagagccttcttatattttggtagataaacaattggaaattttggtgtgttctgcttgttacttttccagtaaaatgatttgcatggtgaaatgccgttttgtaatctgaataataatgtacagttgttttggtttaattaatagatgtaaatttgtctattnnnnnnnnnnnnnnnnnnnnnnnnnnnnnnnnnn

SEQ ID NO: 385081 - DNA, 1248 bp, Oryza sativa
ttacactctactcctctctctcacctccacgaactcgccgactcacacagtctccactcacacgcattgcagaggagaggcgacaatggaggggaaggaggaggacgtgcggctgggggcgaacaggtactcggagaggcagccgatagggacggcggcgcagggcgccggggacgacaaggactacaaggagccgccgccggcgccgctgttcgagccaggggagctcaagtcgtggtctttctaccgggccgggatcgccgagttcgtcgccaccttcctcttcctctacatcaccatcctcaccgtcatgggggtctccaagtcctcctccaagtgcgccaccgtcggcatccagggcatcgcctggtccttcggaggcatgatcttcgcgctcgtctactgcaccgccggcatctccggaggacacatcaacccagcagttacttttgggctgttcttggccaggaagctgtccctgacccgggccatcttctacatagtgatgcaatgcctaggggccatctgcggagctggagttgtgaagggcttccagcagggtctgtacatgggcaatggcggtggtgccaatgtagttgccagtggctacaccaagggtgacggtcttggtgctgagattgttggcaccttcatcctggtctacaccgtcttctcagccactgatgccaagaggaatgccagggactcacatgttcctatccttgccccactgccaattggttttgcggtgttcctggtccacctggccaccatccccatcaccggtactggcatcaacccagccaggagccttggcgctgccatcatctacaacaaggaccatgcctggaatgaccattggatcttctgggttggtcccttcgttggcgctgccctggctgccatctaccaccaggtgatcatcagggcgatcccattcaagagcaggtcttaagccccgcgccgccgctgcgcagccgacgacatgcaacgcaatcgtgatgtcctgtttcccgcgcgctactgctgcgcatctgtcgattccctctatctctagtccccaagatgtttttcctatctgaaccctgaacaactcaatcgtgtaatccagtactcagtcactgtatgtttttatgtgatggagatcttaattcttaagttatcatctctgttgctggaaaaaaaaattcctcttcgtgcatgaaccgcgcctttaatacacgtactagaataatcttggcaggcagc

SEQ ID NO: 385082 - DNA, 1252 bp, Oryza sativa
  unsure (1)..(1252): unsure at all n locations
ttcggcccgttggacgagccgtgccgaattcggcacgagagagagcgagcgaagccagcagcagaagcagtagagagaaagtagagagatggaggggaaggaggaggatgtccggctgggagccaacaagttctcggagaggcagccgatcggcacggcggcgcagggctccgacgacaaggactacaaggagccgccgccggcgccgctgttcgagccaggggagctcaagtcgtggtccttctaccgcgcagggatcgccgagttcatggccaccttcctcttcctttacatcaccgtcctcaccgtcatgggggtcaacaactccacctccaagtgcgccaccgtcggcatccagggcatcgcctggtccttcggcggcatgatcttcgccctcgtctactgcaccgccggcatctccggcggccacatcaacccggccgtcaccttcggcctcttcctcgccaggaagctgtccctcaccagggccctcttctacatggtgatgcagtgcctcggcgccatctgtggcgccggcgtcgtcaagggcttccagaagggcctgtacgagaccaccggcggcggcgccaacgtcgtcgcgcccggctacaccaagggcgacgggctcggcgccgagatcgtcggcaccttcatcctcgtctacaccgtcttctccgccaccgacgccaagaagaacgccagggattcccacgttccgatccttgccccactgccaatcgggtttgcggtgttcttggttcacctggccaccatccccatcaccggcaccggaatcaacccacgaagaacttggggctgccatcatctacaacaagggcatgcctggggccatgccggggaagaccattggattttttgggtcggccccttaatggggggggcccttgttgccatttaccaccagggggttatcagggcaattccattcaagagcaggtggtaacctgcatcagctattatcactgtcaagaagccaatccagagcaagctgtttttgatggggggggctgtttcccgcggccggctttgttagtaattatgggggagtggaagttctttttcaagttggttgaaaaactgtttttatttgaatacagaatggtaatttcagaactcagtggggtatccctattttacaaggggcaaattaagctatcgtcctcctatgggagttgggttccnnnnnnnnnnnnnnnnnnnnnnnnnnnnnnnnnnnnnnnnnnnnnnnnnn

SEQ ID NO: 385083 - DNA, 854 bp, Oryza sativa
cccacgcgtccgcccacgcgtccgcccacgcgtccgcccacgcgtccggcaccgccggcatctccggcggccacatccgcccggccgtcaccttcggcctcttcctcgccaggaagctgtccctcaccagggccctcttctacatggtgatgcagtgcctcggcgccatctgtggcgccggcgtcgtcaagggcttccagaagggcctgtacgagaccaccggcggcggcgccaacgtcgtcgcgcccggctacaccaagggcgacggcctcggcgccgagatcgtcggcaccttcatcctcgtctacaccgtcttctccgccaccgacgccaagaggaacgccagggactcccacgttccgatccttgccccactgccaatcgggtttgcggtgttcttggttcacctggccaccatccccatcaccggcaccggcatcaacccagcgaggagccttggcgctgccatcatctacaacaggggccatgcctgggatgaccattggatcttctgggttggccccttcattggcgctgcccttgctgccatctaccaccaggtggtcatcagggcaattccattcaagagcaggtcgtaacctgcatcagctattatcactgtcaagatgccaatccagagcaagctgtttctgatgggcgcggctgtttcccgctgcctgctttgttagtaattattgtggagtcgacgttcctcttcaagtttgttgtactactgtttttatctgaacacagacttgtaatttcagtactcagttgtgtatccctcttttactatgtgcaaattaagctatcctcctcctattggagttcggttcaaaaaaaaaaaaaaaaaa

SEQ ID NO: 385084 - DNA, 1567 bp, Oryza sativa
  unsure (1)..(1567): unsure at all n locations
gccgcgccggaaccggccgggaccgaccccccgtatcatcttgctccccaaaccaagccaaccccctcgacggccggaacacatcggggggacgcagccatggtgctcgaggcgacgatgatctgcatagacaactcggagtggatgcggaacggcgactactcgccgtcgcgattccaggctcaggccgacgccgtcaacctcatctgtggcgccaagacccagtccaacccggagaacacggtgggcgtcatgacgatggccggaaagggcgtgcgcgtgctcgtcactcccaccagcgacctcggcaagatcctcgcttgtatgcacggacttgaagttggtgctgaagcaaatttggctgcagcaattcaggttgctcagctggctctgaagcatcgccagaataagaggcagcaacagcggattatagcttttattggaagccctgtgaaatacgacaagaaagttttggaaacaatcgggaaaaagctgaagaagaataatgtggctcttgacatcgttgactttggtgaaaccgatgatgataagcctgagaaactggaagcgctaatctctgctgtgaacagtagtgatagcagccacatcgttcatgtccctcccggtgaaaatgccctttccgatgtgcttataagtactcctatcttcactggtgaagaaggtggaagcggttttgctgcttctgcagcagcagcagcagctactggtgcagctggatttgaatttgatgtggacccaaatgtagatccagaattggcactcgccctgcggttgtccatggaagaagagcgagcaaggcaagaggctattgcgaagaaggccgcagaagaatcttctggtgctgaaaataaggaccatgcctcaagctcaaacgctgattctgttatggcagaagcggaacctgcctcaaatgctgctgatgataaaaaagatcagccgaaggaagatgatgatgctcagctactacaacaggctcttgcaatgtcaatggaggagggttcttcaggggctgcagcggctgatgctgctatggcagaggctgctgtagatgaccaggacttggcactagctcttcaaatgtctgtccaggacgcaggcgggtctagtcagtctgatatgagcaaggtgtttgaagacagatcatttgttacatccatccttaactctctccctggtgttgaccccaatgacccctctgtgaaagatttgctggcatcattgcatgggcagggcgagcaagagaagaaggaagacaaatcagacaagccagaagatgagaagaaataaatcaactcctttgtgtcttccttgcaaccacctcttgatcaatctcgcaggcgcccgaagcattggagatatctggtctcgctttatttggtcatggattctacttatcctcgtgtaactgtacttcaattaaaaaacttaaagggataatggtttatcacttcttctgtcgtcattttacgatttgcaattgtttactgtcgtggaatttacttattcgcttctatataaannnnnnnnnnnnnnnnnnnnnnnnnnn

SEQ ID NO: 385085 - DNA, 1460 bp, Oryza sativa
cggacgcgtgggcacacactcaagccagctccagccacacgagcctagttcaggtagatacaatggcgtccaccgcctctttcatgctcgccgtcttgctggcggtggccgtcgcggcggcgccggcgagggcggtgcgatgcccgccgagcgacaagcaggcgctgatgagagtgaagcagtcgctgggaaacccggcgacgctgtcgacgtggtccctggcgtcggcggactgctgcgagtgggaccacgtccggtgcgacgaggccgggcgcgtgaacaacgtcttcatcgacggcgccaacgacgtccgcggccagatcccgtccgccgtggcggggctgacggcgctcatgtcgctgtcgctgttccgcctcccgggcctctccggccccatcccggcgtgcctcaccgcgctctccaacctccagttcctcaccatctcccacaccaacgtctccggcgtcatcccggactcgctcgcgcggatccgcagcctcgactccgtcgacctctcccacaacagcctgaccggccccatcccgaactccttctccgacctcccgaacctccggtcgcttgacctccgcagcaacaagctgacgggttgcatcccggcggggctcgtgcaggggcagttcaggtcgctgatcctctcctacaaccagctcaccggcccgatcccgcgcgacgacgcgcaggacgagatcaacaccgtcgacctctcgcacaaccgcctcaccggcgacgcctccttcctcttcgccgccggccggcccatcggcaaggtggacctctcgtggaacgacctcgacttcgacctcagcaagctcgtcttcccgccggagctcacctacctggacctcagccacaaccgcatcaggggcaccgtgccacgctccctcgccgcgctctccacgctgcagacgctggacctcagctacaaccgcctctgcggcccgctcccgaggctgcacggcgtcatccgccacggctgcaagccgtacgagcacaaccagtgcgccggcggcgccccgctcggcgggtgccaccaatcgtgagcatccatccatccatcaccgccggcgagctgatgctgccacgtaaggtggagcccggggtgcgtaacggtatacgtgtttggtgttttttcgcgtacggggacgtggccgtgtagtacacggtacgacgggtgcagccgtgcagggtactgggcgggtttacgttagtacaaattgtaaccaaggtagagtgcctgcacgcgtgcgtggtcgactctccttcagattgtacgaaacgagggagccgtgtgtacgtgtgcgtacgtgtaccgtgtatggagtacgatgatgatgatgatgcaagtgtgtgtattgtgaatgtacgttatggatcgccctaatgtatcatcgaaatgataagtgtttgatataatttgcctttcaaaaaaaaaaaaaaaa

SEQ ID NO: 385086 - DNA, 632 bp, Oryza sativa
  unsure (1)..(632): unsure at all n locations
angcanggtgcttagagaacagattggcatagttttcaatttntntccagaagcaggggttttagtcattttgaatgagcaaggtgttgaagacagatcatttgttacatccatccttaactctctccctggtgttgaccccaatgacccctctgtgaaagatttgctggcatcattgcatgggcagggcgagcaagagaagaaggaagacaaatcagacaagccagaagatgagaagaaataaatcaactcctttgtgtcttccttgtaagatttcagtatgctgtcttacctccatatccgatatgcatgttttgcatatagtctattcagcccttgatgactatcgttctggttgtacgatatcttctactataaactagaagctggcgagttggctgcataaatttgaattttggagcagcaagttatgtcctcaagatacttgcatgtaaaactggtctatgtgtgcagaggttctgtcgctctgctctttttaggactgtcgtttcattgttcacaattatgattagcatattactgtttctatgcaaaaaaaaaaaaaaaaaactcgagggggggcccggtacccaattcgccctatagtgagtcgtattacaatcggtantntn

SEQ ID NO: 385087 - DNA, 1044 bp, Oryza sativa
  unsure (1)..(1044): unsure at all n locations
gaagctcaaacactgtgtactacgcaacacacacataggcacagttagtgcacgtacatcttgctgaatttgcttgagctcgtacgtgcgtagtgtggtagccatggccaaggcagtgatgatgctccccgtcctcctctccttcctcctgctgccattctcgtccatggcgctgacgcaggatttctgcgtcgccgacctgacctgcagcgacacgccggcggggtacccgtgcaaggccagcgtcggcgccggcgacttcgcctaccacggcctcgcggcggcgggcaacaccagcaacctcatcaaggccgccgtgacgccggccttcgtcggccagttccccggcgtgaacgggctcggtatctccgcggcgaggctggacatcgccgtcggcggcgtcgtgccgctccacacccacccggccgcctccgagctcctgttcgtcacccagggcaccgtcgccgccgggttcatcacctcctcctccaacaccgtctacaccaggacgctgtacgccggcgacatcatggtgttcccccagggcctcctgcactaccagtacaacgccggccagtcggcggcggtggcgctcgtcgccttcagcggccccaaccccggcctccagatcaccgactacgccctcttcgccaacaacctgccgtccgccatcgtcgagaaggtcaccttcttggacgacgcgcaggtgaagaagctcaagtccgtcctcggcggtagcggttaagttcgtcgtacgtctctctccggtcgagttggtcgccgccgccgccgtcgtcgtcgtcgtggtggtcactccgtgtgattgattaatttgcatgcatgcacttctgtcatgggaatgtgtctgatttcttttttcatgttatgcttaatttgttcatgtcaatttctttcagattaattaagtggtggttcaaataatctctaggtgtgtcactgtaatttgttggaacgaaagactaaactgtgcatcgatccaattggtcattttttttttgaaagttcaacannnnnnnnnnnnnn

SEQ ID NO: 385088 - DNA, 706 bp, Oryza sativa
gcgtccgcgcacgcgtgcgcccacgcgtccgcgcgcctcctttccagaagcttccaaaccctaggcgagcgagagaggcgagacgccatggacgcggacgggtggcgaaggcgttcgtggagcactactaccggacgttcgacacgaaccggccggcgctggtgtcgctgtaccaggacgggtccatgctcaccttcgagggccagcagtttctcggcgccgccgccatcgccggcaagctcggctccctccccttcgcgcagtgccaccacgacatcaacaccgtcgactgccagccgtcggggccgcagggcggcatgctcgtcttcgtctccggatccctccgcaccggccccgacgagcaccccctcaagttctcccagatgttccagctgcttcccgctggaggcaacttctatgtgcagaacgacatgttccgtctgaactatggttaaggaaagctggatagtcatccatcaacgtactgggccagtgttttatgttgaaactatgagatgctgttgctcttttgattgtttatcgactggtgcaaattattgcaagaaatggtgttaaaagactatgcaccttctggatttgttcttctatgtttctcccatgaactgtggtatggaggcaccatttatgtggaatgtgaatgaagacagcctaaaagattttatcaaaaaaaaaaaaaaaaaaaaaa

SEQ ID NO: 385089 - DNA, 3137 bp, Oryza sativa
  unsure (1)..(3137): unsure at all n locations
cacctcctcgcttccccccttcctccgcccgccggagcagagttccttctccttccatccattccgttcgggaatcaggcgagcgcgtcagcatccccctcctcctcctctcgcggccgccttcgtcgcaggcatcgccgtgctctgaccggagggcacttgttctttccttcgtcagagcggaggggagcggaggagcggagccggagatccagatctgcacgggaaggtatctcccgctgttggtacagccatgaatatcactcaaatcctgctatcagctcaatctgcagatggtaaccttcgggtagtagcagaagggaacctcaagcagttccaggagcagaatcttcccaacttccttctctccttgtcagtggaactttcggataatgaaaaaccaccagagtctagacgacttgctggtattatccttaagaactccttggatgcaaaggattctgcaaaaaaggaactactgattcagcaatgggtcagcctggatccatcaatcaaacagaagataaaggagtccttgctgataacgctaggatcttcggtgcatgatgctaggcatacctcatcacaagtcattgccaaggttgcatccattgagatcccccggcgtgaatggcaagaactcattgccaaattattgggcaacatgacacaacagggtgcacctgctccactaaagcaagcaactctagaggccttagggtatgtctgtgaggagatttctcctgaacacttggagcaggatcaggtgaatgctgttctaactgctgttgtccagggaatgaaccagacagagctaagccctgaagtccgtcttgcagcagttaaagccctatataatgctcttgattttgctgagagcaactttgcaaatgaaatggaaaggaattatatcatgaaggtaatttgtgatactgctgtatcgaaggaagtggagatcaggcaggcagcctttgaatgccttgttgcaattgcttccacatattatgtacacttggatccttatatgcaaaccattttcaacctgacagctaatgctgtcaaaggagatgaggaagcagttgcacttcaagctattgagttctggagcactatttgtgatgaagagattgagctccaagaagaatatgagggatctgatgatgctaattctactgtaaattatcgcttcattgagaaggccctcccttcacttgttccgatgctgctagaaactctgttaaagcaagaggaagatcaagatcaggatgataatgtatggaacatttccatgagtggtgggacatgccttgggctcattgctagaactgttggtgatgcgattgtgcctcttgtgatgccttttgttgagggtaacatcacaaaaccagattggcattgtcgtgaggcagctacttttgcatttggttctatccttgaaggtccatctgtggagaaacttgctcccctggtacaggctgggtttgacttcctgctgaacacaacaaaagacccgaatagtcaggtaagggacaccactgcatggactcttgggagggtatttgagctcctgcattctccagccagtgcaaatccaattataacaagcgcaaaccttactcgtatcatgactgtcttgctggaaagtagtaaggatgttccaaatgtggctgagaaagtctgtggagccatatattttcttgcccaaggttatgaagacgcagagtcgatttcatctgtgcttacaccttttcttcctaatctcattgctgctctcctttctgcggcggatcgtgctgataccacccacttcaggcttcgtgcatcagcttatgaagcattgaatgagattgtgagagtcagcaacatatctgaaacgtcaggcattataggtcagttactgcaggagatcatgaggagattgaatctgacgtttgatctccatatactttcatctggtgacaaggaaaagcaaagtgatcttcaggcattactgtgtggtgtactgcaggtcatcattcagaaattgagcagctcggatgctaagtcaataattgcccagactgctgatcagttgatgtttctgtttctgcatgtttttgcttgccacagctctactgtacacgaagaagcgatgcttgccatcggtgctcttgcttatgccactggtacagattttgtgaaatacatgcctgagtttttcaagtatctggaagctggcttgcagaattatgaagagtaccaagtctgttccatctctgttggagtggtgggtgatatttgccgtgccttggaagataaaattttgcccttctgtgatgggattatgactgttcttctcaaggacctgtcaaactcgatgcttaatcgttctgtgaagcctccgattttctcatgctttggagacattgctcttgctattggtgataattttgagaaataccttccttatgctatgccaatgcttcaaggagctgccgaacttcttgctgttttggaccatacagatgaggatatggttgattatggtaaccagctcagacggggaatctttgaagcttactctggcatactccagggtataaagggtgcaaaagctcagttgatgataccctatgcaagccatctattgcagttcactgaagctgtctacaaggaccgcagcagggatgagagcgtgacaaaggctgcagttgctgtcctgggggatcttgcggacacactcggctcaagctcaaaggatctgttcaaaagcaacctcttccatgttgagttcctgagggagtgccacgatttggatgatgaagttagggacaccgcgtcatgggcccagggaatgataaaccaagcactggtttcttaagaggggattattttgttttgtcagttattggggaggtttcttttgtggctgtgccaagaccatttgccacagattgaacgaaaggataccaacatatatgtagcgtcagtcgtaggctgcttctgtgcttttgtcgtcagtctgtcaagtcagtttatgcgtcgcatttggcgtgggtggattctggcattgaatgtcttgaacagctaaacctgttaatgttaatgtattctacctgtggtgtttatccattcgnnnnnnnnnnnnnnnnnnnnnn

SEQ ID NO: 385090 - DNA, 3704 bp, Oryza sativa
ggaggctctggctagtcgacgtctgctgcggcgggcgcgcggcttcaccgctgcggtttctctctccccccgcacacccccccgcgacagtcaatatgtcactggatattactcaagttctcttgagtgcacaatctcctgatggcgcgactaggaagcttgctgaagaaagccttaagcagttccaggagcaaaacctcccaggtttcttgttctccctctcaaatgagttggccaatgaggagaaacctgaggaaagccggaggttggctggcttgattctcaagaatgcactggatgccaaggagcagcacaggaagaatgagcttttccagagatggctggcactagatgttggcgttaaggcacagattaaaggatttcttttgcaaactctctcatctcctgttgcaagtgccagatctacctcttctcaagttatcgcaaaggttgctggaattgagattccacagaagcaatggcctgaacttattgcgtcgttgctctcaaacatacatcaggtccagccaaatgtcaagcaagcgacgcttgagacacttggctacttatgtgaagaagtttctccagaagctgttgaccaagaccaagtcaataaaattcttactgctgttgttcagggtatgaatgcttctgaagggaattctgatgtgaggcttgcagcaacacgggcattgtataatgcattgggctttgctcaggttaacttctccaacgacatggaacgtgattatatcatgagagttgtttgtgaagcaactcagtccactgatgtgaagataaggcaggctgccttcgagtgcttggtggctatctcatccacttattatgacaagctggctacgtacatgcaggacatatttaatattactgctaaggctgttaggggagatgaggagtcagttgcactccaggccattgaattttggagctccatatgtgatgaggaaattgacattttggatgagtacagtagtgagtttacagctgactctgatgttccttgctactattttatcaagcaagcacttcctgccttagtgccaatgctgctagagaccctcctcaagcaggaggaagaccaagacttggatgaaggtgcttggaatcttgcaatggctgggggtacttgtttgggccttgtggcgagaactgttggggatgatattgtacctcttgtgatgccttttgttgaggagaacataacaaagcctgattggaggcacagggaggctgcaacatatgctttcggttccattttggagggcccatcagctgataaacttgctcctcttgttaatgtcgcattgaattttatgttgtctgcactggtgaatgacccaagtaaccatgtgaaggacacaactgcttggacccttggaagaatatttgagtttcttcatggttctgcacttgaaactgctcctattatcacatctgagaactgtcagcaaatacttaccgtgcttcttcaaagcatgaaggatgtcccaaatgtggcagagaaggcatgcggagcactctatttccttgctcaaggctatgtggatgcaggatccgcttcgccgctaactcccttcttccaagatattattcagagccttctctttgttactcatagggaagatgctggagaatccagattgcgtactgcagcttatgaaactctaaatgaagttgtcagatgctccattgaagaaacaggccctattgttatgcagttggtacctgtgatcatgatggagctccatcagacacttgaggcaggaaagttatcaactgatgagagggagaagcggagcgaactgcagggccttctctgtggttgtttgcaggtcataatccagaagttgggagcgatggagtcaacaaaatattccttcttgcaatatgccgatcaaatgatggaactgtttttgagagtttttgcctgtcgaaacgccactgtgcatgaggaggctatgcttgctattggtgcattggcatatgcggcaggtccaaacttttcgaagtacatgcctcagttttatcagtatttggagatgggactacagaactttgaggagtatcaggtctgtgccattaccgtgggtgttgtgggtgatttgtgcagggcactggaggacaaaattctgccttactgtgatggaatcatgacccaactcctgaaggacttgtcgagcaatcagttgcatagatctgtaaagccacctatattctcatgctttggcgatattgcactggcaattggggagaactttgagaagtatttgatatatgccatgcccatgctacaaagtgcagcagatttgtcggcgcatgctgctgcagctgatgatgaaatgctcgattacaccaaccaattaaggaatggaatactggaagcatactctggtattcttcaaggatttaagagctcccctaagacacaattactgatgcagtatgctcccaatattcttaatttccttgatgctctttacaatgggaaggatatggatgatactgtgatgaagactgcgataggtgtactgggagatctcgcggacacgttgggtgtccatgctggccctttgatcaatcaatctatctcaagcaagaaatttttggaggagtgcttagcatctgatgatccactggtcaaagagtcagctgattgggcaagggttgcaatcagccgtgcggtttcaggttgaggtcacattggtctcgagtctgcacatgcatcattccacttgtcatgtccgggtcttggttgcatcatgtctagacctgctctttggagaagtcaacccatccttacagcagagtcggaggtcctcactaactcatgcatcaatacatgtgtcagcctgtccttatcacttctgcagaagagagggttaagttggctgcctgctaactttgcttaaggcatctagaaccttcatttcttactggaggtgagatgagcttctacagttgcctggcatcccgattgttcatcggcatggcttggcatgcgtagggtctgggtgctatcgttttccattgcattcattgcatgcatcgaactttggtcggatggtcactcgatacatggtccagttgcttatgtttcaattaagcaaaaagagggctcgaatgcattgtcacaggattattttgtattagctcagggcgacaaagttcattatgtcggacctgagcgttctgtccctcccttagctggtagcttttctttaatttcctagcattttcttcacttgcattgtcttgcattcattcttggtctgttttgtaagagttcaccttttatcaaaacttcggtccagtccggtccggtacagcacgccgttgtacaagtcctcgcgtgcatcggttttatttcctggtgtatcggagcagcaggcatttgtactttctttctttttttttgggttactatcctctgctccatttcagtttccttgaagaagctgggctgctgaaaaacaaaaacaattataggtcttggagtggtttttttgggaggcggttggccgagttgaatttgtttacaaaaattgtattattctatggagctctgcctcctctctccccccatgtgtcatataatttgctggcatattatgagaatatggtgaaatgcgttgaaatgatatggtgttttgcttgcatggtatgctcgtatggtttgattcggt

SEQ ID NO: 385091 - DNA, 901 bp, Oryza sativa
  unsure (1)..(901): unsure at all n locations
agcgactcgtcacagctcaaacaagtcaagagcgaatagttcttgctgatctgttgtttgattactttagttctcgagaggctttagctgaatccatcgatcgatcatggaggatgagaggaacacggagagccaccagggtggcgaggctgcatccgtggtgacggccgcgcccacgccagctcctgctcccgtggtgactcacggcgatcaccaccacgacaccgccgtccccgtggagaagatcgagggtgatcacgccaagacggaggcgaccctgccacgtgcacccgaggaggagaagaagggcttcctcgacaagatcaaggagaagctgcccggcggccacaagaagccggaagacgcaactgctgtgccgccgccggccgcctcaccggctgctcctgccactactccggcgccagcacacccaccgccggctacagaggaagtgagcagcccggatgggaaggagaagaagggtatactgggcaagatcatggagaaactgcccggttaccacaagggctccggcgaggaagacaagaccgccgccgccgccaccggcgagcacaagagcagcgcttaattggggcgtgtgtgagaccaggccatggttggaatttggaagtgtttggcgtgtgttagtttggtgctttttctgcactgcagctttgttaagttcgtgtcaagattggtcaaggcctggtcagcgaagcccgatcagtgatcgaagtttgtgtttcgtgtggggtacgggcttcagtttgctatagtcaagtactagatgttgagtttgtttaattattattggcactcttgtattggttttgggctgggcattctgccttggtattaatgatttctgcccagcataaataattaaaaaaacaaaatgtnn

SEQ ID NO: 385092 - DNA, 516 bp, Oryza sativa
  unsure (1)..(516): unsure at all n locations
cgacggacngtgnacgcgtggtgcgactcgtcacagctcaaacaagtcaagagcgaatagttcttgctgatctgttgtttgattactttagttctcgagaggctttagctgaatccatcgatcgatcatggaggatgagaggaacacggagagccaccagggtggcgaggctgcagagcaggtggaggtgaaggacaggggcctcttcgacaacctccttggcaggaagaaggacgatcagccggaggagaagaagcatgaggaggagcttgtcaccggcatggagaaggtctccgtggaagagccaaagaaggaggagcaccacgccgagggcgagaagaaggagagcctcctctccaagctgcaccgatccagctccagctccagctcgtcgagtgatgaggaagaggaggtgatcgatgacaacggcgaggtggtcaagaggaagaagaagaaggggctcaaggagaagatcaaggagaagctgcccggccacaaggaccatgcccgtgagca

SEQ ID NO: 385093 - DNA, 698 bp, Oryza sativa
taatacgattcactattaggccgaattggttaccggcccccccttcgagttcgacccacgcttctccgtagcaatccattccgatccatcaaatttctcttgagaccgtagagagagagagaggcgccaaccatggccggcatcatccacaagatcgaggagaagctccacatgggcggaggcgagcacaagaaggaagacgagcacaagaaggagggggagcaccacaagaaggacggggagcacaaggaaggcgtggtggagaagatcaaggacaagatcaccggcgaccacggcgacggcggcgagcacaaggagaagaaggacaagaagaagaagaaggagaagaagcacggcgaggagggccaccaccacgacggccacagcagcagcagcagcgacagcgactgagccgccgcgcccccacaccggcgccgtgcgtgcgtgcatgcaggtgatgctgcagatgattggaggagttcgtagcaggattaattagtatctgtgcaatacgtgatgcagtgatctgtctcatgcatgtatctgtgcttgattgcaagaaaaaaaaaaggcatggtttgcctttgtgatgtactgataataatggctgcacggtgccttgtaataagaacgctaattatgatgaaattgatgtgtattatcctggcgtcaccacggtgcttcagattaaaaacaaa

SEQ ID NO: 385094 - DNA, 2170 bp, Oryza sativa
ccaatccccgtatcactatatccacacaagcttcgcagctcgcgcgccgcgggaggggagggagaaaagctcgcccccgagatttttctcctctcctctctgctcgtgtttcttggattggtccatatatccacggttcttgggggcgcggcgcgccgccattgatctggttttggttttgtgaggaggagaagttgcggtggtgctggtgctggtgctttcttgatctgatgatggcgagcacgacgtcagcgacggccgccgggggcgcgttcgccgccgcgaagacgcggcgggtcgtcggcggcgggcggcggccgtgcgcgagggtcgccgccggcgggcggaggcggtccggcgtggtggtgcggtgcgacgccggcgtggaggcgcaggcccaggcgcaggcggtggccaaggccgccagcgtcgccgcgctcgagcagttcaagatctccgccgaccggtacatgaaggaaagaagtagcatagcggtaataggcctcagtgtacacactgcaccagtggagatgcgtgagaaacttgctgttgcagaggaactatggccccgtgctatctcagaactcaccagtctgaatcatattgaagaggctgctgttcttagtacctgcaatagaatggaaatctatgtggtagctttatcgtggaaccgtggacttagagaagtggtagactggatgtcaaagaaaagtggaatccctgcttctgagctcagggagcatctattcatgttgcgtgacagtgatgccacacgccatctgtttgaggtatctgctgggcttgactctttggttcttggagaaggcgaaatccttgctcaagttaaacaagttgtcagaagtgggcaaaacagtggaggcttgggaaagaacatcgataggatgttcaaggatgcaatcactgctggaaagcgtgtccgctgcgagactaacatatcatcaggtgctgtctctgtcagttcagctgcagttgaattggccttgatgaagcttccaaagtcggaatgcctatctgctaggatgctgttgattggtgctggcaagatgggaaagttggtggttaaacatttgattgccaagggatgcaagaaagttgttgtggtgaaccgttcagtggaaagggtggatgccatccgcgaagagatgaaagacattgagattgtgtacaggcctcttacagagatgtatgaagccgctgccgaagctgatgtcgtgttcacaagcacggcatccgaaaccccattgttcacaaaggagcacgcagaggcgcttcccgctatttctgatgctatgggtggtgttcgactctttgtcgacatatccgtccccagaaatgtcagcgcctgtgtgtctgaagttggccatgcgcgagtatacaacgtcgatgacttgaaagaggttgtggaagccaacaaggaggaccggcttaggaaagcaatggaggcccaaacaatcatcacccaagaattgaaacggttcgaggcatggagggactcgctggagactgttccgactatcaagaagctgaggtcctacgccgacaggatcagggcttcggagcttgagaagtgcctccagaagatcggcgaagacgccctcaccaagaagatgagaagatccatcgaggagctcagcaccggcatcgtgaacaagcttctccacggcccattgcagcacctgagatgtgacggcagcgacagccgcaccctcgatgagacgctggagaacatgcacgccctcaacaggatgttcagcctcgacaccgagaaggcgatcattgagcagaagatcaaggcgaaggtggagaagtcccagaactgagattgaagaagagatttttttttttcagcccgtgtatctactatgtatactactaccatatctgtccagacattctaattccaattttttttctctctctcttgagcctttgcttactgagccctcgctgagttggtcaaattgtctcgtgaattagcgccatggctgctgctagagataactaggaaaatgccttgtttgtaaattactgcatctgctgtggcaagagctccattttgaagatattatatacacgctgttggtgcattgaagacacaaataataaaagaattagacgggtctccggtgtgagatatacatacataaat

SEQ ID NO: 385095 - DNA, 1944 bp, Oryza sativa
  unsure (1)..(1944): unsure at all n locations
ttgacagcctacctagcttctccttctcgctcgcttcgcccgcataagtctagccacaaacccgccgccgccgccgccgccgccgccgctagcttccgcggagggcgagatgttcatcgagagcttccgcgtggagagcccgcacgtgcggtacggcgcggcggagatcgagtcggactaccagtacgacacgacggagctggtgcacgagagccacgacggcgcctcccgctggatcgtccgccccaagtccgtccgctacaacttccggaccaccaccaccgtccccaagctcggggtgatgctcgtggggtggggcggcaacaacggctcaacgctgacggctggggtcatcgccaacagggagggaatctcatgggcgaccaaggacaaggtgcagcaagccaactactatggctcactcacccaggcgtccaccatcagggtcgggagctacaacggggaggagatctacgcgcccttcaagagcctcctgcccatggtgaaccctgatgaccttgtgttcgggggctgggacattagcaacatgaacctggctgatgctatgaccagggcaaaggtacttgacattgatctgcagaagcagctcagaccttacatggagtccatggtgcctctccccggcatctatgaccccgacgtcatcgccgccaaccagggatcccgcgcgaacaatgtcatcaagggcaccaagaaggagcagatggagcagatcatcaaggacatcagggagttcaaggaaaagagcaaagtggacaaggtggtggtgttgtggactgcaaacactgaaaggtacagcaatgtctgtgttgggctcaatgacacaatggagaacctcctggcgtctgtggacaagaacgaggcggagatatcaccatcgacactgtatgccattgcctgcgtcatggagggtataccgttcattaacgggagtcctcagaacacctttgtgcctgggctgatcgatcttgctattaagaacaactgcctgattggtggtgatgatttcaagagtggacagacaaagatgaagtctgtcttggttgatttcctagttggtgctggaataaagcccacctcaattgtcagctacaaccacttggggaataatgatggcatgaacctttccgcacctcaaacattccgatccaaggagatctccaagagcaatgtggtcgatgacatggtctcaagcaatgccatcctctatgagcttggcgagcatcctgatcatgttgttgtgatcaagtatgtgccgtatgttggagacagcaagagggcaatggacgagtacacctcagagatcttcatggggggtaagagcaccatcgttctgcacaacacctgtgaggactcactccttgccgcgccgatcattcttgatctggtgctccttgccgagctcagcaccaggattcagctgaaagccgagggggaggagaagttccattccttccatccagtggctaccatcctgagctacctcaccaaggcaccccttgttcctcctggcacaccagtggtgaacgccctggcaaagcagagggcaatgcttgagaacatcatgagggcctgcgttgggctggcccccgagaacaacatgatcctggagtacaagtgagggaggctgccgaggccgagcagccgtggcatgtggcaaagaggcgaatgggatggagcaagaaagacgtgattagctagctctaagaattgttttagcttctcttgtgatttttcggtctttcccattcttaaccttctgtgctttgtgtgagactcttatcgggctatgcaactagcagcagccttactatggtactggatgatgttatggagaatgttagctagttcccctctatttataacttattagtatcggagatttcagttcaaaaaaaaaaaaaaaannnnnnnnnnnnnnnn

SEQ ID NO: 385096 - DNA, 1294 bp, Oryza sativa
ccacgcgtccgcatggataaggttttatcagctgatcctgatgttggtgattggttatacaaacatcataaaattctgtgggcaaggagcaagttctcaccagagatcaaatgtgacttcatcactaataatgtggctgagtcatggaatgcatggatcaaagaattcaaggaactgcaagttgatgccctagcagatgcaatcagagagaagacagcagccttgtgggctaagagaaggaagattggagaaaaactagaaggcagaaacattttacctgcaattgtcacacaactaaaggcagcgcttagaggtttagccaacatgagagtcatgaagggagcggatgatacagctgaagtgactgagctccataatagtgttgaagtctataggcatgttgtgtatcttgaccaacagaaatgcacatgtagggagtggcagttaacagggaagccattctctcatgctcttgcagctatctccaaacaaaggaatccaatcatggatgattttgttgatcccgttttctctgttagttgctttagggctgcatatgaaggtgtcatcccctgcataactgacaagtcccaatggccaacagcgaacaaagattttaagttgcagccaccagtgcccaagcctagaactgttcctaggcaaaggaaaaacatgattccttcttgtctggagaaggggaaaggaaagatcagaaggcaggtgaattgcccaagatgtggtgggctagggcatagacagagcaggcaaaagtgtcctcttaatgggaccaaaaagaggaagaggaaggcaaagaatattgctacaaaagctaggaaaaagaaaactgctaaggaaattgttgaaactccaacaagatcaaaggttgctagagttcaattagttgatagccctgctcgagtcactaggagtcaaacaaggacaactggaacaccaactattgctagagaaggatgctcacaagattcacctggaccagtgacaaggaggcgcttggctatgactgaagcaacaccatcacagccactaccaccaaccaagaagaaattgactccaaagaaaaaacagaactgatgttgcctttttgcttttgttacatgaaactggactcaagaaagatggggttatttatgtatttaatggcaccaaagaccaatgttaaggccaaccatgcttgctactagacgtgctatgtagaaatgcagaaaacaatatttgaagcctatactattttagttctaagaaatgttccgttgaattgcgttaaaaaaaaaaa

SEQ ID NO: 385097 - DNA, 1350 bp, Oryza sativa
  unsure (1)..(1350): unsure at all n locations
atcactcaccagctacgtacactcaaccaacacaccactgaaaagcaagattttgttgaagaaataagcatcttgccatgatcgcagcaagggctgcaaacctgcaggtggccatgaaggccctggcgctggccgtgctggccctcgcctacgccgcggcgacggcgcgcgccgagcagtgcggcaggcaggccggcggcgcccggtgccccaacaggctctgctgcagcaggtgggggtggtgcggcctcaccgacgactactgcaagggcggctgccagagccagtgccgcgtctcccgcgacggcggcgacgacgacgtcgccgcgggttgcttgctcacggcgccgggcggcggccgcgccggcgtggcgtccgtcgtgacgtcggaccagttcgagcgcatgctgccccaccgcgacgacgcggcgtgccccgcccgcgggttctacgcctaccgcgccttcgtcgccgcggccggcgcgttcccggccttcgccgccacgggcgacgccgacacccgcaagcgtgaggtcgccgcgttcctggcccagacttcccacgcgacctctggtgggccctactcgtggggctactgctacaaggaggtgaagggcgcgacgtcagacttctgcgtgccgaacgcgcgctggccgtgcgcgcccggcaaggcgtaccacgcccgcggacccatgcaaatcgcatacaactacaactatggggcggccggcgaggcgatcggcgcggacctgctgggcaacccggagctggtggcaacggacccgacggtggcgttcaagacggcgctgtggctgtggatgaccgcgcggtcgccgagccagccgtcgccgcacgccgtcgtcacggggcagtggactccgactcccgcggacagcgcggccggccgcgcgccaggctacgggctcaccacgaacatcctcaccggcgggctccagtgcgccggcggcaacggcggcgccgaccgggtcgcgttctacaagcgctactgcgacgtgctcggcgtcggctacgggcccaacctggactgcttcggccaggcgccgttcgacggcgacatcatgtcggcgtctgcggcgaagtagacgtgtgcgccgccgtgccggccccgatcgatcgaataaaattgcgtgtgagtacgcacttcgcacggtcgctctgcagccagagtgagtgagtttgctttatgtatttttcggtttcgggcgaggaattcttcatggatctgtgaaagcccatatgtatgcatggtcatggcatgaataaagtagtactgatcttctcgaaaaaaaaaaacaacggnccccgctctagatctagcggncacgtggg

SEQ ID NO: 385098 - DNA, 1386 bp, Oryza sativa
  unsure (1)..(1386): unsure at all n locations
gatagatagcgcggcagaggaaagaggagaagaaaagatggcggctttcgcctccgctctccgcgttctcccctcgccgccggctgcggtgcctcgtcggcttcgctcgagagaacaaaggcagggctgtagatctcgaaggtattcaaaagtcgtggcttactacgctctcactactccgccgtataaacttgatgccctggaaccttatattagcaagaggacagttgaacttcactggggtaagcatcagcaagactatgtggatagcttgaataagcagcttgctaccagcatgttctatgggtacactctggaggaactaataaaagaagcatacaacaacggcaacccattaccagaatataataatgcagcacaggtatggaaccatcacttcttctgggaatcaatgcagccagaaggtggtgggtcaccagggcgaggtgtcctgcagcagatagagaaggattttggctcttttactaattttagggaagagtttatacgctcagcattatcacttttggggtctggctgggttttgcttgtcttgaagagaaaagaacgaaaattatcggtagtccatacacaaaatgccatcagtccacttgcacttggtgatattccactcatcaatctagacttgtgggagcatgcttactacttggattacaaggatgacaggcgaatgtatgttacaaactttatcgaccatcttgtctcttgggatactgtcactctacgcatgatgcgcgctgaggcttttgtgaaccttggtgaaccaaatatcccagttgcatgatatgagatgatatggatatgacctagagatatctatgcatgtattctcatcatgagcgacgccgaggaatttctagatcacatgatacctgatgctgagattcgcatgcatgagagacacttacaccacctcatgtcctgcacggtgaaatagtggaaatctgcttgaggataaacagctttggttttatcgtcaccttggaattttgatatagcatcaaagcaaccttgacactagagcatgattacagagtatgggccatcgatctaacttcttcttgaagctgcaccacttcttgcaaacgtttatgcttcagaactaggacccatggtcccattatgctttttagattagatcttcatcctaagtttcgacaactcatagctgtagtttttgtctttcttttggcacagaattctgtcattgttaagcctagctttgttccctctattatgtaacctgacctttatgtccccattgctcattccttttgtcgacattgaattatttgatgcgatattttcgcatccattactaagcttttgctcaaaaaaaaaaaaaaannnnnnnnnnnnnnnnnn

SEQ ID NO: 385099 - DNA, 1031 bp, Oryza sativa
cggtgtcctttccaatactctctctcctcctcctcctccactccggcgactcctccgccgcatcccgagcaagcaagccgccgccgccgacgacctagctccccgatcgcggccatgtcgaggcgcggcgactgggtctacgagaacaacggcgggacgtgcgtggccatcgccggcgcggactactgcgtggtggccgccgatacccgcctttccgtcggatacaacatcctcacgcgcgaccactccaagatctgcgagctagcggacaaatgcgcactagcatcttccggcttccaaggtgatatcaaagctctgcacaagaacttggctgccagagaattgctgtaccagcaccagcacaataaaaggatgagctgccctgccatggcacaactgctctccaacactctgtactacaagcgattcttcccatattatgctttcaatgtacttggtgggcttgatagtgaagggaaaggatgtgttttcacctatgatgcagttgggtcctatgagaggactggctacagtgcacagggaacaggatctgctttgatcatgccagtgctggacaaccaactaaaatcacctagtccactattactccctgcaagagatgccgtcacacctttgtcggagacagaggcggtcgatttagtgaaggatgtgtttgcatcggcaactgagagggacatctacactggtgataagctggagatagttgtcatcaacaaagctgggacgaagcgagagtacatcgacctgaggaaggactagatcgacgattatgttcttcagttaccgcaaatttgcatcaacaaatttgcttcgaacattctccctgatacgccaggggatcatgccctgaacttgatagaaacgcctgtgctttcttgcttctattctgtaccaggattctcccaacctgctttgttgaactaatcgctgccttgatgcaaatgagaccgaacatatttattgtcagaaatatcacaatggtcgatatgttgaacaaaaaaaaaaaaaaa

SEQ ID NO: 385100 - DNA, 1641 bp, Oryza sativa
ttttttttttttttttttgcttcgaaggcaaaggaagataaatatttgctcaaaactaacgcatcacgcagaccttcctccaaatatcgagagcggatcatacacattgatcatacgacagctataagcccaaatatgttaacccgaagtacccttatagcatcatccaccgatacccaaaacttgtctgaactggtcaaatatccgacaaaactcccatatttaaccttggacaccacgaaaatttctccgaggcaaaaaagatctcttaggatataactgtgcttaaaaacagggctcctcgcaagacgatgtaaagtagcacattgcaaatctactcgatcaggtcatcgtcatcatctggcagtggttgggctgcagccgctgccagttcagcctcgtgctgttgctgggctgctagatcaattgtgacatctggaggagcaagagcaggtgtttccacaaagtggaggttaccacggacgcgtgggcggacgcgtgggcggacgcgtgggcggacgcgcgtagggttttgttggcccccattcctcccccaccccggtgtcctcccctccgccgctcgcgtcgccgcctttttcccctatggcgctgccgaatcaggggaccgtggattaccccagcttcaagctggtcatcgtcggcgatggcgggactggtaaaactacatttgtgaagaggcatctcactggagagtttgaaaagaaatatgagccaaccattggtgtcgaagttcaccctctagattttaccaccaactgtggtaagatccgcttctactgctgggacactgctggacaagagaagtttggtggacttagggatggatactatatccatggtcaatgtgcgataattatgtttgatgtcacttcaaggctgacttacaagaatgttccaacatggcatagggacttgtgcagggtgtgtgaaaacatccccattgtcctgtgtggtaacaaggttgatgtgaagaacaggcaggttaaagccaagcaggtcacattccacaggaagaagaatctccagtactatgaaatttctgccaagagcaactacaactttgagaagcccttcctttatcttgcaaggaagcttgctggtgacccgaacctgcatttcgttgaagctgttgctcttaaacctccggaagttcccattgacctggcaatgcagcaacagcatgaggctgagcttgcggctgcagcagcacaacctctcccagatgacgatgacgatctgatcgagtagagaggatcatgagtctatcatgcttcagcctgagtctcttcataagagtctgaattaggccaatgcatgctagtgttagcttgtctgtggaatgtggacgtttcctgcgtgcctgatgggttgaaaacttttgatgtgtggtgttacatgttgctgccatgaatttgttggctcttttttaacactgctgtgttacttctatggttatgcttaaactatttgtatcatcgagctggtatttatttatccagccggtgttgcacaaaaaaaaaaaaaaaaaaataaggtcgagcgcatatataaaaattttttttaatttatttaaattattttttaatattttttaattttaattttttatttaatttttat

SEQ ID NO: 385101 - DNA, 2175 bp, Oryza sativa
  unsure (1)..(2175): unsure at all n locations
tgcggcgncggctctntccctctnccctccacgcgtccgcgccgcagccgaactcctcgcgctaaaccctcgccgcggcggcggcggcggcggtgccatctcccctccatccccgtctcaccgcagccgggaacgtacgcttcgcgctttcctctcccgtcgtcgaatcgaatcgacccaagtagttgcgggacacgggcggtgagagagatgctggtgctgttcgagacgcccgcggggttcgccctcttcaaggtgctcgacgaggggaagctcgacaaggtcgaggatttatggaaggagttcacgacgtctgactcggcgagaaaggtggttgagctgaaggctttcaacaagtttgagaacacatctgatgccctttctgctgcaaccctcattattgacagcaagcctaccaagggtttgcgcaagttcttgcagaagcactgtgagggtgaaacattagctgtggctgactctaaacttggaaatgctataaaggagaagctgaaaattgactgccttcataatagtgctgtgatggagctcatgagaaggttaagaaaccagctcactgaacttatctctggtttgggtgcacaagaccttggtccaatgagccttggcttgtcccacagtttgtctagatataagctgaagttcagtcctgaaaaggttgatactatgatcattcaggccattggcttattggatgatcttgacaaggagcttaacacttatgccatgagggttcgtgaatggtatgggtggcactttccagagctcactaaaattgtagctgataacatacagtacgcaaaagttgtgaagatgatgggtgatcggactaacgcagaaagccttgatttctctgagatactttcagatgatgaggttgaagcacagctaaaagaggcggcagtaatatccatgggaacagaagttagtgaacttgacttgctaaatatcagggagctgtgtgatcaggtgttggctctttctgagtacagagcccagctgtttgattatctgagaagcaggatgaacactatcgcaccaaatttgactgcacttgttggcgaattggttggtgctcgacttattgcacatggcggcagtttggtaaatctggccaagcagcctggcagcacaattcagatacttggtgcagagaaggctttgttcagagctctaaagacaaagcatgctacgccaaagtatggtctcatctaccatgcatccttaattggtcaagcagctccaaagcacaaggggaagatttctcgttctcttgctgcaaaaactgctcttgccattcggtatgatgcccttggtgatggtgaagataactccattggtcttgagagtcgagtcaagcttgagacacggcttcgggttcttgagggtaaagaacttggcaggtctgcaggttctactaagggaaagcccaagatagaagtgtatgaaaaggaccggaagaagggtgctggggctttaatcactcctgccaagacatacaatcctgcggctgatctggtacttggacaatccactgaagaaacaccaaagaagcctgaaggtgcttcaaagaagaggaaacatcaagaggcggagcctgcaggtgcagaggaaaccattcaagaggatggtgaccaagagggtcagaagaaaaagaagaaaaagaagtccaaagatagcgaggattctcctgcggccgatgctgacggtggcaagaaaaagaaaaagacgtccaaggagagcgaggaacctccagtggccactacagaaggtgagaagaaggagaagaagaaaaagaagaaatctgattcacaagatgccgaggatgttgccatggaaaccgaggagtctggcaagaaagagaagaagaaaaagaagaaacaccatagcgatgaatgaaggatacactggagaaggacatgttatcttgagtagcatagggttgaagaatcgctgctctgtaaaatgcaacattccgagtttttccatgccggttagttgtaggataggcatcaagtttggacttgttactcatggatcttgtattcaattgcctactgaattttggaattggagagcatatgatgcttttgctcnnnnnnnnnnnnnnnnnnnnnnnnnnnnnnnnnnnnnnnnnnnnnnnnnnnnnnnnnnnnn

SEQ ID NO: 385102 - DNA, 517 bp, Oryza sativa
gccgatgctgatggcggcaagaaaaagaaaaagaagtccaaggagagcgaggagccacctgtagccaccgctgaaggtgagaagaaggagaagaagaaaaagaagaaatctgattcacaagatgctaaggatgttgccatggaaaccgaagcgtctggtaagaaagacaaaaagaaaaagaagaaaaagcatggtgatgaatgagggtttcactggagaaagacaatcttgggtagcattgggttgaaaactcgctgttctgtaaaatggaacatgccgggtctgttccatgcctgttagccatagtataggcaccactgttgagacttgagacttgtttactagtggaactgtattgaagcacctagtagtactaaattttggaatagggaaacatgtcgtgcttgctcgttctatgtgaactgaaatttttggtccttttggccgggagggtcttgttcgtgcaatattgcaatggctgttaaggtctttcaggttcttacttccctacagtgaa

SEQ ID NO: 385103 - DNA, 260 bp, Oryza sativa
  unsure (1)..(260): unsure at all n locations
actagttctagatcgctctctttggacttctttcccttcttttcntttnaaccttcttggtcaccatcctctttagtggtcttctctgctggggctttaatcactcctgctaagacatacaatcctgcggctgatctggtacttggacaatccactgaagaaactccaaagaagcctgaaggtgcttcgaagaagatggaaacatcaagagacggagcctgcaccagcagagaagaccactaaagaggatgngtgaccca

SEQ ID NO: 385104 - DNA, 2288 bp, Oryza sativa
gtggaggcggtggtgatgccggagaggtacgcgctgggtggcgcgtgcagggtgctcgccggaatgcccgcgccgctcggggccaccgcgctcgacggcggggtcaatttcgccgtctactccgccggcgcatccgccgcgtcgctctgcctcttcacccccgacgatctcgaggcggatgaggtgactgaggaggttccgcttgatcctctgttcaatcggacggggaatgtgtggcacgtcttcatcgaaggcgagctgcacaacatgctgtacgggtacaggttcgatggtatgttcgcccctcactgcggccagtacttcgatgtctccaatgtcgtggtggatccttatgccaaggcagtgataagccgaggagagtatggtgtccccggtcctggtggcgattgctggcctcaaatggctggcatgatccctcttccgtacagtacgtttgattggcaaggtgacctacctctgagatatcctcagaaggatcttgtaatctatgagatgcatttacgtgggtttacaaagcacagttcaagcaatgtagaacatccagggacttacattggggctatatcaaagcttgactatctgaaggagcttggagttaactgtgtagagttgatgccctgccatgaattcaatgagctggagtacttcagctgctcttccaagatgaacttctggggatactccacgataaactttttttcaccaatgataagatattcatcaggtgggataagaaactgtggccgtgatgccataaatgaattcaaaacttttgttagagaggctcacaaacggggaattgaggtgatcatggatgttgtcttcaatcatacagccgagggtaatgagaaaggaccaatattatcatttagggggatagataatagcacatactatatgcttgcccctaagggagagttttacaattattctggttgtgggaataccttcaactgtaatcatcctgtggtccgtgaatttattgtagattgtttaagatactgggtgacagaaatgcatgttgatggttttcgttttgatcttgcatccataatgaccagaggatgcagtctttgggatccagttaatgtgtatggaagtccagtagaaggtgacatgactacgacagggacacctcttgctactccaccacttattgacatgatcagcaatgatccaattcttggagatgtcaagctcattgctgaagcatgggatgcgggaggcctctatcaagtaggtcaatttcctcactggaaaatttggtcagaatggaatggaaagtaccgggacattgttcgtcaattcattaaaggcacagatggatttgctggtggtttcgctgaatgtttgtgtggaagtccacatctataccaggcaggggggaggaaaccttggcacagtatcaactttgtgtgtgcgcatgatggatttacgctggctgatttggtgacatataacaagaagtacaactcttcaaatggtgaggataatagagatggagaaaatcataacctcagctggaactgtggggaggaaggagaatttgcaggtttgtcggtcaaaagattgaggaagaggcaaatgcgcaatttctttgtttctctcatggtttctcaaggtgttccgatgttctacatgggcgatgaatatggccatacaaaaggaggcaacaacaacacatactgccatgaccattatgtcaattatttccgctgggacaagaaagaagaatcctctgacttgcaacggttctgctctcttatgaccaaattccgcaaacaatgcgagtcccttggcctcgcagacttcccaacagctcaacggttgcattggcatggccatcagcctgggaaacctgactggtctgagacaagccgtttcgtggccttctccacgaaagatgaaacgaaaggcgagatctacgtggccttcaacgccagccatttgccggcggttgttggactcccagagcgcccaggctaccgctgggagccgctggtggacacaggcaagccagcgccttatgacttcctcaccgacgacctgcctgatcgtgtcacgccgtccacctgttctctcatttcctcaactccaatctctaccccatgctcagctactcctccatcatccttgaattgcagcctgatgattgaaagaacaaagtatagcatagtatagcagagtaaaaaacatatgtttatagccctttttgcgtatatgttgaagttgtgcggtccttcaattttgaaaaaaaaaaaaaaaaa

SEQ ID NO: 385105 - DNA, 1575 bp, Oryza sativa
  unsure (1)..(1575): unsure at all n locations
ttcaccctccgccgcctcgtcaattccacgcgaacgcgagagctctcggaaagcaccaccaccagcacagagccagcgcgagagagagagagagggagaccaaaccccatcccggatctctcgtcgtcggcggcgtctgcgatggcgctctccgaccgctcccgcgagtcgctcctcccgagcttcctctacacctcctccgccgcgaggtccttcgccaccggcgccacccgcttcccctccccggtgtccccagcttccccggctccgggtgccgtcgggggcggcgcgcccatctcgatccaggctcccagggagaagatcgagatgtactcgccggcgttctacgccgcctgcactgccggtgggatcgccagctgcgggctcacccacatggccgtcacgccgctcgacctcgtcaagtgcaacatgcagattgatccagcaaaatacaagagcataacatctgggtttggcgtcctcttaaaggagcaaggacctagaggcttcttcaggggatgggtgcctaccttgcttggttacagtgctcagggcgcatgcaagtttgggttttatgagttctttaagaagtactactcagatattgctgggcctgagtatgctcagaagtacaagaccctaatttacctcgctggatcagcttctgctgaggtgattgcagatgtggctctctgcccatttgaagctgtgaaggttcgtgtgcaaacccaacctggattcgctcgtggactgagtgatgggctccccaagttcgtcagatctgaaggcgctcttgggctttacaagggaattgttcctctgtggggtcgccaaatcccttatactatgatgaagtttgcctcctttgagaccattgttgaaatgatctacaagcacgctgttcctgttccgaagtctgagtgcagcaagtctttccaattgggtatcagtttcgctggtggttacattgctggagtcttctgtgccattgtctctcatccagctgacaacttggtctctttcttgaacaacgccaagggagctacagtgggtgatgctgttaaaaagcttggtctttggggccttttcactagaggactgccccttcgtattgttatgattggaactcttactggtgctcaatggggtatttatgatgcttttaaagtcatggttggacttccaacaaccggtggtgttacgcccgcgcccggtgcagcagagaaagcattgcaagccagtgcttgattcttatgcagagataatggcgatgtattcctgaagatccatctttgttgtggctggaattgtatcaattacttgagtttagcacctaaatcttaattttagtggatgattcttgtgtcatccttttgatgagaggaactcattaatcaggtgaagtaggtcttttttgcccccgggaaagtttgatgcttgatacataataaatttttggacagcaaggctgttagagctcaggttttggcatcacctgtactgaggaatactcacatctttgtgttccttaaaagcatacataccttgaatcnnnnnnnnnnnnnnnnnnnnnnn

SEQ ID NO: 385106 - DNA, 584 bp, Oryza sativa
atcgatccgaacgcgagagcgaggaggagagcccgagatctcggcggcggcggcggcggcgatggcgctctccgaccgctcccgcgagtcgctcctgccgagcttcctctactcgacggcgggggcgcggccgtacaccgcgggcggcggcggcgccgccttccgcctccccgccgcggcggccccgggaggtgtaggagggggcgcgccgatcgagatccaggcgcccagggagaagatcgagatgtactcgccggcgttctacgccgcctgcacggccgggggcatcgccagctgcggcctcacccacatggcggtcaccccgctcgacctcgtcaagtgcaacatgccgattgatccagcaaagtacaagagcatcacatctgggtttggaatattggctaaggagcaaggaggtcaggggcttcttcaggggctgggttcccactcttcttggctacaagtgctcagggcgcctgcaagtttgggttttatgaattctttaagaagtactactcagacattgcaggacctgagtacgctcagaaatataagacgctcatataccttgctggctcaacttc

SEQ ID NO: 385107 - DNA, 956 bp, Oryza sativa
cccacgcgtccgtggacgcgtggggcggcgacatgacgacgacgacgacgaggtttgttcagcttgccgcgtgcgcggcggcgtcgctgctcgccgtggcggcgagtggcgcggcggcgcagggcgtcgggtcggtcatcacgcaggcggtgttcaacagcatgctgcccaaccgcgacaactcgcagtgcccggcgaggggcttctacacgtacgacgccttcatcgccgccgccaactccttcccggcgttcggcacctccggcggcagcgccgagctcatccggcgggagctcgccgccttcttcggccagacctcccacgagaccaccggtggaacgaggggtagttctgaccagttccagtggggttactgcttcaaagaggagataaacaaggcgacttctccaccctactatggacgtggcccaattcaattgacagggcaatcgaactaccaagcagccgggaacgcgctggggctggacctggtgggcaacccagacctggtgtccaccgacgccgtggtctccttcaagacggccatctggttctggatgacggcgcaggggaacaagccgtcgtgccacgacgtcatcctcggccggtggacgccgtcggcggcggaacacgccgccggccgcgtccccgggtatggcgtcatcaccaacatcatcaacggcggcatcgagtgcggcgtcggccagaacgacgccaacgtcgaccgcatcggctactacaagcgctactgcgacatgctcggcgcaggctacggcagcaacctcgactgctacaaccagcgcaacttcgccagctagctagctgagtgatcgatcgatccatcggattgttatcctattgcatgatcgttcgatcagttagtactaccaatcaaaactggcatgtagtgatgtagtatcccaacatgaataaaggtctttaatcaaataaacaaa

SEQ ID NO: 385108 - DNA, 913 bp, Oryza sativa
agacgacgacgacggcgaggtttgttcagcttgccgcgtgccggcggcgctgctcgccgtggcggcatggcggcggcagggcgtcgggtcggtcatcacgcaggcggtgttcaacagcatgctacccaaccgcgacaactcgcagtgcccggcgacgggcttctacactagcagcgccttcatcgccgccgccaactccttccggcgttcggcacgagccggcggcgcgccgagctcatcccgccgggagctcgccgccttcttcggccagacctcccacgagaccaccggtggaacgaggggtagttctgaccagttccagtggggttactgcttcaaggaggagataaacaaggcgacttctccaccctactatggacgtggcccaattcaattgacagggcaatcgaactaccaagcagccgggaacgcgctggggctggacctggtgggcaacccagacctggtgtccaccgacgccgtggtctccttcaagacggccatctggttctggatgacggcgcaggggaacaaggcgtcgtgccacgacgtcatcctcggccggtggacccgcccggggggggaaaccaccgccggccgcgtccccgggtacggcgtcatcaccaacatcatcaacggcggcatcgagtgcggcgtcggccagaacgacgccaacgtcgaccgcatcggctactacaagcgctactgcgacatgctcggcacaggctacgggagcaacctcgactgctacaaccagcgaaacttgccagctagttgatcgttcgatcgaattgttgtcatattatatatgatcgtttgatcagttagtactaccaataaaactggcatgtgatgtagtatcccaacatgaataaaggtctttaatcaattgaaggcaaaaaaaaaaaaaaaa

SEQ ID NO: 385109 - DNA, 2244 bp, Oryza sativa
  unsure (1)..(2244): unsure at all n locations
ccacgcgtccgtttggtttttacgagaaccggcaaaagctgatgcaggagaagagagctaagcagcaactgcttcaaggacagggctctcttgacaatgcttcacatgaaaaggagaagaatgcaattgatgggaaatccacagctcagaagcaggcattgagcaaggagggcacccctattgtcggcgaaatgctgaacgcctcaaaatctgcagttgaaagcagtgtaacaaatggcaattagcgcgatatattttctgcgttaattgccacagccgagcagtcagattgtgcaaattctgaaggttcgcggcgtggctgagcgatagctacttgggttgggacttggcaactaaatttcgtaacagactttctataggcttggtgcctggggagtgggtcagttcttactttgattttagctcgtgtgactggttttttgcgtcgttaggtctcatatattactcttatgacatcgggttttatgtaacccttatcctttttgttttttttagccttttcatctattgttattgttagcgaagcatccaaatttcgataaactaagtgaataactatggcttccatgtctaccattcttccattgtgccttggcctccttctcttcttccaagtgtccatggcacaattttcatttgggggaagcccacttcagagcccacgtggatttaggggagaccaagatagtcgtcatcaatgtcgttttgagcacctcaccgcccttgaggcaacacaccagcagagatctgaagctggattcactgagtactacaacattgaggcaagaaatgagttccgttgtgccggagtgagcgtgaggcgcttagtcgtcgagagcaagggcttagttttaccaatgtatgctaatgctcacaagcttgtctacatcgtccaaggtcggggagtgtttgggatggcactgcctggttgtccagagacgttccagtcagttaggtctccctttgagcaagaggtggcaacagctggtgaggctcaatcatcaatccaaaaaatgagagacgagcaccagcaacttcaccaattccaccaaggtgatgtaatcgcagtgccagctggagtagcccactggctatataacaatggtgattctcctgtggttgctttcactgtcatcgacaccagcaacaatgccaaccagctcgatcctaaaagaagggagtttttcttggctggaaagcctagaagtagctggcagcagcaatcgtactcataccagacagaacaactgagcagaaatcagaacatctttgctgggttcagcccagatttactttctgaagccctgagtgtgagcaagcaaactgtgttgaggctccaaggcctgagtgacccaagaggtgccatcattagagttgaaaatgggctccaggcactgcagccctctctccaagttgagccagtgaaagaggaacaaacccaagcttacttgccaaccaagcagctacagcccacctggttgcgaagtggtggagcttgcggccagcaaaatgtcctagatgaaattatgtgtgcatttaagttgaggaagaacatagacaacccacaatccagtgacatatttaacccccatggtggaaggatcacaagggccaatagccagaatttcccaatactcaatatcatccagatgagtgccaccagaatcgttctccaaaataatgccttgcttactcctcattggacggtaaacgcacacacggtgatgtacgtgaccgctggccaagggcgcatccaggtggtggatcaccgtggtaggagtgtctttgatggtgagcttcaccaacagcagatcttgttgatcccacagaactttgcagtggtggtgaaggctcgacgtgaaggatttgcatgggtatccttcaagaccaatcacaatgctgtcgacagtcagatcgcagggaaggcctccattcttcgtgctctacccgttgacgtggtcgccaatgcttataggctttcaagggaggactctaggcatgtaaagttcaaccgcggcgatgagatggctgtctttgctccgaggcgtgggccgcaacagtatgctgagtggcagatcaacgagaagtaaactaaatgtgtaacgatcttactgtaatgaataatgtgaagaagattgcctacacctctttttccataaaaatatcaataagcaattactaagaacatgataatactctcannnnnnnnnnnnnnnnnnnnnn

SEQ ID NO: 385110 - DNA, 685 bp, Oryza sativa
  unsure (1)..(685): unsure at all n locations
aaaaaacacctcgggaaattacccctggggagatacaggccaaacccgattccaaaatcatttcttcggcaggggcccccggattttttccaaaaaaagccttgttaatcctcatggacggtaaagcacaacacggtgataagtgaccgtggccaaggcgcatccaggtggtggatcaccgtggtaggagtttctttgatggtgagtttcaccaacagcagatcttgttgatcccacagaactttgcagtggtggtgaaggctcgacgtgaaggatttgcatgggtatccttcaagaccaatcacaatgctgtcgatagtcagatcgcagggaaggcctccattcttcgtgctctacccgttgacgtggtcgccaatgcttataggctttcaagggaggactctaggcgtgtaaagttcaaccgcggcgatgagatggctgtctttgctccgaggcgtgggccacagcagtatgctgagtggcagatcaacgagaagtaaactaaatgtgtaacgatcttactgtaatgaataatgtgaagaagatcgcctacacctctttttccataaaaatatcaataagcaattactaagaacaaaaaaaaaaaaaaaaaaactcgagggggggcccggtacccaattcgccctatagtgagtcgtattacaatttcnnnnnnnnnnngnng

SEQ ID NO: 385111 - DNA, 721 bp, Oryza sativa
cccaggcgccgtctcaagcacccgaaacattatagttgaagcatagtagtagaatcctacaaaaatgaagatcattttcgtatttgctctccttgctattgttgcatgcaacgcttctgcacggtttgatgctcttagtcaaagttatagacaatatcaactacaatcgcatctcctgctacagcaacaagtgctcagcccatgcagtgagttcgtaaggcaacagcatagcatagtggcaacccccttctggcaaccagctacgtttcaattgataaacaaccaagtcatgcagcaacagtgttgccaacagctcaggctggtagcgcaacaatctcactaccaggccattagtagcgttcaggcgattgtgcagcaactacagctgcagcaggtcggtgttgtctactttgatcagactcaagctcaagctcaagctttgctggccttaaacttgccatccatatgtggtatctatcctaactactacattgctccgaggagcattcccaccgttggtggtgtctggtactgaattgtaatagtataatggttcaaatgttaaaaataaagtcatgcatcatcatgcgtgacagttgaaacttgatgtcatataaatctaaataaaatcacctatttaaatagcaaaaaaaaaaaaaaaaaaaaactcgagggggggcccggtacccaattcgccctatagtgagtcgtattacgaatt

SEQ ID NO: 385112 - DNA, 1178 bp, Oryza sativa
  unsure (1)..(1178): unsure at all n locations
aanngtaatacgactcactatagggcgaattgggtaccgggccccccctcgagttttttttttttttttttttaggtaagatgattttatttagatttatatgaccctaagtttcaacagtcacacatgatgatgtatgactttatttttaacatacgaactattatattgttacaattcagtaccagacaccaccaacagtggcaatgctcctgggagcactatagtagttagggtagataccacatatggatggcaagttgaaggtcaacagagtttgggcttgagcttgagtctgatcaaagtagacaccactaaattgctgcagttgtagctgttgcacaatcgcttgaacaatactaatggcctggtagtgagattgttgtgctaccagcctgagctgttggcaacactgctgctgcatgacttggttgtttatcaattgaaacgtagctggttgccagaagggggttgccactatgctatactgttgccttacgaactcactgcatgggctgagcacttgttgctgtagtaggagatgcgactgtagttgatattgcctataactttgactaagaggatcaaaccgcgcagaggcattgcatgcaacaatagcaaggagagcaaatacgaaaatgatcttcattgttgttggattctactactatgcttcaactataatatttgaacccacgcgtccgcccacgcgtccgcccacgcgtccgcccacgcgtccgcacaattcaaacattatagttgaagcatagtagtagaatcctacaaaaatgaagatcattttcgtatttgctctccttgctattgttgcatgcaacgcttctgcacggtttgatgctcttagtcaaagttatagacaatatcaactacaatcgcatctcctgctacagcaacaagtgctcagcccatgcagtgagttcgtaaggcaacagcatagcatagtggcaacccccttctggcaaccagctacgttntaattgataaacaaccaagtcatgcagcaacagtgttgccaacagattaagctggtagcggatccatnttatttacaggncattagttagattaaagggaattgtgaaaaatttaggtgttnaatggatgggtgtgaatattataaaagaattggggttaggataaatattggtnttataaaaatt

SEQ ID NO: 385113 - DNA, 645 bp, Oryza sativa
  unsure (1)..(645): unsure at all n locations
ccacagcatagcactcaatatcctacgctagcgagtatcgttggaccaatacagctcgcgtagatatgcatacatgccactctctgactcaggtcagaatgctctctactgctacgttatagacaatatcaactacattcgcattctcctagctacagcaacaagtgtctcagcccatgcagtgagttcgtaaggcaacagcatagcatagtggcaacccccttctggcaaccagctacgtttcaattgataaacaaccaagtcatgcagcaacagtgttgccaacagctcaggctggtggcgcaacaatctcactaccaggccattagtagcgttcaggngattgtgcagcaactacagctgcagcaggtcggtgttgtctacttngatcagactcaagctcaagctcaagctttgntggccttaaacttgccatccatatgtggtatctatcctaactactacattgctccgaggagcattcccaccgttggtggtgtctggtactgaattgtaatagtataatggttcaaatgttaaaaataaagtcatgcatcatcatgcgtgacagttgaaaaaaaaaaaaaaaaaactcgagggggggcccggtacccaattcgccctatagtgagtcgtattacaatt

SEQ ID NO: 385114 - DNA, 646 bp, Oryza sativa
aattgtaatacgactcactatagggcgaattgggtaccgggccccccctcgagttttttttttttttttttttttcaacagtcacacatgatgatgtatgactttatttttaacatacgaactattatattgttacaattcagtaccagacaccaccaacagtggcaatgctcctgggagcactatagtagttagggtagataccacatatggatggcaagttgaaggtcaacagagtttgggcttgagcttgagtctgcatcaacagtagacaccactaaattgctgccagttgtagctgttgcacaatcgcttgaacaatactaatggcctggtagtgagattgttgtgctaccagcctgagctgttggcaacactgctgctgcatgacttggttgtttatcaattgaaacgtagctggttgccagaacgggggttgccactatgctatactgttgccttacgaactcactgcatgggctgagcacttgttgctgtgtagtaggagatgcgactgtagttgatattgcctatagctttgacgactgtcgttgatattctctataactttgactaagaggatcaaaccggcgagagcattgcatgcaacaatagcaaggagagcaaatacgaaaaatgatcttca

SEQ ID NO: 385115 - DNA, 770 bp, Oryza sativa
  unsure (1)..(770): unsure at all n locations
aaagggacaaagtggagcaccaccagcagaggtggcaggcacagctcatagaactagatggatcccccagggcatgcaagagaattcaggcacgagcagcaacagtgttgccaacagctcagagctggtagacgcaacaatctcactaccaggccattagtagcgttcaggcgattgtgcagcaactacagctgcagcaggtcggtgattgtactactttgatcagactcaagctcaagactcaagctttgctggccttaaacttgaccatccatatgtggtatctatcctaaactactacattgctccggaggaagcattcccaaccgaccgggggtgtctggtactgaaaattgtaatagtaataaatggattcaaatgttaaaaataaagtcatgcatcatcatgcgtgacagttgaaacttgatgtcatataaatctaaataaaatcacctatttaaatagcanaaaaaaaaaaaaaaaaaaaaaaaaaaaaaaaagagggggggggggggaaaaaaaaaaaaaataaatttaaattaaaattaaaaaaaaaaaaaaaaaaaaagggggggcccgtttttgaggttccacgtttccgtccccgggcttgcaacgtttttttttttttttggggtccccaaattcaattgaccgggccgtcgttttccaacgcctgggctgggaaacccttggccttccccaatttattggccttgctgcacttcccctttttcccggtgggggggttagggggggggcccgcccct

SEQ ID NO: 385116 - DNA, 510 bp, Oryza sativa
  unsure (1)..(510): unsure at all n locations
ttcaaacattatagttgaatagatctacaaatgagatcatttcgtattgctctccttgctattgttgcacgcaacgcttctgcacggtttgatgctcttagtcaaagttatagacaatatcaactacaatcgcatcccccttgctacagcaacaagtgctctccagcccatgcagtgagttcgtaaggcaacagcatagcatagtggcaacccccttccttggcaaccagctcacgtttcaattgataaacaaccaagtcatgcagcaacagtgttgccaacagctcaggctggtagcgcaacaatctcactaccaggccattagtagcgttgcaccgcgattgtgcagcaactacagttgcaacacgtcngtgttgtctgctnagatnagacncnntttcannntcaagcngagatnggcnaaancncncnntccncatatgaanncaancaganatggtagattgttnnnncagatcaggnncaacgagtcgatggatntntnggaan

SEQ ID NO: 385117 - DNA, 256 bp, Oryza sativa
  unsure (1)..(256): unsure at all n locations
cactgctgctgcatgactgtgttatcggtccgtcgctggtcacagaggggttgccaccatgccataccgttgaccttacgaactcaccgcatgggctgaggtacacttgttgctgtagtaggagatgcgactgtagttgatattgncctataactttgactaagaggatcaaaccgcgcagaggcattgcatgcaacaatagcaagggagagcaaatacgaaaatgatcttcattgttgttgcattctactactat

SEQ ID NO: 385118 - DNA, 853 bp, Oryza sativa
ttgctccttccccgtcctccccgcttgggctcttgggcgcccgttccgggcgccccctccctcctccctccgcggtacccggccgcctcactcctctgctggacccccggccgccccgggccgcgccccatcccggtgcgcgccccatcgttcacacacttcaagcattatacagcaaaatagaaagatctagtgtcccgcagcaatgaagatcattttcgtctttgctctccttgctattgctgcatgcagcgcctctgcgcagtttgatgttttaggtcaaagttataggcaatatcagctgcagtcgcctgtcctgctacagcaacaggtgcttagcccatataatgagttcgtaaggcagcagtatggcatagcggcaagccccttcttgcaatcagctgcgtttcaactgagaaacaaccaagtctggcaacagctcgcgctggtggcgcaacaatctcactatcaggacattaacattgttcaggccatagcgcagcagctacaactccagcagtttggtgatctctactttgatcggaatctggctcaagctcaagctctgttggcttttaacgtgccatctagatatggtatctaccctaggtactatggtgcacccagtaccattaccacccttggcggtgtcttgtaatgagttttaacagtatagtggttcggaagttaaaaataagctcagatatcatcatatgtgacatgtgaaactttgggtgatataaatagaaaaaaagttgtctttcatatttaaaaaaaaaaaaaaaaaaaaaaactcgaagggggggcccggtacccaattccgccctatagtgaagtcctattacaattccct

SEQ ID NO: 385119 - DNA, 690 bp, Oryza sativa
  unsure (1)..(690): unsure at all n locations
gggggcgtggatgggccggcgcggattgctggggcaaaagaaattgtgtccgcacaggaaatattttttttgtttcctgatatggggcacgcgggctttgcgcagttgagtttagtcaaagttatagcaatatcagtgcattgctgtcctgtacagcaacagtgcttagcccatataatgagttgtaaggcagcagtatggcatagcggcaagcccctttcttgcaatcagctgcgtttcaactgagaaacaaccaagtctggcaacagctcgcgctggtggcgcaacaatctcactatcaggacattaacattgttcaggccatagcgcagcagctacaactccagcagtttggtgatctctactttgatcggaatctggctcaagctcatagctctgttggcttttaacgtgccatctagatatggtatctaccctaggtactatggtgcacccagtaccattaccacccttggcggtgtcttgtaatgagttttaacagtatagtggttcggaagttaaaaataagctcagatatcatcatatgtgacatgtgaaactttgggtgatataaatagaaataaagttgtctttcatatttaaaaaaaaaaaaaaaaaaaactcgagggggggcccggtacccaattcgccctatagtgagtcgtattacaattncnnnnnnnnnnnnnc

SEQ ID NO: 385120 - DNA, 660 bp, Oryza sativa
  unsure (1)..(660): unsure at all n locations
gganggcngngnancggttgggncgngacgngtgggcggacggtgggcggacggtgggctagtttaaaagaactagtgtcccgcagcaatgaagatcattttcgtctttgctctccttgctattgctgcatgcagcgcctctgcgcagtttgatgttttaggtcaaagttattaggcaatatcagctgcagtcgcctctcctgctacagcaacaggtgcttagcccatataatgagttcgtaaggcagcagtatggcattgcggcaagccccttcttgcaatcagctgcgtttcaactgagagaaacaaccaagtctggcaacagctcaggcgctggtggcgcaacaatctcactaccaggacattaacgttgtccaggccatagcgcagcagctacacctccagcagtttggcgatctctactttgaccggaatctggctcaagcgcaacgactgttggcttttaacttgccatctacatatggtatctaccctaggtactatagagcaccgggtagtattaccacccttggcggtgtcttgtactgaattttcacaatattgtagttcggaagtgaaaatataagcctcaggtatcatcgtatgtgacatgtgaaacttaaggtgatataaatagaaataaaattatctttcatattt

SEQ ID NO: 385121 - DNA, 346 bp, Oryza sativa
ccacgcgtccgcccacgcgtccgcccccgcgtccgcccacgcgtccgcccacgcgtccgcaacaatctcactatcaggacattaacattgttcaggccatagcgcagcagctacaactccagcagtttggtgatctctactttgatcggaatctggctcaagctcaagctctgttggcttttaacgtgccatctagatatggtatctaccctaggtactatggtgcacccagtaccattaccacccttggcggtgtcttgtaatgagttttaacagtatagtggttcggaagttaaaaataagctcagatatcatcatatgtgacatgtgaaactttgggtgatat

SEQ ID NO: 385122 - DNA, 754 bp, Oryza sativa
  unsure (1)..(754): unsure at all n locations
gctctagaactagtggatcccccggnctgcaggaattcggcagagtcaaacattacagcaaaagcataagaactagaaacccaccacaatgaagatcattttcttctttgctctccttgctattgctgcatgcagtgcctctgcgcagtttgatgctgttactcaagtttacaggcaatatcagctgcagccgcatctcatgctgcagcaacagatgcttagcccatgcggtgagttcgtaaggcagcagtgcagcacagtggcaacccccttcttccaatcacccgtgtttcaactgagaaactgccaagtcatgcagcagcagtgctgccaacagctcaggatgatcgcacaacagtctcactgccaggccattagcagtgttcaggctattgtgcagcagctacaggctacaacagtttgctagcgtctacttcgatcagagtcaagctcaagcccaagctatgttggccctaaacatgccgtcaatatgcggtatctacccaagctacaacactgctccctgtagcattcccaccgtcggtggtatctggtattgaattgtagcagtatagtagtacaggagagaaaaataaagtcatgcatcatcgtgtgtgacaagttgaaacatcggggtgatacaaatctgaataaaaatgtcatgcaagtttaaacaaaaaaactctgtaaggataaataaactcgagggggggcccggtacccaattcgccctatagtgagtcgtattacaatt

SEQ ID NO: 385123 - DNA, 676 bp, Oryza sativa
  unsure (1)..(676): unsure at all n locations
gggagctaaaatgatccccacaggagtatttttttgtttccggnatggggaggcaggcttgggcagttgatgtttaatcagttacggcatatcagtgcaccgcagttcatgtgcagcaacagatgttagccatgggtgagttgtaaggcagcagtgcagcacagtggccaaaccccttcttccaatcacccgtgtttcaactgagaaactgccaagtcatgcagcagctgtgctgccaacagctcaggatgatcgcgcaacagtctcactgccaggccattagcagtgttcaggcgattgtgcagcagctacagctacaacagtttgctggcgtctactttgatcaggctcaagctcaagcccaagctatgttggccctaaacttgccgtcaatatgcggtatctacccaagctacaacactgctccctgtagcattcctaccgtcggtggtatctggtattgaattgtagcagtatagtagtacaggagagaaaaataaagtcatgcatcatcgtgtgtgacaagttgaaacatcggggtgatacaaatctgaataaaaatgtcatgcaaatttaaacataaaaaaaaaaaaaaaaaaaaaaactcgagggggggcccggtacccaattcgccctatagtgagtcgtattacaattncnnnnnnncnnnnnnnnn

SEQ ID NO: 385124 - DNA, 410 bp, Oryza sativa
  unsure (1)..(410): unsure at all n locations
aacattacagcgaaagattatccacacatgagatcatttcttctttgctctccttgctattgctgcatgtagcgcctctgcgcagttttgatgctgttactcaagttttacaggcaatatcagctgcagccgcatctcatgctgcagcaacagatgcttagcccatgcggtgagttcgtaaggcagcagttcngcacagtggcaanccccttttttccaancacccgtgtttcaactgagaaactgccaagtcntgcagcaggaattattcgaacagctcaggtatgttcgcgccaacagtctccactgccagggccattagcagtgtttcaggcgattcgtgcagcagctacggctacaacgtttctagcgttacttatcaagtaagcctagccaagctattggcctac

SEQ ID NO: 385125 - DNA, 1613 bp, Oryza sativa
tcgtcgtcgtcggtggcagctgtctttttttgaaggcggaggagatcgttctccagcccatcttggagatctccggggcggttcagctgccagggtccaagtcgctctccaacaggatcctcctcctctccgccctctccgagggcacaacagtggtggacaacttgctgaacagtgaggatgttcactacatgcttgaggccctgaaagccctcgggctctctgtggaagcagataaagttgcaaaaagagctgtagtcgttggctgtggtggcaagtttcctgttgagaaggatgcgaaagaggaagtgcaactcttcttggggaacgctggaactgcaatgcgaccattgacagcagccgtgactgctgctggtggaaatgcaacttatgtgcttgatggagtgccacgaatgagggagagaccgattggtgacttggttgtcgggttgaaacaacttggtgcggatgtcgactgtttccttggcactgaatgcccacctgttcgtgtcaagggaattggaggacttcctggtggcaaggttaagctctctggttccatcagcagtcagtacttgagtgccttgctgatggctgctcctttggcccttggggatgtggagatcgaaatcattgacaaactaatctccattccttacgttgaaatgacattgagattgatggagcgttttggtgtgaaggcagagcattctgatagttgggacagattctatattaagggagggcagaagtacaaatctcctggaaatgcctatgttgaaggtgatgcctcaagcgcgagctatttcttggctggtgctgcaatcactggaggcactgtgacagttcaaggttgtggtacgaccagtttgcagggtgatgtcaaatttgctgaggtacttgagatgatgggagcaaaggttacatggactgacaccagtgtaaccgtaactggtccaccacgtgagccttatgggaagaaacacctgaaagctgttgatgtcaacatgaacaaaatgcctgatgttgccatgacccttgccgttgttgcactcttcgctgatggtccaactgctatcagagatgtggcttcctggagagtaaaggaaaccgaaaggatggttgcaattcggaccgagctaacaaagctgggagcatcggttgaagaaggtcctgactactgcatcatcaccccaccggagaagctgaacatcacggcaatcgacacctacgatgatcacaggatggccatggccttctccctcgctgcctgcgccgacgtgcccgtgacgatcagggaccctggttgcacccgcaagaccttccccaactacttcgacgttctaagcactttcgtcaggaactgaactgagcttttaaaagagtgaggtctaggttctgttgtctgtctgtccatcatccatgtgttgactgttgagggaactcgtttcttcttttcttcacgagatgagtttttgtgtgcctgtaatactagtttgtagcaaaggctgcgttacataaggtgatgagaattgaggtaaaatgagatctgtacactaaattcattcagactgttttggcataaagaataatttggccttctgcgatttcag

SEQ ID NO: 385126 - DNA, 1269 bp, Oryza sativa
  unsure (1)..(1269): unsure at all n locations
ccacgcgtccgctcttccttccccttcctcttcccatcgcgatacctcctccttcccgtcgaaccctctccagtctccactccactgaatcctcccacctcggctcgaaggaatggcaagcggtagtgaagctgagaagtcacctgaggttgtgctggagtggcctaagaaggacaagaagaggcttctacatgctgtttaccgtgttggagatttggatcgcaccattaaatgttacacagaatgctttggaatgaaattactgaggaaaagagatgtgcctgaagagaaatatacgaatgcatttcttgggtttggacctgaggacaccaactttgcacttgaattgacatacaattatggtgttgataagtacgacattggagcaggatttgggcatttcgctattgcaactgaggacgtgtacaaattggctgagaaaattaaatccagttgttgctgcaagatcactcgtgaacctggtcctgtcaagggaggatccactgtgattgcctttgcacaggatcctgacggttacatgtttgagcttatccagaggggtccaacacctgagcctctttgccaagttatgcttcgtgtgggtgaccttgatcgctccatcaagttctacgagaaggcccttggtatgaagctgctgaggaagaaggatgtacctgactataagtataccattgccatgttgggctatgctgatgaggataagacaactgttattgagttgacatacaactatggtgtcacagaatataccaagggcaacgcatatgctcaggttgctattggcactgaagatgtctacaagagtgctgaggctgttgagttggttacaaaagaactagggggaaagattttgcggcagccaggtccactaccagggctcaacacaaagattgcctctttccttgaccctgatggctggaaagtggttttggttgataacgccgacttcctgaaggaactccagtgaagatgagagatggcccaagttctgtgctaggaggcaaagcacaaaccttatgtagtaatgccagtgcaatgtaataaagaagcggtttccgctctatgaacaagaataaattctggcacatgcgttgtgcttatgctagtactgtctgggtttggctgtaaatccgctatgcattgctacctgtatcagcatgactgttggagtgttgttgataacaaggaccagtttgtgcagttgagctgagtttcctgataaaaaaaaaaaaaaaaaaagggnnnnnn

SEQ ID NO: 385127 - DNA, 1267 bp, Oryza sativa
ccgatagaaagggaggaaaaaaaaaagagaaggcgaaaccccaaatccgccgcgatggccgccgccgccctcctccgccgctcgccggcggcgcgcgccctcctctccccggcgctctcctcccgcctcgtcgcctccaagccccactcgtcgtcccccgcgccgccgccgccgccgtcgaaggcgggggcgaacaccaagacgttctcgatctacaggtgggatcccgactcgccgtcgacgaagccccacctcaaggactacaaggtggacctctccgactgcgggccgatggtgctcgacgtgctgctcaagatcaagaacgagcaggacccgtcgctcaccttccgccgcagctgccgcgaggggatctgcgggagctgcgcgatgaacatcgacggcgacaatggcctcgcctgcctcaccaagatctcgtcggcgtcctcggcctccacgatctcgccgctcccccacatgttcgtcatcaaggacctcgtcgtcgacatgaccaacttctacaaccagtacaagagcgtggagccgtggctcaagcgcaaggacgcgccgccgcagcccgggaaggagatcccgcagaccaaggccgaccgcgccaagctcgacggcatgtacgagtgcatcctctgcgcctgctgctccacctcctgcccctcctactggtggaaccccgaggagtacctcggccccgccgcgctcctccacgccaacaggcttccgctgttggggacgctaatcaaaccaaaacccaacatgttcatgcacatccaagctcgaggatatcacggggtatcggagaagagaaacttgctggatcacaaacgtagattgcttgcagcaaaatatgaactgaaaggaaagctttataaggctgtttgtagggaccctgatcttccagcagatatgcaggaccagtttcgctataagctgtccaagttgccaagaaatagctccatgacacgccttagaaaccgctgtatcttcacgggccgctcgcgcgctgtttacaagaaattccgcatgtctcgtattgtgttccggtcattggctaataagggtgaattgttgggtgttaagaaagcgtcttggtagatgctaacaaccagtagatcaaagcactagctctgcagtagtccagcacaataagtttgcctccatgcagtttttcagtgtttgcaacctgaaactatatttcaatcttatgaccagcagccaatctggcactctttcaattaaaaaaaaaaaaaaaaaa

SEQ ID NO: 385128 - DNA, 1234 bp, Oryza sativa
  unsure (1)..(1234): unsure at all n locations
cccgatagaaagggaggaaaaaaaaaagagaaggcgaaaccccaaatccgccgcgatggccgccgccgccctcctccgccgctcgccggcggcgcgcgccctcctctccccggcgctctcctcccgcctcgtcgcctccaagccccactcgtcgtcccccgcgccgccgccgccgccgtcgaaggcgggggcgaacaccaagacgttctcgatctacaggtgggatcccgactcgccgtcgacgaagccccacctcaaggactacaaggtggacctctccgactgcgggccgatggtgctcgacgtgctgctcaagatcaagaacgagcaggacccgtcgctcaccttccgccgcagctgccgcgaggggatctgcgggagctgcgcgatgaacatcgacggcgacaatggcctcgcctgcctccccaagatctcgtcggcgtcctcggcctccacgatctcgccgctcccccacatgttcgtcatcaaggacctcgtcgtcgacatgaccaacttctacaaccagtacaagagcgtggagccgtggctcaagcgcaaggacgcgccgccgcagcccgggaaggagatcccgcagaccaaggccgaccgcgccaagctcgacggcatgtacgactgcatcctctgcgcctgctgctccacctcctgcccctcctactggtggaaccccgaggagtacctcggccccgccgcgctcctccacgccaacaggtggatacaggacagccgtgaccagttcactaaggagcgcctggattccatcaacgacgagttcaagctgtaccgctgccacaccatcaagaactgcacacacgcctgccccaagggcctcaacccagcgaagcacatcgacacaatcaagaagctccagctcgaggcctgagtgagcagtatatctctcttcatgagatgaaactctgtcgaaaaattgtaatcagccagcctcttgtttctctgcctttttagtccatcgcctgacgaataattgctggaacgcaggattcccttctgggcctccgatctgatgacttccatttccatcagatggagggagcattgtagggagtgaataatttgctaccgtattttacgttttgttctgtatctaattcggtttgttgttcaccgtccattccattatgtcgtgcggtttatgcatgaagtaattcatggattttacctttgtttttgtgaaaaaaaaaaaaaaannnnnnnn

SEQ ID NO: 385129 - DNA, 662 bp, Oryza sativa
  unsure (1)..(662): unsure at all n locations
ctcnaaatgcaagccaactgaacgaactcaagaacagattcaaacaattgtagctgattcctctctgcttctcgttgttcttggttggttgttgttgtagaagaagaagaagaagaagatgtcgacggtgactcgtgcctacttggatcagaagctcgcactcgccaagcgctgctccagagaggcgacgctcgccggagccaaggctgcggcggtggcgacggtggcatccgccgtcccaacgttggcgagcgtgaggatgctgccatgggcgaaggccaacatcaacccgacgggtcaggcgctgatcatctgcacggcggctgggatggcatacttcgtcgccgccgacaagaagatcctctcgctggcgaggaagcactcgttcgagggcgcaccggagcacctcaagaacacctccttccagggcaccggccgccctcacccagccttcttcaggccatgaggaacactgaactttcacagtgactgatggaagcctggataaactgctactgctgctgagttcatgcgtaatggttctataagttgtgatgtaattagttttgttgttgttgatgatgaaaatgaaatcaatgagaactagtactttgtttttttaaaaaaaaaaaaaaaggggcggccgcaaccgnnnnnnnnnn

SEQ ID NO: 385130 - DNA, 638 bp, Oryza sativa
  unsure (1)..(638): unsure at all n locations
ctcgatcaaactagtagccagtactcctcgatctccttgggttaatcacctccttcgcttcagactttctcttcagctcccatcccatcatcgtcttgatcgcgatggcaacggtgacccgtgctcacctggagcagaggctcgccctggccaagcgctgctcgcgtgaggcgaacattgcaggggttaaggcggctgccgttgcgaccatcgcctccgccgttccaaccctggcgagcgtgaggatgctgccatgggcgaaggcgaacatcaacccgacggggcaggcgctgatcatctgcacggcggccgggatggcatacttcgtggccgccgacaagaagatcctctcgctggcgaggaggcactccttcgagaacgcaccggagcacctcaagaacacctccttccagggcgccggccgccctcaccctgccttcttcaggccatgaatttctcctaatcaactagctatagaaaaaaaaaatgctgcttgcattgctaggctagctgctgcttcagaaagtgtttgctgtgtacttggatcgatgtagtatactgtatgtctgtatctccagtttgtagtactaataaacaaatcttttgaactaaaaaaaaaaaaannnnnnnnnnnnnnn

SEQ ID NO: 385131 - DNA, 858 bp, Oryza sativa
  unsure (1)..(858): unsure at all n locations
cccacngtccgcccacgcgtccgcccacactccatctcccttgcttgccgctacactcgatctactctctcacacactcctctgatctctctctctctctctcgctagtcgattggcttgcctagctctctcaaactgctctagtgcagttcagcaaaaactaagtgactgaaactaatttacatggcaacggtgacccgtgcacacctggagcagaggctcgccctcgccaagcgctgctcgcgtgaggcaaacattgcaggggttaaggcggctgccgttgcgaccatcgcttctgcagttcccaccctggcgagcgtgaggatgctgccatgggcgaaggccaacatcaacccgacggggcaggcgctgatcatctgcacggcggccgggatggcatacttcgtcgccgccgacaagaagatcctctcgctggcgaggaggcactccttcgagaacgcacctgaacacctcaagaacacctccttccagggcaccggccgccctcaccctgccttcttcaggccctgaacaattagaacagcatatgcatgcatgaatctgaaacttgatcacagtatctagctctcgatcgatccctgtgtcatataataatcgatgtacgcccctgcagaaccatttagagctgcttctgtagagcagtggtgttagtactcatctctgtcgtatctgccattagccacctaattaaatacatgtactgctatcttgcactggggctcactgcatgtaacactactgcagagtgcatgcactcctcataatgttcagaaatcacaagtggtactactatatattccgaccactatagnnnnnnnnnnnnnnnnnnnnnnnnnn

SEQ ID NO: 385132 - DNA, 587 bp, Oryza sativa
tctcgctcagcactactgatccaaccagtaggcgattctctccacctcccagctacttcacttcaggactagtttcttctcagctccatcgatcttgctcgacaatgtcgacgacggtgacccgtgctcacctggagcagaggctcgccctcgccaagcgctgctcccgggaggcgaaccttgcaggggttaaggcggctgctgtcgcgaccatcgcctctgccgttccaaccctggcgagcgtgaggatgctgccatgggcgaaggccaacatcaacccgacggggcaggcgctgatcatctgcacggcggccgggatggcatacttcgtcgccgccgacaagaagatcctctcgctggccaggaggcactccttcgagaacgcacctgaacacctcaagaacacctccttccagggcaccggccgccctcaccctgccttcttcaggccatgatcagcaagctagtgctgcttgcaatctgctgcagaaagtagctagtgttgtgtacttggatgtaatatactgtatgctccagcttgtattaataaacaatcttaatttgatgaactcaaaaaaaaaaaaaaa

SEQ ID NO: 385133 - DNA, 381 bp, Oryza sativa
  unsure (1)..(381): unsure at all n locations
ctcaagaacagatacagattcagactggtgtttctgctagactgctactgcaagtgttggtagctagatcctctctctgcttgtcgttgttgttgtagaagaagaagctgatgtcgacggtgactcgtgcctacctcgaccagaagctcgccctcgcaaaacgctgctccagagaggcgacgctcgccggagccaaggcggcggcggtggcgacggtggcatccgccgtcccgacgctggcgagcgtgaggatgctgccgtgggcgaaggccaacatcaacccgacgggacaggcgctgatcatctgcacggccggccgggatggcatactgaaaggntccgggaaatttncgaattcaaaaanggnggggnangnnttng

SEQ ID NO: 385134 - DNA, 641 bp, Oryza sativa
ccacgcgtccgcccacgcgtccggggcagcgaagtcgccgacgaggaggaggagaaggagccatggccgccaggagcttccaggcccggtcccccaaggaggagtccgacgccgccgtccatgaggcagtcacgctgggattgaagaacgcagccatatctggtaccgtggttgcggtccccacgttggttggttgccgtgtccttccttgggctaaggctaatctcaactacaccgcacaagcactcatcatatcagcagcatgcatcgctggcttcttcatcactgctgataaggccattctacggaacgcaagacagaacaccattgggaagattgacaggtcaacctgatgcgcaactgtacatatgagaacgttgtactgattatccatttcttcgatagcaggcgaggttgatgggagcaataggaatccatctctattattccgttcatccatggatgattggacgtgtactgcaatgaatcagcaatttttatgttttaatcttaattccttatatgaaaacctaacctcgcattgtaaagactagggctgttgccttttagaccagtgaatccagtttggttccaatttgaagttgaataaaagatggaaatgtaatgctcttttaagcccc

SEQ ID NO: 385135 - DNA, 3151 bp, Oryza sativa
ctcgtgccgaattcggcacgagccaagcctatcagcctagctagtgacctgagtactctgctgtctgctgcctgaatctgaatcgatcgatcactcgctcgctgcctgaagagagcaagaatcgatggttgcacggccaagattgctacaccttcgctgataaatagccgaggacaatctcatcggcatccatggcgggcagcagcagctcgaaggagatagtcgacgcggtggagaagtggatggcgttccccacctccggcggcggcggcgccaccgccggcttggagatcgtcgccgaggatgcgcctagcggaagcagcggcgcccaccagcagcaggcgtggcgtccggtggcgccggcgacggcggggcgcgacagcggcggcacggggagcggcaagtcgtcggtggacggcggcgtcgggcgcgcgtcgcacgactccctgccgcgggtgtcgcaggagctcaaggacgcgctgtcgagcctgcagcagacgttcgtggtgtccgacgcgacgcgcccggactgccccatcatctacgccagcgaggggttcttcaccatgaccggctactcccccagggaggtggtcggccgcaactgccgcttcctccagggccccgacaccgacgccgccgaggtggccaagatccgcgacgccgtcaagcacggccgcagcttctgcggccgcctgctcaactaccgcaaggacggcgccccgttctggaacctcctcaccgtcacccccatccgcgacgacaacggcaaggtcatcaagttcatcgggatgcaggtggaggtgagcaagtacacggaggggctcagcgacaagcggatgcggccgaacgagttgccggtgtcgctcatccgctacgacgagaggcagaaggacaaggcgatgtcgtcgatgacggaggtggtgcagacggtgaagcagccgcgcggggcgcgcgcgccggccgacgcggcgctgctgacgccgcccaagatgagcgacgcggacaagatggccgccatgtcgccggtcgtggcacccggcactccctcgggcggaggaggaggagccgggtccttcaagtcgccgctctgggacctgaagaaggaggagtcccgcctgagccggctcgccagcggccgcaagtccggccgctcctccctcatggggttcaagatcgggaagaggagctcggtggggagcagggaggcgccggcggtggtggaggagccggcgccggcgccaccgccggcgccggaggtggtggagaggacggacagctgggagcgggcggagcgggagaaggacatccggcaggggatcgacctggccaccacgctggagcgcatcgagaagaacttcgtcatcaccgaccccaggatcccggacaaccccatcatcttcgcgtcggatagcttcctggagctgacggagtacacgcgggaagagatcctgggaaggaattgcagattccttcaagggccggagaccgaccagggcacggtggacaagatcagggaggccatcagggagcagaaggagatcacggtccagctaatcaactacaccaagagcgggaagaagttctggaacttgttccaccttcaacccatgcgcgaccagaagggggagcttcaatacttcattggtgtgcaacttgatggaagtgatcatgttgaacccctcaggaaccgcctttcggagaatactgagatacagagtgccaaattggtcaaagctacagcagagaatgtggatgatgcagtcagggagcttcctgatgccaacttgagaccagaggatttgtgggcaattcactcaatgcgtgtttctccaaaacctcacaaacggaataacccttcttggatagctatagaaaaggctacaaatttaggggagaagattggcttgaaacacttcaagcctgtaaaacctctcggctgtggtgacactggcagtgtgcacttggttgagctacaaggaagtggtgaattatttgcaatgaaggccatggacaagtcagtgatgttgaaccgcaacaaggtacatcgagcttgtattgaaagagaaatatacgcactattggatcatccatttctcccaacattgtatacttcatttcagacgccaacacatgtttgtctcataacagacttttgtccgggaggagaactctttgcagtgcttgataggcaacccatgaaaattttcagggaagaatgtgcaaggttttatgctgcagaggttgtaattggtctcgagtaccttcattgcctaggtattatataccgtgatctgaagccagaaaacattttgctccaagcagatgggcacattgtactgactgattttgatctttcatttttgacgacttcaaaaccccacgtgataaaaaattccacatcattaaaacgaagaaggtcacaagaatttctccccccaacatttgtctcagaaccttccactccatcaaattcatttgttggtactgaagagtatatcgctccagaggttataacgggtgcagggcatacaagtgcaatcgattggtgggctctcggaattctattgtatgagatgctgtatgggcgtacacctttccgaggaaagaacaggaaaaagacattttataacatactgcacaaagaccttacatttcccagtagcattccggttagtcttgcagcaaagcaattaatccatggattacttcagagagatccttcaaatcgtataggttcaaatgctggtgcaaatgacatcaagcaacattccttttttcaagacatcaattggccactcatacgttgcatgagcccccctgaactagatgttcctctgaaactaattggcaaggaaactcaaccaaaagcgaagcctgatgaagatgttcccctaaatcttgatacattttaagatcaaactggagcagttctttttcctgtatagtaataagaggcttcatgtgatgttagcattgttgagtgttttcagtctgagctgcctcaaaatcgtgtacatgattattcttttggttaggtaaagatcttagtacttcacataaataggatatattcttgtaaagcttatactcttttcttggagatgattcaataaagtagtagtgtttataataaaaaaaaaaaaaaaaa

SEQ ID NO: 385136 - DNA, 3401 bp, Oryza sativa
  unsure (1)..(3401): unsure at all n locations
ggccacgcgtcgactagtacgggagggggggggggggcaaagaagaggaatttaattataagaggaagagggagaagaagagcttaggtacaggctccagtacaagagatcgatcgagagacagaggatcggagaggaggaagaaggagaatccaagtactgggaggcaattaatttgagttgagatcgacttgagagctagcagaggctcatctcatctaggccagcagaggctcttcgctcgcttatttcatccatggcttccaaaggcacagaaggaggccatggtggcgtggagagaaaggagcagcagcagcagaggggttaccagctgccccgtgactcccggggatcactcgaggtgttcaacccctcatccgcttcctccttccgcactgctgctgccgcccccaagtccgcctcccccttccttgctattcccgacagggaagaggataatgtggtggcacagcagcgggcagcagagtggggcctcgtcctccagaccgaccaccacacaggcctcccccagggcgtctccgcacgaccctcctctggctccgcacgcaccagctccgaggacaccccacagcaacagcagagcgccgccgccatcccacgggtgtcggaggagctacgggcggcactatcagcgttccaacagacgtttgtggtgtctgatgccacccgccccaaccaccccatcatgtacgccagcgctggcttcttcaacatgaccggctacacctccaaggaggttgtcggcaggaactgccgcttccttcaaggctctggcaccgacccccatgagattgacaagatcaggcaagccctcgcaaatggctccaactattgtggccgcatcctcaactacaagaaggacggcacgccattctggaacctcttaaccattgcccctatcaaggatgaggacggcaggctcctcaagttcatcgggatgcaagtggaagttagtaaatacactgaagggaaaaaggatactgttgttcgtccaaatggactttcagaatcactcatcaaatacgatgctcgacagaaggatcacgcccgtagctcagtgtctgagctcttgttggctctcaaaaatccacgctcattgtcagaatcaagcaataacaccttaaaaagaaaatcacaagaatccctaagcatgtcaatgaccgaagttcctagtaagagaagctctgaaagtggatctcgccgaaattctcgtagcggaacaaggagctcgcttcagaagatcaatgaagtacctgatcaagggaatagaactagaaaatctggtctgcgtgcatttatgggttttcttggtatgggccatggaagtgtagagaagaacatgctgaaacctagagatgaagatccactgatcgatagtgatgatgaaagacctgagagctttgaagatgagtttaggaggaaagaaatgaggaggggtatagacttggctactacacttgaacgtattgagaagaattttgtcatcacagatccaaggttgcctgataatcccattatatttgcatccgatagctttctgcaattgacagaatacaaccgtgaagaaatattagggagaaactgcaggtttcttcaaggccctgaaactgatcgtgcaacagttaggaagataagagatgccatagataaccaggcagaggtcacagttcagctcataaattatacaaaaagtggtaaaaagttttggaacctctttcacttgcaaccaatgcgtgatcaaaagggtgatgttcagtactttattggggttcaattggatggaactgagcatgttcaggatgatgctgcaaaagagggagtcgtgctggttaagaaaaccgcagataatatcgatgaggctgcaaaggaactcccggatgctaatttgagaccggaagatctatgggctaaccactcaaaagtagtcctgccaaatccacatatgaaggatactgcatcatggagagccatccaaaaggttctcgagagtggtgaaagtattggtttaaaacattttaggccagtaaaaccattaggatctggtgacactggaagtgtacacttggtagagttgttgaatacaggagaatactttgccatgaaagctatggataaaagcatcatgcttaaccgcaataaggttcacagagctactgctgaacgccaaatccttgatctattagatcacccattccttccaacattatatgcatcatttcagacaaaaacgcatatatgcctcattactgactactgcccgggtggtgagctctttgtgcttctagataatcaacctctgaaggttctacatgaagatgcagtcaggttctatgctgccgaagtggttgttgcactagaatacctacattgccaaggtataatataccgagacttaaaaccagagaatatcttacttcatagagatgggcacatctcccttacagacttcgatttgtcttgtctaacatcttgcagaccgcaggtctttcttcccgaagatgctgatgagaaaaaagggagaaaaaacgggagttaccccatattttttgctgaacctatgcgagcatccaattcatttgttggcacggaggagtacattgcgcctgagattattacaggagctggccatacaagcgctgttgattggtgggctctagggattcttctatatgaaatgttgtatggttatacaccttttagaggaaaaacgaggcaacggacatttgctaatatcttgcacaaggatatcagatttcctgctagtatatcggtcagcctagcggcgaggcagctaatgtataggttgctacatagggatcctgccaacaggctagggtcctacgagggagccaatgagataaaaggacatccctttttccgtggtataaattggcctcttatacgcgccacggcgcctccaaagttggagatcccactattttccaaggatgacatggagaagaagggactagtaacaaataaccgcacggatatgttctgaagcccctgatgatgaccttcaataaaagagagggacatatattgttgcttgctttgcgtccgtaggccaagattaagattatgtcatgtaaatatgtaatgtaccgtacagaccttgttgtgtttgaacctagtatgcgatccatcatcttaataagatgcaatgcagcgcaatgtgtgccagtgaacagtaatgagcttgacttgagtttatagtagtctagtatagtgagtagaggaaaaaaagagtaaattgtattgacggtacgtaaacttgtcaagtgggtgcaatttagtatacgaacttgtaaaacactcatttggatgtatgaatttgtttgatgtgtgtgaaccaagaccnnnnnnnnnnnnnnnnnnnn

SEQ ID NO: 385137 - DNA, 477 bp, Oryza sativa
  unsure (1)..(477): unsure at all n locations
gaggaatttaattataagaggaagagggagaagaagagcttaggtacaggctccagtagctagccagtccagtccaagagatcgatcgagaaacagaggatcggagaggaggaagaaggagaatccaagtactgggaggcaattaatttgagttgagatcgacttgagagctagcagaggctcatctcatctaggccagcagaggctcttcgctcgcttatttcatccatggcttccaaaggcacagaaggaggccatggtggcgtggagagaaaggagcagcagcagcagaggggttaccagctgccccgtgactcccggggatcactcgaggtgttcaacccctcatccgcttcctccttccgcactgctgctgccgcccccaagtccgcctcccccttccttgctattcccgacaaggaagagggataatgtggtggcacagcaagcgggcagcagagtggggcctcgtnctnc

SEQ ID NO: 385138 - DNA, 3036 bp, Oryza sativa
  unsure (1)..(3036): unsure at all n locations
ctcgccagctctgctcttcgagatactctcggtctgcacctcagcacacatggaggctgtaatcctcgctgtctcaaagattggttctgttttagtggaggaagccaccaaagctgctataaccaagctatctgaaaaagctacaaatcttaaggaactgccatcaaaggttgaggaaatagaggatgaactgaagacgatgaacaatgttataaaacagatgagtacaacaaatcttacagacgaggttgtcaagggttggattgcagaggtgcgaggtctggcccaccgtgttcaggacataatggacaaatattcataccatgctcttaaattggaagaagaaaattctgtcaagaaactcttcaccacaccgaattatgtcacggttttcagtgaaattgctgaagagattagcaagatagagaaaaaaattgaaaatgttgcaacgcggaaaaaacggtggcagcagcagtcccaccacactcccaatccgcttgcagatattgaaaggaaacggtcccaagactgccttctagctccagatgatctagttgggatagaagacaacaggaaactgttgactgactggttgtactccaaagagcaagataacacaataataacagtatctggtatgggtggattggggaaaaccaccctggtcaacaatgtatatgagcgggagaagaacaatttcgaagttagtacttggattgtcgtgtcacagtcatatgatgtcgttgatttgctgaggaaattgcttaggaagattgtgcctgatgatcaaacacagctattagatttggatgctcatgacttgaaaattagaataaaggaaaagcttaaggatgaaaattttctaattgtattggatgatgtctggaaccgagaagcatacactcaaatagcagatgcattcccaaacttccaagcaagtcgcataatcatcacaacacgacagggtgatgtagcaactcttgctcagtcagcacgccaactcaaactcaacccattggagcacactgacgcgcttgaactcttctgtagaagggctttctacagaaactgcaagtgtccacagaaccttgagaaactgactaatgatatagtagttaggtgccaaggtctgccactggcaatcgtatctataggtggcctattgtcttcattgccaccagagaatcatgtctggaatgaaacatacaagcaacttcgaagtgagctcacaaaaaacaataatgttcaagcaattctaaatatgagctatcatgacttaccgggagatcttagaaactgcttcttgtattgtagcctgttccccgaagatcatgaattatcacgtgagaccgttgtacggttgtgggtcgcagaagggtttgcagtacaaaatgaagaaaacacaccagaggaggtggctgaaaaatatcttcgtgaattgatacaaaggaatatgttggaagttcttggaaatgatgagctaggcagggttagtacctttaagatgcatgacctcgtgcgggacctggctctttctattgctaaagaggagaagttcggctctgcaaataattatgacactatggagaggatggataaggaagttcgtcgcttgtcatcatatggatggaagggcaaacctgtgttgcaagttaaattcatgcgtctccggaccctagtggcacttggaatgaaaacaccctctcgtcacatgttatcctcaattttgtctgaatccaactatcttactgttctcgagttgcaagattctgaaataactgaagtgccagcatccataggagagctatttaatctacgctacatcggcctgcagcgcactagagtcaaatcacttccagaatctattgggaagctctccagcctcctgactctcaacatcaagcaaaccaaaatacaaaagctaccacaaagcattgttaagattaagaagctgaggcaccttctagctgacagatatgaagacgagaagcagtcagcgtttcgctatttcattggaatgcaagcacccaaagagctatccaacttggaagaactccagacccttgagactgtggaagccagcaaagaattggctgagcagttgatgaaacttatgcaactacggagcgtgtggattgacaacataagaactgatgattgtgcaaatctttttgctacactatcaaagatgccacttctttccagcttgcttctatctgcaagtcatgaaaacgagacactttgcttggaagctctcaaaccagaatcagaggagcttcataggctgattgtcagagggtgctgggcagctaggacacttgagtacccaatatttcgtgaccatgggaaaaatatcaagtatctggccataagctggtgccgtcttcaggaagatcctctactcctccttgcaccctatgtgccaaaccttgtctttcttagccttaacagggtgaatagtgcaagcaccttggttctttctgcagattgcttccctcagctgaagacacttgtcttgaagcgtatgcctgatgtaaaccacttggagattataggcggtgccctccaacacattgaaggtttatatgttgtgtcattgccaaagttggacaatgtccctcaaggcattgagtctcttaggtatctgaagaagctgtggctcttgggtctgcataagaatttcaggtctcagtggcaaaaaaatggaatgcaccaaaagatgcaacatgttccagagctgcatgtcaaggactagaaactttgcttacttttgcagtattatttctgtctggtgattatgggctcagccacattatgcatttagtcttttccaacaaatgatcagtttatgacagatgagctagcggcaccactacatcgcaacctcgttattggaaataagtcctgaaatattggctttcatggccatcaggaaactactttgtcatatgtcctattgtttttgcttcacaactttgcagaatttatgaaactggtccttttattgttgatnnnnnnnnnnnnnnnnnnnnnnnn

SEQ ID NO: 385139 - DNA, 1669 bp, Oryza sativa
  unsure (1)..(1669): unsure at all n locations
cgagtcggctgcactgatcgattccatcactctctctctctcgcctgctcgcggttgcctgtgcgttcgtctcgcgatttctcctcctcctcctgggatcatggcgatgtggagggcggcggcggggcatcttctcggccgcgcgctcggctccagggccgcgcacacatcagcaggcagcaagaagatcgtgggtgtgttctacaagggcggcgagtacgccgacaagaatcccaacttcgtcggctgcgtggagggcgctctcggcatccgcgaatggcttgagtccaaggggcatcactacattgtcaccgacgacaaggaggggctaaacagcgagctggagaagcacattgaggatatgcatgtcttgatcaccacccctttccacccagcctatgttagcgcagaaaggatcaagaaggcaaagaacctcgagctgcttctcacagctgggattgggtcagatcatattgatctgccagcagctgctgcagcaggtttaactgtggcagaggttaccggaagtaacactgtgtcggtggcagaagatgagctcatgcgcattttgattttgctcaggaacttcttgcccgggtatcagcaggttgttcatggtgaatggaatgttgctggcattgcctatagggcttatgatcttgaaggaaaaactgtggggactgttggggctggtcgtattggcaggctcttacttcagcgtcttaagccctttaactgcaacctgctgtaccatgacagacttaaaattgacccagaacttgagaaagaaattggggccaaatatgaagaggatctcgatgctatgcttccaaagtgtgatgtcattgtgatcaatacacctcttacagagaaaacaagaggtatgtttaataaagaaagaattgcaaagatgaagaaaggtgtaatcattgtgaataatgctcgaggagcaatcatggatacccaggcggttgcagacgcttgctctagtggtcaagttgcaggatatggtggtgatgtctggttcccccaaccagcaccaaaggatcacccatggcgatacatgcctaatcatgccatgacccctcatatctctgggactacaattgatgcacagctgagatacgcagcaggagttaaggacatgctggacaggtacttcaaaggggaagacttcccggtgcagaactacatcgtcaaggaaggtcagctcgcgagccagtaccagtaataacccttccttgtgtgttgggtgtccatcctgtggccaccttcccgcagtgaagggaaacagagattcggataggaaccaaaacaccttgtgttgttgttgttgcctgagtgttccctgagaaactattggacaccggaaataatggatgcctgccatggcaaccatggctccgaagaataaaaagccctcggattaaacagtacaaaaaaaaaaaaaaatgtatgatcttttatgtgctttctgctctctgtttttgatgtgaattttctggtccagtactccagttgcacataacaattgtacttgtacctgagtacctccatgccnggggccgggggcaccctttgccttactgcctcggcagtcggctggagggctgcagtctgttatctatggaatctttggttagttgttgccaaaaaaaaaaaaaaaaaa

SEQ ID NO: 385140 - DNA, 1932 bp, Oryza sativa
  unsure (1)..(1932): unsure at all n locations
cccacgcgtccgcccacgcgtccgcccacgcgtccgctagcagaaacaaacccctctcactcccagatacctgctgctgccactagcccactaccatggatccttgcaagttccggccgtcgagctcgttcgacacgaagacgacgacgacgaacgcgggagctccggtgtggaacgacaacgaggcgctgacagtggggcccagggggccgatcctcctcgaggactaccacctgatcgagaaggtggcgcacttcgcccgggagcgcatcccggagcgcgtggtccacgcccgcggcgcctccgccaagggcttcttcgagtgcacccacgacgtcaccgacatcacctgcgccgacttcctccggtccccgggcgcccagacccccgtcatcgtccgcttctccaccgtcatccacgagcgcggcagcccggagacgatccgcgacccgcgcgggttcgccgtcaagttctacacccgcgagggcaactgggacctcctcggcaacaacttccccgtcttcttcatccgcgacggcatcaagttccccgacgtcatccacgccttcaagcccaacccgcgctcccatgtccaggagtactggagggtcttcgacttcttgtcccaccaccccgagagcctccacaccttcttcttcctcttcgacgacgtcggcatccccaccgattaccgccacatggacggcttcggcgtcaacacctacaccttcgtcacccgcgacgccaaggccaggtacgtcaagttccactggaagcccacctgcggcgtcagctgcttgatggacgacgaggccacgctcgtcggcggcaagaaccacagccacgccacccaggacctctacgactccatcgccgccggcaacttccccgagtggaagctgttcgtccaggtgatcgacccggaggaggaggagaggttcgacttcgacccgctggatgacaccaagacatggccggaggacgaggtgccgctccggcccgtggggcgcctcgttctcaaccgcaacgtcgacaacttcttcaacgagaacgagcagctggcgttcgggccggggctggtggtgccggggatctactactccgacgacaagatgctgcagtgcagggtgttcgcgtacgccgacacgcagcgctacaggctggggccaaactacctgatgctgccggtgaacgcgcccaagtgcgcccaccacaacaaccactacgacggcgccatgaacttcatgcaccgggacgaggaggtggactactacccatcgcgccacgcgccgctccgccacgcgccgccgacgcccatcacgccgcgccccgtggtggggaggaggcagaaggcgacgatacacaagcagaacgacttcaagcagcccggggagaggtacaggtcgtgggcgccggatagacaggagaggttcatccgccgcttcgccggcgagctcgcgcaccccaaggtctcccctgagctccgcgccatctgggtcaactacctctcccagtgtgatgagtcgttgggggtgaagattgcgaataggctcaacgtgaagccaagcatgtgaagaaactaaggcacaagaatgcatcatctcttgttaattaattggagtactaccaaccaaataaggccagacaatgtcagatgcacgcatcttctgttgtcgttgggccatcttttgtatgcatcctattgttaattactagtacatgatatccaagtgatcatcagcaaggctacagaaattctgtaatacgataaattaaaagaaaccaaaatggagcctgcatatgtgtaacttaattaatgtactggcgtattaatgccactgctgcatgttgtaatactccatcaaagagtctattactattaagtatttaaattatcacttcaaaaaaaaaaaaanaaannnnnnnnnnnnn

SEQ ID NO: 385141 - DNA, 1825 bp, Oryza sativa
ccacgcgtccgcgtaacgtgaccgagcgcgccggacgccgtcgtcgttaattaatcagccatggatccctacaagcaccgcccgtcgagctcgttcaacggcccgctgtggagcaccaactccggcgcccccgtatggaacaacaacaactcgctcaccgtcggctcccgaggcccgatccttctggaggactaccacctggttgagaagctggccaacttcgacagggagcgtatcccggagcgcgtggtgcacgcccgcggcgccagcgccaagggcttcttcgaggtcacccacgacatcacccacctcacctgcgccgacttcctccgcgccccgggcgtccagaccccggtcatcgtccgcttctccaccgtcatccacgagcgcggcagcccggagaccctccgcgacccgcgtggcttcgccatcaagttctacacccgggagggcaactgggacctcgtcggcaacaacttccccgtcttcttcatccgcgacggcatgaagttcccggacatggtgcactcgctcaagcccaaccccaagtcgcacgtccaggagaactggcgcatcctcgacttcttgtcccaccacccggagagcctccacatgttcaccttcctcttcgatgacatcggcatccccgccgactaccgccacatggacggctccggcgtcaacacctacacgctcgtcaaccgcgccggcaagtcgcactacgtcaagttccactggaagcccacctgcggcgtcaagtcgctgctcgacgacgaggccgtcaccgtcggcgggaccaaccacagccacgccacgcaggacctctacgactccatcgccgccggcaacttcccggagtggaagctgttcatccagaccatcgaccccgaccacgaggaccgcttcgacttcgacccgctcgacgtcaccaagacgtggcccgaggacatcgtcccgctgcagcccgtggggaggatggtgctcaaccgcaacatcgacaacttcttctcggagaacgagcagctggcgttctgccccgggatcatcgtgccggggatctactactccgacgacaagctgctgcagacgaggatcttctcctactccgacacgcagcgccaccgcctcggaccaaactacctgctgctcccgcccaacgcgcccaagtgcgcccaccacaacaaccactacgacggcttcatgaacttcatgcaccgcgacgaggaggtcgactacttcccatcccgctacgatcctgccaagcacgccccccgctaccccatcccctccgccaccctcaccggccgccgcgagaaggtggtgattgccaaggagaacaacttcaagcagccaggggagaggtaccgttcatgggatccggcaaggcaagaccggttcatcaagagatggatcgacgcactctctgaccctcgcctcacccacgagatcaggagcatctggctctcctactggtctcaggctgacaggtctctgggtcagaaactggcgagccgtctcagcgcgaagccgagcatgtaaggagatcgatcagcgttgcaatctgcttcagtcacggaaggcctcagcctcactctatcggataataattgctactcatactctagcaataccgatcgatcgagtctattttggaaagaggacatatatgatttctatcaccgcacaattcgtgtaccaccatcatgtaataatctgtaacctgaagacacgtttctcctgatacttcatcattattgtaagcacaccttttatcaataatttatatacagtaaattaattatttaattataatccctttttttgg

SEQ ID NO: 385142 - DNA, 1047 bp, Oryza sativa
  unsure (1)..(1047): unsure at all n locations
gtgatgtggttaccaccaccacgcacaagtccctccgaggaccaagagctggcatgatcttctacaggaagggccctaagcctcccaagaagggccagcctgagggtgctgtctatgactacgaggacaagatcaacttcgcagtgttcccgtcactgcaaggtggtcctcacaaccaccagattgcagcccttgctgttgctctgcagcaaaccatgacacctggattcaaggcctacgcaaagcaggtcaaggccaacgctgtcgccattggcaagtatcttatgagcaagggctacaaaatgggtgactgatggaactgagaaccaccttgttctctgggatcttcgccctcttggcttgactggcaacaaggttgagaagatgtgtgacctttgcagcattacacttaacaagaatgctgtctttggtgacagcagtgcattggctcctggcggtgtccgcattggtactcctgcgatgacatccaggggtcttgtcgagaaggactttgagcagatcggcgagttcctccaccaggccgtgaccatctgcctcaacatccagaaggagcacggcaagctcctcaaggacttctccaagggcctggtgaacaacaaggacatcgagaacctcaagctggaggtcgagaagttcgccacctccttcgacatgcccggcttcaccctcgacagcatgaagtacaaggagtaggaaaacaaaaacacacacaaaccatggtcctaccgccgctaatcgtcgaccagctgtgctctcgtggaccgccgtcgtcgtcatcttcttcctcggcacaagctggccctgtgttacggattttgtctgcccatcgagatgataggtttcataaaacgctctctcccccaccctgctgctgcctctggtttggttgccaacctcatcccccatcggtttttttcctcctcttgtttctaatttctaggagctgtgccttttggaatcatggaatgtcaagtatttgccaataatcaatccgtttgatttctgccaaaaaaaaaannnnaaaaa

SEQ ID NO: 385143 - DNA, 363 bp, Oryza sativa
ccacgcgtccgcgcttgcccaagaaccaccaccaccacctcctcctcctcatccatggacgagccacctctcctcctcgccgccggcgaatagcaccggcggtatatccgatccgatcatctggtggtgtgttctacgggttgcagcttctttcgctggatatagggatcgatcggaagtttttttgggatatgtcggcggcggcggcggcggcggctgggcaggaggttaatccgggcgttgtggtggcggcggtggtggaggtggaatgggcggagtgcgcgtgctgcgggctgagggaggagtgcacgccgacgtacgcggcgggcgtgctgtctcgtgacggcggacggtggcattgct

SEQ ID NO: 385144 - DNA, 801 bp, Oryza sativa
tgtttacgccgtcgtcggccttcaagttcaacgggcgcgcgcttgagatcgagcgtgccatgtcaacaaccggcagtcccatgttcgtccccccccgcagcatcaaattctactcctacttcagggctctacagtgcacaacctagtactgctatgttcaggattactggagggtcttccacttcatgccctacctccatgagagcctcctcacacttcttcttccttttcgacgacgtcggtattcccacttatacctccccattggcggtctcggagtacaaatatctacaccttcgtcacccgcgacgccaaggccaggtacgtcaagttccactggaagcccacctgcggcgtcagctgcttgatggacgacgaggccacgctcgtcggcggcaagaaccacagccacgccacccaggacctctacgactccatcgccgccggcaacttccccgagtggaagctgttcgtccaggtaggtgatcatccagaaattaacgcctatacgatctgagttcgaagccgcagtactccttctaattaattatttaatactgttaggtgatcgacccggaggaggaggagaggttcgacttcgacccgctggatgacaccaagacatggccggaggacgaggtgccgctccggcccgtggggcgcctcgttctcaaccgcaacgtcgacaacttcttcaacgagaacgagcagctggcgttcgggccggggcttgtggtgcccgggatctactacttcgacgacaagatgctgcaatgcacggtgttcgcgtacgccgacacg

SEQ ID NO: 385145 - DNA, 321 bp, Oryza sativa
gaacacaaacacccccaaaccatggtcctaccgccgctaatcgtcgacggcggtccacgagagcacagctggtcgacgattagcggcggtaggaccatggtttgtgtgtgtttttgtttgcccatcgagatgataggtttcataaaacgctctctcccccaccctgctgctgcctctggtttggttgccaacctcatcccccatcggtttttttcctcctcttgtttctaatttctaggagctgtgccttttggaatcatggaatgtcaagtatttgccaataatcaatccgtttgatttctgccaaaaaaaaaaaaaaaa

SEQ ID NO: 385146 - DNA, 999 bp, Oryza sativa
ccacgcgtccgcccacgcgtccgcccacgcgtccgccacgcgtccgcggacgcgtgggggccggaggacgaggtgccgctccggcccgtggggcgcctcgttctcaaccgcaacgtcgacaacttcttcaacgagaacgagcagctggcgttcgggccggggctggtggtgccggggatctactactccgacgacaagatgctgcagtgcagggtgttcgcgtacgccgacacgcagcgctacaggctggggccaaactacctgatgctgccggtgaacgcgcccaagtgcgcccaccacaacaaccactacgacggcgccatgaacttcatgcaccgggacgaggaggtggactactacccatcgcgccacgcgccgctccgccacgcgccgccgacgcccatcacgccgcgccccgtggtggggaggaggcagaaggcgacgatacacaagcagaacgacttcaagcagcccggggagaggtacaggtcgtgggcgccggatagacaggagaggttcatccgccgcttcgccggcgagctcgcgcaccccaaggtctcccctgagctccgcgccatctgggtcaactacctctcccagtgtgatgagtcgttgggggtgaagattgcgaataggcccaacgtgaagccaagcatgtgaagaaatctaaggcacaagaatgcatcatctcttgttaatcaattgaaggtccacccaccaataaggccagacaatgtcagatgccggcatcttctgttgtcgttggcccatcttttgtatgcatccgtattgttaattcgtagtacgtcatatccaagtgatcataggctaggttacacgcactctgcaacaccatgattctgcatctggcttggttgaccacctcatcccccatcggtttttttcgctcctcttgtttctaatttctaggagcctgtgccttttggaatcatggaatgtcaagtatttgccaataatcaatccgtttgttttctgcct

SEQ ID NO: 385147 - DNA, 775 bp, Oryza sativa
  unsure (1)..(775): unsure at all n locations
ccgcccganggacgaccaggacacgctcggggttgtttggagccatagccgcggttcccaggagctgtacgactccatcgccgccggcaacttccccgagtggaagctgttagtccaggtgatcgacccggaggaggaggagaggttcgacttcgacccgctggatgacaccaagacatggccggaggacgaggtgccgctccggcccgtggggcgcctcgttctcaaccgcaacgtcgacaacttcttcaacgagaacgagcagatggcgttcgggccggggctggtggtgccggggatctactactccgacgacaagatgctgcagtgcaaggtgttcgcgtacgccgacacgcagcgctacaggctggggccaaactacctgatgctgccggtgaacgcgcccaagtgcgcccaccacaacaaccactacgacggcgccatgaacttcatgcaccgggaccaggaggtgggctactacccggcgagccacgcgccgctccgccacgcgccgccgacgcccatcacgccgggccccgtggtggggaggaggcagaacgcgacgatacacaagcagaacgagttcaagcagcccggggagaggtacaggtcgcgggcgcctgatagacaggagagggctaacgaccggtatgccggtgatgtatgagacattacgggctcctaaaggttccacgcgagatgggtcaaatacctggagcaaggtgaagaggacaaagcataaataattgccatgatacaaaaacagaaggcgaat

SEQ ID NO: 385148 - DNA, 748 bp, Oryza sativa
aacaaagaagaagaagaaagaagaagcagcagcaaaaaagttgatcagttaattagcaagtgtgttcttctttcttttggtgagagagagagagagagagagagagagagagagagagagagagatctcagaatggtgaatccaggaagaacagctagggcactctgcctcctatgccttgctctcctcctgctaggtcaagatacccattccaggaagctcctgttgcaggagaagcacagccatggcgtcggcaacggcacaaccaccacccaggaaccaagcagagagaatggagggaagtacaggttccaataacaatgggcagctgcagtttgattcagccaaatgggaagaattccacacggattatatctacacccaagatgtcaaaaagccataatggctgttcatttatgatttgaactagtactagtagcttataccttctgcgcgtcttttgttcgtttggagaggggattttcttgggatttagcatatgaactaattaaattaaatcccaggcaaatcccactcagcccattttgtgcagaagttgtcagtgttgcactgtataattatttagtcatacacaactactcctggtaactactcctatcttcgatgaattttctggttttgccagacgtgacaatagtccagtagcatgcagtaccctctcagaatccctgtaatttagcaaaaaaaaaaggaagaaaagaaaagaagcttccctactactttctcc

SEQ ID NO: 385149 - DNA, 1031 bp, Oryza sativa
  unsure (1)..(1031): unsure at all n locations
cccacgngtccgaagcaatcaagcgacgataattagagcactcgcgacctctccgacgatctccagctcactgcttttaggttctcaaactctgatttcctctctactctgtagtgcaatggctgctccattcgctctcgtcagccgtgtctcgccagcgggcgcctccccatccgcgccgcctggaggagggcgaggccgacggtcgggctcccgtcctcggggagggcccgccagctcgccgtggcctccgcggcgcaggagaacagggacaacaccgccgtcgatgtccacgtcaaccaggacggcgggaaccagcaggggaacgccgtgcagcgccgcccgcgccgctcgtcggcgttggacggcatctccccgttcggcctcgtggacccgatgtcgccgatgcggacgatgcggcagatgctggacacgatggaccggattttcgacgacgtcgcgctggggttccccgccacgccgcggaggtcgctggcgacgggggaggtgcggatgccgtgggacgtcatggaggacgacaaggaggtgaggatgcggttcgacatgccgggcctgtcgcgggaggaggtgaaggtgatggtggaggacgacgcgctcgtcatccgcggggagcacaagaaggaggagggcgagggcgcggagggctccggcgacgggtggtggaaggagcgcagcgtgagctcctacgacatgcggctcgcgctccccgacgagtgcgacaagagcaaggtccgcgccgagctcaagaacggcgtgctgctcgtcaccgtgcccaagacggaggtggagcgcaaggtcatcgacgtgcaggtccagtagacgaatcgctgctactactactgaacgatcactctggaggatgtgagcctgtgagcgtgagggtttaagcagtgtgaggtttgaaaaagtcgtgtactagaggttgtaattactcagcgaacgagcgaatgaatggaataatgctagtatgagataaaaggtttggttgctctcaaaaaaaaaaaaaaaaa

SEQ ID NO: 385150 - DNA, 2102 bp, Oryza sativa
tatttttgtttttgggtcgcactgttcgatcgtagcatccatgaccactgtggcatcgctgtctttgctgccgcacttgctcatcaagccttccttcaggtgttgctccagaaagggtgttggtagatatggaggaatcaaggtgtatgcggtgctcggtgatgatggagctgactatgcaaagaacaacgcatgggaggccttgttccatgtcgatgacccggggccaagggttccaattgcaaaaggcaagttcttggatgtcaaccaagctcttgaggtggtccggttcgatatccagtattgcgattggagggcgcggcaggacctcctcaccatcatggttcttcacaacaaggtggtagagggttcttaatcctttagcaagggagttcaagtcaattggaaccttgaggaaagagcttgcagaattacaggaaggattggcaaaagctcacaatcaggttcatctgtcggaaactagagtatcatctgcccttgataagttggcacaaatggagacccttgtcaacgacagactgttgcaagatggaggctctagcgcatctacagccgagtgcacttcccttgctccacccacgcgtccggcgtcccgtgttgtaaacaagaaacctcctcgccggagtctgaacgtgtctggtccagtgcagccatacaatcccagtctgaagaacttctggtacccagttgctttctccagtgacctaaaagacgatacaatggtgccaatagattgttttgaggagcagtgggtaattttccgaggaaaggatgggagacctggatgtgttatgaacacatgtgctcacagagcttgccctcttcatcttggctcagttaatgagggcagaatccaatgcccttaccatggttgggagtattcaactgatggaaaatgtgagaaaatgccatccacaaagatgctcaacgtgcgcatccggtcattaccatgctttgagcaagaaggaatggtttggatatggcctggcaatgacccaccgaagtcgactatcccttctctgctgcctccttcaggatttacaattcacgcagagatagtgatggagctaccagtggagcatggacttcttctggacaatctattagatcttgctcatgctccttttactcatacatccacctttgccaagggttggagtgttccaagcttggtgaagttcttgacaccttcatctgggcttcaaggatactgggatccatacccgatcgacatggaatttcgaccaccatgcatggtgttgtcaaccattggcatctcaaagcctggaaaactagaggggaagagcaccaagcaatgttcgacgcatctccaccagctccatatctgtttgccctcctctaggaataaaaccaggctgctctaccggatgtctctcgacttcgctccatggatcaagcatgtccctttcatgcatatactatggtcacattttgctgagaaggtcttgaatgaggatcttcgactcgtgctcgggcagcaagaacggatgatcaatggcgcaaatgtctggaactggccagtatcatatgacaagcttggtatccggtatcggttgtggagagacgccattgagaggggagtagacaggttgccattcagtaaccaaagtgagagtggatcatagtagctgcattgccaatagcctcttttcaattcttgtcgtatttcttggcgagatgaagatgaagatgaagatgatgatggccagaactagtcagtggatgtatatgcacagtttgtttaggcgtgcgtccctgcatggttggttcaccatctccctgagcttcgttgcagattgaattgggttctggagaggaaaggctaatggaaggagagaatgataggcgacgtcattctgtgtaattttaagtgtacactagcgacagcatcacgggatgcaattgtaatctgaggttgatttgtttttcttcttttttttttcctccccttttacccatgtaaaagtcgatcgcatgtcacgctatgatgcatatatatgatcatactattgattattgagccatgaagaacatgtagcacgttaatcacggacgcgtgg

SEQ ID NO: 385151 - DNA, 1422 bp, Oryza sativa
  unsure (1)..(1422): unsure at all n locations
cgaacactccatttggttgtcattttcaactataatccaccacaactcgtgcaacatcagctcactcgtgttcccaaccgcgacaaagcttcacagatggaggctcagaaccaagaggtcgctgccctggtcgagaagatcgccggcctccacgccgccatctccaagctgccgtcgctgagcccatccgccgaggtggacgcgctcttcaccgacctcgtcacggcgtgcgtcccggcgagccccgtcgacgtggccaagctcggcccggaggcgcaggcgatgcgggaggagctcatccgcctctgctccgccgccgagggccacctcgaggcgcactacgccgacatgctcgccgccttcgacaacccgctcgaccacctcgcccgcttcccgtactacggcaactacgtcaacctgagcaagctggagtacgacctcctcgtccgctacgtccccggcattgcccccacccgcgtcgccttcgtcgggtcgggcccgctgccgttcagctccctcgtgctcgccgcgcaccacctgccggacgcggtgttcgacaactacgaccggtgcggcgcggccaacgagcgggcgaggaggctgttccgcggcgccgacgagggcctcggcgcgcgcatggcgttccacaccgccgacgtggcgaccctgacgggggagctcggcgcgtacgacgtcgtgttcctggcggcgctcgtgggcatggcggccgaggagaaggccggggtgatcgcgcacctgggcgcgcacatggcggacggcgcggcgctcgtcgtgcggacggcgcacggggcgcgcgggttcctgtacccgatcgtcgatcccgaggacgtcaggcgtggcgggttcgacgttctggcggtgtgccacccggaggacgaggtgatcaactccgtcatcgtcgcccgcaaggtcggtgccgccgccgccgccgccgcggcgcgcagagacgagctcgcggactcgcgcggcgtggttctgccggtggtcgggccgccgtccacgtgctgcaaggtggaggcgagcgcggttgagaaggcagaagagtttgccgccaacaaggagctgtccgtctaacagccggacgatcgaaaggcgcactatattatggcaataaatcatttgattatacttatgctgcatttgcgaagctaaggtatactatgcaagccatatgtttgtgttcgtacgtgttgtttgggacgtacagttgtgttgttgtacgtcgtgaagtactgaagtgttcacagtagatcacaagttcacagcaatcaatgaggaccctgtaagccagtgtaaacgaggaacatgccatctgtgtatgacagtgagaaattatataagaaaaacattttgtgacaaaaaaaaaanaataannanaaaaannnnnnnnnnnnnnnnnnn

SEQ ID NO: 385152 - DNA, 490 bp, Oryza sativa
gcgcaccacctgccggacgcggtgttcgacaactacgaccggtgcggcgcggccaacgagcgggcgaggaggctgttccgcggcgccgacgagggcctcggcgcgcgcatggcgttccacaccgccgacgtggcgaccctgacgggggagctcggcgcgtacgacgtcgtgttcctggcggcgctcgtgggcatggcggccgaggagaaggccggggtgatcgcgcacctgggcgcgcacatggcggacggcgcggcgctcgtcgtgcggagcgcgcacggggcgcgcgggttcctgtacccgatcgtcgatctcgaggacatccggcggggcgggttcgacgtgctggccgtgtaccaccccgacgacgaggtgatcaactccgtcatcgtcgctcgcaaggccgacccgcgtcgcggcgggcgggctcgccggcgcacgcggcgcggttccagtggtgagcccgccgtgcaagtgctgcaagatggag

SEQ ID NO: 385153 - DNA, 475 bp, Oryza sativa
  unsure (1)..(475): unsure at all n locations
cccacgcgtccgcccacgcgtccgcccacgcgtccgcccacgcgtccgcaagcattccacaagcttgccgttttccactgacagctcaagtgctcgtgcaacattagctgatcagctcgtgttcccaaccgcgacaaagcttcacagatggaggctcagaaccaagaggtcgctgccctggtcgagaagatcgccggcctccacgccgccatctccaagctgccgtcgctgagcccatccgccgaggtggacgcgctcttcaccgacctcgtcacggcgtgcgtcccggcgagccccgtcgacgtggccaagctcggcccggaggcgcaggcgatgcgggaggagctcatccgcctctgctccgccgccgagggccacctcgaggcgcactacgccgacatgcttcgcccgccttcgacaacccgttcgaccaacttgcccgtttcccgtactacggcaactacgtnaacctgag

SEQ ID NO: 385154 - DNA, 2317 bp, Oryza sativa
gagaagagagttttgtagcgagctcgcgcgaatgcgaagccaaccgagagaggtctcgataccaaatcccgatttctcaacctgaatcccccccccacgttcctcgtttcaatctgttcgtctgcgaatcgaattctttgtttttttttctctaattttaccgggaattgtcgaattaggcattcaccaacgagcaagaggggagtggattggttggttaaagctccgcatcttgcggcggaaatctcgctctcttctctgcggtgggtggccggagaagtcgccgccggtgaggcatggggatggaggtggcggcggcgcggctgggggctctgtacacgacctccgactacgcgtcggtggtgtccatcaacctgttcgtcgcgctgctctgcgcctgcatcgtcctcggccacctcctcgaggagaatcgctgggtcaatgagtccatcaccgcgctcatcatcgggctctgcaccggcgtggtgatcttgctgatgaccaaagggaagagctcgcacttattcgtcttcagtgaggatctcttcttcatctacctcctccctccgatcatcttcaatgcaggttttcaggtaaagaaaaagcaattcttccggaatttcatgacgatcacattatttggagccgtcgggacaatgatatcctttttcacaatatctattgctgccattgcaatattcagcagaatgaacattggaacgctggatgtaggagattttcttgcaattggagccatcttttctgcgacagattctgtctgcacattgcaggtcctcaatcaggatgagacaccctttttgtacagtctggtattcggtgaaggtgttgtgaacgatgctacatcaattgtgcttttcaacgcactacagaactttgatcttgtccacatagatgcggctgtcgttctgaaattcttggggaacttcttttatttatttttgtcgagcaccttccttggagtatttgctggattgctcagtgcatacataatcaagaagctatacattggaaggcattctactgaccgtgaggttgcccttatgatgctcatggcttacctttcatatatgctggctgagttgctagatttgagcggcattctcaccgtattcttctgtggtattgtaatgtcacattacacttggcataacgtcacagagagttcaagagttacaacaaagcacgcatttgcaactctgtccttcattgctgagacttttctcttcctgtatgttgggatggatgcattggatattgaaaaatgggagtttgccagtgacagacctggcaaatccattgggataagctcaattttgctaggattggttctgattggaagagctgcttttgtattcccgctgtcgttcttgtcgaacctaacaaagaaggcaccgaatgaaaaaataacctggagacagcaagttgtaatatggtgggctgggctgatgagaggagctgtgtcgattgctcttgcttacaataagtttacaagatctggccatactcagctgcacggcaatgcaataatgatcaccagcaccatcactgtcgttctttttagcactatggtatttgggatgatgacaaagccattgatcaggctgctgctaccggcctcaggccatcctgtcacctctgagccttcatcaccaaagtccctgcattctcctctcctgacaagcatgcaaggttctgacctcgagagtacaaccaacattgtgaggccttccagcctccggatgctcctcaccaagccgacccacactgtccactactactggcgcaagttcgacgacgcgctgatgcgaccgatgtttggcgggcgcgggttcgtgcccttctcccctggatcaccaaccgagcagagccatggaggaagatgaacagtgcaaagaaatgagaatggaatggttgatgaggagaatacatgtaaaatgtgacagcaaaagagagaaggcaagttttgggtttgtagagtttggctgctgctaatgagttgttgatagtgcctatattcttcagaacttcagatggtgcctcaccaaggcctaagagccaggaggaccttctgataatggttcgggatgattggtttgttctgtcaggatgaaccctagtgagtgacacagggtgatgtgctccgacaacctgtaaattttgtagattaacagccccatttgtacctgtctaccatctttagttggcgggtgttctttcctagttgccaccctgcatgtaaaatgaaattctccgccaaaatagatttgtgtgtataataattttgcttggttgatat

SEQ ID NO: 385155 - DNA, 738 bp, Oryza sativa
gacagcttcaggtcaattgctagaccttatcactactcacgagggagaaaaagatctaaacaaatataacataggagttcaccgccgcattgttcaatataagacatcctactattcattttatctgccggttgcttgtgcactgttgctatctggagaggacttgaccaaatatggtgctgtagaagacattcttgttaagatgggaatatactttcaagtccaagacgattatctagattgttatggtgaccccaaatttattggcaagatcgggactgacattgaagattacaaatgctcttggctagttgtgcaagcccttgagcgtgctgatgagagtcaaaagagcgttctatttgaaaattatggaaagaaagatccagcctgtgtggcaaaagtgaagagcctctacagagaactaaacctagaggcggtctttctggactatgagaacgagagttacaagaagttgattgcggatatagaagcccagccaagcatagctgttcagaatgttctgaagtccttcttgcacaagatctacaagagacagaagtagggggggtttctgtgcaggaagctgtccattgttgcatgtttcttctctagcaactgatgttgtatgttgcaatttgctgatcttggataataatgttgcaaggtgttatttcgggtgtgatggaccgcttggtgtagacattagacaataatacatgagctgtttgtcttgttatt

SEQ ID NO: 385156 - DNA, 2163 bp, Oryza sativa
  unsure (1)..(2163): unsure at all n locations
ggcttaaagcctatcgcaatggagtccatcgccgccgccacgttcacgccctcgcgcctcgccgcccgccccgccactccggcggcggcggcggccccggttagagcgagggcggcggtagcggcaggagggaggaggaggacgagtaggcgcggcggcgtgaggtgctccgcggggaagccagaggcaagcgcggtgatcaacgggagcgcggcggcgcgggcggcggaggaggacaggaggcgcttcttcgaggcggcggagcgtgggagcgggaagggcaacctggtgcccatgtgggagtgcatcgtctccgaccacctcacccccgtgctcgcctaccgctgcctcgtccccgaggacaacatggagacgcccagcttcctcttcgagtccgtcgagcaggggcccgagggcaccaccaacgtcggtcgctatagcatggtgggagcccacccagtgatggaggtcgtggcaaaggagcacaaggtcacaatcatggaccacgagaagggcaaggtgacggagcaggtcgtggatgatcctatgcagatccccaggagcatgatggaaggatggcacccgcagcagatcgatcagctccccgattccttcaccggtggatgggtcgggttcttttcctatgatacagtccgttatgttgaaaagaagaagctgcccttctccggtgctccccaggacgataggaaccttcctgatgttcaccttgggctttatgatgatgttctcgtcttcgacaatgtcgagaagaaagtatatgtcatccattgggtaaatcttgatcggcatgcaaccaccgaggatgcattccaagatggcaagtcccggctgaacctgttgctatctaaagtgcacaattcaaatgtacccaagctttctccaggatttgtaaagttacacactcggcagtttggtacacctttgaacaaatcaaccatgacaagtgatgagtacaagaatgctgttatgcaggctaaggagcatattatggctggtgatattttccagattgttttaagccagaggtttgagaggcgaacatacgccaatccatttgaagtctatcgagctttacgaattgtgaacccaagtccatacatggcatatgtacaggcaagaggctgtgtcctggtagcatctagtccagaaattcttactcgtgtgaggaagggtaaaattattaaccgtccacttgctgggactgttcgaaggggcaagacagagaaggaagatgaaatgcaagagcaacagctactaagtgatgaaaaacagtgtgctgaacatattatgcttgtagatttgggaaggaatgatgttggaaaggtctccaaacctggatctgtgaaggtggagaaattaatgaacattgaacgctactcccatgtcatgcacatcagttccacggtgagtggagagttggatgatcatctccaaagttgggatgccctgcgagccgcgttgcctgttggaacagttagtggagcaccaaaggtgaaagccatggagctgatagacgagctagaggtcacaagacgaggaccatacagtggcggccttggagggatatcatttgacggagacatgcttatcgctcttgcactccgcaccattgtgttctcaacagcgccaagccacaacacgatgtactcatacaaagacaccgagaggcgccgggagtgggtcgctcaccttcaggctggtgctggcattgtcgctgatagcagcccagacgacgagcaacgtgaatgcgagaacaaggcagccgctctggctcgagccatcgatcttgctgaatcagctttcgtagacaaggaatagagtctctctcaagagagttgattttgttagttcttgttcatggttcttctcgctgcatgtttagcaggaaaggtatcatcagtgagttgagagaagcaataagcctatgttgtcatgtgaatcgaataaactggaggttatggtcgtgagctattattagctgtgttcattagaaaggtatatgcttttagattgttttgtttggtggaggcatgtatagtgcgctctctggctaaatcaagcaagggcttaacaggggtattgtcaaaaaaaaaaagcggccgcgtgcaagttcttctccctatnaaccaaaanccaaaaaaa

SEQ ID NO: 385157 - DNA, 918 bp, Oryza sativa
ccctcccatggcgctctccctcaccaccgccttctcccacctctccctcccctccacctccaagttccacccgctccccctcctccacctccgcttcccctcctcctcctcctcccgccgcgccgcgcgcctcgcgctcgccgcctccgccgccgaggccgccgagcctgtcgaggtggaggaggcgcccgccgaggacggggcggatgaggtggtggccgtggaggacgagctgtccggaccggcgctgcgaaagtacgtgaagcagcggcttcccgggggcttcgcggcgcagcggatcaccgccacgggccgccgcaagacggccatcgcccgcgtcgtgctccaggagggcaccggaagggtgttcatcaacttccgcgatgccaaggagtatttgcaaggaaatccaatgtggatggagtactgcaaggtacccctggtgaccctagggttcgagaacagctacgacgtcttcgtcaaagttcacgggggtggtctctcgggccaagcccaggccatttgcctcggcgtcgcccgtgcactggtgaagatcagcaccgcaaacaaagttactctgaggggagaaggtttgctgacaagagacacccgtatagttgaaaggaagaaggctggtcttaagaaggcacgcaagcgcccgcagttctcaaagcgttagagtatgcacaaccttgttgttagactcatttaaaagttttacattccacagtttgtattggcccttctctgttattttctgtgcaaattatgtgctcctcaccacagacttgtaatcttcgttctctgtaagcaattttattgaggtcacaaaaggcaattatcttgaaatcattcctgatatctgatgagaacagctgctcacccttacatcctcatatagtcacataagacaattat

SEQ ID NO: 385158 - DNA, 1169 bp, Oryza sativa
ggatttcgggtcgatgaacatggacgagctgctgcggagcatctggacggcggaggagagccaagcgatggcgtcggcgtctgcggcggcggcggcggcggaggggggcctgcacaagcaggggtcgctcaccctgccgcgcactctcagcgtcaagacggtggacgaagtgtggcgggacttacaacgagaggcgtcgccgggggcggctgctgctgacggcggcggcggcggcggggagcaccatcagcccaggcggcagccgacgctcggggagatgacgctggaggagttcctggtcagggccggggtcgtcagagagaataccgctgcggcggctgctatggtagctgcggccgccgctccgccggtggctccgcggtcgattccggctgtcaacaacagctccatcttcttcgggaactacggaggcgtcaatgatgctgctgctgccgctgctggtgcgatgggtttctcaccggtggggattggggatccgaccatggggaataggctgatgtccggagtggcagggattgggggtggtgcgatcactgttgctccggtggatacatcagttggacaaatggattcagcgggcaagggggatggggacctgtcatcaccgatggcgccggtgccgtacccctttgagggggtgataagggggaggaggagcggtggtaacgtggagaaggtggtggagcggcggcagaggaggatgatcaagaacagggagtcagcagctagatctcgtgcccggaagcaggcttacacaatggagttggaagctgaagttcagaaactcaaggaacagaacatggaattgcagaagaaacaggaggaaattatggaaatgcagaaaaatttcttcccagaaatgcagaaaaatcaggtattagaggcggtcaacaatccttacggacaaaagaagcgttgcctaagaagaacattgacaggtccctggtaaaatttgagttattgataaccggagcttgacaagacacaccatattttaaccttaaggttcttgtacatattgtcaggatttcaaaactcatctctctgttgtaaattgatgatcaacagagtcgagtgtactagtgcttaacttgccctgtcaccttcaacttacagttctgcaagtcttctatcgtgctcttatgtcc

SEQ ID NO: 385159 - DNA, 2958 bp, Oryza sativa
cggcgcacacccacacaccgaccaccaggcagcgcctcctcgctttggctctcgcgtgaggagggtttaggtggaagcagagcgcgggggttgccgggggatccgatccggctgcggtgcgggcgagatggcggcgccggcgtctgcggttcccgggagcgcggcggggctacgggcgggggccgtgcggttccccgtgccagccggggcccggagctggcgtgcggcggcggagctcccgacgtcgcggtcgctgctctccggccggagattccccggtgccgttcgcgtggggggttccggggggcgcgtggccgtgcgcgcggcgggcgcgtcaggggaggtgatgatccccgagggcgagagcgacgggatgccggtttcagcaggttcagacgatctgcagttgccagccttagatgatgaattaagcacggaggttggagctgaagttgagattgagtcatctggagcaagtgacgttgaaggcgtgaagagagtggttgaagaattagctgctgagcagaaaccacgagttgtcccaccaacaggagatgggcaaaaaatattccagatggactctatgcttaatggctataagtaccatcttgaatatcgatatagcctatataggagactgcgttcagacattgatcagtatgaaggaggactggaaacattttctcgcggttatgagaagtttggatttaatcacagtgctgaaggtgtcacttatcgagaatgggctcccggggcacattctgcagcattagtaggtgacttcaacaattggaatccaaatgcagaccgcatgagcaaaaatgagtttggtgtttgggagatttttctgcctaacaatgctgatggctcatctcctattccacatggctcacgtgtaaaggtgcgaatggaaactccatctggtataaaggattctattcctgcctggatcaagtactctgtgcaggccgcaggagaaatcccatacaatggaatatattatgatcctcctgaagaggagaagtacatattcaagcatcctcaacctaaaagaccaaagtcattgcggatatacgaaactcatgttggaatgagtagcacggagccaaagatcaacacgtatgcaaactttagggatgaggtgcttccaagaatcaaaaagcttggatacaatgcagtgcaaataatggcaattcaagagcatgcatattatggaagctttgggtaccatgtcaccaatttctttgcaccaagtagtcgtttcgggaccccagaagatttaaagtcattgattgataaagctcatgagcttggtttagttgtgctcatggatgttgttcacagccatgcgtcaaataataccctagatgggttgaacggttttgatggtacagatacgcattactttcatagtggttcacgcggccatcattggatgtgggattctcgccttttcaactatgggaattgggaagttctaagatttctactatccaatgcaagatggtggctcgaggagtataagtttgatggtttcagatttgacggtgtaacctcaatgatgtacactcatcatggattacaagtagcatttacggggaactacagtgaatactttggatttgccactgatgctgatgcagtagtttacttgatgctggtaaatgatttaattcatggactttatcctgaggccataaccatcggtgaagatgtcagtggaatgcctacatttgcccttcctgttcaagatggtggggttggttttgattatcgccttcatatggctgttcctgacaaatggattgaactcctcaagcaaagtgatgaatcttggaagatgggtgatattgtgcacacactgactaacagaaggtggtcagagaagtgtgttacttatgctgaaagtcatgatcaagcactagttggtgacaaaactattgcattctggttgatggacaaggatatgtatgattttatggctctggacagaccggcaacacctagcattgatcgtggaatagcattgcataaaatgattagacttatcacaatggggttaggaggagaaggctatcttaactttatgggaaatgagttcggacatcctgaatggattgattttccaagagctccacaagtacttccaaatggtaaattcatcccagggaataacaacagttatgataaatgccgtcgaagatttgacctgggtgatgcggactatcttaggtatcgtggcatgctagagtttgaccgcgcgatgcagtctctcgaggaaaaatatgggttcatgacatcagaccaccagtacatatctcgaaagcatgaagaggataagatgattatatttgagaagggagatctggtatttgtgttcaacttccattggagtaacagctattttgactaccgtgttggttgtttaaagccagggaaatataaggtggtcttggactcagatgctggactctttggtggatttggcaggatccatcacactgcagagcacttcactgccgattgttcacatgacaacaggccctactcgttctcagtttattctcctagcagaacctgcgttgtctatgctccagcggaatgagaacaccaagaggcagcatgcaagtgtgtgcggctgctagtgcgaaggagcaagaaaaactacttgccagcaatctgtgaacggctttcctaggttctgcttcgatgaatgccggatagactagacagcttgcttttgtgctttgcgctcccaatttgtagttttagtttgtgagggaaagaaacgtttatttgtaattatctatggctgtcgaacggcgacgaaaccatgaaccccgtatatttgttggtaccgttcgaactgccagttatacatagttctgcacttctgtacatcttgtgatgcttgaatcttgatgcttagttaattagatcatgttatcttcaaaaaaa

SEQ ID NO: 385160 - DNA, 3017 bp, Oryza sativa
  unsure (1)..(3017): unsure at all n locations
cttgactccccccactcctccctcgtgctgctcctcctcgtcgctcggctcgaggcgcggcatttgcggcgggagggatctgcgcgcgagtgcgtgcgggcaggcggcgggggagcacgcaccgggggatggcgtcgttcgcggtgtccggcgcgaggctcggggtcgtgcgggcggggggcggcggcggcggcgggggtggcccggcggcgcgatccggcggggtggacttgccgtcggtgctcttcaggaggaaggactccttctcacgtggcgttgtgagctgcgcgggtgctcctgggaaggtgctggtgcctggcggtgggagcgacgacttgctgtcctctgcggaaccagacgtggaaactcaagagcaacctgaagaatctcagatacctgatgataataaagtaaaaccttttgaggaggaggaagagattccagcagtggcagaagcaagcataaaggttgtggctgaagacaaacttgaatcttcagaagtgattcaagacattgaggaaaatgtgactgagggtgtgatcaaagatgctgatgaaccaactgtggaggataaaccacgagttatcccaccaccaggagatgggcagaagatataccaaattgacccaatgctggaaggatttcggaaccatcttgactaccgatacagtgaatacaagagaatgcgtgcagctattgaccaacatgaaggtggcttggatgcattttctcgtggttacgaaaagcttggattcacccgcagcgctgaaggcattacctaccgagaatgggcacctggagcacagtctgcagcattagtaggtgacttcaacaattggaacccaaatgcagatactatgaccagaaatgagtatggtgtttgggagatttccctgcctaacaatgctgatggatcccctgctattcctcatggctcacgtgtaaagattcggatggatacaccatctggcgtaaaggattcaattcctgcctggattaagtttgctgtgcaggctccaggtgaaataccgtacaacggtatatattatgatccacctgaagaagaaaaatatgtattccaacatcctcaacctaaacgaccaaattcgctgcggatatatgaatcacatattggaatgagtagcccggaaccgaagataaacacatatgctaattttagggatgaggtgctaccaagaattaaaaagcttgggtacaatgctgtacagataatggcaatccaggagcactcttattacgcaagctttgggtatcatgttactaacttctttgcgccaagtagccgtttcggaaccccagaagacttgaaatctctgattgataaagctcacgagcttggtttgcttgtacttatggatattgttcacagtcatgcatcaaacaataccctggatggtttgaatggttttgatggtactgatacacattacttccatggtggaccacggggtcatcactggatgtgggattctcgcctgttcaactatgggagttgggaagttttaagatatttactgtcgaatgcaaggtggtggcttgaagaatacaagtttgatgggtttcgatttgatggggtgacctccatgatgtatactcatcatggtttacaggtggcatttactggcaactatggcgaatattttggatttgctactgatgttgatgcagtagtttacttgatgctggtgaacgatctaattcatgggctttatcctgaggctgtagccattggtgaagatgtcagcgggatgcccacattttgtattcctgttcaagatggtggtgttggttttgactatcgtttgcatatggctgtaccggacaaatggatcgaactcctcaagcaaagtgacgaatattggaaaatgggtgatatcgtgcacaccctaacgaatagaaggtggtcagagaagtgtgttacttatgcagaaagtcatgaccaagcactagttggtgacaagactattgcattctggttgatggataaggatatgtatgattttatggctctagacagaccttcaacacctcgcattgatcgtgggatagcattacataaaatgattaggcttgtcaccatgggcttaggaggcgaaggctatcttaatttcatgggaaatgagtttgggcatcctgaatggatagatttcccaagaggcccgcaaagtcttccaaatggctcggtcctcccaggaaacaactacagttttgataaatgccgtcgtagatttgaccttggagatgcagattatcttagatatcatggtatgcaagagtttgatcaggccatgcagcatcttgaggaaaaatatggattcatgacatctgagcaccagtatatatcgcgcaaacacgaggaggataaggtgatcatcttcgagagaggagatttggtattcgtgttcaacttccactggagtaatagctattttgactatcgcgtcggttgtttaaagcctggaaagtacaagattgtgttggactcagacgatggcctctttggtggattcagtcggcttgatcatgatgctgagtacttcactgctgactggccgcatgacaacagaccatgttcattctcggtgtacaccccaagcagaaccgccgtcgtgtatgcacttacagaggactaatgatcagctctgatcattgggggaacaactcaagggagttggtggtaatgacgccggaatacaactcaagtgaaaggtgaaaagaaaggctgccctgacgatgtgatttgaggggcttgtgtttcatcgccaatgccaggaagatgaggtagaaaagcctactgatgagctcctgttttcgagtgactcgtgaaggaaatagaccagggtgaacggcttttttcagagctataccaaacccatcctatgttgcgcattcgctgtagttttgtacataacgatatcggttggcatttgtatgtttatgaataatctgttcgacagaaatgtttttctccttgtatttagtgctcaaaaaaaann

SEQ ID NO: 385161 - DNA, 2797 bp, Oryza sativa
caagaaactccatcaaattccccagccaaaaacactcagataattttttttattagaaaaaaagaaaggagattagccagccagtctgctgctccatcctcagtgctcacgcactcactctgaggagtgaaatccaatccagcccactccggagttcctggaaaatcctcgcgaagtccgaagaaaaaaaatattaccactgccatttcttggtttcttgatagcttctcctagctgctgccgcccaatcatccgagagagcgagcaagtaagaaagattgattgattgcttgattgggagtgtcctttgggcgagctgtggtgggatttagcggcatgtcagcgtcgccgtcgtcgatgaagcggcgccggcgccggcgaggcgggggtgcggacggtggtgtggttcaggcgggacctgcgcgtggaggacaaccggcgctggcggcggcggcgcgggcggccggggaggttggtgccggtgtacgtgtgggcgccggaggaggacgggccgtactacccggggcgggtgtcccggtggtggctcagccagagcctcaagcacctggacgcctcgctccggcggctcggcgccagcaggctcgtcacccgccgctccgccgacgccgtcgtcgcgctcatcgagctcgtccgcagcatcggcgccacgcatctcttcttcaaccacctctacgacccgctgtcgctggtgagggaccaccgggtgaaggcgctgctgacggccgagggcatcgccgtgcagtcgttcaacgccgacctgctgtacgagccatgggaggtggtcgacgacgacggctgcccgttcaccatgttcgcgccgttctgggacaggtgcctgtgcatgcccgacccggcggcgcgctgctgccgcccaagaggatcgcgcccggcgagctgccggcgaggaggtgcccctccgacgagctggtgttcgaggacgagtccgagcgggggagcaacgcgctgctggcgagggcgtggtcgcccgggtggcagaacgccgacaaggcgctggccgcgttcctcaacgggccactcatggactactcggtgaaccggaagaaggccgacagcgccagcacgtcactgctgtcgccgtacctgcacttcggcgagctcagcgtacgcaaggtgttccaccaggtgaggatgaagcagctcatgtggagcaacgaggggaaccacgccggcgacgagagctgcgtcctcttcctccggtccatcggcctcagggagtactcgaggtacctcacgttcaaccacccgtgcagcctggagaagccactcctggcgcacctcaggttcttcccctgggtggtcgacgaggtgtacttcaaggtgtggaggcaggggaggacagggtaccctctcgtcgacgccgggatgcgcgactctagggccaccggctggctgcacgaccggatacgcgtcgtcgtctccagcttcttcgtcaaggtgctccagcttccatggcgctgggggatgaagtacttctgggacaccctgctcgacggcgacctcgagagcgaccggctcggctggcagtacatctccggctctctccccgatggccgtgagctcgaccgcatcgacaaccctcagcttgaaggatacaagtttgatccgcacggggagtatgtccggcgatggctgccggagctggcaaggctgccgacggagtggatacaccacccatgggacgcaccggagtcggtgctccaggctgcagggattgagctaggctccaactatcctctccccatcgtggagctggacgcggcgaagaccaggctgcaggatgcactgtcagagatgtgggagctcgaggccgcgtcacgcgcagcgatggagaacggaatggaggagggcctcggcgactcctccgacgtgccgccgatcgccttcccaccggagctgcagatggaagttgaccgagcaccggcccagcctactgttcacggaccgacaacggctggccggcgacgagaggatcagatggttcccagcatgacctcctcgctggtcagagctgaaacagaactttcagcggattttgacaacagcatggacagtaggccggaggtgccgtcgcaggtgctcttccagcctcggatggaaagggaagaaacagtggacggcggcggtggcggcggaatggtcggcaggagcaacggcggcggccaccaaggccaacaccagcagcaacagcacaactttcagactacaattcaccgggcacggggcgttgcgccgtctacgtcagaggcatcaagcaactggacttgggagagaaggcggcgtggtgcccgtctggtcgcctccggcagcgtcaggcccctcagatcactacgctgccgatgaagctgacattaccagtagaagttatttggacaggcatccacagtcgcatacgttgatgaactggagtcagctctcgcagtcattgtgagttcacacgcacggacaacaggctgggaagtggaaaattaatgctgattgtcagaattaatcattaggaaggtcgacattgagaagaattcatatgtaaattatcaccttttgtttgtctatagccttggtgtgcatgaatcaagtgatgaagcttccttgatgcaataatgattatgtaaagctagttttacagaacatttgtggtataggtttgctagttgtcaaaaggatatgtactatttgttagataagaggttattctagcattatgtcttagacttgtacattctccctttggtttattgtaatcttggtgtgaatagtc

SEQ ID NO: 385162 - DNA, 2004 bp, Oryza sativa
gtcgggaagagcacccaaaccctcgcttccgccctcgcaaaccctagcgcccggaggaggaggaggtgggttgcggtggtagtttgccgtccgccgatgtcgagcaacctagcagcctcccgccgctcgtcgtcgtcgtcctcggtggcggcggcggcggcggcgaagcgacccgcggtgggggagggaggaggaggaggaggagggaaggcggcagcgggcgccgccgcggcaaagaagcgcgtggcgcttagcaacatcagcaacgtcgccgctggtggtggcgccccagggaaggccggcaatgcgaagttgaatttagctgcctcagctgcaccagtgaagaagggatctttggccagtggccgcaatgtgggcacgaatcgggcctcggcggtgaaatcggcttccgccaagccggctccggccatatcccgccatgagagcgccacacagaaggagtctgttcttcctcctaaagtgcctagcattgtgccgactgctgcactggcacctgtcactgtaccctgcagcagcttcgtctcccctatgcattcaggagattcagtttcggttgacgagacgatgtcgacgtgtgactcaatgaaaagcccagaatttgagtacattgataatggggattcctcctcagttctaggttccttgcagcgaagagcaaacgaaaacctgcgtatctcagaggatagagatgtcgaagaaactaagtggaagaaggatgctccttccccaatggaaatcgaccaaatttgtgatgttgacaataactacgaggatccgcagttgtgtgctactcttgcttctgatatctacatgcacttgcgcgaggctgagaccaggaaacgtccatcaactgattttatggaaacaatccaaaaggatgtaaacccaagcatgagagcgatcctgatagactggcttgtggaagtcgctgaagaatatcgtcttgttcctgatacattatacctgacagttaactacattgatcgttatctttctggcaatgagatcaatcgtcaaagactgcaattacttggagttgcttgtatgcttattgctgcaaaatacgaggagatatgtgcacctcaagtagaagaattctgctatataactgacaacacatacttcagagatgaggttttggaaatggaagcttctgtcctgaattacctgaagtttgaagtgactgcacctacagcaaaatgctttttgaggagatttgtccgtgttgcacaagtatcggatgaggatccagcattgcatcttgagttcctagccaattatgttgctgagctatcactgctggagtacaatctactttcttaccctccttcactagtagcggcatcggctattttcttggccaaattcatactgcagccaacaaagcacccttggaattccacccttgctcactacacacaatacaagtcgtcagagttaagcgactgtgtaaaggcattgcaccgcctttttagcgttggtcccgggagtaaccttcctgcaatcagggagaagtatacccaacataagtacaaatttgtggcgaagaagccctgcccaccctcaataccgaccgaattctttcgcgacgcaacatgctgaactagaaaaataaaccaaggattagttacagttgctgactgaattcttcctccagaggcacctatgccaggttgtgccgtagaccgttcagataaccttgatgcaaggcatgctgcttgccccccccccccccccccctggttctttcaggcggtttggctgagtgtagatagatcgatgcttctgctgtgtgtggtaacttttatggtactgatgtgctttcttctatcttcttttccctgtacctagatgatccatggttttcagtactttgtacatcggagtcctgcagcaaagctttaaacatcttgtttgatattagctgccaacctgggcgtctcctaggttgatgtatgatagagtctctgttcgtgttgcttt

SEQ ID NO: 385163 - DNA, 1648 bp, Oryza sativa
cccacgcaggccatcgccatgggcgtctcggctctcctccgcctgtagatcgtgtggatcgtgcttacctgcgatggatagggcgagcgagaaccggaggctggcggcggtggggaagcccgtgccggggatcggagagatggggaaccggaggccgctcagggacatcaacaacctcgtcggggcgccgtcgcacccgtccgcgatcgccaagaagccgatgctagagaagagtgggaaggaagagcagaagcctgcattggtggtgagccaccggcctatgttgaggaatttcgcggcctccttgacgcgaaaagaacagcttgaccatcaggtttccgtggctgatgcagcggtcgtctgcactgatccacagaagaaccccatccccgatggcacagttgacgacgatgtggaatcgtgcgaatcgaacgactatattgccgtggatgaatgcaatgatactgatgaggatgagtccatgatggacattgacagtgccgactcagggaatccgcttgcagcaaccgagtacgtcgaagagttgtacaagttctatagagaaaatgaggaaatgagttgtgtgcagcctgattacatgtccagtcaaggagacataaatgaaaagatgagagcaattctgattgattggctcattgaggtccatcacaagtttgagctgatggatgagactctctttcttactgttaacatagtagacagattcttggaaaaacaagttgtgccaaggaagaagttgcagctagttggagtgacagctatgctccttgcttgcaaatatgaggaagtcgcagtccctgtcgtcgaggatctagtgctaatttctgaccgggcttatacaaaaggacaaattctggaaatggaaaagttgatcctaaacacactccagttcaacatgtctgtaccaacaccttacgtttttatgagacggtttctgaaggcagctcagtctgacaagcagctacagctactttcctttttcattctggagctctccctggtggaataccaaatgctcaagtaccgaccttcgcttctttctgctgctgcagtttacacagcacaatgtgctctcactcgttgccagcagtggacaaagacctgcgaactacatagtagatataccggagagcagcttcttgagtgttctaggatgatggtagatttccaccagaaggccggagcaggcaagctcaccggcgtgcaccggaaatacagtacgttcaagtttgggtgtgcagccaaaacggagcctgctctcttcttgcttgagtcaggagcaggaggttacaaccttcagaagcagccttgttgaatgaatctattcccctggatagatttttttaacttagcttcagaacaactacagcaagcatgttgatgcttcacaaaagtgcagcagatttaccttactacagctcttttgtggtaatgtaaacttggtgtgaatgatggataatctgggtggtggtcagtccttcagttatactggggggctaataaatgattcaggcattcagcctatgtaagctgaatctcttgtaaatctacatgtgttcaagtagcatgaagaaaataacttgcatgttgagactttcagattcctcttaaaaaaaatgaaaattcc

SEQ ID NO: 385164 - DNA, 1667 bp, Oryza sativa
cgggaggagtacgcccgcctcggcagcgtcttcaccgtccccatcctcagccgcaagatcaccttcctcatcggccccgaggtgtcggcgcacttcttcaaggggaacgaggccgagatgagccagcaggaggtctacaagttcaacgtgcccaccttcggccccggcgtcgtcttcgacgtcgactactccgtcaggcaggagcagttcaggttcttcaccgaggcgctccgcgccaacaagctccgcagctatgtcgaccagatggttgtcgaggctgaggagtacttctctaagtggggagaaagtggaacggtggatctgaagtatgagctggagcatctcatcattctgactgctagtcggtgcttgctcgggagggaggtgcgagaaaagctctttgatgatgtttcttctctcttccatgatctggacaatgggatgcagccagtcagtgtcatcttcccctacctcccaattcctgcacaccgccgccgtgaccgggcacggcaacggttgaaggaaatcttcgccaccatcatcaagtcccgcaaggcctctggacgggctgaggaagacatgctgcagtgcttcattgattcgaagtacaagagtggacgctcaaccacagaaggtgaaataaccggcctacttattgcagcactatttgctggacagcacactagctctatcacctcaacctggactggggcctacatgcttcgcttcaagcagtacttcgcagcagccgaagaggagcagaaggaggtcatgaagcggcacggggacaagatcgatcatgacatcttggcagagatggatgtcctctacaggtgcatcaaggaggcgctccgtcttcacccaccgctaatcatgctgctccgccagtcacacaacgacttctcagtgacaacgaaggatggcaaagagttcgacatcccgaagggccacatcgtcgcgacatctccagccttcgccaacaggctccctcacatcttcaagaaccccgactcatacgaccccgacccgtacgcaccaggcagggaggaggacaaggcagcgggcgccttctcgtacatctcctttggtggcggcaggcacggttgcctcggtgagcccttcgcctacctacagatcaaggccatatggactcacctgctgaggaactttgagttcgagctggtctcccccttcccggagaccaactggaaagccatggtcgtcggcatcaaggacgaggtgatggtcaacttcaagcggcggaagctcgtcgtcgacaactaggatgccaccttcaaccttaggagtcgatgcttgtcgcgcttttcgcctttttttctcttcttttccctttctgtcagtatttgatccgtgtaagtttctgccagctttgtattagggtgtttcagtcgttttaggatcctgtgatttgcttcctgccatgaaaaatcaagcttgatctctgcaacttctgtacctctgggttgcttggcaacgatttgtgtttgtgttattagacttgaagcatcctggattgtacctgaatctttgcatcgtccgttatttcatatggctttggacataatgtctgaagtctgaacaaataatacttatatgtaatggaatggaaatgagaataaaactatggcaatgtgagttgtctctgc

SEQ ID NO: 385165 - DNA, 951 bp, Oryza sativa
  unsure (1)..(951): unsure at all n locations
actactcttttattatcgcctccctgctcgccctcctcccactctctcgccgccgccgccacttctagaagcttccatcgccaccaccgcagcgccccgcgccgccatggccgccgaagccaaggccccgtcgctcgccgaggaatactcacttcctccacaggaagccccagttgaaaaggcagttgaggataagccccaggaggctgaaagtatctctgtaacgaatgatgaaacccctcaagctgatgagactgcaacagctgtggaagtgaaccctgaaacttctgaagtgcaagaagttgctgacaagtcagaagttgaagacaccaaccctgcagcagaggaaacgaatgagactgctgaggaagaggctgaggagaaaccagagattaagatcgaaacggctccagcagatttccgtttcccaacaacaaatcaaacaaggcactgtttcacacgctatgttgagtatcacaggtgcgtagctgcgaaaggggaggatgctcctgagtgtgataagtttgcaaaatactatcgatctctttgcccaggcgaatgggttgagcgttggaatgagcaacgggaaaacggcaccttccctggacctctgtaagcatgtgcaaaggggagaacatacgttgttgtccgggctctcttcgttggtaactggcgtcatgttatcagaatcggagggatcgtccttttttttggagagatttacaaataagagatttctttttttatttgaagaatgacatctgttgactctacctaaacgatcatcctctgcactgctgagaaactcacattacagctatgatcttcctcccttgactgatcttccataactgttttctcaggataatgtggttgctcgcttgggaaaatgtgttgacataaatcttaagttctttactttctctgtttnnnnnnnnnnnnnnnnnnnnn

SEQ ID NO: 385166 - DNA, 1946 bp, Oryza sativa
ttccgagcgaagcgaacgaaccaattctcctctcgttcctccgcacggaacagcgccgcgccgcgactcgccgcgaagccatggcggcgcgcgctcgcctccgcctcgtcctgcccccgctcgcggcgctgctcctcttcgcgcacctcgccgccgtcgcggtggcgcggccgcggtgggaggaggagggcagcaacctccgcctgccgtcggagcgcgccgtggcggctggcgcggcggcggacgacgctgccgaggccgccgagggcaccaggtgggccgtcctcatcgccggctccaacggctactacaactaccgccaccaggcggatgtctgccatgcctaccagatcatgaagaggggcgggctcaaggacgagaacatcatcgtcttcatgtacgatgacatcgcgcacaacccggagaatccgaggcctggtgtcatcatcaaccatccccagggtggcgatgtctatgctggggtcccgaaggattacactgggaaggaggttaatgtcaaaaacttgtttgctgttctgctcggtaacaaaactgctgtcaaaggtgggagtggcaaagtcctggacagtggccccaacgatcatattttcattttttacagtgaccatgggggtcctggtgtccttgggatgccaacctatccatacctctacggtgatgatcttgtagatgttctgaagaagaagcatgctgctgggacgtacaaaagcctggtcttttaccttgaagcctgtgaatctggaagcatctttgagggtctattgccaaatggcatcaatgtttatgccaccactgcatcaaacgctgatgagagcagctggggaacatactgccctggggagtacccgagcccacctccggagtacgacacatgcctaggggacttgtacagcgttgcttggatggaagacagcgatgtccacaacctgagaactgaatcactcaagcagcagtacaatctcgtcaaggaaaggacatctgtgcagcacacatattactctgggtcacatgtgatggaatacggttctttagagctgaatgcccatcatgtgttcatgtacatgggttccaatccggctaacgacaatgctacatttgtggaagataactcgttgccatcgttctcaagggctgttaatcagcgggatgctgacctggtttacttctggcagaagtaccgcaaattgcctgagagttctcctgagaaaaacgaagctcggaagcaattgcttgaaatgatggcacacagatctcatgttgacaacagtgttgagctgatcggaaaccttctctttggctctgaggaaggcccaagggttctaaaggctgttcgtgcaactggcgaacctcttgttgatgactggagttgtctcaagtctatggtacgcactttcgaagcacaatgcggctcgctagcgcagtatggaatgaagcatatgcgttcctttgcaaacatctgcaatgctggcatctctgctgaagcgatggcaaaggttgctgcgcaggcttgcaccagcattccctccaacccctggagttccacccataggggttttagtgcttaaatcataggtgaagaaaacttagcaaatattctcagctcctgcaatatacccaagttatctttttctcttgcccctgtagtttgatgatcgattgggggcagtagtgcttgaaccgtaggtgaagtctgaagaactgtgcattatttcagatgctccaccatcccaaatcatctaaattgttctcgttctctggtgtacataccatagcaggaaaattgatatggcaatattacctgccatcattgctgtacatacttatagcttgctatatgtagtttgtagctacatatataatatgataaatgcattgctgctattttaaaaaaaaaaaaaaagcggacgcgtgggcgaacgcgtggg

SEQ ID NO: 385167 - DNA, 768 bp, Oryza sativa
ccacgcgtccgggcgtcgtctactccctcggcgactggattgcgcagtgctacgaaggcaagccgatcttcgagttcgaccgtgctcggatgttccggtctggcctcgtcgggttcacgcttcacgggtccctttcacattactactaccatttctgcgaggcactgtttccattccaaggattggtgggttgttcccgcaaaggttgtgttcgatcagacggcctggtctgcgatatggaacagtatctacttcgtggtcttggggttccttcgtttggaatcaccggccactatttccagtgagctcaaatccacgttttggcccatgcttactgccggctggaagttgtggccttttgcacacttggttacatatggcctagttcctgttgaacaaagacttctgtgggttgactgcgtggagttaatctgggttacaatactgtcaacttactccaacgagaaatctgaagcaaggaactccgaggacgcatccacatcaaatgcttccaatgacaattcaatatagcgaacggtatagccagccaagctgccctttaccttcatcattttgggcttgtatatattgtacaatttgtagctgcagctctgcaggtgtaacctttttgcaaagataaattaaacatataagatgtgtagcaactgccaaaggcaatcagaacgaaattaccttgcactggatcaactgttgacgagattatgagctatgcaattttggtagctattcttttgaaaaaaaaaaaaa

SEQ ID NO: 385168 - DNA, 1793 bp, Oryza sativa
cctttctgtcccgtctcctcgcccgccgccctcgactgccgtctcctcgcctgccgctggcgccgatctccatcctgctagcagaggtggcgccggcgtcctcctgctcccgccgcattcgcatcctaatccatcccatccggcctcggcctcgaatttcgtctcctcgcccgccgcttgcgccgatccccatcctgcgagcagaggtggcgcccggcgtcctccttcttccaccgcatcgtcgctcgccgctcatggatcctgagatctagacgtcaacgtgcttcctggaaagagagaggctcaggcatgagagcatacctctaaaataatgtccgtgcttacctgtgtgcttgataacatgggctcatcctgtagcagatctcattctttaagtgaggctgaaacaaccaaaaatgcaaaatctgcagacattgacaggcgaattttgcaagagacaaaagcagagcaacacatccacaagctcttacttcttggtgcgggagaatcagggaagtctacgatatttaaacagattaagctccttttccaaactggctttgatgaggcagaacttaggagctacacatcagttatccatgcaaacgtctatcagacaattaaaatactatatgaaggagcaaaagaactctcacaagtggaatcagattcctcaaagtatgttatatccccagataaccaggaaattggagaaaaactatcagatattgatggcaggttggattatccactgctgaacaaagaacttgtactcgatgtaaaaaggttatggcaagacccagccattcaggaaacttacttacgtggaagtattctgcaacttcctgattgtgcacaatacttcatggaaaatttggatcgattagctgaagcaggttatgtgccaacaaaggaggatgtgctttatgcaagagtacggacaaatggtgttgtacaaatacaatttagtcctgttggagaaaacaaaagaggtggagaggtatataggttgtatgatgtaggaggccagaggaatgagaggagaaagtggattcatctttttgaaggtgttaatgcggtaatcttttgtgctgccattagcgaatatgatcagatgctatttgaagatgagacaaaaaacagaatgatggagaccaaggaactctttgactgggttttaaagcaaagatgttttgagaaaacatcattcattctgtttctcaacaaatttgatatattcgagaagaaaatacaaaaggttcctttaagtgtgtgcgagtggtttaaagactaccagcctattgcacctgggaaacaggaggttgaacatgcatatgagtttgtcaagaagaagtttgaagagctctacttccagagcagcaagcctgaccgtgtggaccgcgtcttcaaaatctacagaactacggccctagaccagaaacttgtaaagaagacattcaagttgattgatgagagcatgagacgctccagggaaggaacttgattcagagctaagactaggttgtaagtcacacagggaaggtaattaggacggcgagaggaacaaagtttcacactgtcacagctttatctgttgtaattcttttacacgtggaccattgattgatcttttggttcttactgtgggctgttcaggtctgtaccctattttttgttctctagttagccattgtgcaaattttccttgaatcagattctctacctgttgtctatgtgtgttatcttggtctgttaatttgcatagcccacttgttcattaaaaaaaaaaaaaa

SEQ ID NO: 385169 - DNA, 462 bp, Oryza sativa
  unsure (1)..(462): unsure at all n locations
cccacgcgtccgagacctaagagagcacggcggcggcggcggcgatggcgcggtggccgtggaggtggagggtgctgctgccgctgcttctccttcactcctcccccgtcttcgcgcaagaaggccaagataatgatccctctactttgttcaaacgagcctcagaaatgatgaacctaaggaaatatgatggatcacttggtctgctaaatgctgtgttggaggttgacccaaatcactcagaagcttacaggcagcgtgcatctgtgcttcgtcacaagtgcaggtacaaggaagcggagggtgactatagcaaatacctggagctaaaacctgggagttcttctgtggaaaaggaattatctcaactgcttcaggctcaaaatgcattagagtctgcttatggccaatttgaatctcatgacttctcaaaagtcctggggtacatcaccaaaattgngc

SEQ ID NO: 385170 - DNA, 551 bp, Oryza sativa
cgtgtggccgtccgccgctccgcgcctccgctctgctacctgcgcctgcgcgtcgtgctccctgcgtccatccctcgccacgccttgccgcaccaacagcgctccctgcacctccgcctccctccccaatccgtcccatctcctcgcccgccgccctcgcctgccatcctgccagcagaggtggcgccgccgttctcctgctcccgctgcattcgctcaccggtgagcatcctaatccatcccatccggcctcggcctcgtcctcgaatttcgtctcctcgcccggcgtcctcctgcatccaccgcatcatcgctcgccgttggggatcccactgacttgctgattgcaactgtcagtgtggtgattggactgcatcagttgtgggaattgaactggtcaagtctcagactaagtacaatgcaaggcatttttgcatgtggttcaatttcctcggcccatggatcatgctttagaccagcttgtcttgcagtggatgatctgaggctgttttacaaaataaattcagtaacctgtggagcgtactcgtggc

SEQ ID NO: 385171 - DNA, 596 bp, Oryza sativa
tcggtcccgtctcctcgcccgccgccctcgactcccgtctcctcgcctgccgctgtcgccgatctccatcctgctagcagaggtggcgccggcgttcttctcctgctaccgccgaatttgctcaccggtgagcatcctaatccatcccatccggcctcggcctcgaatttcgtctcctcgcccgccgcttgcgccgatccccatcctgcgagcagaggtggcgcccggcgtcctcctgcttccaccgcatcgtctatcgccggtgaccatccctccctccctatccacacctcatcaggtattctgcgttatccctcaaaaaagtttgggggttcaaccgaaaaccgacccctcaaccgaaacagggttagatctgcctctgcccagttccacctactttcaacttgttaattttgatttttgtttttagcagatgtaatttggttactgaatctcatccaaacacccttagaatagttgcattagaacggaaaatgtaagctcacataatttggactcatcctaactcacataaatttcttaagaagaatctataccacaaactactcatagtcactcaaaaaatctttttatta

SEQ ID NO: 385172 - DNA, 899 bp, Oryza sativa
  unsure (1)..(899): unsure at all n locations
cggtctcctcttcggccgtctttgctcgaccggagcggagcgcagcgcaggccaacggcgtggacgacgcgcgccccctctggatcgccgctcccccgcgcgccacagcttccatccggcgactgcaaggccgcccaagccaagagggtttctttgcaagctttagccgctcgacgttcattgacagaacatgcctaaaataaagacaagccgtgtcaaatatcctggaggatgggagcttattgaaccaactatccgtgagttggaggccaaaatgagggaagctgaaaatgacacacatgatgggaagagaaagtgcgaagccctctggccaattttccgtatttcccatcaaagaagtcgctacatatatgatctttattacagaaggaaggagatatcaaaagagttgtatgagttttgcctggaccagggttatgcagaccgtaatctgattgcaaagtggaaaaagccgggctatgagcgcctttgctgtcttcgatgcatacagacacgagaccacaactttgcaactacatgcgtctgccgggtccccaagcatctcagagaggagaaggttatagaatgtgttcactgtggatgcagaggctgtgccagcggtgattgagatatcgtcattatcttgtttgaatctgtcaaactaagcagacataatgtttcttgagcgaaatttcggctaaaaacgtttacgaaaacgttttgtaaacccgcctaccgggtatgacgttatttaagtacctgagattgtggttacggtctgcattaatctgccgcatggtcattgcttgatcatcggcctcaacaccctgcatatgtgtattctaaagttttttaatggaaacatctgttactcgatgctnnnnnnnnnnnnnnnnnnn

SEQ ID NO: 385173 - DNA, 501 bp, Oryza sativa
cgccacgcgtccgctcccgtctcctcgcctgccgctggcgccgatctccatcctgctagcagaggtggcgccggcgtcctcctgctcccgcctcattcgctcaccggtgagcatcctaatccatcccatccggcctcggcctcgaatttcgtctcctcgcccgccgcttgcgccgatccccatcctgcgagcagaggtggcgcccggcgtcctccttcttccaccgcatcgtcgctcgccgcacagttggtgtcccgttttgattcttgaggcccatgtagcaaatactactcctaccagaggagaaaaccgtgaaacccgcatagctcctctcaaaaaacaaaagggaggggaaaaagaatcacgacatatagctgatagctgcggtccaaactccaaacccggccgtctttgctcgaccggagcggagcgcagcgcagcgcagaccagcggcgcggacgacgcgcgccctctctggatcgccgatcccccgcgcgccac

SEQ ID NO: 385174 - DNA, 512 bp, Oryza sativa
tcatgacctccgcctccccaatccgtcccggtggtcgcccgccgccctcgactgccgtctcctcgcctgccgctggcgccgatctccatcctgctagcagagggggcgccggcgtcctcctgctcccgccgcattcgctcaatcctaatccatcccatccggcgctcggcctcggctcgaatttcggtctcctcgcccgccgcttgcgccgatccccatcctgcgagcagagggggcgcccggcgtcctccttcttccaccgcatcggcgctcgccgctaggatattgaaggctgaagctttgtgggtatccagcaaggatttcaatggcgctgctacaggttggaggtaccttggctcccaaacttggggaaaaacctcagctggtgcccaggtcacctgcacttacaagagttatttatgctgatccaagatttctggtgtcaaaaagtggtagcggaggcaggcttaaacaccttgtatcacctactgctagtttacaatcatggacat

SEQ ID NO: 385175 - DNA, 1709 bp, Oryza sativa
  unsure (1)..(1709): unsure at all n locations
aattcggcacgaggttcggtcgtataaaaagcaagcgagcgagagagccgggcctccgccgcgcgctttcctcccttgctcccaccaccacacctgtcctccttcccctccatcgtcgtctccctcctcttgtcccactccgactccgacatggcggccgcgaagcacttcacctacgtcatcctcggcggaggcgtcgccgcgggatacgctgcgcgggagttcgccaagcagggcgtcaagcccggggaactcgccatcatctccaaggaatcggtggctccctacgagcgtcctgctctcagcaagggatacctctttcctcagaatgcagccagacttccgggattccacacctgcgtcgggagcggcggagagaggctcttgcctgaatggtattccgagaaaggtatcgagctgatcctgagcaccgaaattgtcaaggctgatcttgcctccaagacattgaccagttcagctgatgcaacctttacctatgacactttgctcattgccactggcttctcggtcataaagctcactgactttggtgttcaaggagcagaggccaacgacatattgtacctgagggatattgaggacgcggacaagttggtcgcggctatgcaagccaagaaggatggaaaggctgtgattgtcggaggtggctacataggacttgagcttagcgcagccttgaagaccaacaattttgatgtcactatggtgtaccctgaaccttggtgcatgccccgtctcttcacttctggccttgctgctttctacgagggatactacgctaacaaaggaatccatatcataaagggaaccgtggctgttggttttgatgctgatgccaatggagatgttactgcggtgaagctaaagaatggaaacgtgctggaagctgacattgttattgtcggtgtcggtggcaggccactgactcatctcttcaagggtcaagttgcagaggagaagggtggaatcaagactgatgcattcttcgaaacgagcgttcctggtgtatacgccattgccgacgtggccgccttcccgatgaagctatacaatgagattaggagagtagagcatgttgaccatgctcgcaaatcagccgagcaggccgtgaaggcgatcaaggcgaaggaggccggcgagtcggtgccggagtacgactacctgccctacttctactcccggtcgttcgacctctcgtggcagttctacggcgacaacgtcggcgaggatgtgctgttcggcgacaacgaccccacggcggccaagcccaagttcggctcgtactggatcaaggacggcaaggtcgtcggcgtcttcctcgagggcggctcggcggaggagaatcaggtcattgccaaggtcgccagagctcagccgccggtggccgacgtcgaggctctcaagaaggaaggactcgacttcgctgccaaagtctgaacctctctatgcacacgcatttcattttgtggacgctgtgatgctgccatcttttcgattctgagcttcgtagtgattttgttagctccgatcctatatatggaggatttgttttgttctcattgtgaatttgtgatgtagtcactgtggcgaggtcccaataatgtctgtactctgtagcttctgtgattggttgttttctttttnnnnnnnnnnnnnnnnnnnnnnnnnnnnnnnnnnnnnnnnnnnnn

SEQ ID NO: 385176 - DNA, 1302 bp, Oryza sativa
  unsure (1)..(1302): unsure at all n locations
cagcttcagctccncccccaccatctccctcctcgccgccggcccccatttctcccgcgtccacttcgagcggcggcgcgcgtgccgtaccgatggctatggtcccctcgggctcgggcggtgggccgccggtgattgcggaggtggagatgaacggcggcgccacctcgggcgccgcaacggtcagggccaccgtcgtgcaggcctccaccgtgttctacgacaccccggccactctagataaagcagagaggttgatagaggaggctgctgggtatggttcacagttggttgtgttcccagaagcttttgttggcggctatcctcgtggatccacatttggctttggggccaacataagcattggtaatccaaaagacaaggggaaggaagaattccggaagtatcatgcggcggcaatagaagtgcctggcccagaggtgacacgcttggctgctatggctggaaaatataaagtatttttagtgatgggagtgattgaaagggaaggttacactctgtattgctcggtgctcttctttgatcctctaggacggtacctaggtaagcaccgaaagctcatgccaacagcattagaacgaataatatggggatttggagatggatcaacaattcctgtttatgatactccacttggaaagatcggagccctaatttgctgggaaaataaaatgccactgttgcggacagcactttatggtaaaggtattgagatatattgtgctccaactgctgattccagacaagtttggcaagcctccatgactcatattgccttagaggggggatgctttgtcctgtcagcaaatcaattctgccgtagaaaggactatcctccaccaccggagtatgtatttactggtttaggtgaagagccttctccagacactgttgtctgccctggaggtagcgtcatcatttcaccatccggagaagtcttggcaggtcccaactacgaaggggaggcgctgattacagctgatctagaccttggagaaatcgtgcgagccaagtttgattttgatgtggtgggccactatgctcgacctgaggtcttgagcttggtagtgaatgaccagccgcacctccctgtgtctttcacttctgccgctgagaagacgacagccgcaaaaagtgacagcactgcaaagccctactaagaatgaaatgtctgactgcggatatgtcacgtatctgcgctgatcctgtgaatggcaacaattagtgaactgcttatgggtatagaggaacactgtcccttaatagggtacgctcagtatg

SEQ ID NO: 385177 - DNA, 645 bp, Oryza sativa
  unsure (1)..(645): unsure at all n locations
acgganatatttttggttnngggagnccttttccaanatgttttccccgggnggngtttntattcaccatccgggngantttggcggtccnaataggaagggnggggngataaaagtaatttagccttggagaattctgcgacccaagtttgattttgatgtggtgggccactatgctcgacctgaggtcttgagcttggtagtgaatgaccagccgcacctcccctgtgtctttcacttctgccgctgagaagacgacagccgcaaaaagtgacagcactgcaaagccctactaagcaagataatcagagtcaatcgcaaaactgattactgtcactagacggtgaatcattggctccgatcgttcatgcttgacgtccctgtcatccccttgcttgtaaattgcagtccagaacaaacttctgaggtctgtagaacttgccccttttatgctgtgtatctatcaaggtaggtgtcagatcaaacttggttcccctccatatcaaatatgagtagtgcatgaactggcactacgatggtttcactgtcacacatgtggttattttacgttctactcccttggtgccatattacagattattttagttttatcataagttaaacttctctaaaaaaaaaaaaaaa

SEQ ID NO: 385178 - DNA, 654 bp, Oryza sativa
cggaatcgcaattcccacctcagacccacccaaaggcttcctcctcctctccctcgcggcggcggcgcggcgtctatcctcctccaccggcggcaaggcatctgagctcaacagcaagcaaatggcaggtggcagaattgcacatgcgaccctcaaggggccgagcgtggtgaaggagatctgcattgggctcacccttgggctggtcgctggtggtctgtggaagatgcatcactggaacgagcagaggaagactagatccttctacgacatgctcgagaagggccagatcagtgttgtcgtcgaggagtagtcttttgtgttgaaagtcttttgcctttgttttttgcaagttatttctgaaactctctggagagcatgacaaagctagtgccgtggagattgtcatgaaaaataagcatagcaatttgagaacatttgatctcgttgaatttgcttcttttcttgtattatcttaaaatctgtctttaatatatgccagtaacagcttaagggattggatggcttccccctgacattaatctgatttagtttcttttgcttattttcctgtcaccatttgagattgtgattatgcccatccttttcagtgtggatgcgatggggggaattggatacctaatgagtcatttg

SEQ ID NO: 385179 - DNA, 1284 bp, Oryza sativa
  unsure (1)..(1284): unsure at all n locations
ggacgtncggtcacgtatgggcggacgtttggccccaatcttacatcaactacctacttcctacgtagcccagtaactatacattattaaggctaaccagtaactaactaaggcacacgtacgcaatggtggcgctcggacgccgttcatggctggtcccgctggccatggtgctcgccgtctccagctgcctcgccggcccggcgatggccgccggaaagaccgggcagatgaccgtgttctggggccgtaacaagaacgagggaaccctcaaggagacctgcgacaccggcctctacaccaccgtcgtcatctccttctacagcgtgttcggccacggccgctactggggcgacctctccggccacgacctccgcgtcatcggcgccgacatcaagcactgccagtccaagaacatcttcgtcttcctctccatcggcggcgccggcaaggactactccctcccgacctccaagtccgccgccgacgtcgccgacaacatctggaacgcccacatggacggccgccgccccggcgtgttccgccccttcggcgacgccgccgtcgacggcatcgacttcttcatcgaccagggcgcgcccgaccactacgacgacctcgcccgcaacctctacgcctacaacaagatgtaccgcgcccggacgccggtgaggttgacggcgacggtgcgctgcgcgttcccggacccgaggatgaagaaggcgctggacaccaagctgttcgagcgcatccacgtccgcttctacgacgacgccacctgctcctacaaccacgcggggctcgccggcgtcatggcgcagtggaacaagtggacggcgaggtaccccggcagccacgtctacctgggcctcgcggcggcgaacgtgccggggaagaacgacaacgtgttcatcaagcagctctactacgatctgcttcccaatgtgcagaaggcgaagaactatggcggaatcatgctctgggacaggttctacgacaagcagaccggttacggcaaaaccgtcaagtactgggcttaattaattaacctactactactatttactgctactatgcgttaatttgtgcgtgtgtgtttgagaataaaatatgttggtgtgtgttggtttttttatgtaggtatatgaataaaacgagatccatatgtaacgatggagatctcgagttgtttgtttgttggtcatcaatcgaataaagtgtatgaacaatatatcagaaatggttattatgtaattttgtctcttgttaaaaaaaaaaaaaaaa

SEQ ID NO: 385180 - DNA, 1547 bp, Oryza sativa
  unsure (1)..(1547): unsure at all n locations
aatcatcagcatacacacgatggcgtcccaacgccggcgatcatctgccaccgccgtcctcctctccttgctactgctcctccagttggccgccgcctatcctcaaggaaagaggcagaacgtcgccgtcttctggggccgcaacaaggccgagggctcgctccggcaaacctgcgacaccggcgactacaacatcgtcatcatctccttcctcagcgtcttcggccacggcaaatactggctcgacctctccggccacgaccttcgcgacgtcggcgccgacatccgccactgccagtccaagggcgtctacatgctcctctccatcggcggcgacggctaccaatactccctcccttcctccaagtccgccgccgacgtcgccgaaaacctctactactccgtcctcggcggcgaccgccccggcgccttccaccccttcggcgacgacaccatcgtcaacggcgtcgacttcttcatcgacaacggcccagccgaccactacgacgacctcgccaaccgcatcaacgactacaaccagaacatccgcgaccccatcggcatcatgctcacggcgacggtgaggtgctcctaccctgacccgaggatgaaggcggcgctggacaccaagctgttccggcgcatccacgttcgcttctacgacgacccgagctgctcctataaccacgccgggctcgccggcgtcatggcgcagtggaacaagtggtcggcgacgtaccccgacgggcagatcttcctgggggtcgtcgcggccaacttgacggggaagaacgacatggtcgccgtcggcgagctccgcgacaagctgctgccggcggtgcagaacacggatacgtacggaggagtgatgctctggaacagctactacgactcgctcactcactacggccgatacgtcaaggacttggcttgatataattaattaaactcaaatcaaccaataattacttgagcccgtgcatgcatgcatgcagctcaatcactatctcagtaattacggcgtcatgtgtttgatataggaaagtaatccctacgtaggccattctcaacccaatgactaagatggtgtctatagcattaaataaggtgccacctagaatgaaaaatgatgtgacaagtaaataaatgaggaaagagaaggaaatcatgtcttgcatgagacatggtttctacacaacatccaagacatcatgtgagataatgagtattaaatttaagtatggaatagtagtgtttgcattggaagagtggcgtctagtactagtttcttgatgatgtggagtttatgaaaatcatgttttgggttgggatgttgtttttcttttgacctagcttgctagcgaaagctagtgttaattacatttttaatttgtcataaatgcatgtgtgatcgatgtgtccttaattagtctttttttttgcaatctatggtagtagttattccatgcaaaaatgatgaaaaaataaagttattaaggctnnnnnnnnnnnnnnnnnnnnnnnnnnnnnnnnnnnnnnnnnnnnnn

SEQ ID NO: 385181 - DNA, 1178 bp, Oryza sativa
  unsure (1)..(1178): unsure at all n locations
atcatgcataaagatgaacattacatgcatgcatggtaactatataaactactataccttcacagctaatgtatctactacatctaaaaacagctagctaattaactcaccatcatggcgttcggacgccgttcactcttcttgccggtggtgggcgtcgcggccatcctgctgctcgccgccggccacgcgaccgccgtcaacaccggcgagaccgtcgtgttctggggccggaacaaggacgagggctctctccgtgaggcctgcgacaccggcctctacacctccgtcatcatctccttcctcgccgtcttcggccacggccgctactccctcgacctctccggccacgacgtctccgccgtcggcgccgacatcaagcactgccagtccaagtacatccccgtgctcctctccatcggcggccagggcggcgcctactccctccccaccaacgcctccgccgccgacgtcgccgaccacctctgggactccttcctcggcggcggccgagccggcgtgccccgccccttcggcgacgcggtggtggacggcgtcgacctcttcatcgaccagggcggcgccgagcactacgacgagcttgcccggcggctgttcagccactacaagttcgagatgctgctgacggcgacgacgaggtgctcgtacccggaccaccgcctcgacatggcgctggcgacggggctgttcacgcacatccacgtccgggtgttcggcggcggcggcgacgccggctgcacgacgcgccacagggcgtcgtgggagaggtgggcggcggcgtaccccggcagcctggtgtacctcggcgtggtggcctcgccggagcaggacgccaacgcctacctgccgcgtaaggttctcttctccgacgtgctcagccacatcgtcgagaagcccaactatggtggattgatgatctgggataggtactacgacaagaagaccggctactccgctggaaaagttttttaattaacttccaatagactggaaattagttaaccatggtgaccaatactaatgaataaggatttgtagaaaacaaggatgtggttttgtcaatgatgtgcttctatgctcataaataaatacacggacttaaataagaggatcagaagaatggattttaatctcntgagagaaaaaaaaaaaaaaaa

SEQ ID NO: 385182 - DNA, 1161 bp, Oryza sativa
cactggctcaccgcaattaaacgccatctcgatcgaaagctagactaaccaagtatatatacgatcgatggcgttccggcgccgttcatgcatcccggcggctctggccgtcttcttcctgctgctcgccggccagtcaaccgccggcgaagaccagaccgccgtaatctggggccgccacggcgacgagggcaccctccgtgaggcctgcgacaccggccactacaacaccgtcatcatctccttcctcagcgtcttcggccacggccgctactccctcgacctctccggccacgacctccgccgcgtcggcaacgacatcaagcactgccagcgcaagggcatcgtcgtgctcctctccatcggcggccagggcggcgactattccctcccctcctcccgctccgccgccgacgtcgccgacaacctctggaacgcgttcctcgccggccgccgcaagggcgtgctccggccattcggcaacgcggcggtcgacggcatcgacttcttcatcgaccggggctccggcgaccactacgacgagctggccaggaagctctacagctacagaaacaacaaggggaagggggtgatgctgacggcgacgccgcggtgcaggttcccggaccggcggctggagaaggcgctggcgacgggggtgttcgcgcgcatccacgtgaggatgttcggcgacgacgtgaactgcacggcggcgccgagggagtcgtgggagaagtgggcggcggcgtacccggcgagccaggtgtacctcgggctggtggcctcgtcggagcaggacccgggatacctgtcgcccaagccactctactacacgctggtgatgtacatcagagacaggctcaactacggtggcaagatgatctgggacaggtactacgacaagaagaccgactactccattggaaaacttatttaaaacctatatatatactcctttttccattgggagcatggagatatatatatatatatatatatataccaagtattgaatagggcttaatttctagctatatggaataatgtaatcccatgtcgcaattaaataagggtgattatctaaattgttgttgttttgtgtaatcctccaaaataatatcaataaagttcactgcatgtgaaagtaaaatctttaaaaaa

SEQ ID NO: 385183 - DNA, 1355 bp, Oryza sativa
  unsure (1)..(1355): unsure at all n locations
ggacggncggagnacgntgtgggcggatgcgtgggcggacgcgtgggccggacgcgtgggcaacagcactccacacacaattacacaacaatggcgtccgaacaacaacgccggcgatcaccacctaccatcctcgccgccatccttcttctctccttcttggcgacggccaacctcgccggcgccatcgatccagccggaaggagacggaacgtggtcgtcttctggggaggcaacaagaacgaaggcagcctccgttcagtctgcgacagtggactctacaacatcgtcatcatctccttctacagcctcttcggccatggccgctactgggacgacctctccggccacgacctccgccacatcggcgccgacatcacccactgccatttcaaggccgtctacgtcctcctctccatcggcggcggcgatggaaaagactactccctaccttcctccaaatccgccgccgacgtcgccgacaacctctacaactccttcctcggcggcagccgcccgggagtctaccacccattcggcgatgacgtcacagtcgtcggcattgacttcttcattgaccgcggtcaacccgaccactactacgagatcgccgagcggatcaactacgacacccgccactggcgtgaccccatcgggttcaagctgacggcgacggtgagttgtgcgtacgacgactctgaccccaggatgaagaaggcgctggaaacctaccttttccggcgaatccacgtcaggttctacgatgatccgaggtgttcatacaaccatgccgggctcgccggcgtcatggcgcagtggaacaggtggtcggcgagttacccttataatgggaagatttacttggggctcgcggcggcgaatttgacggggaagaatgacatggtcgccgtcggtgagctctaccggaagctgctgccggcggtgcagaagacggatacctacggaggagtgatgctttggaacagctactatgactccatcactcactacggacggtatgtcagtgcctgggcttaattataagattcagagatcaaccaacgataatctctctatatatacgtgtgcctccatcatcagtccaatccgtgcgtgcatatagctcaatcactatcacagtaatcattacttagtacatgttgttttgtaatctttgctagcgaaagctagtgttttttttttatgtgcacaactcggtgtgccgccatacatgcatgtgtgatcgacgtatcagtctgtactctcccttttttatcttgctagcgaaagctagtattttgagtattattatctgcgcaatttggataccctnnnnnnnnnnnnnnnnnnnnnnn

SEQ ID NO: 385184 - DNA, 1312 bp, Oryza sativa
  unsure (1)..(1312): unsure at all n locations
ccacgcgtccggttaactactccatctagctaagacccgtagtgtatagtagtcaagatcaatggcgtcccgacgccttgccccgctgctggtcctactgctctcgtccagcctcgccgccggccagagcaccggcgacaccgtcgtgttctggggccggaacacggaccagctcgaggggtccctccgtgaggcgtgcgacaccggcctctacaccaccgtcatcatctccttcctcagcgccttcggctacatcccgggcacctacaagctggacatctccggccacaccgtctccgccgtcggccccgacatcaagcactgccagtccaggggcatcctcgtcctcctcgccatcggcggccagggcggcgagtactccctgccgacctcccaggcggccgtcgacctcgaggactacctctggaacgccttcctcggcggcggccgccccggcgtcgcccgccccttcggcgacgccgtcgtcgacggcatcgacttcttcatcgaccagggcgccacggagcactacgacgagctggcgcggcggctgtacgcgcacaacaaggactacaaggggaggctcggggtgatgctgacggcgacggcgaggtgcgtgttcccggaccagcggctgcaggcggcgctgtccacggggctcttctcgcggatccacgtcaaggtgttcggcgacgggcggtgcgcgtcgaggagggaggagctggagaagtggatggcggcgtacccgcagagccgcgtcctcgtcggcgtcgtcgcgtcgccggaggctgacagggacggctacgtgtcgcacaaggatctctactacgacgtgctgcagttcatcaacaagctgcccaactatgggggcatcatggtctggaacaggtactgggacaagaagaccggatggacggctggtaatgagcctggtctcctggatcaggttctgtgatggacggctggtaattaaccagaccttgatccattttcactttgatcactgatcacttcactggattcatgcacgagctactactagtacgtgcacaaataaagtaagtaatgtcatgtgacgtgcatgcacaaataaagatggaaatgatatgataaaagattggggtatgtgtgtgtgtgtgtgttggataatgtaatgtaatgcacaaataaagtgaggtgatcaggacgggcaggcttactttcttctgggtgatatgttgtatgtattttgttttattggattggaataaatatatatatatatatatatatttcatcgccaaaaaaannnnnnnnnnnnnnnnnnnnnnnn

SEQ ID NO: 385185 - DNA, 1145 bp, Oryza sativa
ccatactacaccagaacacaacaatggcgtcccaacgccggcgatcatccgccgccaccatcgccgtcttcttcttcctcctctccttgttagcggtgttcttccagccggccgccgcctactaccaccctcaggggaagaggcagaccgtcgccgtcttctggggacgcaacaaggccgagggctcgctccggcaaacctgcgacaccggcgactacaacatcgtcatcatctccttcctcagcgtcttcggccatggcaagtactggctcgacctctccggccacgacctccgagacgtcggcgccgacatccgccactgccagtccaagggcgtctacatgctcctctccatcggcggcgacggcgacggctactccctcccttcctccaagtccgccgccgacgtcgcctacaacctctaccactccttcctcggccgcccacgcgccggcatcttccgccccttcggcgacgacaccatcgtcaacggcgtcaacttcttcatcgaccacggccccggcgaccactacgacgacctcgccaaccgcatcaacgactacaaccagaacatccacgaccccatcggcatcatgctgacggcgacggtgaggtgctcgtaccctgacccgaggatgaagaaggcgctggacaccaagctgttcacgcagatccacgtgaggttctacgacgacccgaggtgctcgtacaaccacgcggggctcgccggcgtcatggcgcagtggaacaggtggtcggcgaggtacccaaacagccggatcttcctggggctcgcggcggcgaacgtgacggggaagaacgacatggtcggcgtcggggagctcagccggaagctgctgccggcggtgcagaagacggagagctacgcgggagtgacgctctggaacagctactacgactccaagactcactacggaagatatgtcaagcactgggcttaatttaatcaattaatttaagctcagatcaaccagctataataatctactacagtgcatgcagctcaatcactatcgcagtaatcacggtgtcatgggtttaatgtagtaaactacccccacttaattacatgttgtttgttgttttttgatcttggtctcgagagcaagtgttttttttatttg

SEQ ID NO: 385186 - DNA, 626 bp, Oryza sativa
gttttcctcgaggaggcggcggtgcagcgaagacgcgacggcgggggcggcgcgacccggaggcgatggcgacggcacggcgctctcctccggccgccatattatctccgattgcacgtgcacctcctccttcctgggaccttgtaccctctccttcctaggatagtgctgtgcttcaggaagatggcaaagaagaagaacccaattgtctttatggatatttcgataggtgatgaacctgaggccattcccaacccaatgactaggatggtgtctatagcattaaataagctgccacctaggatgaaaaatgatgtggcaagtgaataaatgaggaaatagaaggaaaccatgtctttgcatgagacactggtttctacacaacatccaagacatcatgtgaggataaggtaaccatttaaattttaaggtataggaatagttcgtgtttgcaatttggaagattagtgtttagtactagtttcttgatgatgtggagtctatggaaactatgtctagtgtcatgggttgggaatgacctgatgaaagaatgttttttgaggtgccatgtggctctagctatgtgcttcattattcctgtgttttgtcaaaaaaaaaaaaaaaaa

SEQ ID NO: 385187 - DNA, 500 bp, Oryza sativa
tattcatcacaaaaccatcaacctagcacacagcaacttgctttacattgctgcaaacatgggcctcgtgcacgcactcctccccttcgcagcagcagcagcattgctgcccctcgccgcgccgccgccgggcacggccgacgacccgggcctcgccgtctactggggccgccacaaggaggagggctcactgagagaggcctgcgacaccggccgctacaccaccgtcatcatcaccttctacaacgccttcggccacggccgctactccctcgacatctccggccacccgctcgccgccgtcggcgccgacatcaagcactgccagtccaggggcatcaccgtgctcctctcaatcggcggccagggcggcgcctactccctccccaccaacgcctccgccgccgacgtcgccgacaacctctggaacgcctacctcggcggccaccgcgccggggtggcgcgccccttcggcgacgacgcggcggtggagctccagc

SEQ ID NO: 385188 - DNA, 384 bp, Oryza sativa
cacaatatgatatgatgggcctcctgagcttgctgctcgtcgtcgtgtcctgcctcgccgcgccggcgacggccgactggtacggcccgctcgccgtctactggggtcgccacaaggactacgagggctccctgagagaggcctgcgacaccggccgctacaacaccgtcatcatcaccttctacagcgtcttcggctacgtcaagggcaggtacggcctcgacatctccggccacccggtcgccgccgtcggcccgacatcaagcactgccagtccaagggcgtccaggtcctcctctccatcggcggccagggcggcgggtactcgctcccgtcatcccagtcggccgccgacgtcgccgacaacctctggaacgcctacct

SEQ ID NO: 385189 - DNA, 1302 bp, Oryza sativa
gcgaagtcctgcagcctccgtagcagacacgtacaacgtaccgagcaaccttagctagtggcgcctgaaaattattaagcgcttcaagatggcaaagcatggcgttgcttccgttttaacactggcattggtccttggagttgcggccattcctacagtggtgcaatctatcggcgtgtgctacggcgtgatcgggaacaacctgccgtcgccgagcgacgtcgtgcagctctacaagtccaacggcatcgactccatgcgcatctacttcccaagaagcgacatcctccaggccctcagcggctcaagcatcgccctcaccatggacgtcggcaacgatcagctcggctccctcgcctccgacccctccgccgccgccgccttcgtccagaacaacatccaggcgttcccgggcgtcaacttccgctacatcacggtcggcaacgaggtttccggcggcgacacgcagaacatcctcccggccatgcagaacatgaacagcgccctctccgccgccggcctcggcaacatcaaggtgtcgacgtcggtgtcccagggcgtgaccgccggcttcccgccgtccgccggcacgttctccgcctcgcacatggggcccatagctcagtacctggcgagcaccggcgcgccgctgctcgccaacgtctacccctacttcgcctacgtgggcaaccaggcccagatcgacatcaactacgcgctcttcacgtcgccgggcacggtggtgcaggacggcggcaacgcgtaccagaacctgttcgacgccatcgtcgacacgttctactccgcgctggagagcgccggcgccgggagcgtcccgatcgtggtgtcggagagcgggtggccgtcggccggcggcacggcggcgagcgccggcaacgcgcagacgtacaaccagaacctgatcaaccacgtcgggcaggggacgcccaagaggcccgggagcatcgagacctacattttcgccatgttcaacgagaaccagaagggaggcgacgagacggagaggcacttcggcctcttcaacccggaccagtcgccggcatactccatcaatttctaagaagattgttctgagaagagatcgatcgatgatgaattaaacgtcgatcgatatagatatatacatacacgcgttccatatatagtttgggtttgaataagctttctgcctgcatattgcaaagctcaatgcatgcatgtaacggtgcagagacaaataatatgaacttgaataaagtttaccagacctattttcgcgtacctgcccgggcggccgctcga

SEQ ID NO: 385190 - DNA, 1185 bp, Oryza sativa
ggatatggctaagatgggtttcgctcccatgctttcagtggccgtgctccttggaaccttggcagcatttcctgcagcggtacactccatcggcgtgtgttacggcgtggtcgccaacaacctgcccgggccgagcgaagtcgtgcagctgtacagatccaaggggatcgattcgatgcgcatctacttcgcggacgccgccgccctcaatgcactcagcggctcgaacatcggtctcatcatggacgtcggcaacggcaacctctcgagcttagcttccagcccctccgccgcagccggttgggtcagggacaacatccaggcctacccgggcgtctccttccgctacatcgccgtcggcaacgaggttcaaggcagcgacaccgcgaacatccttccggccatgcggaacgtcaacagcgcgctggtggcggccggcctcggcaacatcaaggtatccacgtcggtcaggttcgacgcgttcgccgacaccttcccgccctccagcggcaggttcagggacgactacatgaccccgatcgcgaggttcttggccaccaccggcgcgccgctgttggcgaacgtgtacccctacttcgcctacaaagacgaccaggaaagcgggcagaaaaacatcatgctcaactacgccaccttccagccgggcacgacggtggtggacaacgggaacaggctgacctacacgtgcctcttcgacgcgatggtcgactccatctacgccgcgctggagaaggccggcacaccgagcgtcagcgtcgtcgtgtccgagagcgggtggccgtccgccggagggaaggttggggccagcgtgaacaacgcgcagacatacaaccaggggctgatcaaccatgtccgaggcggcacgcccaagaagcgcagggcgttggagacttacatatttgctatgttcgacgagaacggcaagcctggggatgagatcgagaagcactttgggctgttcaaccccaataagtcgccatcgtacagcattagtttctaaggggatcgtacagactgatatatatttttatatggaataagttgctcccgtgataggccaaacgcaagcatgggaagcaagcatagtgccgtgtggtgtccatgcatctttcccaatttgtgaaatatatactcccagtgaattttaaaaaaaaaaaaaaaaaa

SEQ ID NO: 385191 - DNA, 1439 bp, Oryza sativa
  unsure (1)..(1439): unsure at all n locations
cggacgcgtgggcggacgcgtgggcggacgcgtgggcgcgcgcgcaggttcagatagtttcaggcttgggaggaaggaaggagaggcagagagagaatttttgtctgagagaattcagatttcagagagataattttcgtctgaagaattgtgtatcgatcgatgtctggtggtgtgatcagcatggtggtcgcgccatggattctcgcttgcgggttcttgctctgctcatcctccttcctcggagctgaaggcgccattggtgtgaactacggcatgctggggaacaacctgccgtcgccggcgcaggtgatctccatgtacaaggccaagaacatcaactacgtccgcctcttccacccggacaccgccgtcctcgccgcgctccgcaactccggcatcggcgtcgtcctcggcacgtacaacgaggacctcgcccgcctcgcctccgacccctcgtttgccgcctcctgggtcagctcctacgtccagcccttcgccggcgccgtcagcttccgctacatcaacgccggcaacgaggtcatccccggcgaccccgccgccaacgtcctcccggccatgcgcaacctcgacgccgcgctcaaggccgccgggatcagcggcatcccggtcaccaccgccgtcgccacgtccgtgctcggcgtctcgtacccgccgtcgcagggcgcgttctcggaggcggcgtcgccgtacatggcgccgatcgtcgcctacctcgcgtccaggggcgcgccgctgctggtgaacgtgtacccctacttcgcgtacgccgcggacgcggagcgcgtgcagctcgggtacgcgctgctgtcggcgtcgcagtcggcgtcggtgaccgacggcggcgtgacatacaccaacatgttcgacgcgatcgtggacgcggcgcacgcggcggtggagaaggcgacgggcgggcaggcggtggagctggtggtgtcggagaccggctggccgtccggtggcggcggcgtgggcgccaccgtggagaacgcggcggcgtacaacaacaacctgatccgccacgtctccggcggcgccgggacgccgcggcggccggggaagccggtggagacgtacctgttcgccatgttcaacgagaaccagaagcccgagggcgtggagcagcatttcggcctcttccagcccgacatgaccgaagtctaccatgtcgacttcgcggcctccagctagattaggcccggcccatttcacatttctttctttcagctgctgctactattttattatttgtcggatacagtattttcgtagtttcggttcgatctcatgtcaccggtgctctgatttggattcattgttcatttgttgtcgatgcacattggngtatgatttattcaaacgcacgaattttacgagaagatnnnnnnnnnnnnnnnnnnnnnnnnnnnnnnnnn

SEQ ID NO: 385192 - DNA, 700 bp, Oryza sativa
  unsure (1)..(700): unsure at all n locations
cggacgtgnccgaggacgcgtgggtcagattgcagttcagagttgcccactgctactttactttgcagctattttgcttctgcttcttcttgttcttgttgctgttggtaatactgcgagagaaattaatcagtagagtgttcatctactatcaatttttgatcgaggagagatggcgggaacggcgaactgcatcgacatcctcatcgccatcatcctcccgcccctcggcgtcttcctcaagttcggatgcgggcatgagttctggatctgcctgttgctcaccttcctcggctacatccccggcatcatctacgccatctacgccatcaccaagtaattcatcattagttactacatcatcaaccaaatcctcaagggatgggctccaaaccgcttcatctatcttctcgattgccgtgtgcttgttggaatttggaaatgatatatgcatccaaaattcagtcctgagtgctccaattcttgtcatctagtcattttcaatgtccccccagtctcttcctctaatgtttgatgatatgtagaatctcttgctgttaatctgttgctttcgtgtgaataagctcccctcttatgtatatctatctatgacttgttttactagtaaacttgattattgagagcttgagacttgcttccctgtctgtctgtatatcttgttccaacactggaactgaat

SEQ ID NO: 385193 - DNA, 1671 bp, Oryza sativa
  unsure (1)..(1671): unsure at all n locations
ctcctcctcttcttcatcgtttcgcttagcttttctttcttcttcgtcgtctcggttcactcctccgttcgatcgactttgcttgtttcaagcaagctagatctctcaccaacaggaggtgatcaatggcgagcggcggcgcattatccccggtggaggagaagcccacggtggtgaagacgaccaaggcggagcagcacgaggaggaggcggcggtggcggtgaagagcgcggcggagatgatgaagaagagcagcccgtgctgcccccggtgcaactccatcaagaccaagttctgctactacaacaactacagcatggcgcagccgcgctacttctgccgcgagtgccgccgctactggacccagggcggctccctccgcaacgtccccgtcggcggcggctgccgcaagagcaagcgctcgtcggcctcgtcggcgtcggcgtcggcggcgtctcctcctgctcctgcggtgggcgccgcgccaccggtggtgccggcgctgtcgtcggcgatcagcaagctgctgcagtcggagcccatggcggcgccgtgcgcggacttccccaacgtgctcccgaccttcgtgtccaccgggttcgagctccccgccgccgccggcgaccgcctctcgctggggtcgttcggggcgttcggcaacctgtcggcggcggtggcggctcccggcggtggtggtgggtcgtcgacgaccacgtcgttcatggacatgctgaggggagttggagggcttttcgacggcgtcggcaacagccatcagatgggcggcaatggcggcggcggaggcagctactacgcgcctctcatcaccggcgccggcaatggcatgctgatgccgccgccgccgctgccgccattttctggttctctgatgcagcatgggatgcaggggctgttcgccaatcatgcgatgggaggaggtggtggtggagtgatgaacgccggcgaggacggcagcgtgatggcggggctgggaggaggccagtggccgccggcgcttggtggtgcagacgagcagcagggcggcggcgacggtggcgaagctgtgatgacgaaggacaccggcggcggcgcatcgtcgtcggcgtcgaggccggactacttctacggctggaacacgccgccggcggcgtcgtcgctggaggcggcatcggcggcaacgccgccgctgccaccggagcaacgccatggcagggcctcatcgacagcagctcggccatgatgtaagctcaatcaaatcaaccatgccaaggttggagagagatctcatccagaagttgttgctagcttcttggaatgatttttcttcagcttcatcgatcgctttagttcgttttttatccgtggatcaaattagttcgctctttggaaaaattcgtcgaaacagttttaaattttgctagacaaatgaatgtcgtcgtcgtcatcgtcgctcgtttacctgtaattagcttggagttggggttgtttgattgacctcatggaaccatgcaaaaggttctcatgtttaaggggagttaattaaatgtacatcattggtcgtgacaaaaaaaaattgccgttggtttgtttcttnnnnnnnnnnnnnnnnnnnnnnnnnnnnnnnnnnnnnnnnnnnnnnnnnnnnnnnnnnnnnnnnnnnnnnnnnnnnn

SEQ ID NO: 385194 - DNA, 2316 bp, Oryza sativa
tgcagagatagggaggaggcataattccactcactgccccaaccacaggacattctcttctctctctcccttctgctcaagaaatccaccagctgctgcatcaggaggtggagctcgctcgtcgtcttcgtcttcgttgcgcttcgtctcctcaggtgcccggaggagcaagaattgttgggggggcagcgaggtagacgcagttggagagccctcttgcatggatgcagcccactggcaccaggggctagggctggtgaagcccatggaggagatgctgatggcagcgaacgcggccgccggcgcgaatccgaatccggcggcgacggcgccgtcgtcggtgactgggggcgcactgaggggcggcggcggcggcggcgcgccgccggtggcaggtggcgcgggggcgggtagcacggagcggcgggcgcggccgcagaaggagaaggcgctcaactgcccgcggtgcaactcgacgaacaccaagttctgctactacaacaactacagcctccagcagccgcgctacttctgcaagacgtgccggcgctactggacggagggcggctcgctccgcaacgtccccgtcggcggcggctcgcgcaagaacaagcgctcgtcgtcgtcggcggcatcggcgtcgcccgcgtccgcctccacggcgaattccgtcgtcacgagcgcgtccatgtccatgtccatggccagcacgggcggcggggcgtccaagaacccgaagctggtccacgagggcgcgcaggacttgaacctggcgttcccgcaccacggcgggctgcaggcgccgggggagttcccggcgttcccgagcctggagagcagcagcgtgtgcaaccccggtggcccaatggggaccaacggccggggcggcggcgcgctctccgcgatggagctgctccgaagcaccggctgctacatgccgctgcaggtgccgatgcagatgccagcggagtacgccacgccggggttcgcgctcggtgagttccgcgcgccgccgccgccgccacagtcgtcccagagcttgctcgggttctcgttggacgcgcacggctcggtgggcgggccatccgccgcggggttcggctccagcgcggggttgcaaggcgtgccggagagcacgggcaggttgctgttcccgttcgaggacttgaagccgacggtcagctctggcactggcggtggaggcgcaagcggcggcggcgccggcgtagacggcggccatcagtttgatcacggcaaggagcagcaggccggtggcggaggcggcggcccaggcgggcacgacacgccggggttctggaacggcatgatcggcggcggcagtggcacttcttggtaatgcggcggcggcggccatgcatgcatgcatggctcatgcaaaagcctccgcgctgtggtggcgtgggttcaaattggagataggcagtagagacgacgagggttttaataagaggttggcattggcgataatccatcactgattcactgttactccgtataaggtgttttgatctctcttcttcttctttcccggtgttgcatcatcatcttggtgttctttcttctcccttttgctgtctttcatgtgattgttgatcggctttggtgctcaacacaacaaccgagctcacatgattcctcaaaaggatcatgatgcatgatcgatctctttctgaattctgatcttccagttctctccattgatcactgttactactagtcatcgcttgatcgatgtgtggttagagagctgcatgcgtcagtgcagtactagactagtagagcatgggaagcttctttttaggctggcttcgagtccgatggcgtgtacgtacgtggtacacaggcatgcatgtggtgtgtagctcattggttttgcaggggcattgtgaagcgaaggatgaagggaaggactcggttggggaggaagaaagaaaaatggacccccatcaccatgcatgtatgtcaaacttagctacagtatgtttggtaacggcaatgcatcaagcttttggttgtagatgtagatcttgggaagggtttgcagctgatctatgactttgtgttgatccaaacagtagtgattccatccttttctagcttaacttgttattgttgttaacttctatgggatgtgtagaggtcatataaagttatagtagtagtagttgcaaaaggggtttttgagcgcatgtaatttaatttgtatagtactcctactatcttattgttatatttacagccaaactataatgcacatctttttgctccttgtttctgaaaaaaaaaaaaaaaaaa

SEQ ID NO: 385195 - DNA, 891 bp, Oryza sativa
  unsure (1)..(891): unsure at all n locations
acaccacatcgactgattagctagttagctcctcttctcttcccctcctacctccactcctactccattatccagcagttcgatcgatccatggctatctagcttctgatcttgatccctttcttcttctcatcgtccttgtttgttcttattcctagctacttagctagatctatcgatcagttcagacctcttaattcctgtcctgatcaatcacgttctgtctgtatcctttgattcgtcgacaatcctagtacttcatggagcagtgttagttagctagcaaaagtagtactttcatcaggagtgtctatcggcaaatagctaggttttctggcttaacacgtactttcattaatttggaagaacagcaagacaaagaaactgattaagatcagcgagtaatcgatgatggcaggagctcccccgatgcatatctgcatggactccgactggctcaagggcatcgtccccgaggagcacgggatggggtcgtcgtcgccgtcggcggagctgatcgcgtgcccgcgggcgccgatgcaggcggcggcggcggcggccgaccgccggctttcgcccccagcacgaccagccgctcaagtgcccgcggtgcgagtcgacgcacaccaagttctgctactacaataactacagcctctcgcagccgcgctacttctgcaagacgtgccgccgctactggaccaagggcggctcgctccggaacgccgccggggcgncaacccgcggccgacccgctctgaagccttggactatttgactggaagaagtacnacccgtcttcgccggctccggttgcggcggctccccgtggcggcgctgaaaaccttgttgctcgagcgaantaatggtctgaataatggaattgcggcg

SEQ ID NO: 385196 - DNA, 1428 bp, Oryza sativa
  unsure (1)..(1428): unsure at all n locations
gcccctccttccttgatggtcttggagctccaccgcggtggcggccgctctagaactagtggatcccccgggctgcaggaatgtggagctagctcgatctcgccgcgcgcgctcagctcgtcgacaaggcagcgtgcacccaccaagatagcgggatgatccagtgagcgcgtggaggcggtgtttgattctagattgttctagaaccgaacgagcgagcttagctagctagctagctgctgctgcttcgatcgatcggtcgttgcctcatgcaggagttccagtccatcccggggctcgccgggcggctgttcggcggcgcggcggcggctgacatccggcgcgcgcaggcgcagcagggcccggcgtcgcggtgcggcgggataccgtcgccggaggcggtgaagtgcccgcggtgcgagtcgaccaacaccaagttctgctactacaacaactacaacctctcgcagccgcgccacttctgcaagagctgccgccggtactggaccaagggcggcgtcctccgcaacgtccccgtcggcggcggctgccgcaagaccaagcgtagcggcagctcgtccgctgcgtcctcggccccgtcgacgccgacggcggcaactgacaacgccaagaaccagcggcgcgcctcggcgtcgtccccacgatccagtagcggcggtagcggcaacacgagccccacggccgccgcggcgacgaccccgacgacaccggccacgccgtcgtcgaacaccatcgccgtcataaaccacgcgacgacgacgacgacgacgacgaaccccttcccgacagacgtgccacctccggcgccgattttcgccgaccaagcggcagcgctcgcgtcactgttcgcccctcctccgccgccgcctctcccggtgttcagcttcgcagcgcaggcgaagaccgaggacgggattgcctccgttctactcgccggacagacgacggcgcccactgccgccaccgttgccgacatgacgccgttcacgtcgctggacgcggggatcttcgagctcggcgacgtgccgccggcggcgtactggaacgccgggagctgctggacggacgtcccggacccgaatgtctacctaccctagctcggtgtagttactcatcacgatcaccttgattaagtctttgattaagctgtggttaaaacgcttcttaaggacgaccactagctaccactagtatgtcttttactactacattcatctactctactgttctccctgtaagtttttttcttcttttccttgtcttctctagctgcacttctgctgctgcaaaggtacgtgtaactgtccaagaaagctaacatttgtgtatctactgcacgcgtgaaaaaaaaaatctgaattggatcnnnnnnnnnnnnnnnnnnnnnnnnnnnnnnnnnnnnnnnnn

SEQ ID NO: 385197 - DNA, 645 bp, Oryza sativa
  unsure (1)..(645): unsure at all n locations
gaattgtaatacgactcactatagggcgaattgggtaccgggccccccctcgagttttttttttttttttttaatgacaaatttgtaaatgcctcctttatttattattgatattaccacccagtatgcaatgtatacactccccaatttatccatgcaagttctataacaaaacacacactgacacacatgtaaggtgtatagatagtctacagcttgcaagaacatgagttatatgtgttccgatgtatctatgtcctttttcttccatcggtcggccggcttgctaggcgatgaaggctctggcgatgcggccgtcggcgccctgggggaagaacccgccggccttggcggggtcgccggagccgtacacnacgccgaggatctcctcgggcgttgcggtcgtaggcgancganaacggtcgccggcgatgatgttgccacggtctgcccctccggccctgcccggggccaccaccagccctcgtccttgancccttcctcccaacacttccgcagtcnganatttcgccgtgactccccacccgacccgtactcccacccaanacccngctcgtananaaccctgataccgntctgcccaatccgccaaacccgcncanttctggctnaggtaagactggt

SEQ ID NO: 385198 - DNA, 1568 bp, Oryza sativa
cactgttgctgctgctgctgctgcttgcaaacactgaataccctaacctctttcattaatttctcgctctgattttgaccgttagaacaaagctaagatgggccatacgtatactaggaggagtaccatcatattcatcttctttctagcttcctctcctcttcacattccctgcatccatccatctcaaccaccaccacctcatttcaggagatcatctcctccttttctttgctagggtttgtttgccataactactatctatcgcctcttcttcacctcacctgtcctgtcggccatggagagcttcgccagtctcgcaggaggtggcagcagcagcaccacagctcggttgccggagctgatctcgccggagaacccggaccacatctcgccgcccccgttgctgtaccagctgctcgccggcccggagtcgtcggcgcggcagcatgggcatgatgggcatcaccacggcggcggtggcggcgaagcagcagcagcagctgtgcagggacaggtctcgccggcaggcgcggaggcggcggtcaaggccgagatcatgtcgcatccacagtactcggctctcctagccgcctacttaggctgcaaaaaggtcggggcgccgccggatgtactgaccaagctcacggctgtgccggcggcgcagcagctggacgaagccgacggccaccctcgtcgccggcacgagccacagcgtgatgacgacccggatcagctcgatcagttcatggacgcgtactgcagcatgctgacgaggtacagggaggagctggagcggccgatcctggaagccgcggagttcttcagcagggtggagacgcagctcgattcgctcgctgagagtaattgtgaaggcacgggatcatcagaggaagagcaagaccctagtgacaagcagctgaagcaccagcttctgaggaagtacggtggctcgttgggcgatctccggcaggtgttctccaagaggaccaagaaagggaagcttcccaaggaggccaggcagaagcttctgcactggtgggagctgcactacaagtggccctatccctccgagatggagaagatgacgctggcgcagacgacggggctggaccagaagcagatcaacaactggttcatcaaccagaggaagcggcactggaagccgacgccggtggcaggcacggccttcccgacgatggaagctgccggaggcggcttccgacactccggccacggcggcggccttgcggcggcggcggcgctgccgctgtacatgggcaggccgttcgttgtggacggcatgtaccggctcgggtcttgaagcctctggggatcgcatggtgtttgcatggtgttttttgcttggtaaatatttgctagcagcttcccatgatcagcctgtgggatggtgaaatggaagaactgatgaatcttcatcacgatctttcctctcatttttttttctttggtgtgtgataaaagctcagatgtaccacgtactactgtctgcttctttgcaaatggatatgtaattgaaagctttaattctaaaaaaaaaaaaaaaa

SEQ ID NO: 385199 - DNA, 1345 bp, Oryza sativa
  unsure (1)..(1345): unsure at all n locations
ctgcttccnatctgcagcgccttccgcctcgccggcnagcaagccgncncgntcnacggnctcctctccctcccggacccgccctctgccctcctcccctgcgcgacctcctcgctcgctcgcccgcccgcccgacctccgtctccggttcgcgtccaattttgaggagtgaaatggatggggttgtcgccgcttcggctgatgccaccagggacgagattaagattatgaatgtgtacatatgggacatggatgaaaccctcattctgctcaagtcgctgctggatggctcgtatgctggtgcctttgatggcctcaaggaccatgataagagtgttgatatagggaagaggtgggagaatctcattctggaactctgtgacgagcatttcttctatgaggagattgagaattacaatgaaccctttctcagtgctgtcaaagaatatgatgatgggaaagacttgacaacatatgattttgaagctgactgctttagttcgccttatgatgatctgaataaaaggaagcttgcttacaggcaccgtgctattggagagaagtatacaaagggtttggaaaaaattctggaccaccacatgatcaaagtctggaatgatctgtatagcgcgaccgacaaatacaccgatggttggctttcttcagctcataagttgttggaagaagcaatgggtaaatcaacagctgagtccactagccaacattcaagcatcaattgcatagttacatcagggtccctgattccaagtcttgccaaatgtttgctctatcgtctggatgatgtggttgcattcgagaatgtttacagctcctgggaagtcgggaaactgcagtgcttcaaatggatcaaggagcgctatgatggcccaaacgtccgtttctgtgcaatcggagacggacacgaagaatgcaccgctgcgcagataatgaagtggccatttgtcaagatcgagttccaccctgatgcccctcataggttccctggctgaaccttccaaccattcatcgcatcatggataccgtttatgattcatcgagcaacgatggttaaccaacatcctgttggtcctcctgtttacctcagtcctccgatgccggcatttgccaattgccgtggagaccttgttaaaggaaattgtaagcagagagatgcgatgggaaggcatattgctgaccctctgcctggagaattaggaggctggtgtgtgataaataaagcgtccgactagttccggcatgtgtttctagaaagattctgtgctgttcgtgttgccattttactctgaccaggcaaatcgttcgtctgttggttgttgtaaaaaaa

SEQ ID NO: 385200 - DNA, 1915 bp, Oryza sativa
gagttgaggttgctgtatttatcgtctttgtcctcatctttctttcttgctttcctctaccttgactttggcttccccactctctcttcttcttgggaggctgggagctaccagcacaacacaccaaggaagctgaggtgcgttgatttcttgatatcatggccaagaggcacctcttgttggtgacaacttgtttgtgggctctgtcatgtgccttgctgcttcatgcttcctctgatgggttcctgagagtcaacctcaacaagaagagattggacaaggaagatctcactgccgccaagttggcgcagcagggcaaccgtcttctgaagaccggcagttcagacagtgatcctgtccctctggtggactacctcaacacccagtactatggggtgattggcctcggctcaccgccgcagaacttcacggtgatatttgacactggaagctccaacctgtgggttccttcagcaaaatgctatttttcgatagcatgctacctccacagcagatacaactcgaaaaagtcgagctcttacaaagcagatggagaaacttgcaaaattacatacggttctggggcaatttctggattcttcagtaaggataatgtgttggttggagaccttgtagtgaaaaaccagaagttcattgaggcaacacgcgaaacaagcgttacctttatcatcggaaagtttgatggaattcttggtcttggctaccctgaaatctctgttgggaaagctcctccgatttggcagagcatgcaggagcaggaactgcttgcagatgatgtcttctcgttttggctgaaccgagacccggatgcatcctctggtggtgagctcgtctttggtggcatggatccgaagcattataagggggatcacacctacgtccctgtttcccgcaaaggctactggcagtttaacatgggggatctccttattgatggccactcaactggcttctgtgcaaaaggctgtgctgctattgtcgactccggaacttccttgcttgctggtccaacagctatagttgctcaggtgaaccatgctattggggctgaaggaatcatcagcacggaatgcaaagaagtggttagcgagtatggagagatgatcctcaacttgctcatagcacagacagatccgcagaaagtatgcagccaggttggtctgtgtatgtttgacggtaaacgctcagtaagcaatgggattgaatctgttgtcgacaaagaaaacttgggttctgatgctatgtgttcagtttgtgagatggctgttgtgtggatagagaaccagctacgcgaaaataaaacgaaggagctgatattgaattatgctaatcagttatgtgagcgtctaccaagccccaatggagaatcaactgtcagctgccatcaaatctcgaagatgcctaatcttgcattcaccattgcaaacaagacatttattcttacaccagagcagtacatcgtgaaactggagcaaggagggcaaaccgtctgcatcagcgggttcatggcgttcgacatacctccaccacgcggtcctctttggattcttggagatgtcttcatgggtgcttatcatacggttttcgacttcggcaaagacaggatcgggttcgctaaatctgcatgaagagtgtatgtagatcactcttcagatcacggagattagcctgtatatttcataagctgaaaccaaacatgtatggttttatgatatatagtagctagtacacggacaaacctctttggttgcttctttctgaagaaaaaagaagaacagacatggatgtatgatctacctgatgtgtataaattgaatgatgcagtctgagaaataatcctctgatcaaaaaagaggccgacttcaaaaaaaaaacaaaacggttcctttggtcc

SEQ ID NO: 385201 - DNA, 685 bp, Oryza sativa
  unsure (1)..(685): unsure at all n locations
gcgatttaagttgggttaacgcccagggtttttcccagtcacgacnttttaaaacgaccggcccagtnagcgcgcgttaataccgactccacttataggncgaattggggttaccgngcccccccctcgaaggttcgaccccacgcgttccgcgactcgaaatcgatcgagagattattggcgagtcgaggagagtgcgcgagagagatggcgatgagatcggcgctgacctcactcccgttgcgcctccgctcccctgctcctgtggcggcggcgtgcggcgggatgcggctgatgagcgacggcaaggggcgcgtgctgagcgaggaggagcgggccaaggagaacgtctacgtccaggtttatttgaagatggagagggagaggatggagaagcgcaagaagaagctcgagaaggagaaggcggaggcagacaagggcaatcccgccgcctccgacaagaatacggaggggggatccaactaggagtgatgtgcttctgtctgaagacggacttgtttcacatgcctatgttggacaccggtgttcatacatgtcctaggatgaaagaataaattctgtaaaacatttgacagagctagattcatctgctctggtttccggtgcttgttcatgattgaatgaggctctattgtgttggacaagtaaaaaaaaaaaaaaaaaa

SEQ ID NO: 385202 - DNA, 794 bp, Oryza sativa
  unsure (1)..(794): unsure at all n locations
agtcgacccactgggggagttgggagagagagacagtttcacggagccaacgaagcgaagatcctctcgtctcgtgttctagggtttctcgcggcgatggaggcggcggctagggctccatccagggcggcggcgaggttcgtgcagcgcaggctcttttcctccggcggcaaggtgctcggcgaggaggagaaggccgccgagaacgtctacatcaagaaaatggaacacgagaagctggagaagttggcccacaagggccccaacccaggagagcaagcttcaaccgcagtgcttgcggctaacgctgtgaagactggaagcggctcaacggagtcaagatctgctggtgtgtcaactgacaaaaacaggaactatgctgtcctggcaggcactgttgctgctttgagtggcctggggtggtatctcttgtcaaagcctaagaagtctgaagatatagtggactgaaggtggttaatgagatcctagacggtctgtcattgagtttcaccctgttttacttgtttagaaataaatgctgaacacactgcactgagtttcctatagcatcactaaaactttcaagtatgcacccgagatatgttctcagttcttcatgccctgttttgactgttggcactgttctctgatgctgcatccttttgattgaagaggaattcggatacaagatagtaaatgaaatcccgttgtttctagtccttgtttgaaccaagtgttgttttaaatttcagcaagtgatggttttatttctnnnnnnnnnnnnnnnnnnnnnn

SEQ ID NO: 385203 - DNA, 1369 bp, Oryza sativa
  unsure (1)..(1369): unsure at all n locations
cccgtccgattccaggtcgaccacgcgtccgcgctcagctaagctctccaccattgcttgcaaagctggtcgtgtcactcctcccgttaagcttcccgcggcggcgagagcaagctaagctaggtcgggcatggggaaggacgaggtgatggagagcggcggcgccgccggcgagttcgcggccaaggactacacggacccgccgccggcgccgctgatcgacgcggcggagctggggtcgtggtcgctgtaccgcgccgtcatcgccgagttcatcgccacgctgctgttcctgtacatcaccgtggccacggtgatcgggtacaagcaccagacggacgcgtcggcctccggcgccgacgcggcgtgcggcggcgtgggcgtgctcggcatcgcgtgggcgttcggcggcatgatcttcatcctggtctactgcaccgccggcatctccggcgggcacatcaacccggcggtgacgttcgggctcttcctggcgcgcaaggtgtccctggtccgcgccatcctctacatcgtggcgcagtgcctcggcgccatctgcggcgtcggcctcgtcaaggcgttccagagcgcctacttcaacaggtacggcggcggcgccaacaccctcgccgccggctactccaagggcaccggcctcgccgccgagatcatcggcaccttcgtgctcgtctacaccgtcttctccgccaccgaccccaagcgcaacgcccgcgactcacatgtcccggtcttggcgccgctgccaatcggcttcgccgtgttcatggtccacctggcgacgatcccgatcaccggcaccggcatcaacccggccaggagcatcggagcggccgtcatcttcaacaacgagaaggcgtggcacaaccattggatcttctgggtcggcccgttcgtcggcgccgccatcgcggcgttctaccaccagtacatcctccgggccggcgccatcaaggccctcggctccttcaggagcaacgcgtgatatcaaggggttcgagaagccattgttgggggataatggctggaaggcgttgatgaagcaatggccatgatgatcgatgatgagttctaccgtgttaagattctcccttttcaaaaaaaattaagttcgccgctggtcgtttttgtttcagcagctgctcctcctcctgcttgtcgtgtgtgtgaagtgaacatccatgtgtttgtaatctgttttaaatcgagggatgtctcatgtgtttagcctgtactcccatttaatttagcgacgataagcatcgatgcccgcctctcctatctggaatatatcaatcagtttaatcaagtggttcgccgtaattgaaaaaaagaaaaaaannnnnnnnnn

SEQ ID NO: 385204 - DNA, 1343 bp, Oryza sativa
  unsure (1)..(1343): unsure at all n locations
cggacggtggncnggnacgcgtgggagaagagagaggtagagaagagagagcagagctaagctagctcagagtgagtagcgtgttgagcttgctgaagggagcggcaatgtcgaaggaggtgagcgaggagccggagcacgtgcggcccaaggactacaccgacccgccgccgggccgctgttcgacgtcggcgagctccggctgtggtccttctaccgggcgctcattgcggagttcatcgccacgctcctgttcctatacatcaccgtcgccaccgtcattgggtacaaggtgcagtcgtccgccgaccagtgcggcggcgtcggcaccctcggcatcgcctgggccttcggtggcatgatcttcatcctcgtctactgcaccgccggcatctccggagggcacattaaccccgcggtgacgttcgggctgctgctggcgaggaaggtgtcggtgattcgcgcggtgatgtacatcgtggcgcagtgcctgggcggcatcgtgggcgtgggcatcgtgaagggcatcatgaagcaccagtacaacgccaacggcgccggcgccaacatggtggccagcggctactccaccggcaccgccttcggcgccgaaatcatcggcaccttcgtcctcgtctacaccgtcttctccgccaccgacccaaagcgcaatgcccgcgactcccacgtcccggtgctcgcgccgctgcccatcgggttcgccgtgttcatggtgcacctggccaccatccccatcaccggcacgggcatcaaccctgcccggagcatcggcgccgccgtcatctacaaccagaagaaggcatgggacgaccactggatcttctgggcggggccgttcatcggagcgctggcggcggcggcgtatcaccagtacatcctccgggcggcagccatcaaggcgctgggctccttccggagcaaccccagcaactgagcttagatggccatggctgctctgctgctgctggcctggttggacttggtcatatcgtttgcatgtgagggagtgtgtgtgagagagggtggggggtgccagtcagccaggtgcatgatttgttgtttccagcttaaattatcatcaccgttactgttgttaatcaaaccggtgggatttgttgtatgtatgtatgtactaccttgattaatttagtttcgcttgtttgtgtaaccggtgttagtaattattagagatacaaactgcttcggctttttaagttcagtcgaccacccttgtaaaaccgctgtaagaacttccaccaccaattgccatctgcttttgttgctgttggattgcagttttccaannnnnnnnnnnnnnnnnn

SEQ ID NO: 385205 - DNA, 947 bp, Oryza sativa
ccacgcgtccgggcgttcggcggcatgatcttcatcctcgtctactgcaccgccggcgtgtccggcggccacatcaacccggcggtgacgttcgggctcttcctggcgcgcaaggtgtcgctggtccgcgcggtgctctgcgtcgtcgcgcagtgcctcggcgccatctgcggcgtcgggctcgtcaaggggttccagagcgcgccttctacgcgcgctacggcggcggcgccaacgagctcagcgacggctactccaagggcaccggcctcgccgccgagatcatcggcaccttcgtgctcgtctacaccgtcttctccggcaccgaccccaagcgcaacgcccgcgactcccacatcccggtgttggctcctctcccaattggattcgcggtgttcatggtccatctggccaccatccccatcaccggcaccggcattaacccggcgaggagcttgggaaccgcggttatctacaacaaggacaaggcctgggatgaccaatggatcttctgggtgggccccctgatcggcgccgccatcgccgccgcctaccaccagtacgtgctgagggccagcgccgccaagctcgggtcctaccggagcaacgcctgagatcggcggcggcggcgcgcgcgaggtggcgctgaagtgtagatacgcgtacaagatggccgcctctgtccagcactagatcaacgaattcagccttcgcatcctgcatttcgcctcgtggatagattctactgcactattatgtactatgtatccatgcatatggtctccattcctttgaactatgtccgccatatgttgcttcccgctggtgcttccaagtttggttaattttccttcacattctgcatgtatgtaatattcatatggagaatttgtgaatttgaagatcatagttactattatgtgcgatttattaagtactttctgcaa

SEQ ID NO: 385206 - DNA, 677 bp, Oryza sativa
ccacgcgtccgcccacgcgtccgcccacgcgtccgcccacgcgtccgagctgcacagagctagcgttagcttggttagttgttcttagcattctagctagctcaatggcgaaagacattgaggcgtcggcgccggagggcggcgagttctcggcgaaggactacaccgacccgccgccggcgccgctgatcgacgtggaggagctgaccaagtggtcgctgtaccgcgcggtgatcgcggagttcatcgcgacgctcctcttcctgtacatcacggtggccaccgtgatcgggtacaagcaccagtcggacgccaccgtcaacaccaccgacgccgcctgcagcggcgtcggcatcctcggcatcgcctgggccttcggcggcatgatcttcatcctcgtctactgcaccgccggcatctcaggtgggcacatcaacccggcggtgacgttcgggctgttcctggcgaggaaggtgtcgctgatcagggcggtgctgtacatcatcgcgcagtgcctgggcgccatctgcggcgtggggctcgtcaaggggttccagagcgcgccttctacgcgcgctacggcggcggggccaacgagcttagcgacgggtactccaagggcaccggccttgccgtcgagatcatcgggacctttgtgctcgtgtacaccggttttt

SEQ ID NO: 385207 - DNA, 348 bp, Oryza sativa
  unsure (1)..(348): unsure at all n locations
gctaagcacacacagcgcgctcacagtgatcggagatggcgaaggacattgagggcggccgcggcggcggacgcgtgggcggggagtacatggcgaaggactactccgacccgccgccggccccgctgatcgacgcggaggagctgaccaagtggtccctgtaccgcgcggtgatcgccgagttcgtggccacgctgctcttcctctacatcacggtggccacggtcatcgggtacaagcaccagtcggacccgggcgcgaacgcntcaacgtcgcgtgcaggttattccncnttcgcnagatacccntngcancattcggcnanatnatctnaacggcttttggtag

SEQ ID NO: 385208 - DNA, 630 bp, Oryza sativa
  unsure (1)..(630): unsure at all n locations
gcttgtcgaggagatggcgagcggccgcaccgcgcgggactgcgcgtacatgagtacaggtacccagcgtctgcgccgctgatcgacgcggcggagctggggtcgaggacgctggaccgatccgtgatgggcgagttcatcgacacgctgatgttcctgcacatcaccgtggacacggtgatcggttacaagcaccagacggacgcgtcggcctccggcgccgacacggcgtgcggcggcgtgggcgtgctcggcatcgcgtgggcgttcggcggcatgatcttcatcctggtctactgcaccgccggcatctccggcgggcacatcaacccggcggtgacgttcgggctcttcctggcgcgcaaggtgtccctggtccgcgccatcctctacatcgtggcgcagtgcctcggcgccatctgcggcgtcggcctcgtcaaggcgttccagagcgcctacttcaacaggtacggcggcggcgccaacaccctcgccgncggctactccaagggcaccggcctcgccgcgagatcatcggaccttcgtgtcgttacaccgcttctcgcaccgacccaaggcacgccggactacatgtccggctggcgcgtgcatcgcttgcggtatggcact

SEQ ID NO: 385209 - DNA, 1210 bp, Oryza sativa
  unsure (1)..(1210): unsure at all n locations
ggcaacggcagcacaggcacagcagcagcgtggtggtgagagtnagaagcatgtnacccctcttaaaaacacttcgccgagaagtcacgcaccaaacaccaccaagaacgaacaactcttctccccctctccccctccttccttgctcctcctcccatcttgtctcctccctctctctcgcaaagtcgcaacgcgctcctcctcggtgaaacgggagtgaggtgcgtgcggccatggcgtccagcgcctcccggttcatcaagtgcgtcacggtgggcgacggcgccgtgggcaagacctgcatgctcatctgctacaccagcaacaagttccccactgactacataccaacggtgttcgacaatttcagcgcaaacgttgttgtggacagcaccacggtgaatctgggcctctgggatactgctgggcaagaggattacaaccggctcaggcctctgagctatcgtggtgctgatgttttcgtgcttgccttctctcttgtgagccgagctagctatgaaaatattatgaagaagtggataccggagctacagcattatgcacccggcgtgcccattgtgttggttggcacaaaattggatctccgtgaagacaagcactacttgttggaccatcctggcatgatacctgttaccacagcacagggtgaagaacttcgaaaacaaataggtgctgcttattacattgagtgcagctcaaagacacaacagaatgtcaaaggtgtgtttgatgctgctatcaaggtagtaatccagcctccaactaagcagagggaaaagaagaaaaagaaatcacgacaaggatgctctatgatgaacatgttccgtggaaggaaaatgtcatgcttcaaatcctgattgatcgagatgtcccttacatgatgcaatgttctgggtgcaacctcaagctggcaacctttggagtctgaatgtgctggtagagttagatgcaaagttcttgtgtatatttgcatcttttggtaattaattactagagttagatggttaaactagtctgcttatgtaccgcacaatgcttcttattattagctcttgttggtctagaaagtctgatagatgccaaaggaacaaggagacaccgttctgtcaggacaaaatcacagattttgtaatcaaaaaaaaaaaaaaatatcgtcattagaacattttatgattcgatggtagaactg

SEQ ID NO: 385210 - DNA, 1143 bp, Oryza sativa
cgcgtccgacgtgagagtgaacaagagataagctaagctagtacagcaaccagcaagaacaaagaagagtggccggagtgggcgggggagatgagctcggcggcggcggcgacgaggttcatcaagtgcgtcaccgtgggggacggcgcggtggggaagacgtgcatgctcatctgctacacctgcaacaagttccccaccgattacatccccaccgtgttcgacaacttcagcgccaatgtctccgtggacgggagcgtcgtcaacctcggcctctgggacactgcaggtcaggaggattacagcaggttgaggcctctgagctacaggggagccgatgtgttcatcctgtccttctccctgataagcagggcgagctatgagaatgttcagaagaagtggatgccagagcttcgccggtttgcgcctggtgttcctgtagttcttgttggaaccaagttggatctccgtgaagatagggcctatcttgctgatcatccagcttcttccataataacaacggagcagggagaagaactgaggaagctaataggagcggtcgcctacatcgaatgcagctccaagacacagagaaacattaaagctgttttcgacactgccatcaaagtggtgcttcaacctccaagacataaggatgtaaccagaaagaaactccaatcaagctccaatcggccagtaaggcggtacttttgcggaagcgcttgtttcgcgtagtcaataaccaagaagaaaaaaatgtggtttttgttccatcaccatgatgttcagatggccccatggatctactcagaatgggatagaagatcatggttgaatcaacattgcttgcagctaggaggaaacttctagttctctttttttctgcagtggagctccttttgtttctcctttctcttttttttcttatgtcgtaaaagctccagaaagttttacccttggtaataagatgtgctcttctggatggctaaaaaaaaaaaaaaaaaaattcactttgcgaaatgttggaaactactggacctaacagacctaacagacaaacaaaaaagaagccacatgcttcaaccttttcttatatactttggattgaatacataggaagttaattaaaaaaaaaaaaaaaaa

SEQ ID NO: 385211 - DNA, 1087 bp, Oryza sativa
aacaaagcagcttgccaccgtccctgcctctcctgctttgctttgccttctcggagaagacaaatctactgtagctgcttgtctctgttcgccggtggcgaccgtgagaggaggaggtagtcctagtcctagtaggcgagatgagcggcgccaccaagttcatcaagtgcgtcaccgtcggcgacggcgccgtcggcaagacctgcatgctcatctgctacaccagcaacaagttccccaccgattacatccccaccgtgttcgacaacttcagtgctaatgtttcagtggatgggaacatcgtcaacttgggattatgggacactgctggacaagaggattacagcaggctgaggccactgagctacaggggagcggatatatttgtgctggcattctcactgatcagcagagcaagctatgagaatgttctcaagaagtggatgccggagcttcgccggttcgcaccgaatgttccaattgttcttgttgggaccaagttagatctacgtgaccacagatcttaccttgcggaccatcctgctgcttccgcaattacgactgcacagggtgaagaacttagaaagcagataggcgccgcggcctacatcgaatgcagttcgaaaacacaacagaacatcaaggccgtgtttgatactgccatcaaggtggtccttcagcctcctcggagaaggggggagacgacgatggcaaggaagaagacaaggcgaagcaccggctgctcgttaaagaacttgatgtgtggcagtgcatgtgttgtttaggacctgtctgaattcttgaaggtgtgtaagcgttgtgtaatggcaagtgaatttgctgactgttctgctgcttccatttactactactaagctctttcgtgtgtttgaattactacatctaaaactagagcatcaggctcatagactgacttcatatcaggtgtttgtatcattaatattattatgtaagaaggttgtggtttgtggaacaactaaatacaacaatgcaggctatgttgtactatgctctgctactggtgtttgttataaatatcacatcctgctaaaaaaaaaaaaaaaaa

SEQ ID NO: 385212 - DNA, 756 bp, Oryza sativa
  unsure (1)..(756): unsure at all n locations
ccacgcgtccggtgagaacagttcagagaggaagcatgtgacacttccctctgtccctctctctctctctagcctccaaccatcgcttcaccaagaagccatcacctcctcctctctatcaagttctctcccctctcttgctgtctctgcttgctgctgctgctgctcgattcggccggcggccatggcgtccagcgcgtcgcggttcatcaagtgcgtcacggtcggggacggcgccgtcggcaagacctgcatgctcatctgctacaccagcaacaagttccccactgattacgtacccactgtttttgacaatttcagtgcaaacgtggtggtcgacggcaccacggtgaatttggggtctctgggatactgcagggcaggaagattacaacagattgaggccgctaagctaccgtggcgccgatgtctttgtgcttgccttctccctagtgagccgagctagctatgagaatgtcatgaagaagtggttaccagagcttcagcattatgcaccaggggtgccaattgtgttggttgggaccaaattggatcttcgtgaagataaacactacttacttgaccatcctagcttggtgcctggtgactacagctacaggggaggagggaaactcccgnnaaagccacaatttgngcggcaacggtggtttaccatcggaattgcaggctccaaaaggaccacagcaagnaattgtaaaaagcttgttngttttggattggttgcccatcaaaggg

SEQ ID NO: 385213 - DNA, 1040 bp, Oryza sativa
aatcgcgcggatcaacagactcgagtaggggagagagagagagagagagagagagagagagagagagagagagagaaggcgacgcggcaatcgatctgcccgcctcacctccggccaccgaccaccgccgcctccgcgtccctctgcctcacctcgacgccggctagcatcgccggcgatgggttgctcctcctccgtgccagctcgaagcactggagggttgaacaatattagcaacgataactccgctactgattcaaaggacttgcgtgctaagttggtattgcttggtgactctggtgtagggaaaagttgcattgttcttcgctttgttcgtggtcagtttgatcccacttccaaggtaactgtcggtgcatcatttttatcacaaacattggctttggaggactcaacaatagtgaaatttgaaatatgggataccgctggacaagagaggtatgctgccttggcacctctttactacagaggagctgctgctgcagttgttgtctacgacataactagtccagaatcatttagcaaagcacaatactgggtgaaggaacttcaaaaacatggtagtcctgatattatcatggttttggttggtaataaagctgatctacataaaaatcgacatgtatcttctcaggaagcacaagagtatgcagagaagaataatatggttttcatcgagacatcagcaaagacagctgataatataaaccaagtatttgaggaaattgcgaagaggttgcccaggccaacggcgtcttgataattagcttcggtgtttgttgaagtggaacacatacaagctggtaatgtgcatgtaacatgtctgtcagggcaaaaactgctgtatggtcgattgtttggaaaacaaaggatactgtacagtttatcccattgtgttcaatcgtatcgtattgtatatgttaatagtgccgtcgtgtaacatcttagtttactaaaacaatctaatatcggtactaaaaaaagttgcttagttgctgtgcctgtgtaaaaaaaaaaaaaaa

SEQ ID NO: 385214 - DNA, 865 bp, Oryza sativa
cccacgcgtccgcccacgcgtgcggcacatagcagctctagctagctacaggcatcagtggtcagtagagtgatcagttgcaactagctagctagttagattatatcttcagtgatggctccggcctgcgtctccgacgagcacgccgtcgcggtgtcggcggagcggctgtggaaggcgttcatggacgcgtccactttgcccaaggcctgcgccggcttggtcgacgacattgcggtcgaggggaacggtggtccgggcaccatctacaccatgaagcttaaccctgccgcgggtgtgggaagcacatacaagacccgggtggcggtgtgcgacgccgcaagtcatgtcctaaagtcggatgtgctcgaggcagaaagcaaggtggggaagctcaagtcacactcgacggagacgaagcttgaggccaccggcgatggctcctgtgtggccaagctcaaggtggagtacgagctcgaggacggcagctcactgtcgccggagaaggagaaggacatcgtggatggctactatggcatgctcaagatgatcgaggactacctcgtcgctcaccctgccgaatacgcctaagatgaagaggaatactgcctctatccagtatatcccacctagagtgagtgataattaaataatgagagccgcagaaatgtccaaattctcgtggcgtttgagtccgtgagagtaatttcgtgctttaagtttgtggttgtgtttatgtgcctttctatggtcgtattcagtgttaaagttatcattttgcttcatcaatgggtgaataaagagaggcaagtctgaatgtgttctgctatggtttggaggttaatatggaagattgaaaatcaaa

SEQ ID NO: 385215 - DNA, 2943 bp, Oryza sativa
gtcgaatcctcctccgagaagaggagagtacatgaatcctagcgcgaggatctcgcaggtagcaatggcggcgatactgccggacctggcgacgcaggtgctggtcccggcggcggccgtggtcggcatcgcgttcgcggtggtgcagtgggtgctggtgtccaaggtgaagatgaccgcggagcggcgcggcggggaggggtcccccggcgcggccgccgggaaggacggcggcgccgccagcgagtacctcatcgaggaggaggaggggctcaacgagcacaacgtcgtcgagaagtgctccgagatccagcacgccatctccgaaggagcaacttctttcctcttcactgaatacaagtatgttggactattcatgggcattttcgcggtcctgatcttcctcttccttggatctgttgagggattcagcacaaagagtcaaccttgccactacagcaaggataggatgtgcaagcctgcccttgcaaatgctatcttcagtactgttgcctttgtgcttggtgcagtcacctctcttgtatctggtttccttggaatgaagattgcaacttatgcaaatgccaggacaacccttgaggcaaggaagggtgttgggaaggcattcattactgctttccgctctggtgctgtcatgggtttcctgcttgctgcaagtggccttgttgttctttacattgccatcaacttgttcggaatttattatggtgatgactgggaaggtctttttgaggctatcactgggtatggtcttggtggttcttctatggccctatttggccgtgtaggtggcggtatttacacgaaagctgctgatgttggtgctgacctagttgggaaagtagaaaggaatatccctgaagatgacccaagaaacccagctgtcattgcagataatgttggtgacaatgttggagatattgctggaatggggtcagatctctttggttcctatgctgagtcatcttgtgctgctcttgtcgttgcttcaatctcttcttttggaattaaccatgaattcactcctatgctgtacccgctcctgattagctcagttggtatcattgcttgtctgataaccacacttttcgccactgatttttttgagatcaaggctgttgatgaaattgagcctgccctcaagaagcaacttataatttccaccgttgtgatgacggttggcattgcacttgtcagttggttaggcctcccatattccttcacaatattcaactttggtgcccagaagactgtgtataactggcaacttttcttgtgtgtggcggttggtctttgggctggactaatcatcggatttgtgacagagtattacacaagcaacgcctacagccctgtccaagacgttgctgattcctgcagaaccggagctgctactaatgtcatctttggccttgctctgggatacaaatctgtcattattcctatttttgctattgcttttagtattttcctcagcttcagccttgccgcaatgtacggtgtagctgtggctgcccttggaatgcttagcacaattgcaactggtcttgccattgatgcctatggccctatcagtgacaatgctggaggaattgctgagatggctggcatgagtcacagaattcgtgagagaactgatgctctggatgctgcaggaaacaccactgctgccatcgggaagggtttcgccattggctcggcagccttggtgtctcttgccctctttggtgcctttgtgagccgtgccgccatctccactgtcgatgttctgacacctaaagttttcattggactgattgttggtgctatgctcccatactggttctctgctatgaccatgaagagtgttggcagcgcagcgctcaagatggtggaggaagtccgtaggcagttcaactccatccctgggctcatggagggcacaaccaagcctgactacgcaacctgtgtgaagatctccactgatgcatccatcaaggagatgattcccccaggtgctcttgtcatgctcagccctctcattgttgggatcttctttggtgtcgagaccctctcaggactacttgctggtgctctcgtttctggtgttcagattgccatctctgcatcaaacactggtggtgcctgggacaacgcaaagaagtacattgaggctggtgcatctgagcatgcaaggaccctgggcccgaaaggctcagactgccacaaggctgctgtgatcggcgacaccattggggatcctctcaaggacacctcaggcccctcgctcaacatcctcatcaagctgatggctgtcgagtcgctcgtgtttgccccgttcttcgccacccatggaggcatcctcttcaagtggttttagatggtgacgatagatttacgaggacgttatttttgccaggagggcgctggaaatcatccatatattatagagttcatcgagttgacacatatagttccctccgtttcctatttgttattactgtctgtccatcagtcgatcatgctaagcttattagcatcatacctgtgtctagtttttttgagtctggtagttgtagccgatgggagcaaatcactggccacctacaggtttggacaagagtaccttgaatttgcgttttcctgtaggttggatgatacgatgatggtgatgattattgtacgtgcacggaatgcacctgtctcagtgaaattttcccgggaaggttctgctgtttctttatgtccttgtgggaatgttaggatgatcttgtacaaaaaagaaaacaactctagtgatagggggtggagtacatgtgtgccaactaagtttgagttgtcttgaattattgaagtaaaatactttagctaaaatgacgtagtagtgcgtgtgcttgcttttgttttaagatagggaattatagtattattttgtataccccc

SEQ ID NO: 385216 - DNA, 2761 bp, Oryza sativa
  unsure (1)..(2761): unsure at all n locations
ttagagacgcgtcacctcctccccgccgccgccgccgccgcctcgcctccgttgcaaccgtagtagggttagggttttcgtggtgggcgccgccgccatggcgatcctctcggcgctcgggaccgaggtgttcatccccgtcgcggccgccgtcggcgtcgcgttcgccgtcgcgcagtggctgctcgtcgcgcgggtgaaggtcaacccggcgcacgcggcggcggccgcggcgtcgggggggagcaagaacggcgggtacggggactacctcatcgaggaggaggaggggctcaacgaccacaacgtcgtcgtcaagtgccacgagatccagaccgccatctccgaaggagcaacatcatttctcttcacggagtaccaatatgttggtatcttcatgtcaatcttcgctgtcgtgatcttcctcttccttggttcagtcgagggattcagtacaaagagccagccttgcacatacagcaaggacaagtactgcaagcctgcccttttcaacgcgctctttagcactgcatctttcttgctgggagcgatcacctctttggtctctggttaccttggaatgaagatcgccacatttgccaatgccagaactaccctggaagcaaggaagggtgttgggaaggcatttatcattgctttccgctctggtgctgttatgggcttcttgctggcatcaagtggtcttgtggttctttacatcgccattaatgtatttaagttgtattatggtgatgactgggaaggtctttttgagtctatcactggttatggtcttggtggatcttccatggctctcttcggaagggttggtggaggtatttacactaaggctgctgatgtgggtgctgatcttgttggcaaggttgagaggaacatccctgaagatgatcccaggaacccagctgtgattgctgacaatgtcggtgacaatgttggtgatattgctggaatgggatcagatctctttgggtcatacgccgaatcatcctgtgctgcccttgttgttgcttccatttcttcctttgggatcaaccatgatttcactgggatgtgctacccgctgctggtcagctccatgggcatcattgtctgcttgatcaccactctctttgccactgacttcttcgagatcaaggccgtgaaagaaatcgaaccgtcactaaagaagcagctcatcatttctacggctctgatgactgttggtattgcactggtcagttggttggcgctcccatacaaattcaccatcttcaattttggtgaacagaaggaagtcactaactgggggttgttcttgtgtgtttcgatcggtctatgggctggtctgatcatcggatacgtgacagagtactacactagcaatgcatacagccctgttcaggatgtcgcagatgcttgcagaactggtgctgccaccaatgtcatatttgggcttgctctaggatacaagtctgttattatcccaattttcgctatcgcgcttggtatctacgtcagcttcaccattgctgcgatgtacggcatagcagtggctgcccttggcatgctgagcacaattgccactggactggccattgatgcttatggtccgatcagcgacaacgccggtggtattgctgagatggcagggatgagccacagaatccgcgagagaaccgacgcccttgacgctgctggaaacacaaccgctgctattggaaagggttttgccattggatcagctgctctggtgtcccttgcactttttggtgccttcgtcagcagagctggagtgaaggttgttgatgtcctgtctccaaaggtgttcatcggattgattgttggagccatgctcccgtactggttctctgccatgaccatgaagagtgttggaagtgccgccctcaagatggttgaggaggttcggaggcaattcaactccattcctgggctaatggagggaactggcaagcctgactatgccacctgcgtcaagatctccactgatgcttccatcaaggagatgattccccctggtgctttggtgatgctcacccccctcatcgtcggaactctctttggtgtggagaccctgtctggtgttctggctggtgctcttgtttccggagttcagatcgccatctcggcctccaacactggtggcgcatgggataacgcaaagaagtacattgaggctggtgccagtgagcatgctcggacccttggtcccaagggatcagactgccacaaggccgccgtgatcggtgacaccattggagaccccctcaaggacacatcaggcccgtcgctcaacatcctcatcaagctcatggccgtcgagtcccttgtgtttgcgcctttcttcgccacacacggtggtctgctgttcaagtggttctaagaacataataccattggcagcagcgctgaaatcttcgacggacatcacgaataacgactgccagtgtacgttgtgcttgggaatcgcccgcaccgtttctttttgggtctcatgttgtttcaggattgctgttgtcttatctttggcctcttgggagttgttaccttagccttactgttagcttcacttagaagagaccagagtccagatgttctcccatctctggtgcgtgtctggcaaattttcctcgtcccatgatgacgacgataatgtttgaactcttgaacaatgagatgatgattgttgcatgttagttactggtggtnnnnnnnnnnnnnnnnnnnnnnnnnnnnnnnnnnn

SEQ ID NO: 385217 - DNA, 1076 bp, Oryza sativa
ccacgcgtccgaaccgacgctcttgacgctgctggaaacacaaccgctgctattggaaagggttttgccattgggtcagcagcactggtgtcccttgcactgttcggcgccttcgtcagcagagccggggtgaaggtggtcgacgtcctgtcccccaaggtgatcatcggattgatcgtcggagcaatgctcccgtactggttctccgccatgacgatgaagagcgtcggcagcgcggcgctgaagatggtggaggaggtccggcggcagttcaacaccatccccgggctgatggagggcacaggcaagccggactacgccaactgcgtcaagatctccaccgacgcctccatcaagcagatgatccctcccggcgccctcgtcatgctcacgccgctcatcgtcggcaccctcttcggcgtccagaccctctccggcgtcctcgccggcgccctcgtctccggcgtacaggtcgccatctctgcgtcgaacaccggtggcgcatgggacaacgcaaagaaatacatcgaggctggggcgagtgagcacgcgaggtcgctggggcccaagggatcggactgccacaaggcggcggtgatcggcgacaccattggcgacccgctcaaggacacgtcgggcccgtcgctgaacatcctcatcaagctcatggccgtcgagtcgctggtgttcgcgccattcttcgccacgcacggaggaattctattcaagctcttctaggagagagagatttaaaattcgatcgaatttgaggacggacggagattttcgaataataactagaccacgggatcatgtgggctgaaaaaaaggaacctctgcaaataatgttgctttggtggtagtgggacactatctctacgatttaattttgtctcatgtaggttttgtaatttgtttttaacttgctgcgtcgttttcagtttctgtctgcctgagccctgaggcatcgtgaacttcttttagctgatgtacggcttgtataaagtgaccagatggttttcatctgcagtttatgtgcatatttttgtcatcttaacaatgtcgcgcccgttgat

SEQ ID NO: 385218 - DNA, 702 bp, Oryza sativa
aagaggagagagagagtacagcggtatagagagagagacacagagagagagagagagagagcagcagcaggtagcaggtcgaggagggtttgtggccatggcgatcctgtcggatgtggccaccgaggtgctgatcccgatcgccgccatcatcgggatcgggttctccatcgcgcagtgggtgctggtcgcccgggtcaagctggcgccgtcgcagccgggagcgtcgaggagcaaggacgggtacggcgactcgctgatcgaggaggaggaagggctcaacgaccacaacgtcgtcgccaagtgcgccgagatacagaacgccatcgctgaaggagcaacatcgttccttttcaccgaataccaatacgttggcgttttcatgtcgatattcgcggtggtgatcttcctcttcctcggctccgtcgagggattcagcacaaagacccacccctgcacatacagcaaggacaaggagtgtaagcctgctctgttcaatgccctgttcagcaccgtctgcttcctgcttggagccatcacctcagtggtttctggcttcctccggatgaagattgcgacttacgcaaatgcgcgggccaccctggaggcgaggaagggtcgtggctaggccttcatcaccgcgttcccgttgggagcggtgatgggattattgctggcatcaaatgggcttctggtgcttta

SEQ ID NO: 385219 - DNA, 1168 bp, Oryza sativa
cccacgcgtccgcccacgcgtccgcggacgcgtcgagtcgtcttctccccttcttctcctcctcctcctcgattcggagctccacccgcagccatggctaagaactaccccgtcgtgagcgccgagtaccaggaggccgtcgagaaggccaggcagaagctgcgcgccctcatcgccgagaagagctgcgcccctctcatgctccgcctcgcgtggcactcggcggggacgttcgacgtgtcgtcgaagaccgggggcccgttcgggacgatgaagaccccggcggagctgtcgcacgccgccaacgcggggctggacatcgcggtgcggatgctcgagcccatcaaggaggagatacccaccatctcctacgccgatttctaccagcttgccggagttgtggccgtcgaggtgtccggtggacctgccgtccccttccacccaggaagggaggacaaacctgcacccccacctgagggccgtcttcctgatgctaccaagggttctgaccacctaaggcaggtcttcggtgcgcagatgggcttgagtgatcaggacattgttgccctctctggcggtcacaccctgggaaggtgccacaaggaaagatctggttttgagggaccttggacaagaaaccctctgcagtttgacaactcttacttcacggagcttctgagtggtgacaaggagggccttcttcagcttcctagtgacaaagccctgctgagtgaccctgccttccgcccactcgtcgagaaatatgctgcagatgagaaggctttctttgaagactacaaggaggcccacctcaagctctccgaactggggttcgctgatgcttaagaggtttctagtctactactgctagtacattgcccgtggtactcttgttttgcatctaggctagggccagtgtgaaccagcagactaccactgtgagtcgcctctgtaataaaatttgttcggcctatggccatcctcagtacgttgtcaatgtctcggtgggctgttatgctcaactgcaatgctgcatccactgaaacctctttctagatgtgttggtatgaaatgcggtattgcgttcccgatttcccctgctactgtcttgaacctgccgtggtacaatccttgtttgctgcacttcatttttaaaaaaaaaaaaaaa

SEQ ID NO: 385220 - DNA, 2587 bp, Oryza sativa
  unsure (1)..(2587): unsure at all n locations
gcggctgcggcggcaaggcggcgagacgtgggagagggatttacaggtagagggagagggtggaggaggagaggctgaggctaggaagcggtttcgccatggcgagcgtcgacccgtcccggagcttcgtgagggacgtgaagcgcgtcatcatcaaggtgggcactgcagttgtctccagacaagatggaagattggctttgggcagggttggagctctgtgcgagcaggttaaggaactgaactctttaggatacgaagtgattttggtcacctcaggtgctgttggagtggggcgacagcgacttaggtaccggaagcttgtcaatagcagctttgctgatctgcaaaagccacagatggagttagatggaaaggcttgtgccgctgttggtcagagtggactgatggctctttacgatatgttgtttaaccaactggatgtctcgtcatctcaacttcttgtcaccgacagtgattttgagaacccaaagttccgggagcaactcactgaaactgttgagtcattattagatcttaaagttataccaatatttaatgaaaatgatgccatcagcactagaaaggctccatatgaggattcatctggtatattctgggataatgacagtttagcaggactgttggcactggaactgaaagctgatctccttattctgctcagtgatgtggatgggttgtatagtggtccaccaagtgaaccatcatcaaaaatcatacacacttatattaaagaaaagcatcagcaagaaatcacttttggagacaaatctcgtgtaggtagaggaggcatgacagcaaaagtgaaggctgctgtcttggcttcaaatagcggcacacctgtggttattacaagtgggtttgaaaatcggagcattcttaaagttcttcatggggaaaaaattggtactctctttcacaagaatgcgaatttgtgggaatcatctaaggatgttagtactcgtgagatggctgttgccgcaagagattgttcaaggcatctacagaatttgtcatcagaggaacgaaaaaagatattgctagatgttgcagatgctttggaggcaaatgaggatttaataaggtctgagaatgaagctgatgtagctgcggcccaagttgctggatatgagaagcctttggttgctagattgactataaaaccaggaaagatagcaagccttgcaaaatctattcgtacccttgcaaatatggaagaccctataaaccagatacttaaaaagacagaggttgctgatgatttagttcttgagaaaacatcttgcccattaggtgttctcttaattgtttttgagtcccgacctgatgccttggttcagattgcatctttggcaattcgaagtggtaatggtcttctcctaaaaggtggaaaagaagctatcagatcaaacacgatattgcataaggttataactgatgctattcctcgtaatgttggtgaaaaacttattggccttgttacaactagagatgagatcgcagatttgctaaagcttgatgatgtcattgatcttgtcactccaagaggaagtaataagcttgtctctcaaatcaaggcgtcaactaagattcctgttcttgggcatgctgatggtatatgccacgtatatattgacaaatcagctgacatggatatggcaaaacttattgtaatggatgcaaaaactgattacccagcagcctgcaatgcaatggagaccttactagttcataaggatcttatgaagagtccaggccttgacgacatattagtagcactaaaaacagaaggagttaatatttatggtggacctattgcgcacaaagctctgggatttccaaaagctgtttcatttcatcatgagtatagttctatggcctgcactgttgagtttgttgatgatgttcaatcagcaattgaccatattcatcgttatggaagtgctcatacagattgtatcgtcactacagatgataaggtagcagagacttttctacgcagagttgatagtgctgctgtatttcataatgcaagtacgagattctctgatggggctcgttttggattgggtgctgaggttggcataagcacagggcgtatccatgcccgtggaccagtgggtgttgaaggtctcttaactacacgatggatcttgcgaggacgtgggcaagtggtgaatggtgacaaggatgtcgtgtacacccataagagtcttcctttgcaatgaggtcaaatgctccttttagcctgttcaggagtaggtgaatatccttttaagaatggattgactactttattttgtcatcttgtacaagcatcttattgcggcattccgatggattattgattttgggggttcccactttcaaatgtgacaccaaaaataaattcatcagttctgagagcaagattttggaggttcagcttctccatgtaataagtaaattcagttctgagaacttgtgtaccaacgcgctatgttgcttgtaatgagcgatactaacatctgtgattgcacatatactaannnnnnnnnnnnnnnnnnnnnnnnnnnnnnnnnnnnnn

SEQ ID NO: 385221 - DNA, 2336 bp, Oryza sativa
  unsure (1)..(2336): unsure at all n locations
tcgttcgggcgaaacgccaaacgaaacgaggcgctgccctgccaccttcgcctcacgaacgccagcctcgctgtttcccctccctctcgcaccgctcgttcccgttcccacgcgtccgcccacgcgtccggttcagcttcccgttcaggttcaggcaatcacgcctcctctcctctcctctcctctccttcttcactccactccaacgccccacgccctcccccgctttataagggggagctccacatcaccacccttcccacaccatcgcggaagccaccgcatctttcctcctctttccctggagccatttcctcccctaaagggcctttccttttcttgatctctcttctatcttcgatccatccatccatccggccatccttcctaggtgaatttcaacgatgcagttcagcagtgtgtttcccttagagggtaaagcatgcgtgagcccaataaggagaggtggtgagggctcagctagtgatagattgaagatcggggacagtagcagcatcaagcatgatagagcagtgaggaggatgtgtcttggttataggggcaccaaaaacggtgcacaatgtgtgctcacctcagatgctggcccagacactcttcatgtccgaacatcattccggaggaactttgcggatccaaatgaggttgctgctgttatattgggtggtggcaccgggactcaactttttcctctcacaagcacaagggccacgcctgctgttcctattggaggatgctataggcttatcgatatccccatgagcaactgtttcaacagtggcataaacaagatattcataatgactcaattcaactcagcatctcttaatcgtcacattcatcgtacgtaccttggtggtggaatcaactttactgatggttctgttgaggtattagccgctacacaaatgcctggggaggctgctggttggttccagggtacagcagatgcagttagaaaatttatctgggttcttgaggactattacaagcataaagctatagaacacattttaatcttgtcaggagatcagctttatcgtatggactacatggagcttgtgcagaaacatgttgatgacaatgctgacattactttatcatgtgctcctgttggagagagtcgagcatctgactatggactagtgaagttcgacagttcaggccgtgtaattcaattttctgaaaaacccaagggcactgacttggaagcaatgaaagtggataccagctttctcaattttgccatagacgacccgactaaatttccctacattgcttcgatgggagtttatgtcttcaaaagagatgttcttttaaaccttctaaagtcaagatatgcagaactacatgactttgggtctgaaatcctcccaagagctttacatgagcacaatgtacaggcatatgtcttcgctgactactgggaagacattggaacgatcagatcgttctttgatgcaaacatggccctttgcgagcagcctcccaagtttgagttttatgatccaaaaactcccttcttcacttcacctcgatatttgccgccaacaaagtcagataaatgcaggattaaagatgcgataatttcccatggctgtttcttgcgtgaatgtaccatcgagcattcgatagttggagtccgctcacgccttaactctgcatgtgagctcaagaataccatgatgatgggtgcggatttgtacgaaactgaagatgaaatttcaagactactgtcagaaggcaaggtccccattggtgtaggggaaaacacaaagataaacaactgcatcatcgacatgaacgcgagggttggaaggaacgtggtcatcacaaacagcgagggtgtccaagaaagtgatcggcctgaggaagggtactacataaggtcgggaatcgtggtgatcctgaagaacgcgaccatcaaggacgggaaggtcatataggagagctcgctgatgccacagatctctgaaccctgaacctgcaaatgcagtgcagtgcgtcttttcttgaggggttaggacatgcaagctcgttgattccacatggcagagaactcgagggaagatcccaggaagacggatgatcgagaaagattgtgtagtactagcagttcttcgctcgttaaaatgtgtgtactaaataactaataagctgccccgagtgaagtagcagcagcaactttttggagggtcgttggtgcatctcatgtgtaaataaactcaaaactggtaaaaaaatgtatccatcatgccattatctcccnnnnnnnnnnnnnnnnnnnnnnnnnnnnnnnnnnnnnnnnnnnnnnnnnn

SEQ ID NO: 385222 - DNA, 514 bp, Oryza sativa
ttcttcccccgcattccgcgccggagctgaggagggacagcgagccagcgagggaggtggggcaatccagcgagcgccagatcgtgccgccagccccgctccgtcctctctccggcgaccctccgccccgcctgatcccgtggtggatcaactacaactcatctttaggaaagcctcttgaacattagccttgtgtgcctttcaacagtatggcctcggtaggtgtggtgcgttcttccttggggtttcagaacgaaacaagtacaagtggcgatgccgaccgacttccgaatgagatgagcaatatgagtataagggatgataataaggacattgacgacatagttgtcaatggcaatgggacagaacctggtcatgttattgtgacaagcattgatggaagaaatggacaggctaaacagaccattagctacatggccgagcgtgtcgtaggtcatggatcctttggaactgttttccaggccaagtgcctggaaaccggtgagactgtggc

SEQ ID NO: 385223 - DNA, 834 bp, Oryza sativa
  unsure (1)..(834): unsure at all n locations
gaacgcgtgggcggacgcgtgggcggacgcgtgggcgganngtgggcggacgcgtgggcgganngtgggcgcaactccaccgctcccaatctcgatcgaaacgcgagggtttcgcatctccgccgacgcctagaggaagaagggatccgccgccggtagccaagccatgccgaagaacaagggtaagggagggaagaaccgcaagaggggtaagaacgaggccgacgacgacaagcgcgactggtgttcaaggaggacgggcaggagtacgcccaggtgacgcggatgctcggcaacggccgctgcgaggccatctgcgtcgacggcaccaagcgcctctgccacatccgcggcaagatgcacaagaaggtgtggatcgccgccggggacatcatcctcgtcggcctccgcgactaccaggacgacaaggccgacgtcatcctcaagtacatgaacgacgaggcccgcctcctcaaggcctacggcgagctccccgacaccctcaggctcaacgagggcgtcgacgtcgacgggcccgaggacggcggcgaccacgacgactacatccagttcgaggacgaggacatcgacaagatctaagctcttttcttctttctccgcagctacaatttactgctatgttctaattaatagctatgtgtggtactatgtgggctggctgttatggattgtttggttgccggtttcatcttgtgatatgagatatttgtcatggtttgaggtggttaaataattgttggattccgtaactttaatctggtatacatgatggttatgcgtnnnnnnnnnnnnnnnnnnnnnnnnnnnnnnnnn

SEQ ID NO: 385224 - DNA, 451 bp, Oryza sativa
ccacgcgtccgaaaaccctagccgcgccgccgccgccgacgaccaggtaaggaaggagatccgccgccggcgccgccatgaagcgcaacccacgcgtgacgagctcccggaggaagtgccgcaaggcgcacttcacggcgccgtcgtccgtccgccgcgtgctcatgtcggcggcgctgtcgtcggagctccgccacaagtacaacgtgcggtccatcccgatccgcaaggacgacgaggtgcaggtggtgagggggagctacaaggggcgcgaggggaaggtggtgcaggtgtaccgccgtcgctgggtcatccacgtcgagcggatcaccagggagaaggtgaacggctccaccgtcaacgtcggcatccacccctccaaggtcgtcgtcaccaagctcaagctcgacaaggaccgcaaggccatcctcgacccgcaaggcgcgcggcc

SEQ ID NO: 385225 - DNA, 486 bp, Oryza sativa
ccacgcgtccgcccacgcgtccgctcgcagcttcctcttgtttttcttggccgaaccccccctcgacacgccgtcgccgccgaggggagagagagagaggccgccggcgccgctaccactgaccccccccctcgccggagcgccccgtcgccggtcgggtttgatcgatggcgtccaagaggatcctgaaggagttgaaggacctgcagaaggaccctcccacctcatgcagcgcaggtcctgtgggtgaggacatgttccattggcaagctactattatgggaccctcagacagcccatttgctggtggggtattcttggtgaacattcatttcccaccggattatccttttaaaccaccgaagtctcttttccgcaccaaggttttccacccgaacattaatagcaatggcagcatttgcctcgacatcttcaaggaacagtggggttctgcacttaccatttcaaggtcctcctgtcaatttg

SEQ ID NO: 385226 - DNA, 1437 bp, Oryza sativa
  unsure (1)..(1437): unsure at all n locations
cggacgntgggcggtcgccagcagccgccgccgctgcctctcctcctcctcccctcgccgccgatccaatccggtcactttcagtcttttttcttgagggggagatggcggtttctttcaccaacgttagctcagaggcaggcctcaaaaagctcgatgagtaccttctcactcgcagctacatctctgggtaccaagcctccaacgatgacttggctgtgtactctgcattttcaactgcgccctcttcaagctataccaatgttgctaggtggtttactcacattgatgcactcctacgtctgagtggagttactgctgatggtcaaggcgtaaaggtcgagtcgacagctgttccttcagcttcaacccctgatgttgctgatgcaaaggctcctgcagctgatgatgacgatgatgacgatgttgacctttttggtgaggagactgaagaggagaagaaggcagctgaggagcgtgctgctgctgtcaaggcttctggcaagaagaaggaatctgggaagtcctcagtgttgcttgatgtcaaaccatgggacgatgagactgacatgaccaaattggaagaagctgtgaggaatgttaagatggaaggcctcctttggggcgcatccaagcttgtcccggttggttacggtatcaagaaattgcaaatcatgatgaccattgtcgatgatcttgtgtcggttgatagtctgattgaggactacttctacaccgaaccagcgaatgagtacatccagagctgcgacattgttgcgttcaacaagatctagatcttccttgagtcaggtgatggcgatcggtgcagcggccgccgcgccacgcacgcaccgtcaggcatcgacgacgagcgagacgccctcggcgcagaagacactcacggcgatggcaggtgacgaggacggcgctgctggtggtgttggtagcgggggcgatgacgatgacgatgcgcggggcggaggcgcagagccgagctgcgcggcgcagctcacgcagctggcgccgtgcgcgcgagtcggcgtggcgccgccggggcagccgctgcgagcccccggcggagtgctgcctgctgggcgccgtgtcgcacgactgccgtgcggcacgctcgacatcatcaacagcctcccgccaagtgcggcctcccgcgcgtcacctgccagtgatggagatggtgtgccaaggtaattgcgtttgctcgtgcgaggatgagaagagaagattgaataagatgtttgatggcaacaagtcatcaggcgatccgatccctgcagctatgaatggggtatacgtagtagtggtctcgttagcatctgtgtgtcgcatatcagcgccgtgcgtgccgtgtctgtcctgcttgctctgctgatcgttcaatgaacgacaaattaatctaactctggagtgacaagtcgttcg

SEQ ID NO: 385227 - DNA, 750 bp, Oryza sativa
  unsure (1)..(750): unsure at all n locations
tgctgatggtcaagcgtaaaggtcgagtcgacagctgtccttcagcttcaacccctgatgttgctgatgcaaaggctcctgcagctgatgatgacgatgatgacgatgttgacctttttggtgaggagactgaagaggagaagaaggcagctgaggagcgtgctgctgctgtcaaggcttctggcaagaagaaggaatctgggaagtcctcagtgttgcttgatgtcaaaccatgggacgatgagactgacatgaccaaattggaagaagctgtgaggaatgttaagatggaaggcctcctttggggcgcatccaagcttgtcccggttggttacggtatcaagaaattgcaaatcatgatgaccattgtcgatgatcttgtgtcggttgatagtctgattgaggactacttctacaccgaaccagcgaatgagtacatccagagctgcgacattgttgcgttcaacaagatctagatcttccttgagtcaggtgatggcgatcggtgcacaaagataaaaagaaaaatccggaagtttgaattaccgttgatacttcaatctagaagtttgaattaccattgatgtgtcgttcgtggtgtcaactagtacttgagcccgttttgtgttgagattgtagcactctacttctactgagatcgttttctcctcctttaatgtttaaagaccaatcaggttattattactgtgtctgcctgtgtcaccgtggnnnnnnnnnnnnnnnnnnnnn

SEQ ID NO: 385228 - DNA, 1581 bp, Oryza sativa
  unsure (1)..(1581): unsure at all n locations
aggactagaatacttgctgactactgaggcgaaaggataccgggtggcgaagatggctgaccttggattcggcgatgccaggagtggcaatggcagcaggagccaatgctccagggggaaggcgatgctgctcgccctcggcaagggcctccctgagcaagttcttccccaggagaaggtcgtcgagacctacctccaggacaccatctgcgacgatcctgcaacaagggcaaagctggaaagactttgcaagaccaccacagtgaggacaaggtacactgtcatgtcaaaggagctcctagacgagcacccagagctcaggactgagggaactccaacactgacgccacggcttgacatctgcaatgctgcagtgcttgagcttggtgctactgcagcccgtgccgcccttggtgaatgggggcgtccagcagctgacatcacccaccttgtctacatctcgtccagtgagcttcgcctcccagggggtgaccttttcctggcaactcgccttggcctccatccaaacaccgtccgcacttcccttctcttccttggctgctccggtggcgctgccgcgctccgcaccgccaaggacattgctgagaacaacccagggagccgcgtccttgtagtagccgcggagacgacggtgctgggattccggccaccaagtcctgaccgtccttacgatcttgttggtgctgccctgtttggtgacggcgcatcagctgcgatcattggagcaggccccattgctgctgaggagagtcccttcctagagcttcagttctcaacacaggagttcctaccagggacggacaaggtaattgatggcaagatcactgaggaagggattaatttcaaactggggcgtgatttgcccgaaaagattgaaaaccgtatagaagggttctgcaggacactcatggatcgggttgggataaaggagttcaatgatgtattctgggctgtgcatcctggtggtccagcaatactgaacaggctagaggtttgccttgaactccagccagagaagctcaagatcagtagaaaggccctgatgaactatggtaatgtgagcagcaacaccgtcttctatgtgttggagtatttgagggatgagttgaagaaagggatgataagggaagaatggggactgatcttggcttttggcccaggcatcacatttgaaggaatgctagttcgaggcattaactgagactgaaaggggtccaagaagactttcagctagatggaagaatcacaaacataccatttccaggttaagtatatagtatgaacttgaaacatctcataaggagcatagatgtcttgacagcatctgtgcactacatagttattgttttactgtaatctatgttttatgtatcaaacaatgtgaggtactctagtttgaatgccagatacttgggaaaatttcgggcaatacattgcatcctgttacattgtcatgtatagtaattttccagagtatctatttnnnnnnnnnnnnnnnnnnnnnnnnnnnnnnnnnnnnnnnnnnnnnnnnnnnnnnnnnnnnnnnnnnnnnnnnnnnnn

SEQ ID NO: 385229 - DNA, 1749 bp, Oryza sativa
  unsure (1)..(1749): unsure at all n locations
tcgtttgacgcgtgggctcatcccagccgccgccgccgccgccgcagcctcctcggctctccctcctctccttcgagttagctacctccttattcaaccatgggtaaggagaagacgcacatcaacattgtggtcattggccacgtcgactccggcaagtcgaccaccacgggccatctgatctacaagcttggaggtatcgacaagcgtgtgattgagaggttcgagaaggaagccgctgagatgaacaagaggtccttcaagtacgcgtgggtgctcgacaagctcaaggccgagcgtgagagaggtatcaccatcgatatcgccctgtggaagttcgagaccaccaagtactactgcacggtcatcgatgcccctggtcaccgtgacttcatcaagaacatgatcacgggtacctcccaggctgactgtgccgtgctcatcattgactccaccactggtggttttgaggctggtatctccaaggatggccagacccgtgagcacgctcttcttgctttcactcttggagtgaagcagatgatctgctgctgcaacaagatggatgccaccactcccaagtactccaaggcccgttacgatgaaatcgtgaaggaagtctcatcctacctgaagaaggtcggctacaaccctgacaagattcccttcgttcccatctctgggtttgagggtgacaacatgattgagaggtccaccaaccttgactggtacaagggccccaccttgcttgaggctcttgaccagatcaacgagcccaagaggccatcagacaagcccctgcgtcttccccttcaggacgtgtacaagatcggtggtattggcaccgtgcctgtgggtcgtgttgagactggagtcctcaagcctggtatggtggtgacctttggtcccagcggcctgaccactgaggtcaagtcggttgagatgcaccacgaggctctccaggaggctcttcctggtgacaacgtcgggttcaacgtgaagaacgttgcggtgaaggatctgaagcgtgggtacgtggcctccaactccaaggatgaccctgccaaggaggctgccagcttcacctcccaggtgatcatcatgaaccaccctgggcagatcggcaacggctacgccccagtgctggactgccacacctcccacattgccgtcaagtttgctgagctggtgaccaagatcgacagacgatctggcaaggagctggagaaggagcccaagttcctcaagaacggtgatgctggtatggttaagatgattcccaccaagcccatggttgtggagaccttctctgagtaccctcctcttggtcgttttgccgtgcgtgacatgaggcaaacggtggctgttggcgtcatcaagaacgtggagaagaaggacccaaccggtgccaaggtgaccaaggctgccgccaagaagaaatgagcctcgttcaagtggtggttttcatgtctgcatttgagatatctagctctagtactcgttaagttttgcccacggccatgtcatcgttgcatggaccgttaatatctgctcgcaatgtgcactatgtcagtcgtttaaaactcgtttatttctgttcggttaaaacttggatgctctgagtcttattattgcccttcggctgttgtggaatgcgagtacttacattgctaaaaacaatatctttaaaaaaaatcgagggggggcccggtacccaattcgccctatagtgagtcgtattacaattnc

SEQ ID NO: 385230 - DNA, 1614 bp, Oryza sativa
tcgcgaccctccgcgtgagcggcagcaagtgttcactgccgtcttcttctcgatttatctttcttggtttcttgatctgtagcttattagcggccatgtgcggcggagcaatcatctccgggttcatcccgccgtcggccgctgcggcggcggcggctgcggcggccaagaagcagcagggcaggagggtcacggccgacgtgctgtggccggggatgctgcggaaggggaaggcggcggcggcggaggaggactttgaggccgacttccgcgagttcgagcgtggcatgagcgacgacgaggcggaggggggcggcggcgaggaggaggaggacgacgacgacgtggtcgtggtggtccccccgccggcggcggcgaggttcgtcgtccgtgccgcggccaaggcggcgcccccaactgcagatgggatgttgactacaaagcttgtccaacatgatggacctactgctagatcagcaaagcacaagaggaagaatcagtacagggggatccgccagcgtccctggggcaaatgggcagctgaaatccgagaccccagcaagggtgtccgtgtttggcttggaacatataacactgctgaggaggcagctagggcatatgacgctgaagcccgcaagatccgtggcaagaaagccaaggtcaactttcctgatgaaccagctgttgctcagaagctctccctgaagcaaaacgctgccaagcaagagaaactagctccacctctgaagacctgtggcgatgatgctttctttcagctaaacagttcagacaatgatttgtttgcaatgcttgcaaaggtgcctgcaaagccggcagagcctgttgatctcatgcctccagtcaaacctcttgcttccactgagacattcgagatgaacatgctctctgatacgagcagcaactcatttggctcttcagactttggttgggaggatgacaccctgaccccagactacacttcagtcttcgttcctaatgctgccatgccagcatatggtgaacctgcttacctgacaggtggagcgccaaagagaatgaggaacaactatggtatcgccgtgccccagggaaatggcatgcctaatctcgcacaaaacatgcccaccttcgatcccgagatgaagtatttgccattaccttatgttgagagcagctcagatgaatcaatggacaaccttctgcaaaatgatgctacacaagacggggcaagcaacgagggcatctggagccttgatgagctgctcatggcagctggtgcctactgaggagacgaaatgttctggtcagtgtggtctgtcactagcaaaccatgttgaatgtgtatggccaagatgaagagctggtgatgtctgctatgttttgtagagggatgctaccaaagtaatgctagaatattacaagctgctatcagctgtactctctatgacaatgtttatactatgtttgctgtatggtgtggtctatgatttgaagtatgttggagactgattcaaataactgccttggccatgtgtgtgctgtaatgtgcttattaagttatatagttgtgctcatattgcgtatctaacacccccaactttaaaaaaccaaaaa

SEQ ID NO: 385231 - DNA, 1809 bp, Oryza sativa
  unsure (1)..(1809): unsure at all n locations
gccgccgccgccgcagcctcctcctctcgccatctcccgtcctctccttcaagtcagctacctgcttaatcaaccatgggtaaggagaagacgcacatcaacattgtggtcattggccacgtcgactctggcaagtcgaccaccacgggccatctgatctacaagcttggaggtatcgacaagcgtgtgattgagaggttcgagaaggaagccgctgagatgaacaagaggtccttcaagtacgcgtgggtgctcgacaagctcaaggccgagcgtgagagaggtatcaccatcgatattgccctgtggaagttcgagaccaccaagtactactgcacggtcatcgatgcccctggtcaccgtgacttcatcaagaacatgatcacgggtacctcccaggctgactgtgccgtgctcatcattgactccaccactggtggttttgaggctggtatctccaaggatggccagacccgtgagcacgctcttcttgctttcactcttggtgtgaagcagatgatctgctgctgcaacaagatggatgccaccactcccaagtactccaaggcccgttatgatgaaatcgtgaaggaagtctcatcctacctgaagaaggtcggctacaaccctgacaagattccctttgttcccatctctgggtttgagggtgacaacatgattgagaggtccaccaaccttgactggtacaagggccccaccttgcttgaggctcttgaccagatcaacgagcccaagaggccatcagacaagcccctacgtcttccccttcaggacgtgtacaagatcggcggtattggtaccgtgcctgtgggtcgtgttgagactggtgtcctcaagcctggtatggtggtgacctttggtcccagcggtctgaccactgaggtcaagtcggttgagatgcaccacgaggctctccaggaggctcttcctggtgacaacgttgggttcaacgtgaagaacgttgcggtgaaggatctgaagcgtgggtacgtggcctccaactccaaggatgaccctgccaaggaggctgccagcttcacctcccaggtgatcatcatgaaccaccctggccagatcggcaaacgctacgccccagtgctggactgccacacctcccacattgccgtcaagtttgctgagctggtgaccaagatcgacagacgatctggtaaggagctggagaaggagcccaagttcctcaagaacggtgatgctggtatggttaagatgattcccaccaagcccatggttgtggagaccttctctgagtaccctcctcttggtcgttttgccgtgcgtgacatgaggcaaacggtggctgttggcgtcatcaagaacgtggagaagaaggacccaaccggtgccaaggtgaccaaggctgccgccaagaagaaatgatcctcgttcaagtggtagttttgtgcacggccatggcactcgttgcattgaccgttattatcatatgctcgctgtgtgcactgtgtcgtttaaaactctctattttctgttcggtttaaacttgttctgagcctgattattgcccttcggctgttgtggaatgcgggtatttacattgctaattcctatgtctttattttggcttgtggcattcgcttgttctactgctattgaaaactgtaatctgtttctgttattaaaaactgaaccttttcttctgctatttgaaactgaagcgagtgggtttcaatttgctgaaatcctgctanttgctatttaaattatttatgttcaatttcgttcagtccnnnnnnnnnnnnnnnnnnnnnn

SEQ ID NO: 385232 - DNA, 702 bp, Oryza sativa
  unsure (1)..(702): unsure at all n locations
attaagttgggttaacgcnagggttttccccagtcacgacgttgtaaaacgacggcccattgagcgcgcgtaatacgactcactataagggcgaattggggtaccgggccccccctcgaggtcgacccacgcgtccgaaggaccccaagttcttgaagaacggtgatgctggtatggtccaagatgattcctaccaagcccatggttgtggagaccttctctgagtaccctcctcttggtcgttttgccgtgcgtgacatgaggcaaacggtggctgttggcgtcatcaagaacgtggagaaaaaggacccaaccggtgccaaggtgaccaaggctgccgccaagaagaaatgagcctcgttcaagtggtggtttgcatgtctgcatttgagatatctagttctactatttcgttaagttttgtccacggccatggctctcgtttcattgaccgttaatatctgctcgctgtgtgcactatgtcagtcgtttaaaactctctttttctgttcggtttaaaccttgatgtctgagcctgattattgcccttcggctgttgtggaatgcgagtatttacattgctaattcctatgtctttattttcgcttgtggctatgcgcttgtttctgctgctattggatactggaatctgtcttcctgttattaaaaactgaaccttcccctcatatttctaaaaaccaa

SEQ ID NO: 385233 - DNA, 761 bp, Oryza sativa
  unsure (1)..(761): unsure at all n locations
ctcatttggctcttcagactttgnttgggaggatgacaccctgaccccagactacacttccagtcnttcgttcctaatgctgccatgccagcatatggtgancctgcttacctgacaggtggagcgccaaagagaatgaggaacaactatggtatcgccgtgccccagggaaatggcatgcctaatctcgcacaaaacatgcccaccttcgatcccgagatgaagtatttgccattaccttatgttgagagcagctcagatgaatcaatggacaaccttctgcaaaatgatgctacacaagacggggcaagcaacgagggcatctggagccttgatgagctgctcatggcagctggtgcctactgaggagacgaaatgttctggtcagtgtggtctgtcactagcaaaccatgtaaggcactccacactacctactattttgatttcttgtagatacattttcatgtacagattacatatgttgtaaaatgggatatggttttcttgtcaggttgaatgtgtatggccaagatgaagagctggtgatgtctgctatgttttgtagagggatgctaccaaagtaatgctagaatattacaagctgctatcagctgtactctctatgacaatgtttatactatgtttgctgtatggtgtggtctatgatttgaagtatgttggagactgattcaaataactgccttggccatgtgtgtgctgtaatgtgcttattaagttatatagttgtgctcatattgcgt

SEQ ID NO: 385234 - DNA, 612 bp, Oryza sativa
  unsure (1)..(612): unsure at all n locations
gttaacctcattaagggaacaaagtngggttccaccgcggtggggcngtttnagaattagnggatccccnggggtgcaggaattnggcacgngcccaagttcttcaagaacggtgatgctggtatggtttaagatgattcccaccaagcccatggttgnggngaccttttttgagaaccctcttcttggtcgttttgccgtgcgnnanatgaggcaaacggtggctgttggcgtcatcaagaacgtggagaagaaggacccaaccggtgccaaggngaccaaggctcccgccaagaagaaannatcntngttcaagtggtagttttgtggcccacggccatggcgcgcagttgttgcatggaccggtattatcatatgctcgctgtgtgcactatgtcagtcgtttaatactcgttctattttctgttcggtttaaacttgtttgctcccagtccgattattgtccatcggctgttttggaatgcgagtatttacattgctacttcctgtgtcgttattttcgtttgtgctattccctgcttttgctgctaaaaaaaaaaaataaaaacggaaaacaaaaactaaaagatgaacataacaaccaaaaacacg

SEQ ID NO: 385235 - DNA, 682 bp, Oryza sativa
ttttcctcccttctcacactccaatccatcctccctctccaccctccaggctccagctatgtccgcctcgcccgagttctacaggccctcgccgccggccttctcgccctcctgcgccgccggtaccagtaccacggaggtcgacgagtacagctgctgccggacgccaacgccgggaatcaagggagccagccacctgcccgccggcgccccggaagcccaggccggtggctgcaggaagctcctcttcgacccagctcagcagcaggggaaggggaaggccatcagcctgcgtctcgacgagctggagcgcctcttccgccccatcaccaataatgccaaccttcacctccgaaccagcaagcccacccatacctgacctcactgcacttcaacttcattcatccgagtgcatactagtactattatatactaaatgcttcttcttcttcttctttggataatcaatctcttttcgctttaatttcctcttactactaggattagtagtagtaggattttagtctaggagtaatcgttaccgccacgagctgcagtgttgtatttgtatgtatgtatgtatcagcaatcaagccaagcttcacgtaaggtcgagcagtgatttcagtcagtatgtatgctcaaaatgatttagttgtacaatgaatcaaaagcttaattt

SEQ ID NO: 385236 - DNA, 739 bp, Oryza sativa
  unsure (1)..(739): unsure at all n locations
agcagtttctgttaagagccaattgcaacagattgcaaggccaatgtacagcaacccacctgttcatggtgcactggttgtctccataatccttaatgatccagaattaaagagtttatggttgaaagaggtcaagggtatggctgatcgaatcattggaatgcggaaggcactccgggaaaatctcgaaggcctaggttcaccattgtcatgggatcacatcaccaatcagattggaatgttctgctacagtgggatgacacctgaacaggtggatcgcttaaccaatgaataccatatttacatgacccgtaatggcagaataagcatggctggtgtaacaaccaggaaatgtggcgtatttggctaatgctattcatggaggtcactaaaacgaaatgaagctacttcctcttccctcttcggccaatgaaatgaggcttgcaagcggcggcgttttttttttggggggtggtctattgaccttttaagatggttgtactagagaaataatccagtgaacatgctggtgtttctccaacttcggattttccctgtatggaggagagaactagaaacctacccaattttgagagctatagatgccgatcctgttatttcaatcgtcagatgttatgcctgtggcagcctggcaggtcacctcagaaacagagatatgtgaaagagaataaatgcaaatgagctgagcattttgacnnnnnnnnnnnnnnnnnnnnnn

SEQ ID NO: 385237 - DNA, 1621 bp, Oryza sativa
gtcttctcctcctcacacctcaccttccccctcgctcctccgatcgcgcgcgcatggcgatgtcacgagcggccgccgctgccgcggggactcccgtggcgcggcggcgattgatgggggccgtggcggcgaggtcgatggcgtcgtggttcggccacgtggaaccggccgccaaggaccccatcctcggcgtcaccgaggcgttcctcgccgacccctccccggacaaagtcaacgtcggcgtcggcgcgtaccgggacgacagcgggaagcccgtggtgctggagtgcgtgcgcgaggcggaacggcggatcgccgggagcatgaacatggagtaccttccaatgggtggaagcataaagatgattgaagaatcacttaaactggcctatggggagaactgtgagttcatcaaggacaagaggatcgcagcagtgcaggctctttcaggaactggtgcatgtcgcctctttgcagatttccagaagcgtttcttgccagattcacagatttatatacccacacctacatgggccaaccatcacaatatttggagggatgcccaagtaccacaaaagacatttacctattaccatccagagtcaagaggacttgactttgcaggcctaatggatgatatcaagaatgctccagatggttcattctttttgcttcatgcttgtgcgcataatcccactggagtagatccttcagaagaacaatggagggagatatctcatcagttcaaggtgaagaaacattttccattcttcgacatggcataccaaggatttgctagtggtgatccagagagagatgccaaggcaattcgaatatttcttgaagatggacatcaaattggatgtgcacagtcatatgcgaaaaacatgggactttatggacaaagagcaggatgccttagtattctatgtgatgatgagatgcaagcagttgctgttaagagccagttacaacagattgctagacctttgtacagcaacccacccgttcatggtgcattaattgtttcaactattcttggtgatccggagttgaaaagtttatggctgaaagaggtcaagggtatggctgatcgtatcattggaatgcgaacagcactcaaagagaaccttgaaaagttgggttcaccaatgtcatgggaacatatcactaatcagattggaatgttctgctacagtggtatgacacctgaacaagtcgatcgcttgacaaaagagttccatatctacatgactcgtaacgggcggataagcatggctggagtaacaacaggaaatgttgcctatctggctaatgctattcatgaggttaccaagacaaagtgagagtgttggagacattcctatcatcattttcagtacctttttaccgaccgcaaaatgggtcaaatggtgaaataaaattgtagtccgatatgatgtgaaataaaatggctggtaagctagaaaagggcaagtttattttttgaggacaagacttttgctgtaccagtgaaaacattttttaggacaagactttacagttagaacgaacgttctaactgtgacagtgtcatgctttgtaaaggaagtgtacctttccaccgatgggcaaaaaaaaa

SEQ ID NO: 385238 - DNA, 1549 bp, Oryza sativa
actagttctagatcgccctcaccctccaattccaatccctcccaagaactagctgatcacgacgagcagctagtccactgctactgcgatcgatcggttgcaaagttaattaattagtggcgatcgatcgatcatggggagggttattagcagctggagggttcttgcggtggtggctgctttgatggccatggcggcggtggagctgtgcgccgcgataccgttcgacgagagggatttggagtccgacgaggcgctgtgggatctgtacgagcggtggcaggagcaccaccacgtgccgcgccaccacggcgagaagcaccgccggttcgggcggttcaaggacaacgtgaggtacatccacgagcacaacaagcgcggcggccggggctaccgcctccggctcaaccgcttcggcgacatgggcagagaggagttccgcgccacgttcgccgggtcccacgccaacgacctccgccgcgacggcctcgccgcgccgccgctcccggggttcatgtacgagggcgtccgcgacctcccccgcgccgtcgactggcgccgcaagggcgcggtcaccggcgtcaaggaccagggcaagtgcggcagctgctgggcgttctccacggtggtgtccgtggagggcatcaacgcgatccggacggggcggctggtgtcgctgtcggagcaggagctgatcgactgcgacacggcggacaacagcggctgccagggcgggctcatggagaacgcgttcgagtacatcaagcacagcggcggcatcaccaccgagtccgcctacccgtaccgcgccgccaacggaacgtgcgacgccgtccgcgcgcgcggcgggctggtggtgatcgacgggcaccagaacgtgccggccaacagcgaggccgcgctcgccaaggccgtcgccaaccagcccgtctccgtcgccatcgacgccggcgaccagtccttccagttctactccgacggcgtcttcgccggcgactgcggcaccgacctcgaccacggcgtcgcggtggtcggctacggcgagaccaacgacggcacggagtactggatcgtcaagaactcgtggggcacagcctggggcgagggcggctacatccggatgcagcgcgactccggctacgacggcggcctctgcggcatcgccatggaagcctcctaccccgtcaagttctcgccaaatcgtgtcacgccaaggcgcgcccttgggccaaaggaaacccagtgatcgagccggcgccatctccgccgtacacatgcccgcctacgagcctggatcaacggctctggtcgcgtctcctcctccagcttgcaaaatggtgctattattgttgctgctctttgttaattgccttgtgtttatgtaattcgtgtgaggcgatcagggaaaagaattacctgaaatcgtctaagttactagtgttatttcgtgtgtgctaaataagttttagatgtgaggtgaggtcgatcgatctatcatgtggtgttcttcgtggcaccggaaatatataagaaggttgttgttatgact

SEQ ID NO: 385239 - DNA, 492 bp, Oryza sativa
  unsure (1)..(492): unsure at all n locations
ccagcgtccgctacatccggntgcagcgcgactccggctacgacggcggcctctgcggcatcgccatggaagcctcctaccccgtcaagttctcgccaaatcgtgtcacgccaaggcgcgcccttggcgccaaggaaacccagtgatcgagccggcgccatctccgccgtacacgtgcccgcctacgagcctggatcaacggctctggtcgcgtctcctcctccagcttgcaaaatggtgctattattgttgctgctctttgttaattgccttgtgtttatgtaattcgtgtgaggcgatcagggaaaagaattacctgaaatcgtctaagttactagtgttatttcgtgtgtgctaaataagttttagatgtgaggtgaggtcgatctatcatgtaatgtactgaacttatatgtggtgttcttcgtggcaccgggaaatatatataagaaggttgttgttatgactaaaanaaaannnnnnnnnnnnnnn

SEQ ID NO: 385240 - DNA, 1886 bp, Oryza sativa
gagctccgccgccggagaaaaagatggccgacgacagcgcctccccgtcgccgtcctcggcctcgccgctccagcaccaccgcgaagccctcaagtcgtcagtgcgcaacacggcagctagccggaggcgggaacaagctattgcgattgggaaggaaagacgggaagccttgatccgtgcaaagcgtgtgtgtcgagctccaatttctggcagtgatgaagctgaaatggaagagggtgatatggtggtcgatgaggagaaagcatgtcttgaggcaaagactgctcatgctgttgaagaattgaaatctgctttgtcaatccaggggaaaggcgttcagaagaagaagatagaggcgcttcgtgatttgagacgcttgttgtcacagcctgaagtacctctagttgatactgcaattaaagctggagcagtccctcttttagtgcaatatctatcctttggatcatcagatgagcagttgctagaggcagcttggtgccttacaaacatagcagctggggaaccagaagaaacaaaatccttgctgcctgctctaccattgcttattgctcaccttggtgaaaagagctccacacttgttgccgagcaatgtgcatgggccattggtaatgttgctggtgaaggagcagagctgagaagcacattacttgcacaaggtgctttgcggcctcttacccgtttaatgttctccaataaaggttctacagcaagaactgctgcttgggctatgtcaaatctcatcaaggggcctgatccaaaggctgcaaatgagcttattaccattgatggcgtgctaaatgcaattatagcgagcttggaaaaggaggacgaagagttagcaactgaggtggcatgggttgtggtctatctttcagcactttcagacagaggtattagcttaatagtaagaagttctgtgcctcagctgctgataggacgactgttctcatctgagaacttgcagttgctgatcccagtgcttcgtggtttgggaaatcttattgccgctgatgactacatggttgattcagtcctaactgttggaaacaatatcattgatcaagcattgtcaggtcttataaaatgtttgaagagtgataacagggttctcagaaaggagtcatcatgggcattgtcaaatatagcagcaggcagttttgagcacaagaaactgatttttgccagtgaggccacgcctgtgctgatacgccttgtcaccagcgcgcaatttgatattcgcagggaagcagcatacaccctaggaaatctgtgtgttgtccctactggaaattgcgaactcccaaagataatcgtggaacatctagtcgctatcgtagatggtggagcccttccaggatttatacacttggtcaggtctgctgatgtagataccgcagggcttggtcttcagttcctagaactggtgatgagggggtatcccaataagcaaggcccaaagcttgtggaaatggaggacggcattgaggccatggagaggtttcaattccacgagaacgagcagatgaggaacatggccaatggtttggtcgacgaatacttcggtgaggattatggcctcgacgagtgactcaactaattaccattcgtacatcaggttaaattgtaatggcagcagctgttcatgtgttcgtactgtaaaaatgcattctcagtttctaacagcactggaactttagaatgagaaaatcatttgcttgttaaaaaaaaacttactgccacttgttgacgtaatttggaaagaaaaaaaaggttgcattagcatcttgttatgtataattagattgtaacacaatgctagacatatttgctggttacagtagcagaacactttactttctttgca

SEQ ID NO: 385241 - DNA, 2176 bp, Oryza sativa
cccacgcgtccgctcccgtctcttcccgtccccgctccagtgggcgggctctctccctcttcctcctccgctccgctccacctcggttgaccaccacccgatcggcggcgagggcggggagctccggcgtgctcagtgaaaatggatggaaatgctaaaggcggtgggcattctgaggcactgaagaactacaatcttggaagaactttaggtattggctcatttggaaaagtgaagattgcagagcataagcttacaggacacagagttgctataaagatcctgaaccgccgccaaatgagaaatatggaaatggaggagaaagcaaagagagaaatcaagatactgagattgttcattcatccccatatcattcgcctttatgaggttatatacactcctacggatatatatgttgtgatggagtactgcaagtttggagaactgtttgattacattgttgagaaaggcaggttgcaggaagatgaggctcgccgaatcttccagcagattatatctggggttgaatactgccacagaaacatggtggttcatcgtgatctgaagccagaaaacttgctactggattcaaagtataatgtaaagcttgctgactttggtttgagtaacgtcatgcatgatggccattttttgaagacaagctgtgggagtccaaactatgctgctccagaggtgatctctggtaaattatatgctggacctgaggttgatgtatggagctgtggagtgatcctttatgctctcctttgtggtactcttccatttgatgatgagaatatccccaacctattcaaaaagataaagggtggtatatatactctcccaagtcatttatctgctctggccagagatttgatcccaaggatgcttgttgttgatccaatgaagagaatcacaattcgtgaaattcgagagcatcagtggtttcagattcgccttcctcgttacttagcagtgcctccaccagacacagcacagcaagccaaaatgattgatgaagatacccttcaagatgtcgtaaacttgggttatggaaaggaccatgtgtgtgaatctctgcgcaatagactgcagaatgaggcaactgttgcatattatttactcttggacaatcgattccgagctaccagtggctatttgggagcagactatcaagaatctttggagaggaattttaatcgctttgcttcatcggaatcagcaagttcaaatacaaggcattatcttccaggaagcagtgatcctcatgccagtggtttgcgcccacattatcctgttgaaaggaaatgggctcttggacttcagtcacgagctcaacctcgcgagataatgattgaggtcctaaaggcacttcaagacttaaatgtctcctggaagaagaatggacagtacaacatgaaatgcagatggagcgttgggactcaggccactgatatgttagatgttaacaacagctttgttgatgactcaatcataatggataacggtgatgtaaatgggaggctacctgctgtgatcaagtttgaaatccagctttacaagaccagagacgagaagtatctgctggatatgcagagagttacggggcctcagctccttttcctggacttctgtgcagacttccttaccaagctgagggttctatagtacccttgtgttggcttcagtgaaaaaccaaacctagggttttatcatgtgcggtttttcactgcaataatgaataaaggacaccatgtaaataggcagctgtgactttcttcccagtcccttagacagcgaaggttgttgtttgagtgactagtgttgtgttaagcaccaaaatgttggttgttacagacttacatagtatatagatctttataagctatctgggtgggcgaatgcttgatttctaattttttgcaggctgcagctatactgctggtgatgccgcagtacaagcttttctttttgctcctgcacacggttattatacgtgtgcatggaaattttgctactgctaggaagaagctagtaagaatatcagccccttgctgccgggttgtggtataaatgtagatgacagcaaatttagtggaatatttctatgacaacaaatgtagtcgtatgatcatgctcatgcccccctatggagaatcgagatatcctttctctt

SEQ ID NO: 385242 - DNA, 2508 bp, Oryza sativa
gcgatcgagtatggtcgccgtcgttcgccgtcgtcctgctgcttccgccgcatccatcccggtgagcagtcacatcctccgccaccgccgcctgcgccgatccccatccatccctccagcgagcagggcgggcgccgtcgttcctcctgctgcttccgcccgcatccatcctggtcactgtgaaaatggaaggaaatgctagaggcgcggggcattctgaggcactgaagaactacaatctaggaagaactttaggtattggttcatttggaaaagtgaagattgcagagcataagcttacagggcacagagttgctataaagatcctgaaccgtcgccaaatgagaaatatggaaatggaggagaaagcaaagagagaaatcaagatattgaggttgttcattcatccccatatcattcgcctttatgaggtcatatacactcctacggatatatatgttgtgatggagtactgcaagtttggagaactgtttgattacattgttgagaaaggcaggttgcaggaagatgaggctcgccgaatcttccagcagattatatctggggttgaatactgccacagaaacatggtggttcatcgtgatctgaagccagaaaacttgctactggattcaaagtataacgtaaagcttgctgactttggtttgagtaatgtcatgcatgatggccattttttaaagacaagctgcgggagtccgaattatgctgctccagaggtgatctctggtaaattatatgctggacccgaggttgatgtatggagctgtggagtgatcctttatgctctcctttgtggtactcttccatttgatgacgagaatatccccaacctattcaaaaagataaagggtggtatatatactctcccaagtcatttatctgctctggccagggatttgatcccaaggatgcttgttgttgatccaatgaagagaatcacaattcgtgaaattcgagagcatcaatggtttcagattcgccttcctcgttacttagcagtgcctccaccagacacagcacagcaagccaaaatggtactttgtgtcacattcttaacgagttgttcattaatgtatcaaactttatatactaatataattttcttgagatatacttatagagtatgataaataatgttttgccaacataaaaccgtataaagcagtggtgaaaggcattttgaataacattttatgatatgaggcttgtggagtattttcttgctagtagtagtttatcttagcagaaatccttcatgagatgtaaaagaagcagataagttttcacttgcaatatcacttattacatgtttgattttttataattatcttgccactttgctaatatcttgatatatgaccttctttgaagattgatgaagatacccttcaagacgttgtaaacttgggttatgaaaaggaccatgtgtgtgaatctctgcgcaatagactgcaaaatgaggcaactgttgcatattatttgctattggacaatcgattccgagctaccagtggctatctgggagcagactatcaagaatcattggagaggaatcttaatcgctttgcttcatcagaatcagcaagttcaaatacaaggcattatctcccaggaagcagtgatcctcatgccagtggtttgcgcccacattatcctgttgaaagaaaatgggctcttggacttcagtctcgagctcagcctcgcgagataatgattgaggtcctaaaggcacttgaagacttaaatgtctgctggaagaagaatggacagtacaacatgaagtgcagatggagcgttgggtatcctcaggccactgatatgttagatgtcaaccacagctttgttgatgactcaattataatggataatggcgatgtaaacgggaggttacctgctgtgatcaagtttgaaatccagctttacaagagcagagacgagaagtatctgctggatatgcagagagttacggggcctcagctccttttcctggacttctgtgcagccttccttaccaaactgagggttctatagtaccccgtgttggcttcagtgaataaccaaacctagggttttatcatgtgcggtttttcactgcaataatgaataaaggacaccatgtaaataggcagctgtgactttcttcccggcccttagatagagaaggttgttgtttgagtgactagtgttatgttgagcaccaaaatgttggttgttacaggcttacatagtatatagatcttgataagctatctgggtgggcgaatgcttgatatctaattttttgcaggctgcagctatactgctggtgatgctgcagtacaagcttttccttttgctcctgcacacggttattatgcgtgtgcatggaaattttgctactgctagaaagaagctaggtaagaatatcagccccttgctgccgggttgtggtataaatgtagatgacagcaaatttagtgaaatatcaacaaatgtagtcgtatgatc

SEQ ID NO: 385243 - DNA, 2210 bp, Oryza sativa
cctcctcctcctctcctctctcccgtcacgggcgcatctctctctctctctctctctctctctctctccccgcacagccgcgccgcgccgccgtcgccttctcgggcgagggcgaagagcgagggctcctgctcgccgccgcccctccccctcgtccgcggcgcgccggaggtcaggtagaagatggagggagctggcagagatgggaaccctcttggcggttaccggattggcaaaaccctagggattgggtcatttggcaaagtgaagatcgcggagcatatattgactggtcacaaggtggcaatcaagatcctcaatcgccgtaagatcaagagcatggagatggaagagaaagttaaaagagaaatcaagatacttagattatttatgcacccacatatcattcgcctttatgaggtgatagacaccccagctgatatttatgttgttatggagtatgtcaaatctggagagttgtttgattacatcgttgagaagggaagactgcaagaggaagaagctcgacgctttttccagcagatcatatctggtgttgaatattgccatagaaacatggtggttcatcgtgatcttaagccagagaaccttcttttggactccaaatgcaatgttaagattgcagactttggcttgagtaatgttatgcgtgatggtcactttctgaagacaagttgtggtagcccaaattatgcagcacctgaggtgatatctggtaaactatatgctggccctgaagttgatgtgtggagttgtggtgttattctttatgctcttctttgtggtacccttccatttgatgacgagaatattcccaacctttttaagaaaataaagggtggcatatatacccttcccagtcatttgtcacctttggcaagggatttgattcccagaatgcttgttgttgatcccatgaagaggatcaccatacgtgaaatccgtgaacatcagtggttcacagttggtcttccgcgttatttagctgtgccacctcctgacactgcacaacaggttaaaaagctcgacgatgaaactctgaatgatgttatcaatatggggtttgacaagaatcagctaatcgaatcacttcacaagagactgcaaaacgaggcgacagttgcctactatttactattggacaataggctgcgcacaaccagtggctaccttggagctgagttccatgaatctatggaatcttctctcgctcaagtaactccagctgagacaccaaactcagccactgatcatcggcagcatgggcatatggaatctcctgggtttggcttgaggcatcatttcgcagctgacaggaaatgggcccttggtcttcagtctcgagcacatccacgagaaataataactgaagttcttaaagctctgcaagagctaaatgtttgctggaagaagattggacattataacatgaaatgcagatggagtcctagttttcccagtcatgagagtatgatgcataacaaccatggctttggtgcagaatctgctataattgaaactgatgacagtgagaaatcaacccacactgtgaaatttgaaattcagctttacaaaacaagggatgaaaaataccttcttgacttgcaaagggtcagtggaccacagcttctctttctggacctgtgctctgcctttctaactcagctgagagtcctttaattatgccgttgtctgcttcccaactgaacttcctgcagcataccgtggattgtcacgtttcatttaagatatgtacataatgaccataatcctccagtagataatatttcctggagtgtgtagacgttagaggctgccagtgatgtattttgacggtaattggccaaaccagaggtaacaggcaggaggcaaacctttctctgtttttttatttgccgttgttgttgttatatgacggtttagacttatctagagtccttgaaccactttgcttgtttacggtgatctttactagcctgattgcccagcctgagaatcacctctgtcgttatgaaagttgagcagttggcatactattgttgatcctgcattccttgacagatgaccgttggatacatgcagagctgtgtatctttttttttttcacatcataattactcagattggttacccatttgcttctgtatgtgttgactggaatgttaaataagaatagttccctcttgatt

SEQ ID NO: 385244 - DNA, 1350 bp, Oryza sativa
cgtcgatctcctcgcgactttgcccgccgccgccgccgccgctctccatcccgcgagaagctcgtcgccggcgtcccgctgcatccatcctctccggcgatggcgattactttgtccaatgtcaactctgaggcaggcctccagaagcttgatgagtacctccttactcgcagctacatcagtgggtaccaggcttcaaaggatgacatgactgttttcacctcacttccttctgctcccgcagcaagctatgtcaatgtcacaaggtggtatgatcacatcagtgctctcctaagatccagtggagttaccgcagagggtgaaggtgtgaaggttgagtcaactgcttgttctgtgtctccaactgctgaccaaaaggcaccagcagctgatgaagaagatgatgacgatgttgatctgtttggtgaggagactgaagaggagaagaaagcagcagaagaacgggccgcagctgtcaaggcttctggaaagaagaaagaatctgggaaatcatcggttctgctagatgtaaagccatgggatgacgaaacagacatggcaaagcttgaggaagctgtgaggaatgtgaagatggagggcctgctctggggtgcatccaaacttgtaccagttggatatggcatcaagaagttgcaaattatgatgaccattgtggacgatcttgtttctgtggacagtctcattgaggattatttttacacggaaccagctaatgagtttattcagagttgtgacattgttgctttcaacaaaatctaaaatggagtcttgtcagaggcagccttactaaaagaggaatgctatatgctcatcatcagaatttcccaatggtttatgtttcgtctatggaccttgagtgtactgcgaaccagcgtttggtattatcatgagatttaaatcttggttggacttgttttggccagttgccccctgttggtttgtacctattgattttggaggtctttgtcacatgcccgttcagtcgttctacacaagtagttgccctttgcatgatctggtataacagctgcacaactgttctcggctgatgtacgataatattgtctatatcgtacctggtacaccgaaatagtgggatatttaactattttctactttcaaggtgtggcatttaaaaaattgttactcagtttatgacatgtgggtattcgtacggctatgatttatgggttcagtaacaaatcgttaaatgtcacatcaatgagtggaaaatagttaaatatctctgaaatagcgggggcaggcgcaaagggtgtctactcaaggagcaaaatgcagctgcacccaaagaaaagtgagaactagttt

SEQ ID NO: 385245 - DNA, 862 bp, Oryza sativa
ccacgcgtccgcccacgcgtccgcccacccggccgcctctcaatatggggtcaaaaagccaaaaaaataagtgattcgtttttagcccttataaaaagaaaacggattcttgaacctctttcacgctcatgtcacgtcgaggtactgcagaaaaaagaactgcaaaatccgatccaatttttcgtaatcgattagttaacatggtggttaaccgtattatgaaagacggaaaaaaatcattggcttatcaaattctctatcgagccgtgaaaaagattcaacaaaagacagaaacaaatccactattggttttacgtcaagcaatacgtagagtaactcccaatataggagtaaaaacaagacgtaataaaaaaggatcgacgcggaaagttccgattgaaataggatctaaacaaggaagagcacttgccattcgttggttattagaagcatcccaaaagcgtccgggtcgaaatatggctttcaaattaagttccgaattagtagatgctgccaaagggggtgggggtgccatacgcaaaaaggaagcgactcatagaatggcagaggcaaatagagctcttgcacattttcgttaatccatgaacagaatctaggtatgtagacacatggatccatacatctcgatcggaaaagaatcaatagaaggagaatcggacgatatctttctcgaaacaaacaaaaaggaaaagaaagagaaaacagaaatcatgatcaactaagccctctcgggggcttgcttaagaataagaaagaggaatcttatggaaatagcatggaataaggtttgatcctattcatggggattccgtaaatatcccattccaaaaaaaaaaaaaaa

SEQ ID NO: 385246 - DNA, 1158 bp, Oryza sativa
tgttagccaagatcaagagatcgatcatatcgtattttgtagtaatttagcagctagctagtgcagctgcaagctattagcgactgcatgctttgatcgatccatctagctaattgttgaatccatctaagcttaatggctctgcagcagagcatggcgatgccgatgatggtagtgtctgaccttggcaccgctcctcggtcatcgccgatggttcagctgcagaggatgaagaagcatctggtggtggtggcggcgttcaagagcagaaccaaggcttcccccaaggtggacaagtcgaacaagaacaagtcgatcgtggaggacggcatcttcggcacctccggcggcatcgggttcaccaaggagaacgagctgttcgtggggagggtggccatgctggggttcgcggcgtccctcctcggcgaggcggtcaccggcaagggcatcctggcgcagctcaacctggagacgggcatccccatctacgaggccgagccgctgctcctcttcttcatcctcttcacgctgctgggcgccatcggcgcgctgggcgaccgggggcgcttcgtggacgacgccaccgggctggagcgcgccgtgatcccgccggggaaggggttccgcgcggcgctggggctcagcgagggtggcccgctgttcgggttcaccaaggcgaacgagctcttcgtgggtcgcctcgcgcagctggggatcgccttctccctcatcggcgagatcatcaccgggaagggcgcgctggcgcagctcaacatcgagaccggcgtccccatcaacgagatcgagccgctcctcctcttcaacatcctcttcttcttcttcgccgccatcaaccccggaaccggcaagttcgtcaccgacgacaacgacgaccaatgagcccagcccacccctcattttgcttttactccacttaattaaattagcttcttctgatagtagtaaggagacggttaagtggactagctagtcaatgtcaatcctctcctctgtactgtagtggagtagtatctacttatatgcatatactagcaaaaattcaggacacaacaatcaatcggtactcctgaatgcatgatgggtgaaccttccaaaaaaaaaaaaagagggcgcccactactagaggactccgcagct

SEQ ID NO: 385247 - DNA, 2744 bp, Oryza sativa
  unsure (1)..(2744): unsure at all n locations
aaannnctattntccgtcctcctcctcctcctcccctcccttccatcgccgctgctcgcttcctccccctctcccacgaaagatggcgtctcacattgttgggtacccccgcatgggccccaagagggagctcaagtttgccctggagtctttctgggatgggaagagcagcgctgaggatttggagaaggttgcgaccgacctcagggccagcatctggaagcaaatggctgacgctgggatcaagtacatccccagcaacaccttctcgtactatgatcaggttcttgacacggctgccatgcttggtgctgtcccagagcgctactcatggactggtggagagattgggttcagcacctacttctcgatggctaggggcaatgccactgtccctgccatggagatgaccaagtggtttgacaccaactaccactttatcgtccctgaacttggtcccaacaccaagttctcctactcttcccacaaggctgtgaatgaatacaaggaggctaaggcgctcggcgttgacaccgtgccagtacttgttggaccagtttcatacttgttgctctccaagcctgccaagggtgtagagaagtcgttcgctcttctttcccttctcagcagcatccttcctgtctacaaggaggttattgctgagttgaaggcagctggtgctacatggattcagtttgatgagcccacacttgttcttgaccttgactctcaccaattggctgcattctctgcagcgtacacagaactcgagtcggcactttctggattgaatgtgcttattgagacatacttcgctgacattcctgctgaatcatacaagaccctcacatccctgaacagcgtgactgcttatggttttgaccttatccgtggttccaagactcttgaccttgtcaagagtgctggtttcccctctggcaagtacctctttgctggtgttgtggatggacgcaacatctgggctgatgatctcgccgcatctctcaccacccttgagtctcttgaggctattgttggaaaggacaagcttgtggtctcgacttcctgctcactcatgcacaccgctgtggatcttgtaaatgagaccaagctcgatagcgagattaagtcatggctcgcttttgctgcccaaaaggtggttgaggtgaatgcccttgctaaggcattggctggacagaaggatgaggcttactttgcagcaaacactgctgctcaggcctccaggaggtcatcacctcgtgtgacaaacgaggaagtccaaaaggctgctgctgctctgaaggggtctgaccaccgccgtgctaccaatgttagcgctagactggacgcacagcagaagaagctcaaccttccagtccttcctacaaccacaattggttcattcccacagactgtggagctcaggagagtccgccgtgagtacaaggctaaaaagatctctgaggatgagtacgtcagtgccatcaaggaggaaatcagcaaggttgttaagatccaggaagagcttgacatcgatgtgcttgttcacggcgagcctgagagaaacgatatggttgagtacttcggtgagcagctttctggttttgcattcactgccaacggatgggtgcaatcttatggatcacggtgtgtcaagccaccaattatctatggtgatgtgagccgccccaaccccatgactgtgttctggtccaagttggcgcagagcatgacctctcgccccatgaagggaatgttgactggtcccgtcacaatccttaactggtcttttgtcaggaatgaccagccgaggtttgagacatgctaccagattgctcttgccatcaagaaggaggtcgaggaccttgaggctggtggtattcaggtcatccaaatcgatgaggctgctttgagagaaggtctgccactccgcaaggcggagcatgctttctacttggactgggctgttcactccttcagaatcaccaactgcggtgttcaggacaccacccagatccacacccacatgtgctactctaacttcaacgacatcatccactccatcatcaacatggacgctgatgtgatcaccatcgagaactcccggtccgacgagaagctgctctccgtcttccgcgagggtgtgaagtatggtgctggcattggccctggtgtctatgacatccactccccaaggatcccgtccacagaggagattgcggaccgcgtcaacaagatgctcgcggtgctcgacactaacattctctgggtgaaccctgactgcggtctcaagacccgcaagtacaacgaggtcaagcccgcccttaccaacatggtttcggccgccaagctcatccgcacccagctcgccagcgcgaagtgaggatatccatagctgcaagttcccttcggttgcgaggacgatgccgtcatagccatctgtttttgaataatctgggtccagtggatccaattgtctgtggttaggtttagtcagtctcggtgggaagatccctcatacccgttttacttttgaatcaatttggtggtttttgaggcagtttgtcggtgtatttgtattgtgtgtaatctgagtgggaatcagcagtgtttcatctgcatctgaatcgttgcggatcaaattacaaaattttcaaggagagttcttgatgttatggtcttccaactacctaagtgttttgtgtcagttgttcacctgagttgagagtggttgatttctgatg

SEQ ID NO: 385248 - DNA, 1241 bp, Oryza sativa
ccacgcgtccgcccacgcgtccgcccacgcgtccgcccacgcgtccgcctgagctgaacaccgcatcagcagcagcaagcagctaatcgcgcacgtacgcacaccgcgacccggggcgagatggcgcagtcgatgctggtgtcgggagccaatggcacggtggccgccgcgagcaccagcaggctgcagcccgtgcggccgacgccgttctcgcggctcgtgctgtcgcagccgtcgtcgtcgctggggcgcgcggtgtccgtcaagacggtggcgctgttcggcaggtccaagaccaaggccgcgcccgcaagaaaggctgagccgaagccaaagttcaagaccgaggacggcatcttcggcacgtccggtgggatcggtttcaccaaggagaacgagctgttcgtcgggcgtgtcgccatgctcgggtttgccgcgtcgatcctgggtgaggccatcaccgggaagggaatcctggcgcagctgaacctggagacggggatcccgatctacgaggcggagcccctcctcctcttcttcatcctcttcaccctcctcggcgccatcggcgcgctcggcgaccgcggcagcttcgtcgacgaccagccggtgacgggcctcgacaaggccgtcatcgccccgggcaagggcttccgctccgcgctgggcctcagcgagggcggcccgctgttcggcttcaccaaggccaacgagctgttcgtcggccggctcgcgcagctcggcatcgccttctccatcatcggcgagatcatcaccggcaagggcgccctcgcgcagctcaacatcgagaccggcgtccccatcaacgagatcgagccgctcgtcctcttcaacgtcgtcttcttcttcatcgccgccatcaaccccggcaccggcaagttcgtcagcgacgacgacgaagagtagaattacgaggatcgatcgatctaccgaggtttcgccgccattgttgtgcttgcgcatcattgagactttctttcaagtgtatatgtactgtgtacgtgtaggtgtaaagacgtaccttgtttaattagttgttaattaatgcccatggagaaaattaacgtgagatttagctacttgctgcggtaaatctaattggagatgcctctccaattagtcttaaccagagacatccaattagtcttaaccagagacacccatactttaggagttttggctgctattaatccattgagcatctatgcttgaaataaaaa

SEQ ID NO: 385249 - DNA, 1431 bp, Oryza sativa
ccacgcgtccgaaacgaactaatatatagataatcgaaattgaaaagaactgtcttttctgtatactttccccgttctattgctaccgcgggtcttatgcaatcgatcggatcatatagatatcccttcaacacaacataggtcatcgaaaggatctcggacgactcaccaaagcacgaaagccagttagaaaatggattcctatttgaagagtgcctaaccgcatggataagctcacattaacccgtcaattttggatccaattcgggatttttcttgggaagtttcgggaagaaattggaatggaataatatagattcatacagaggaaaaggttctctattgatgcaaacgctgtacctagaggatagggatagaggaagagggaaaaatcgaaatgaaataaataaagaataaagcaaaaaaaaaataagtcgaagatagaagagcccagattccaaatgaagaaatggaaactcgaaaaggatccttctgattctcaaagaatgaggggcaaggggactgataccgagaaagatttcttcttattataagacgtgatttgatccgcatatgtttggtaaaagaacaatcttctcctttaatcataaatggaaagtgttcaattagaacatgaaaacgtgactcaattggtcttagttagtcttcgggacggagtggaagaagggcggagactctcgaacgaggaaaaggatcccttcgaaagaattgaacgaggagccgtatgaggtgaaaatctcatgtacggttctgtagagggacaggaagggtgacttatctgtcgacttttccactatcaaccccaaaaaacccaactctgccttacgtaaagttgccagagtacgattaacctctggatttgaaatcactgcttatatacctggtattggccataatttacaagaacattctgtagtattagtaagaggaggaagggttaaggatttacccggtgtgagatatcgcattattcgaggagccctagatgctgtcgcaggaaagaatcgtcaacaagggcgttctaaatatggggtcaaaaagcctattataataagggattcgtttttgccccttataaaaagaaaacggattcttgaacctctttcacgctcatgtcacgtcgaggtactgcagaaaaaagaactgcaaaatccgatccaatttttcgtaatcgattagttaacatggtggttaaccgtattatgaaagacggaaaaaaatcattggcttatcaaattctctatcgagccgtgaaaaagattcaacaaaagacagaaacaaatccactattggttttacgtcaagcaatacgtagagtaactcccaatataggagtaaaaacaagacgtaataaaaaaggatcgacgcggaaagttccgattgaaataggatctaaacaaggaagagcac

SEQ ID NO: 385250 - DNA, 511 bp, Oryza sativa
ccacgcgtccggatcgatctaaaccaatccattttttctatatacatacgacatgccaacggttaaacaacttattagaaacgcaagacagccaatacgaaatgctagaaaatcggccgcgcttaagggatgtcctcagcgtcgaggaacatgtgctagggtgtatactatcaaccccaaaaaacccaactctgccttacgtaaagttgccagagtacgattaacctctggatttgaaatcactgcttatatacctggtattggccataatttacaagaacattctgtagtattagtaagaggaggaagggttaaggatttacccggtgtgagatatcgcattattcgaggagccctagatgctgtcgcagtaaagaatcgtcaacaagggcgttctaaatatggggtcaaaaagccaaaaaaataagtgattcgtttttagcccttaaaaaagaaaacggattcttgaacctctttcacgctcatgtcacgtcgaggtactgcagaaaaa

SEQ ID NO: 385251 - DNA, 856 bp, Oryza sativa
  unsure (1)..(856): unsure at all n locations
gttacttcccccggtttttaaattataaggcccctttgaatttttccttaatcaaacttnaaaaatgatcaaatttgtaaaaaaatatagcaacatttttaacacaanataaatatattattaaaatatattcaatgttacatttaattgaactaatttagtgttatagatgtgctttaatcattcaatgtgtatatatatatatatatagcttcagttataactgttggatgcactttccaagttcaagtaaattgtcaatgaaaggcttaaatggatgtatagaactcaatgcatgtgaaagggcatggaataattttcgcgtctcaaatgaataacagacaaacgatcatcaaatgctcatcatcataaccaagcagccctctatactgaaatttaagtgaggtgcagtcattatttataaagccaactgtaaggtgcatatagtaatctgttcttttcccacgtaatgggtggtttatgtttcttgatgttctctgtaaattttgctgctttggctgtaaatgttctttgtcataattcacatcatgtagtaatctgggtccagtggatccactgtctgtggttaggcttagtcaatctctcggccccgcgtccgctcatacccattttactttgaatgaatctggtggtctttgaggcagtctgtcggtgtatttgtattgtcaactgagtggaaatcagcagtgtgtcatctaaaaaacaaaggaagaaacttgccatctttaacaagaactcgccttttctcagaagttatgaacgtcatccacctgaaaaccgtcttccaaccactgctacaacgataatcttgcttccaacggaatagtgctaaggg

SEQ ID NO: 385252 - DNA, 601 bp, Oryza sativa
  unsure (1)..(601): unsure at all n locations
ccacgcgtccgcggacgcgtgggcggacgcgtgggcggacgcgtgggcgcgcagctcggcatcgccttctccatcatcggcgagatcatcaccggcaagggcgccctcgcgcagctcaacatcgagaccggcgtccccatcaacgagatcgagccgctcgtcctcttcaacgtcgtcttcttcttcatcgccgccatcaaccccggcaccggcaagttcgtcagcgacgacgacgaagagtagaattacgaggatcgatcgatctaccgaggtttcgccgccattgttgtgcttgcgcatcattgagactttctttcaagtgtatatgtactgtgtacgtgtaggtgtaaagacgtaccttgtttaattaggtgttaattaatgcccatggagaaaattaacgtgagatttagctacttgctgcggtaaatctccaattagtcttaaccaaaaacatccaattagncttaaccaaaaacncccatnctttagnattttgggtggctattaacccatnnancanctatgcngnaaatntttttttntcttaaattnnnaaanaaaaaaaaaaaaaaaaaaaaaaananaannnnangggggg

SEQ ID NO: 385253 - DNA, 1008 bp, Oryza sativa
ccacgcgtccgggcacttcaccaaccctctgcctcccttccgccgccctccgccgccgcatgcaagccatcctcgccgctgccatggccgcccagaccctcttgttctccgccaccgcccctcccgcctcccttttccagtccccttcctctgcccgccctttccactcgctccgcctcgccgccggccccgcgggcgccgccgctgccagggcgctcgtcgtcgccgacgccaccaagaaggccgtcgccgtgctcaagggcacctcccaggttgagggagtcgtcaccctcacccaggatgaccaaggtcctacaacagtgaatgtccgtgtgacgggacttactcctggacttcacggcttccacctccacgagtttggcgatactacgaatgggtgcatatcaacaggaccacattttaacccaaacaatttgacgcacggtgcaccagaagatgaagtccgtcatgcgggtgacctgggaaacattgttgccaatgctgaaggtgtagctgaggcaaccattgttgataagcagattcctctgagtggcccaaattctgttgttgggagagcattcgttgttcatgagcttgaagatgatttggggaagggtggccatgagcttagtctcagtactggaaatgctggtgggcgacttgcatgcggtgttgttgggctgaccccgttgtaggtcgctgcaagttgcagctgaagtgtcagtatcgcatccatgtcaccctttttgtcatcttcgagcctgaggcagtcgttcttgtatcacatggatttcgcaacatggatgcttaatagtatctgttgatcgttcgtctcacagtaataaaatttagttgagcaaataagtgtcgtcacatcccctgttctccaccctgtcaaactataaattgtgaaacatgagctgttctgggtatacaacgcataaaaaaaaccatgtgttatacataacagccttgttgctggctgtactttcgtgcttctgatctaaa

SEQ ID NO: 385254 - DNA, 1380 bp, Oryza sativa
  unsure (1)..(1380): unsure at all n locations
ctcatcccccatctcctctccaatactcgccactaatttcttctctctttctctctctctccgcgccctcgcatcgcacgtgaggcagtcgagggatagcggcgcaatggcggcggcggtggtggcgaacggcgcgaggggcgactcctccaaggccgcgttcgcggagatatacagcaggctcaaggaggagatgctcgaggacccggccttcgagttcaccgacgagtcgctccagtggatcgaccgcatgctggattacaatgtgctcggaggaaagtgcaaccgcgggatctctgtcattgatagtttcaagatgttgaagggcactgatgttctgaataaggaggagacatttcttgcctgcacccttggttggtgcattgaatggcttcaagcttattttcttgtgcttgatgatattatggacaactctcaaacacgacgtggccagccttgctggtttagggtgcctcaggttgggctcattgctgtaaatgatggtattatccttcgcaaccatatttcacgaattcttcaacgccattttaaaggaaagctgtattatgttgatctcattgatttgttcaatgaggttgagtttaagactgcttcaggtcaattgttggatcttattactactcatgagggagaaaaggatctcacaaagtacaacttgacagttcaccgccgcattgttcagtacaagacagcttactactcattctatcttccggttgcatgtgctttgctgctatctggtgagaatttggataacttcggtgatgttaagaacattcttgtggaaatggggacatacttccaagttcaggatgattatctagattgttatggtgatcctgagtttattggcaagattggaacggacattgaagactacaagtgctcatggttagttgtgcaagctctcgagcgtgctgacgagaaccaaaagcacattctatttgaaaattatgggaagccagatcctgaatgtgttgcaaaagtgaaggatctgtataaagaacttaatctggaggccgtatttcatgaatacgagagggagagttacaataagctgattgccgacatcgaagcacatccgaacaaagcagttcagaatgtattgaaatccttcctgcacaagatctacaagaggcagaagtagagctaagctcatggagaagctgtttcatgtttgcttggtaactagagtcgtggggacaaataactggtaactagaatcatggggactgttccctgatgttgtgtgtattatggttatgttcgtaccgtgtagtacagcgtgctactccgtaaaataatgaagcatggtgctatttatgcgtgcgtgaannnnnnnnnnnnnnnnnnnnnnnn

SEQ ID NO: 385255 - DNA, 1333 bp, Oryza sativa
ccacgcgtccgcccacgcgtccgcccacgcgtccggtctccccctttctgaacacagcaccaccccttctgctgcatctcccacctccctctgaattgtgggcctgaggcgatggcggcgctcgccccgtccaagatgctcggcacccggctcaacttcgccggctcctcccgctacgccaccgcggcaccgaccaccggagcgcagaagatcgtctccctcttcagcaagaagcccgccccgaagcccaagcccgccgccgtcacctcctcgagccccgacatcggcgatgagctcgccaagtggtacggccctgacaggaggatcttcttgccggagggtctcctggaccgctcagaggtgccggactacctcaacggagaggtccccggagactacggctacgacccttttggcctcagcaagaagccagaggacttctccaagtaccaggcctatgagctgatccatgccaggtgggcgatgctcggcgccgctgggttcatcatccccgaggcctgcaacaagtttggcgcaaactgcggccccgaggccgtctggttcaagaccggcgccctcctcctggacggcaacaccctcaactacttcggcaacagcatccccatcaacctcatcgtcgccgtcgccgccgaggtcgtcctcgtcggcggcgccgagtactaccggatcatcaacggcctggatctggaggacaagctccacccaggtggcccattcgacccgctggggctggcgagcgacccggaccaggcggcgctgctgaaggtgaaggagatcaagaacgggcggctggccatgttctccatgctggggttcttcatccaggcctacgtcaccggcgagggccccgtcgagaacctctccaagcacctcagcgaccccttcggcaacaacctgctcaccgtcatctccggcgccgccgagaggacgcccagcctgtaaacatctcgccgccggcgacgctggctggcctcaagttaattttaatcttacccgggaagaagaagggaggagtttgagaagggtggaagaatgtgttaaatgtacgtgtaaattatcgtcgagttgggagatgaatttgaaaacctgttcattctgatcttctgataggaaggaccaagtgtttggatttgtggctgagaaatatttgctacctgagtaaattgtctcgaagtggttttcatcaacgttgacattgctgaatggtttccctggattttttttttgtttcaattttgactatttgctactacctgagtaaattgtctctaataatggtttccatgaattttgactagtgagttaagtcgcc

SEQ ID NO: 385256 - DNA, 654 bp, Oryza sativa
  unsure (1)..(654): unsure at all n locations
ttttcttttccactcgacaggctgcacctaccagcggactgtttactgtagctctgtggggactgcgcgtctcacccacgccaagatgctaggcgagccggggtcaactgaggaggagtgcctgctgttgcgaaagcgtgcgacaggccacgggagagcaaaagatcgtctccctgttcagcaagaagcccgccccgaagcccaagcccgccgccgtcacctcctcgagccccgacatcggcgatgagctcgccaagtggtacggccctgacaggaggatcttcttgccggagggtctcctggaccgctcagaggtgcccgactacctcaacggagaggttccccggagactacggctacgacccttttggcctcagcaagaagccagaggacttctccaagtaccaggcctatgagctgatccatgccaggtgggcgatgctcggcgccgctgggttcatcatccccgaggcctgcaacaagtttggcgcatactgcggccccgaggccgtctggttcaagaccggcgccctcctcctggacggcaacacccttaactacttcggcaacagcatccncattaacctcatctgcgccgtcgatatgcgaggttatctctttatgtatgtgtcaatatacttatgtatctattat

SEQ ID NO: 385257 - DNA, 556 bp, Oryza sativa
ccacgcgtccgcctacgcgaacacaccaccacacttgctggtgaagatcaaacttgctttatactgggggcgatgaggtcatagctatgttggccatttgcaacatgctcataccccaattcaactacgtcaattgctagcgctacaccaccgaggcaccgaccaccggagcgcaaaagatcgtctaccctcttcagcaagaagcccgccccgaagcccaagcccgccgccgtcacctactcgagccccgacatcggcgatgagctcgccaagtggtacggccctgacaggaggatcttcttgccggagggtctcctggaccgttcagaggtgccggactacctcaacggagaggtccccggggactacggctacgacccttttggcctcagcaagaagccagaggacttctccaagtaccaggcctatgagctgatccatgccaggtgggcgatgctcggcgccgctgggttcatcatccccgagaaccatctacccttgagcttggcacgaaccggtgcgcgcgtccgggcgtacctgcccgggcggccgctcg

SEQ ID NO: 385258 - DNA, 1891 bp, Oryza sativa
aggaactccaacgaccacgtatccacaaaccaaagcccccctttaaaatccgacacaagaaacagatccaaccaattcgctcgcttaagccgccggcaaatcaacccaaccccaagggtttttcgtgtggtgttgaggatccatggctaggaagatgctcaaggacgaggaggtggaggtggccgtcaccgacggcgggagctacgactacgacctgttcgtgatcggcgccgggagcggcggcgtccggggctctcgcacctccgcgtccttcggggctaaggttgcgatttgcgagctcccgttccatcccatcagctcggattggcaaggagggcatggtgggacgtgtgtgatacgtggttgtgtgcctaaaaagatactggtgtatggttcatctttccgcggagaatttgaggatgcaaagaattttgggtgggaaatcaatggggacattaacttcaactggaaaaggctgctggaaaataagactcaagaaattgttagactaaatggagtataccagaggattcttggcaattctggtgtgacaatgattgaaggggcaggcagtttggttgatgctcatacagttgaagtcacaaagccagatggttcaaagcaaagatatacagcaaagcacatattgatagcaactggtagccgagctcaacgtgtcaacattcctgggaaggagttagctattacttcagatgaggccttaagtttggaggagctaccaaaacgtgctgtaatccttggtggcggatatattgctgttgaatttgcttctatatggaaagggatgggtgcgcacgtagacttgttttatcgaaaagagcttcctctaagaggtttcgatgatgagatgaggacggttgttgcaagtaaccttgagggaaggggaatcagattacatccagggacaaatctatctgagttgagtaaaacagccgatggcataaaagttgtcactgacaaaggagaggagatcattgcagatgttgttctgtttgctacaggtcgcacaccaaactcccagaggttgaacttggaagctgctggtgttgaagttgataatattggagctataaaggttgatgattattctcgtacatcagtcccaaatatatgggctgtgggtgatgtaacgaaccggataaatttaacacctgttgcactgatggaggctacctgcttttctaaaactgtgtttggtggccagccaactaaacctgattacagagatgtaccttgtgctgttttctccatcccaccactatcagtagtgggcttgagtgaacagcaggctttggaggaagccaagagcgatgttcttgtttacacttccagcttcaacccaatgaagaacagcatatccaaacggcaggagaagaccgtcatgaaactggtggttgattcagagactgataaagtacttggtgcatcaatgtgtggaccagatgcaccagagattatccagggtatggctgtagcgctgaagtgtggagccaccaaggcgacctttgacagcactgttggtattcacccgtctgctgctgaagagtttgtgacaatgcggaccttgaccaggcgcgtgagcccatcatccaagccaaagacaaacttgtaggcaagatgagtaattttggataaagaaacatatatacccgttttgatttatattttgtggcaaagtgtactctggtttgcatctggtaatttcacgttagggattctacctggaacggtaaaaaggagacaatgtatacttgattgaaataaggtttctgcatatcagcctgttcagagagtaaaccttctgcgtttttctgatccaaataagcgggcgggacatcattcgttcggcctgcagacaaactctctgaat

SEQ ID NO: 385259 - DNA, 1570 bp, Oryza sativa
  unsure (1)..(1570): unsure at all n locations
cggacgcgtggcccccaaatcttctccaagtccaatcgacctcatttcattcgattcatcgatcgctcggcgcggcttagggtttttggcggcagcgatggcgtcggagaagcacttcaagtacgtcatcctcggcggcggcgtcgcagcgggatatgcggcacgggagttcgccaagcagggtgttaagccaggggagctcgccatcatctccaaggaggccgtggctccttatgagcgccctgctctcagcaagggatacctctttcctcagaatgctgcaagactcccaggatttcatgtgtgtgtcggcagtggaggagagaggcttttgcccgaatggtactcagagaaaggcattgagttgatcctgagcactgaaattgtcaaagctgatcttgcctccaagactttgactagtgcagttggagcaacctttacatatgagattttgatcattgcaactggctcctcagtcatcaagctatcagattttggtactcaaggagctgattccaacaacattttatatctaagggaagtagatgatgctgacaagctggttgcagctatccaagcaaagaagggtggaaaggcagttattgtaggaggaggttacattggtctagaacttagtgctgcattgaagatcaatgattttgatgtcacgatggtgtttcctgaaccttggtgcatgcctcgtctcttcactgctgatatcgcggctttctatgagagttactacactaacaaaggagttaagatcgtgaagggtacagtagctgttggttttgatgctgatgctaatggtgatgtcacagcagttaacctgaagaatggcagtgtgcttgaagctgatattgttgttgttggtgttgggggcagaccgctgactactctctttaaaggtcaagttgctgaggagaaaggtggaattaagaccgatgctttctttgaaacaagtgttcctggagtctatgctgtcggtgatgtggccaccttccccatgaagatgtacaatgagttgaggagagtggaacatgttgaccatgctaggaagtctgcagagcaggctgtaaaggcaatcaagggaaaagagtccggcgagtccgttgtggagtatgactatctgccatacttctactcccggtcattcgacctgggatggcaattctacggcgacaacgttggcgacaccatcctgttcggagacagtgacccgacctctgccaagcccaagttcgggtcctactggatcaaggacggcaaggtgttgggtgccttcctggagggtgggtcacctgatgagaacaaggccattgccaaggtcgcgaaaactcagccgcccgttgccaacatagaggagctcaagaaggaaggcctccagttcgccagcaaaatatgagatttttgtagttttgatgtacatttccacatggtactccccctattggttttctgattgtgatgcgtctgtactctgtactcctcttaaatatgggcacttgctatagctgctgagatttgaataaagaagttttctactacaaaaaaaaaaaaannnnnnnnn

SEQ ID NO: 385260 - DNA, 1247 bp, Oryza sativa
  unsure (1)..(1247): unsure at all n locations
tccgnattcccggtcgacccacgcttcccccctcccctccggcgaactccgagctcttcccggtgagcgccgccgattcggccggagaggctcgccggagtcgcctccgccctgcccacgatggccgccaacttctggacgtcgtcgcactgcaagcagctgctggaccaggaggacgtggacaaggtcccccaggcggacagcgaccggggcatcacgctggaggagttccgcctcgtcaagatccacatgtccttccatatctggcgattggcacaacaggtgaaagttagacaaagggtgatagctactgctgttacttatttcaggcgtgtatacacaagaaagagcatgactgaatatgatcctcgtctggtagcaccaacctgtttgtatttggcatcaaaggtggaagagagcacagtgcaagcaagacttcttgtcttttacataaaaaagatgtgtgcttctgatgagaagtaccggtttgaaatcaaggatatccttgaaatggaaatgaagctcctggaggcacttgactattatttagttgtttaccacccatatcgtcctcttttacagttattgcaggatgctggcataacagatctgacacaatttgcctggggaattgtcaatgatacttacaagatggatcttattctcatacacccaccatatatgatagcattagcctgcatctacattgcaagcgttcttaaagacaaggacataactctgtggtttgaagagctccgtgttgacatgaacattgtcaagaatatctcgatggaaattttggacttctatgacacctacaagattgatcctcaaagagggctcccagaggacaaaatagcccctgtgatgaacaaactgccttcaaaggcctaaagcagactgagccctagttcagttgttatcagtctgagcgtcaaatcaccttatgctcgtacaacaggaaatatgtgtcaccttccttggagaactttatatttcaaagccatatatatatatagtatcagaattcagaattgcccctaacgaacgatttaattcagaattccgaactatatacagctgttcctgttgcagcagcttgcgaggcaaatcatttacaatgaagatcccaacgggttgggaatggtctgtatctgtatgtgtttttgatgtgtaaaaaaaaacatggctttggtactatttagtttctatagcaaatgaaatcctgaaaaattcttgcggtgaaa

SEQ ID NO: 385261 - DNA, 1547 bp, Oryza sativa
aacacgcgaaaagagaggcgaggcggaaacaagcccgggcttttccgtctcgtctcgtctccctcccaaaccgaaccaatccaatctcttctcatccatccccatggaggcgcaggcgcaggacaaggcggaggagggggaggaggagggcacgcggcagcaacacgcgcaggctgggccggtcggtgcggctggtggtggtggtggggggggcgcggcggctgtggcgatgagcgccatccccatgaacagctggctcgtgcccaagcccgaaccggtggagttcttcggcgggatggccatggtgcgcaagccgccgccgaggaaccgggaccggcacaccaaggtggaggggcgcgggaggcggatccgcatgccggcggcgtgcgcggccaggatcttccagctcacgcgggagctagggcacaagtccgacggcgagaccatccggtggttgctgcagcagtcggagccggcaatcatcgcggccaccggaaccggcaccgtcccggcgatcgcgaccaccgtcgatggcgtgctccgcatccccacccagtcgtcgtcgtcctctggcccggcgtcctccgcggtggtcgacggtgaggagtcctcggccaagcgacgccgcaagctgcagcccacgcgcgcggtggctggcgcgtctccgctggccacggcggcgcccgcggcgtactacccggtcatcgctgaccctctcctgcaaggtagcggcggcgcggcgatttcagtcccgagcggcctcgctcccatcaccgccaccggcgctccccaaggcctcgtgcccgtcttcgccgtcccggccactggcagccccgcggtcgccggcggcaaccgcatgatcccgcaagccaccgccgtatggatggtcccgcggcccgcaggcgccgcgggcgcgggcaaccaacccacgcaattctgggccatccaatccgcgccccagctcgtgaacttcgccggcgcgcagttcccgacggcgattaacgtcgccgacttccagcagcagcaacaacagcagccggtgtcaacaaccatcgtccagaacagcaactcgggcgagcacatgcacttctccggcgccgactcccacgagcagcagcggcgcgggcggaaggaaggcaacagcggcggcgtggtggaccacccggaggaggacgaagacgacgacgacgacgagccggtctccgactccagcccggaagagtagcaaacacacacagcacaacacaaaaaaagcaagcgaggcgagcactccactgcacgccaaaaagtccacaagtcccccccacacacaaagcttaggttcctttttgctccgattcaatttctcgatcgtttctttcccgcaatattcctcatccttgtcatgatgaactagtaattactcccgcgtgttgtgctgtgctgtgctggtactactccttactttcccgtccttagctcagtgtttagtcttagagaagaagaagatgatgatgatttagcatgcaaatgagcagttgacaatttgacaaaaaaaaaaaaaaaaa

SEQ ID NO: 385262 - DNA, 1439 bp, Oryza sativa
atcgacgccacgcgtgcgcgggcctttacctctactcagcttcgcgaattcgcggccgctcaaaaccctagccaacccctcctcctcctcctcttcctcgcgatccaccggcgatggcctccgccctcggggctcaggcgtctgtcgcggcgcccatcggtgcgggcggctacgggaggagttcctcgagcaagggtagcaatactgttaacttctgcaacaaatcatggattggaaccacattagcatgggaaagcaaggccctaaaatcaaggcatatgaacaagatcttttccatgtccgttcaacaagcaagcaaaagcaaagttgctgtaaaacctctggaattggataatgcgaaggagccaccccttaacttatacaaaccaaaggagccttacacagccacaattgtctcagtcgaaaggcttgtaggccctaaagctcctggtgaaacatgccatattgttattgatcatggtggcaatgttccatactgggaaggacaaagttatggtgtcattcctccaggagagaacccgaagaaacctggttccccaaatactgtccggctctattctattgcatctactaggtacggtgattcttttgatggaaagactgccagtttgtgtgttcgtcgtgctgtttattatgatcctgaaactggaaaagaagaccccacaaagaaaggtatctgcagtaatttcctatgcgactctaaaccaggcgacaaagttcagataacaggcccctcaggcaaaatcatgcttctacctgaggatgatccaaatgcaacccatatcatgattgctactggcactggtgttgctccctaccgtggctatctacgtcgtatgttcatggaggatgtcccaagtttcaagtttggtggtctggcttggctatttctaggtgttgctaacactgatagccttctgtatgatgaagagttcacaaactaccttcagcagtatccagacaatttcaggtatgataaagcactaagtagggaacagaagaataagaatggtggaaagatgtatgtgcaggacaagattgaagagtacagcgatgaaatttttaaacttttggatggcggtgcacatatctacttttgtggtttgaagggtatgatgccagggatccaggacacactcaagagagtagctgagcaaagaggtgagagttgggagcagaagctgtcgcagctcaaaaagaacaaacaatggcacgtggaggtttactaagttactaaaaagcacgggctgtgattttgtgattgttttgcagcgagttgaaacataaaacagtaaaaagcgatgattctcgttgcattgtaaaattgtcaatcttattcataagcttctgcttgacatggtgaataaaatgaagcatatgctaattttgacttaaaaaaaaaaagcggccgcgaattc

SEQ ID NO: 385263 - DNA, 3450 bp, Oryza sativa
  unsure (1)..(3450): unsure at all n locations
cgattggggcgcttgtgaacaccggggcgccacgtggagaggacgttacactccagccgccaaatttccactcccacacccgcgctcccctcccctctcttttccgtgatcgcacctcgcccacgcgccccccgccacacacaatctctgcagctctccagcttcgttggaactcgcgaatctctctccgatcccaggtgaagcgcgacttggagttggaggggagatcgatcagggccaggatgccgtcggtttcgagggccgtgtgcgtgcagagggcgagcgggaataacggtaggaggtgcagagatggggcggccgccgccggccgccgatccgtcgtggcgcagagagcgcggcacggcaagccggaggtcgccatccgctcggggtccggcggctcggcgcggggcgggcattgctcgcctctcagggcagtggcggcgccgatcccgactaccaaaaagagggtgttccacttcggcaagggcaagagcgagggcaacaaggccatgaaggacctgctgggagggaagggggcgaacttggcggagatggcgagcatcgggctgtcggtgccgccggggttcacggtgtcgacggaggcgtgccagcagtaccaggcggcggggaagacgctgccggcggggctgtgggaggagatcgtcgaggggctccagtgggtggaggagtacatggcggcgcgcctcggcgaccccgcccgccctctcctcctctccgtccgctccggcgccgccgtgtcgatgccggggatgatggacacggtgctgaacctggggctgaacgacgaggtggcggcgggactggcggccaagagcggcgaccgcttcgcgtacgactcctaccgccgtttcctcgacatgttcggcaacgtggtcatggacattcctcatgcactgttcgaggagaagctcgaagccatgaaagcagtcaaggggctgcacaacgacactgacctgactgccactgacctcaaagaactagtggcacagtacaaggatgtctatgttgaagctaagggagagccattcccctctgatcccaagaagcaactgcagctggccgtgttggccgtgttcaactcatgggatagcccaagagcaatcaagtacagaagcataaacaagatcactgggctgaagggcactgctgtaaacgtgcagaccatggtgtttggaaacatggggaacacctctggcacgggtgtgctcttcactaggaacccaagcactggagagaagaagctttacggcgaattccttgtgaatgctcagggtgaagatgtggttgctggaatcagaactccagaggatcttgatgctatgagggaccacatgccggagccttatgaagagctcgttgagaactgcaaaattttggagagtcactataaagaaatgatggatattgaatttactgttcaggaaaataggctttggatgcttcagtgcagaacaggaaagcgcacaggaaaaggtgctgtaaagattgctgtagacatggttaacgagggccttgttgagcgccgcacagcacttaagatggtagaaccaggtcacctggatcagcttcttcatcctcagtttgagaacccatcagggtataaagacaaagttattgccacgggcttacctgcatcacctggggctgctgtgggccaaattgtattcactgccgaggatgctgaagcatggcatgcccaagggaaagatgttattctggtgaggacagagaccagcccagaggatgttggtggcatgcatgcagctgttggaattcttacagcaagaggtggtatgacctctcacgctgctgttgttgcgcgcggatggggcaaatgttgtgtgtcaggatgctcaagcgtccgtgtaaatgatgcgtccaagattgtagtgattgaagacaaggcgctgcatgaaggtgagtggctatcgttgaatggatcaactggtgaagtgatcattggcaagcagccactctgcccaccagcccttagtggtgatttggaaactttcatgtcttgggtggatgaagttaggaaactcaaggttatggcaaatgctgatacccccgaggatgcaacaacagccagacagaatggggcagaaggaattgggctatgccggactgaacatatgttcttcgcttcagacgagaggattaaggctgtcaggcagatgattatggcttcaagtcttgaactgaggcagaaagcactagatcgccttttgccttatcagaggtctgactttgaaggcatcttccgtgcaatggatgggcttccggtaactattagactcttggatcctccacttcatgagttccttccagaaggccatgttgaggatatggtgcgtgagctatgctctgaaactggagcagctcaggatgatgtccttgcaagagtagaaaaactttccgaagtaaatccaatgcttggtttccgtgggtgcaggcttggtatatcataccctgaattgactgaaatgcaagcccgtgccatctttgaagctgctataaccatgaccaaccagggtattcaagtctttccggagataatggttccccttgttggaactcctcaggaattggggcatcaagtggatgttatccgtcaaattgccaacaaggtgttcacagacatgggaaaaactattggctacaaagttggaactatgattgaaattcccagggcagctttagtggctgatgagatagcagagcaggctgagttcttctcctttggaacaaacgacctaacacagatgacatttggttacagtagggatgatgtggggaagttccttcccatctatctgtctcagggtatcctccagcatgacccctttgaggtgcttgatcagaggggagttggggagctggttaagctggctacagagagaggccgcaaagctaggcctaacttgaaggtgggcatctgtggtgaacatggtggagagcctctgtcagtcgctttctttgcgaaggctgggctggactatgtttcttgttcgcctttcagggtcccaattgctaggctagctgcagctcaggtgctcctctgatgatgacgcccttctctttaccggcaaccagatcgcctgctgttggtgcacctggtgaagaataataaatacatagccatggaatggtggaaactctgctgcctgtcaaaggcgccgttgtatgtagtatgcatgttcgcatgtaagcctatgtggtggtagttttctgaaaatttcgcttgaactgccatggtaatgtaccaaacagcgatgacgacgaagaatcgaataaaggtggtgattacctataatccaaaaaaaaaaaaaaaaaaaaaaaaaaaactcgagggggggcccggtacccaattcgccctatagtgagtcgtattacaattcnnnnnnnnnttttttttttccccncnnc

SEQ ID NO: 385264 - DNA, 3073 bp, Oryza sativa
  unsure (1)..(3073): unsure at all n locations
aaagctgaaagctagctgagactgagtgccagtatcaagcagaaggaagctaatttaagagaagatcagagtgaaccatcgtcatcaatggcgccggccgctcatcgggatggcgcggcggaggcggtggggcagagggtgttccacttcggcaagggccggagcgacggcaacaagaccatgaaagacctgctgggagggaagggggcgaacttggcggagatggcgagcatcgggctgtcggtgccgccggggttcacggtgtcgacggaggcgtgccagcagtaccaggcgcagaaggcgatgccggcggggctgtgggacgagatcctggcggcgctcacctgggtggagggcaacatgggcgccgtcctcggcgacccgcgccgtccgctcctcctctccgtccgctccggcgccgccgtctccatgcccggcatgatggacaccgtcctcaacctcggcctcaacgaccacgtcgtcgccggcctcgcccaccgcagcggcgagcgcttcgcctacgactcctaccgccgcttcctcgacatgttcggcaacgtcgttatggacataccgcattcactatttgaggagaaaattgaagccatgaaagcagctttaggtttgaggaatgacaccgagttgactgccagggatttgaaagaacttgttgctcaatataagaatgtttatgtggaggccaaaggtgaagaatttccctcagatccaaagaagcagctgcatttatctgtgttggctgttttcaactcatgggacagcgcaagggcaaagaagtacagaagcattaaccagatcactgggttaaagggtactgctgtgaatgttcagtgcatggtctttggcaacatgggtgacacttcaggcactggtgttctctttactaggaaccctagtactggagagagaaaactttatggtgaattccttgtcaatgctcagggtgaggatgtggttgctggaatcagaactccacaagatcttgataccatgaaggattgcatgccagagccttatgcagaactagttgagaattgcaaaatcttggaaagccactacaaagaaatgatggatattgagttcactgttcaagaaaatagactttggatgctgcaatgcagaacagggaagcgcacaggcaaaggtgctgtgaagattgctgtagacatggtcaatgagggactgattgaccggcgttcagcaattaagatggtggaaccacggcacttggaccagcttcttcatccccagtttgagagccagtcgtcatatggagacaaagttattgctacaggcttgcctgcatcaccaggagctgctgtaggccagattgtcttcacagctgacgatgctgaagcatggcatgcacaaggaaaatctgtcattctggtgaggactgaaacaagcccagaggatgttggtggcatgaatgcggctgctggaattcttacagccagaggtggtatgacatctcatgcagcagtcgtagcccgtggatggggaaaatgttgtgtggcaggatgctcgggtatccgtgtaaatgatgctgagaaggtggtactggttgccgacaaggtgctttgtgagggtgaatggttgtcactgaatggttcgactggagaggtcattttgggcaagctgcctctatccccaccagcacttagtggtgatttgggagaattcatgtcttgggtggatgaagttaagaaactcaaggtcaaggctaatgctgatactcctgcggatgcactgactgcaagaaataacggtgcggaagggattgggttgtgcagaacagaacacatgttcttctcttctgatgaaaggataaaggccatgagacagatgataatggcggaaacaattgaacacaggcagatagcactagatcgcctcttgccatatcagagacttgactttgaaggaattttccgtgcaatggatggacttcctgtgactattcgactcttggatcctccactccacgaattccttccagagggtaacgttgaggatatggttcgtttgttgtcttctggaaacgtatatactcaggaggaaattcttacaagaatagaaaaactttctgaagtgaatccaatgcttggcttccgtgggtgcaggcttgggatatcatacccagaattgacagcaatgcaagcccgtgctatctttgaagctgctatttctatgactgaacaaggtgttaaagttttcccagagataatggtgcctctcattggaacacctcaggaactcgcccaacaagtagatgtaattcgtgaagttgccgaaaaggtttttgcaaatgcagaaacaaccattagctacaaaattggatccatgattgaggttcccagggctgctcttatagctgatgagatagcagcactagccgaattcttctcgtttgggacgaacgacctgactcagatgacatttggttatagcagggacgatgttggcaagtttctgccaacctacttgtcaaagggtatcctccagaatgaccccttcgaggtgtttgaccagaagggagtgggggagcttgttaaggttgccgtagagcggggccggaaggcaaggcctgatttagaggtgggcatttgtggggaacatggtggtgagccttcttcagttgcatttttcgcgaaggttgggctgaactacgtttcttgctccccattcagggttccaattgcaaggctagcagcagcgcaggtgatgctgtgatcggcgagtactaatgaagcaaaccgttggtgcatcttgtaaatatacgaagagtaaataatgcttaaataatttatgttacgatggacactcgcaacatgctttgcttgacgaaatgtatgatgacctgcaaatggaggtttgcatgtgtataaataatattttttgtttgtgtgcccacggtaattgctgccataaacatcaaacagctatcagaggttgcatgttaaggcacctgaaataattgtaatttatttcgagaattactcaaatgaaatgtcatgtttttttgtacctaaaaaaaaaaaaaannnnnnnnnnn

SEQ ID NO: 385265 - DNA, 557 bp, Oryza sativa
gcttttgcacaaagcctcagtgcctcactgcacttgcaccggtcactaatggctccggctcaatgtgctcgtgtgcagagggtgttccacttcggcaagggcaagagcgagggcaacaaggccatgaaggacctgctgggagggaagggggcgaacttggcggagatggcgagcatcgggctgtcggtgccgccggggttcacggtgtcgacggaggcgtgccagcagtaccaggcggcggggaagacgctgccggcggggctgtgggagggagatcgtcgaggggctccagtcggtggaaggagtacatggcggcgcgcctcggcgcccccgcccgccctctcctactgttcgtccgatccggcgccatcgtgctgatgccggggatgatggacacggtgctgaacctggggctgaacgacgaggtggcggcgggactggcggacaagagcggtgaccgctttgcgtacgactactaccgacgttttctcgacatgttctggaacgtggtcatggacaattctcatgcactgttcgaggagaagctcgaagccatg

SEQ ID NO: 385266 - DNA, 2166 bp, Oryza sativa
  unsure (1)..(2166): unsure at all n locations
tgtccactcgcctcctctctcgcgcggctttccatttccatctccccctcctgctcctacgtctccgccgctcctcacttcctccactcgatttcctttcttggcctctcctcctctgacacaggggtgtgcaggtttgtgtttgtgcgtggcgcgtccgccatggctcgcggcagcggggccggaggaggcggcggcggtggtggcggggggctggagctgtcggtcggggtcggcggcggcggcgcgcgtggtgggggaggcggtgaggcggcggcggcggtggagacggcggcgccgatcagcctcgggaggctcatcctctccgggatggtcgccggcggcgtgcagtacgggtgggcgctccagctctccctcctcaccccctacgtccagacactcggactgtcgcatgctcttacttcattcatgtggctctgtggtcctattgctggcatggtggttcaaccatgcgtgggtctatacagtgataggtgcacctcaaaatggggaagacgaaggccatatattcttacaggatgtgtgttgatatgcttggctgtcgtagttattggattttcagctgacattggatacgccatgggtgatacaaaggaagactgcagtgtctaccatggatcacggtggcatgctgctattgtatatgtcctgggattctggcttcttgatttttccaacaacactgtgcagggtccagcacgtgctctaatggctgatttatcaggacgtcatggacctggcacagctaactccatcttctgttcttggatggcaatgggaaacatcctaggatactcctctggttccacaaacaattggcacaagtggtttccattccttaaaacaagagcttgctgtgaagcttgtgcaaatttgaaaggtgcatttctggtggctgtgattttcctgtccctgtgcttggttataactctgatatttgccaaggaagttccattcaaaggaaatgcagccctcccaacaaaatcaaacgagccagctgagcctgaaggcactggtccactagcagtgttgaaaggcttcaggaacttacctactgggatgccttctgtgcttattgtgactggccttacctggttgtcttggttcccattcatcctctacgacactgactggatgggccgtgagatctaccacggtgacccaaagggaactgatcctcagatcgaggctttcaaccagggtgtcagggcaggtgcatttggcctgctactgaattcgattgtgctaggattcagctcattcttgattgaaccaatgtgccggaaagtcgggccaagggtggtgtgggtgacgagcaatttcctcgtctgcatcgccatggctgcaactgcactgatcagcttctggtcactcaaggacttccatggaactgttcagaaagccatcactgcagacaagagcatcaaggctgtctgcctcgtcctctttgcgtttcttggagtccctctcgccgttctgtacagtgttcccttcgcagtgacggcgcaattagcggccactagagggggtggccaagggctctgcaccggcgtcctcaacatctccatcgtcatccctcaggtggtcatcgcgctgggagccgggccgtgggacgagctgttcgggaaggggaacatcccggcgttcggcctcgcctcgggattcgcgctcatcggcggcgtcgccggaatattcctgctgcccaagatctccaagcgccagttctggtcggtcagcatgggcggcggtcactgaccgcccgctctcgccgccggctgcggcggcggcggcggccggagcagcgccgccggaagtggtgagctttgtagttctcgtttgcaatggatcaaaggagccccctctttttttttacatagggtaattaattaattaaggctgttaattaggaaggggtgaggtggccctgcagctggggcccacgctttgttgccacctcggtagaagagaataagcagatcatgcagataatatggaactgtaaaactgttttgtgttgtgtgtgtgtgcagtgtgcttggtaattagtgtgtaatgaatggtcaggagaagtgcagtgaactaagtgaaagtgagcttccatcatcatcatcnnnnnnnnnnnnnnnnnnnnnnnnnnnnnnnnnn

SEQ ID NO: 385267 - DNA, 1200 bp, Oryza sativa
atggaggagaggtacgaggcgttgaaggagctcggggccggcaacttcggggtggccaggctggtcagggacaagaggagcaaggagctcgtcgccgtcaagtacatcgagaggggcaagaagattgatgaaaatgtgcagagggagatcatcaatcataggtcgctccggcatcccaatatcattcggtttaaggaggtttgtttgacacccacacacctagccattgtcatggagtatgctgctggtggagaactctttgaacaaatctgcaccgcagggcgattcagcgaagacgaggcaaggtacttcttccagcagctaatatcaggtgtcagctactgtcattctctggaaatttgccaccgtgatcttaaacttgagaacaccctcctggatggaagcccaacacctcgtgtgaagatttgtgactttggttactcaaagtctgctttgctgcattcgaagccgaagtctacagttggtactccagcatacatagcgccagaagttctttcaagaaaagaatatgatggcaaggtagcagacgtttggtcctgtggtgtgacactgtacgtgatgcttgtcgggtcatacccgtttgaagatccaggtgatctgaggaatttccgcaaaacgatcagcagaattcttggcgtgcaatactccatcccggattacgtgagggtgtcttccgactgcaggcgccttctatctcaaatatttgttgccgatccttcaaagaggatcacgatccctgagataaagaagcacacgtggtttctgaagaatctgccaaaggagatatcggagagggagaaggccgactacaaggacacggacgccgcccctccgacgcaggccgtcgaggagatcatgcggatcatccaggagggcaaggtccccggcgacatggccgccgccgacccggcgctgctcgcggagctcgccgagctgaagagcgacgacgaagaggaggccgccgatgagtatgacacctactgaccatccatgatccatattgcatccatggtcgttgtgctgcagctgtaaatatgatccggaataaacgtgatcgccagaccaaatgatatgcgtattctgatgcattttctgccgtgtatactctgcaccggattttcctgcagcgtaaataataaagaaaaaaaataattatttgtttcccaaaaaaaaaaaaaa

SEQ ID NO: 385268 - DNA, 1177 bp, Oryza sativa
cccgccgcggctcacctggaaactgggcagattggacaatcgctcgagcgagctagcgagagagagcgcgagagagcgaggcggcgcgcgcggtggttgcggatttgtagcttagagcgcggggccatggggaggtcgccgtgctgcgagaaggcgcacacgaacaagggggcgtggacgaaggaggaggaccagcggctcatcgcgtacatcagggcgcatggcgaaggctgctggcgctcgctgcccaaggcggcgggcctccttcgctgcggcaagagctgccgcctccggtggatgaactacctccgccccgacctcaagcgcggcaacttcaccgacgacgaggacgagctcatcatccgcctccacagcctcctcggcaacaagtggtctctgatcgccgggcagctgccggggaggacggacaacgagatcaagaactactggaacacgcacatcaagcgcaagctcctcgcccgcggcatcgacccgcagacgcaccgcccgctgctcagcggcggtgacggcatcgcggcgagcaacaagcggcaccaccgccgccgcatcccatatccgtcccggcgaaggcggcggccgcggcgatcttcgccgtgcgaagccgccgccgccgccgcgcccggtcgactcctcggacgacggctgccgcagcagcagcggcacaacgagcacgggggagccgcggtgccccgacctcaacctcgagctctcggtcgggccgacgccgagctcgccgccggcggagacgcccaccagcgcgcggccggtctgcctctgctaccacctcggcttccgcggcggggaggcgtgcagctgtcaggctgacagcaagggcccacacgagtttagatatttcaggccgttggaacaaggccagtacatatgagatatgaccatgagatgtgagatggcttaattagcttcaattcccaacatgtgtaacacagggagtttttctagtggacgacaatactgtttaatttcagaaaaaaaagggaaagaaaaaggttctaatctgttcatatttcttactattatccaatcttcatgatctcaatctctctctctctttattatttttctttgtagtaattaacttcatgttggttcctctaaaaaagattggtcgatgttattcagtgataaatattcctag

SEQ ID NO: 385269 - DNA, 575 bp, Oryza sativa
  unsure (1)..(575): unsure at all n locations
gcgcttgtcacgcccccaccccctttgctttgatgcacgcctagctaatcaattaacttaacctgcctcgcctctgcctattcgaaacagcagcggctccagctcgccgtggtcgactttcccggcggcgatcaccggcagcggaggaggagcagtacgtgtgtatatataaaggatggggaggcagccgtgctgcgacaagctgggggtgaagagggggccgtggacggcggaggaggacaagaagctgatgagcttcatcctgaccaacggccattgctgctggcgcgccgtgccgaagctcgccgggctgctccgctgcggcaagagctgccgcctccggtggacaaactaccttccgccccgacctcaagcgcggcctcctcaccgacgccgaggagcagctcgtcatcgacctccacgccaagctcggcaacagatggtccaagatngctgccaagctaccgggcaggacggacaacgagatcaagaaccactggaacacgcacatcaagaagagctcatcaagatgggcatcgacccggtgacgcacgagcccctcgaccggaagcagg

SEQ ID NO: 385270 - DNA, 735 bp, Oryza sativa
tccacacctcgtcgccgatctcccaccccgcgcggcgccggcgcccgtccgtcctctcctctcctgcctccgccgcatcctcgcctcgcctcgccgaacacacaagattttgaggatgccgagggccacgagcgatgcgaagcttctaattcagtccctgggcaaggcttatgctgccacaccaacaaatctcaagatcattgacctctatgtggtctttgcagtcgccactgcccttattcaggttgtttacatgggaatagtggggtcatttcctttcaactctttcctttctggcgtcctctcatgcataggaactgcagtcctcgctgtttgccttcgtattcaagttaacaaagataacaaggaattcaaggatcttcctcctgaaagggcgtttgcagatttcgttctgtgcaatctggtgctccacttggtgatcatgaacttccttggttgatgtcctgcccctacaactgatcaaggttttgtagccccagtttatggtcactggtcagaacaccctgatgtttgggagtgtcatagtatgagatattcatatgatctttcacacttcaccgatgtaattcgacaatttttcgagaaactataagttctctacctgccgttcgctgcggcttatctttatatctgtgtatttagtgtttaacaatcttagaacatgtgatcctgttttcttcaagtgaccgaaggttggcaacatgctattcgacc

SEQ ID NO: 385271 - DNA, 1726 bp, Oryza sativa
gctgctacttcttccactagcggccgtcttgctgctccctccactgctcgcctcgcctccgccaccatctgaaatcgagtgagtgggagctaaggcggcggccccgtcgagatggcgctcgtattgcatactttcgatggaaacaagaatgcattcaaggcactcattgctgccgagtactctggtgtcaaggttgagttggcaaagaactttcagatgggtgtctccaacaagactcctgagtttctcaagatgaatcctattgggaagattcctgttctagagactcctgatggtcctgtttttgagagcaatgcgattgcacgatatgttacccgctcgaaggctgacaacccactctatgggtcttcactgattgaatatgcccacatcgagcagtggaatgacttttcggccacagaggttgatgctaatattggaaaatggctctacccacggctaggaattgctccctatgttgctgtgagtgaggaagcagctattgctgctttgaagagatcattgggtgccctcaacacacaccttgcatcaaacacataccttgttggccattcggtgactcttgctgatattgtgatgacactgtaacctctacatgggctttgctcggatcatgaccaagaattttacttctgagttccctcatgttgagaggtacttctggaccatggttaaccagccaaactttaagaaagtcatgggtgatgtgaagcaggcagattctgtcccacaagttcaaaagaaggctgcagcaccaaaggagcagaagccaaaggaagccaagaaagaggccccaaaagaagctccaaagcctaaggcagctgagaaaccagaggaggaagaggaagcaccaaagccaaagccaaagaatcctcttgatttgctccctccaagcaaaatgatccttgatgagtggaagaggttatactcaaacacaaaaacaaacttccgtgaggttgctatcaagggtttctgggatatgtatgacccagaaggttactccctgtggttttgtgactacaaatacaatgacgagaacaccgtgtccttcgtgaccatgaacaaggttggtgggttcctgcagcgaatggacctgtgccgcaaatatgccttcgggaagatgcttgtgatcggctcctgagccgccattcaaggtgaagggtctttggctcttccgtggccccgagatccccaagttcgtcatggatgaagtctatgacatggagctctatgagtggaccaaggttgacatctcagatgaggcccagaaggagcgcgtcagcgccatgattgaggacctggagccatttgagggcgagtctttgctggatgcgaaatgcttcaagtgaggcgtcgttggagcaaggataccgtggaaaatgagctatttaggttttggatttacccttctacaatagttcatgattatgaaaaaaaaaatactatcaccatgtggctatattagtcaatattgagtgtgctggtcgtttctttttgtactgtttttaagagttttggcccttctatcttgtagttcttagttgttaaagacactatccatcgaatcatcatcggaaacacaccattccttgtgaatcggctgctgctcatatgttaaacttgccaattctgatgttttcgaattgttatgcaagtaaaagaggtacagtgatgttcatgtttgtcaaaaaaaaaaaaaaaaaaa

SEQ ID NO: 385272 - DNA, 818 bp, Oryza sativa
ccacgcgtccgcggacgcgtgggcggacgcgtgggcggacgcgtgggcggacgcgtgggctcgtcgcaacagctacaaacgcccacatcacacgcagaaatccgcatcaacagccagccatggcgtccacgctgaccaacgtcggcctgtctaccccggcggcggcggcgtcgtccctcgttaggccggtcgccggagctggacgcgtggtgtttccccgtgttggccgcggcgggttcgcggcggtgagggcgagcgggccggcgacgccgccggacatctcggacaagatgtcggagagcatcgacaaggcgaaggaggcgtgcgcggaggacacggcgagcggcgagtgcgcggcggcgtgggacgaggtggaggagctgagcgcggcggcgagccacgcgcgcgacaagctcaaggagacctccgacccgctcgaggcctactgcaaggacaacccggagaccgacgagtgccgcacctacgacaactgattcttaccattatatgtttgctaatctctctgtaattaattataagttactgggttgaaaagattatttgtcgtagaagacagaggggagtttggtggaatggtggtatttacggatagttcaagggggaaatgggaaaaaaaaggttttttacacttgtttgtctggatgaatttgtatggaacttttctgcttgataattttcgcatgtgttagtatttgtatatgatgatataagtgggaaataaatcatcaaattttccagcaggaactttgtggaaacttttttttaattttttcgtcaatcagtgcgctttggctcaa

SEQ ID NO: 385273 - DNA, 793 bp, Oryza sativa
ccacgcgtccgcggacgcgtgggccccaaacctccttcttcttctccttcctcactgcaacactcttcggggtgcaggcagccagagccatggcaaccatcctcgccgtggccgccatggccaccttccaggctccgacgaccctcccggggcccctggctcctacgctaccggttcgccggaacgtcgtgtcgttcgccggccgccggcaggggcgcgcgctgggaaggctggcggtggtggtcgcggcgggctcgccgacgccgccggagctggcgcagaaggtgtcggagagcatcaagcaggcggaggagacgtgcgcgggcgacccggagggcggcgagtgcgcggcggcgtgggacgaggtggaggagctcagcgccgccgccagccacgcgcgcgaccgcaagaaggacagcgacccgctcgaggagtactgcaaggacaacccggagaccgacgagtgccgcacctacgaagactgagcccacacgagcgccaccagttcatcccatgctttcgccattgctgttactgtgttacacatttcagctctaagcaagctagagcagcatggcatactggggtgtacactttgcctcttgggcgtgtaagtttgatcgttaatttgtcttagtttgcaataatgcgaggttttttatttgttaattacaaaaacaaatactccctccgtattttaatgtatgacgccattgactttttaacaaacgtttgaccttttgtcttattaaaaaaattatgtaattatcatttatttaaaaaaaaaaaaaaa

SEQ ID NO: 385274 - DNA, 736 bp, Oryza sativa
ccacgcgtccgcccacgcgtccgcccacgcgtccgcgcagaaatccgcatcaacagccagccatggcgtccacgctgaccaacgtcggcctgtctaccccggcggcggcggcgtcgtccctcgttaggccggtcgccggagctggacgcgtggtgtttccccgtgttggccgcggcgggttcgcggcggtgagggcgagcgggccggcgacgccgccggacatctcggacaagatgtcggagagcatcgacaaggcgaaggaggcgtgcgcggaggacacggcgagcggcgagtgcgcggcggcgtgggacgaggtggaggagctgagcgcggcggcgagccacgcgcgcgacaagctcaaggagacctccgacccgctcgaggcctactgcaaggacaacccggagaccgacgagtgccgcacctacgacaactgattcttaccattatatgtttgctaatctctctgtaattaattataagttactgggttgaaaaaattatttgtcctagaagtaagacaggagtttggtggaatggtagtattttcggatagtttaagttggaaatggtaaaaaaaaggttttttaatcttttttgtctgaattaatttttatgggacttttctccttgattattttcgcatgtgttagtatttgtatttgtttagataagtgtaaaataattcattaaattttcccccccaaaaatcaccccctcccccgtttaaaaaata

SEQ ID NO: 385275 - DNA, 524 bp, Oryza sativa
ccacgcgtccgcttcctgtcgcgacacactcctaacgcccacctccccgcaagaaatccgcatcaacagccagccatggcgtccacgctgaccaacgtcggcctgtctaccccggcggcggcgtgcgtcgtccctcgttaggccggtcgccggagctggacgcgtggtgtttccccgtgttggccgcggcgggttcgcggcggtgagggcgagcgggccggcgacgccgccggacatctcggacaagatgtcggagagcatctacaaggccgaaggaggcgtgcgcggaggacacggtgagcggcgagtgcgcggcggcgtgggacgaggtggatgagctgagcgtgtctgtgagccattctgcgcgacatgttctaggataccttcgatctgttttaggtttattgcaaggactttccgtagactgtctatgtgctgtattttctacatttggttcttactattttttgtttgtttatttttctattatatttattattttctggattgaatatatatatttt

SEQ ID NO: 385276 - DNA, 804 bp, Oryza sativa
  unsure (1)..(804): unsure at all n locations
cacaaagcaaaccaagcaaacatcagagtaagaactcagagaagtccgatcgttccacctccaaattcgcagctattccgacgatgtcgatgatccgccgcagcaacgtgttcgaccccttctccctcgacctctgggaccccttcgacggcttccccttcggctccggcagcggcagcctcttccctcgcgccaactccgacgcggcggccttcgccggcgcgcggatcgactggaaggagacgcccgaggcgcacgtgttcaaggcggacgtgccggggctgaagaaggaggaggtcaaggtggaggttgaggacggcaacgtctcccaagatcagcggcgagcgcatcaaggagcaggaggagaagacggacaagtggcaccgcgtggagcgcagcagcggcaagttcctccgcagtttccggctgccggagaacaccaagccggagcagatcaaggcgtccatggagaacggcgtgctcaccgtcaccgtgcccaaggaggagcccaagaagcccgacgtcaagtccatccagatcaccggctagagcattgggctaatctaaaacgatttatctgtggcttcaagtgtatcgatcacttatgtgaggtgtaattactggtgtttttggtgtgctctggttcctttcaagtgtgttgttgccgctcgaactactccgctatgtaaaacggtaaaacctgttgtctcattatgaaagtgaactatattatgttctactactactctnnnnnnnnnnnnnnnnnnnnnnnnnnnnnnnnnnnnnnnnnnnnnnnnnnnnnnn

SEQ ID NO: 385277 - DNA, 755 bp, Oryza sativa
  unsure (1)..(755): unsure at all n locations
cgccgcttgagaattgagatcaccctctttccatctagaacacaaaccagacaaccaaaaaacagcaagacacaatacacaatgtcgctgatccccccgcagcaacgtgttcgaccccttctccctcgacctctgggaccccttcgacggcttccccttcggctccggcagcagaagcagcggcacgctcttcccgtccttcccccgcggcacctcctccgagaccgcggccttccgccggcgcgcgcatcgactggaaggagacgccggagcacgtgttcaaggcggacgtgccggggctgaagaaggaggaggtcaaggtggaggtggaggacggcaacgtcctccagatcagccggcgagcgcagcaaggagcaggaggagaagacggacaagtggcaccgcgtggagcgcagcagcggcaagttcctccgcaggttccggctgccggagaacaccaagccggagcagatcaaggcgtccatggagaacggcgtgctcaccgtcaccgtgcccaaggaggagcccaagaagcccgacgtcaagtccatccaggttaccggctagtaagaaacttcgggtgtgacatgcacggtggagagcttcgattcgagccttcggtttgtgatcaattgcagtaaataaaagcgtcaaatctggtcctcagtgtttatgctgtgaaaaagttcaaagctatgttggaagtgagcaataaagacttttcttgttttgtgaaaaaaaaaaaaaaaaannnn

SEQ ID NO: 385278 - DNA, 923 bp, Oryza sativa
  unsure (1)..(923): unsure at all n locations
ggcacgagctcgtgccgaattcggcagaaaagaagccagcaatcgaaagcccaagcttccaaaaatccgcttccaattcgcgaaactacactagtcgtaagcgccaaatccaaccgacgatgtcgctgatccgccgcagcaacgtgttcgaccccttctccctcgacctctgggaccccttcgacggcttccccttcggctccggcggcagagcagcggcagattcttcccgtccttcccgcgcggcgcctcctccgagaccgcggccttcgccggcgcgcggatcgactggaaggagacgcccgaggcgcacgtgttcaaggcggacgtgccggggctgaagaaggaggaggtcaaggtggaggtggacgacggcaacatcctgcagatcagcggcgagcgcaacaaggagcaggaggagaagacggaccagtggcaccgcgtggagcgcagcagcggcaagttcctccgcaggttccgcctccccgacaacgccaagccggagcagatcaaggcgtccatggagaacggcgtgctcaccgtcacggttcccaaggaggaggccaagaagcccgacgtcaagtccatccagatctccggctaggcatcgccggcgtgccgcgtgcgcgacggagaggagcacggcggggttttcgctttggcctggtttgtctgtcgtgaaggagcaaataaaatcgggtccggttgagtccagtgtgtgtccgtgtctgtcttgaacagtcgtgtgtcgcgtcgtgtcactgggtcagtgtgttgttccagtgcgccgttcatcagccgatcagcgtctgtaccggtcttttgcaactagttaagtgatgaatactataatctgttaataaaaaaaaaaaaaaaaaaaaaaaaaaaggggggcccccaccccggtggnnnnnnnnnnnnnn

SEQ ID NO: 385279 - DNA, 834 bp, Oryza sativa
  unsure (1)..(834): unsure at all n locations
gcgagaaaagaagccagcaatcgaaagcccaagcttccaaaaatccgcttccaattcgcgaaactacactagtcgtaagcgccaaatccaaccgacgatgtcgctgatccgccgcagcaacgtgttcgaccccttcggctccggcggcagagcagcggcagatcttcccgtccttcccgcgcggcgcctcctccgagaccgcggccttcgccggcgcgcggntcgactggaaggagacgcccgaggcgcacgttttcaaggcggacgtgccggggcttgaagaaggaggaggtcaaggtggaggtggacgacggcaacatcctgcagatcagcggcgagcgcagcagggagcaggaggagaagtcggacaagtggcaccgcgtggagcgcagcagcggcaagttcctccgcaggttccgcctccccgagaacaccaagccggagcagatcaaggcgtccatggagaatggcgtgctcaccgtcaccgtgcccaaggaagagcccaagaagcccgacgtcaagtccatccagatctccggctagagccccgtttgtttattctgctgcttctcctcaatgctgcaattgatctcctcctttggtactttgcttgtgtcgtgagggacacagtccaaaatgtgtgtgatatgatcatgtgtttatgaatgtgtggtctcctccaagggtcccaaatgtgtttgtctcctatgcgtttatgtacgggaaataaactttaagcttgattaatgtaccaatgtttgagtttttcttgagccttttggaatggaaactgggagtggccagttcggttctnnnnnnnnnnnnnnnnnnnnn

SEQ ID NO: 385280 - DNA, 619 bp, Oryza sativa
  unsure (1)..(619): unsure at all n locations
aattggttccgggccccccttgagtngaccccagcttccgaggagtcaaggttgaagttgacgacggcaacatcctgcagatcagcggcgagcgcaacaaggagcaggaggagaagacggaccagtggcaccgcgtggagcgcagcagcggcaagttcctccgcaggttccgcctccccgacaacgccaagccggagcagatcaaggcgtccatggagaacggcgtgctcaccgtcacggttcccaaggaggaggccaagaagcccgacgtcaagtccatccagatctccggctaggcatcgccgggcgtgcccgtgcgcgacggagaggagcacggcggggttttcgctttggcctggtttgtctgtcgtgaaggagcaaataaaatcgggtccggttgagtccagtgtgtgtccgtgtctgtcttgaacagtcgtgtgtcgcgtcgtgtcactgggtcagtgtgttgttccagtgcgccgttcatcagccgatcagcgtctgtaccggtcttttgcaactagttaagtgatgaatactataatctgttaatacgtgatctgtctgatgcattctgtgctttnnnnnnnnnnnnnnnnnnnnnnnnnnnnnnnnnnnn

SEQ ID NO: 385281 - DNA, 2031 bp, Oryza sativa
tctcttttattgtgggacggagagagtaagagttacttaggtgaaaagacttcagctgaagaaaccaccacattagatttagctgaagaaaccaccacacttttaaggcttaaccacgtgatcacagctgcaataatccggtggctctcttcacatcaaccatgggataattaaccttcggactgactagcaattcagtcacaaaacacagtgcacatgttatcagaagttcacatatcagtacgagaattcgaacagagactggtccgagatattcttgccaagctaaaatagacgggcgccatctcaggccttggaaaacataaacatgttatgtagcatgcatatatacacacatcgccggataaatacgctagttaaaagctacggtcttcttctctcggcgtatgcgtccacctcgtcattaggaacgtgacaacaacacgtttaggccgacttcgcgaagccaaccctcatcttgccgtagtcgaacacggtatggtaggcacccatgaaaacgtcacccaggatccagagaggaccacggggaggagggatgtccatggctgtgaatccactgatgcactgggcagcagctccttcaccaaccttcagaatatactcttctggcttcagtgcaaactttttgcctccaatggtgaatgaaatctcaggcatggatgcaaggctgccacagtccacagatgattctcccattggacttgggagcttgtcacagagctgattaatgtagttcaagatgagatcctgagtcttgttctgtgcaagttggttctgcatccatacaacagccatctcacaggcattgcacatgggaccactttggagaccattcgattccccagcttcatcatctactacgctcttaattccagcactaacaccatgcttcccatcaaaagtacacagaccaacctgagagcagatttttgatggctgtgtctcagcaagcaacagatctaggatctgttgtccatattgagaaacaactgtcttgcattcttggctgactaccccagtagcaccgatcttctcattgatttcagtgattatggctgtggggccagcaagcaatgatgttccagagtctgctatagctgaacaaccgctagcacaaaatcctgtggtctttcctccaatcaggacatcgcccatctcaaactgccaatatcccttctgagagactggaacatatgtatggttgcccttgtagtggctaggatccattcctccaaacacaatttcaccaccttctccttcatcagaatgacggttgaaccagaaggagaaaacaggctcactgacaagaccttgctctaccatcttataccacacaggtactgcatctccaacggatatttcctgaaatccaagcccaagaatgccatcaaattttgcaaccatgaaagtaagacctggctccttggtagcttcaatgaattcctgatctttcacaaccagatcacctactgtaacactatcctcgctgaaaaacccagcaattgaaccagtgccatactgaatggcagctggttttccattcttctgataagtgctcgactgtccggacttgtagcgagagtggaagaagcacgcaatcgagaagtagcacttggccgacggcacccagaggttggagctgccagtgtcgaagatgacggtgaatttctgcggcggagtgccgacgccaatctccccgaagtactgcgcgttcatgtagttcttcagcgccacgatgtcgccctcacccccgccgccgccaagggagttggcgccgcggaggcccagccggcgcgccccttcctcgccggagagtcgcgcggcgacgcggctgttctcgtcgatcgggcgcttcttcagcgcgatccgcaccaaaccctccgccgccgaagcggggaggagggcttggagcagcacggccgcgaggagcaccaaggccacgctgcgggttcccatggctgcgatcggaaaacgggaggagcagcagcagcaacagcaacaaccgacgtg

SEQ ID NO: 385282 - DNA, 917 bp, Oryza sativa
  unsure (1)..(917): unsure at all n locations
tggagctccaccgcggtngnggncgctctngaactagtggatcccccgggctgccggatctcgccgatcaccaacaaacaaaagaggaaaaaaaacatatacacttctagtgattgtctgattgatcatcaatggctagcaaggtcgtcttcttcgcggcggcgctcatggcggccatggtggccatctccggcgcgcactgagcgagtcggagatgaggttcagggacaggcagtgccagcgggaggtgcaggacagcccgctggacgcgtgccggcaggtgctcgaccggcagctcaccggccgggagaggttccagccgatgttccgccgcccgggcgcgctcggcctgcggatgcagtgctgccagcagctgcaggacgtgagccgcgagtgccgctgcgccgccatccgccggatggtgaggagctacgaggagagcatgccgatgcccctggagcaaggctggtcgtcgtcgtcgtcggagtactacggcggcgaggggtcgtcgtcggagcaggggtactacggcgaggggtcgtcggaggagggctactacggcgagcagcagcagcagccggggatgacccgcgtgaggctgaccagggcgaggcagtacgcggcgcagctgccgtcgatgtgccgggttgagccccagcagtgcagcatcttcgccgccggccagtactaggcttagctggcttgcctcatagctagtaggatcacaccgttgctgtgttgcatgcaacgagatagtgatcaaaacaaataatgaataatgaaatgttttgaaaacaaaatagctggtgataaagtactatatatgattttgtgcgttctggacaaaaaaaaaaaaaaaaaactcgagggggggcccggtacccaattcgccctatagtgagtcgtattacaattnc

SEQ ID NO: 385283 - DNA, 911 bp, Oryza sativa
  unsure (1)..(911): unsure at all n locations
cnattcggnacgaggtcgattnacnggttaccanccantgtatccacttctagtgattgtctgattgatcatcaatggctagcaaggtcgtcttcttcgcggcggcgctcatggcggccatggtggccatctccggcgcgcacgtgagcgagtcggagatgaggttcagggacaggcagtgccagcgggaggtgcaggacagcccgctggacgcgtgccggcaggtgctcgaccggcagctcaccggccgggagaggttccagccgatgttccgccgcccgggcgcgctcggcctgcggatgcagtgctgccagcagctgcaggacgtgagccgcgagtgccgctgcgccgccatccgccggatggtgaggagctacgaggagagcatgccgatgcccctggagcaaggctggtcgtcgtcgtcgtcggagtactacggcggcgaggggtcgtcgtcggagcaggggtactacggcgaggggtcgtcggaggagggctactacggcgagcagcaacagcagccggggatgacccgcgtgaggctgaccagggcgaggcagtacgcggcgcagctgccgtcgatgtgccgggttgagccccagcagtgcagcatcttcgccgccggccagtactaggctagctggcttgcctcatagctagtaggatcacaccgttgctgtgttgcatgcaacgagatccattcctccaaacacaatttcaccaccttctccttcatcagaatgacggttgaaccagaaggagaaaacaggctcactgacaagaccttgctctaccatcttataccacacaggtactgcatctccaacggatatttcctgaaatccaagcccaagaatgccatcgaattttgcaaccatgaaagtaagacctggctccttggtagcttcaat

SEQ ID NO: 385284 - DNA, 768 bp, Oryza sativa
  unsure (1)..(768): unsure at all n locations
caacaaacaaaagaggaaaaaaaacatatcgcttctagtgattgtctgattgatcatcaatggctagcaaggtcgtcttcttcgcggcggctcatggcggccatggtggcatctccggtcgcgcagtgagcgagtcgaagagttcaggacagcatgccagcggagctgcagacaccctacctccggctcaccgctagtgttgacngcagttaccgcngggagttccaccgatttcnccccccggggggttgcctgggatgcagtgtgccagcantgcagaagtgaccggagtgccgttgccccgccatccnccggatgtgaggagntacgaggagagcatgccgatgccccttggagcaaggctggtcgtngtcgtcgtcggagtactacggcggcgagggtcgtcgtcggagcagggtactacggcgaggggtcgtcggaggagggctactacggcgagcagcagcagcagccggggatgacccgcgtgaggctgaccagggcgaggcagtacgcggcgcagctgccgtcgatgtgccgggttgagccccagcagtgcagcatnttcgccgccggccagtactaggcttagctggcttgcctcatagctagtaggatcacaccgttgctgtgttgcatgcaacgagatagtgatcaaaacaaataatgaataatgaaatgttttgaaaacaaaaaaaaaaaaaaaaaaaaactcgagggggggcccggtacccaatttcgccctatagtgagtcgtattacaattnc

SEQ ID NO: 385285 - DNA, 681 bp, Oryza sativa
  unsure (1)..(681): unsure at all n locations
ttggcatggctttcgggcaatgggattgaagaggttcaggaagcatccagggaggcagaacccttgaggtgccgcagtgttgaccgcagttaccgcgggagagttccagccgattttccccgcccggggcgtcgcctgggatgcatgtgccagcagtgcaggaagtgaccgcgatgccgtgcgccgccatccgccggatggtgaggagttacgaggagagcatgccgatgcccctggagcaaggctggttgtcgtcgtcgtcggagtactacggcggcgagggttcgtcgtcggagcaggggtactacggcgaggggtcgtcggaggagggctantacggcgagcagcagcagcagccggggatgacccgcgtgaggctgaccagggcgaggcagtacgcggcgcagctgccgtcgatgtgccgggttgagccccagcagtgcagcatcttcgccgccggccagtactaggcttagctggcttgcctcatagctagtaggatcacaccgttgctgtgttgcatgcaacgagatagtgatcaaaacaaataatgaataatgaaatgttttgaaaacaaaatagctggtgataaagtactaaaaaaaaaaaaaaaaaaactcgagggggggcccggtacccaattcgccctatagtgagtcgtattacaatttcgncgtnnnn

SEQ ID NO: 385286 - DNA, 1362 bp, Oryza sativa
  unsure (1)..(1362): unsure at all n locations
gtcggacccacgcccgtccgcacccagacgcactcacacactcagcttaagcgagcgagcgagtgaacgagagagagagacagagatggcgagtgttgcctccttcccggtgatcaacatggagaacctggagaccgaggagaggggcgcagcaatggaggtcatccgcgacgcctgcgagaactggggcttcttcgagatgctgaaccatggcatcgcgcacgagctgatggacgaggtggagcgggtgagcaaggcgcactacgccaactgccgggaggagaagttcaaggagttcgcgcggcggatgctggaggccggcgagaagggcgccgacgtgaagggcatcgactgggagagcaccttcttcgtccgccaccgccccgtctccaacctcgccgacctccccgacgtcgacgaccactacaggcaggtgatgaagcaatttgcgtcggagatcgagaagctctcggagagggtgctggacctgctgtgcgagaatctgggcctggagaagggttacctgaagaaggccttcgccgggtcgaacggcccaacgttcggcaccaaggtgagcagctacccgccgtgcccgcgccccgatctcgtcgacggcctccgcgcccacaccgacgccggtggcatcatcctgctgttccaggacgaccaggtgagcggcctccagctgctcaaggacggggagtgggtggacgtgccgcccatgcgccacgccatcgtcgccaacatcggcgaccagctggaggtgatcaccaacggcaggtacaagagcgtcatgcaccgcgtcctcacgcgccccgacggcaaccgcatgtccatcgcctccttctacaaccccggcgccgacgccgtcatcttcccggcgcccgcgctcgccgccgccgacgcggcggcggccgcctacccgaggttcgtgttcgaggactacatgaacctgtacgtgcgccacaagttcgaggccaaggagccacgcttcgaggccatgaagtccgccgccgaggtcgtccacgcggcgcccatcgccaccgcttgataaggatcagacttcactagctacggctgcgcgtgccatgatccagatatatgggatgtgtacggtagtgtacgtggtgctgtacatgccgtcccgtgtttttctgcgtaatgtttttacgtactagactactactagtgtgtgtacgtaacctggggatgtaagtatcgcgtcaagtactcaagtgtgtgtaacgggcgctctaatcgtattgttctgtgcttcaatggctaccacgttagatgggccttgtgctaatgttgttttatgctnnnnnnnnnnnnnnnnnnnnnnnnnnnnnnnnnnnnnnn

SEQ ID NO: 385287 - DNA, 1640 bp, Oryza sativa
gacgttgttgttttaaaacagaatttgtgaagctttactttgaccagaaactgtgatacatagtcaataactcaatgtgtgcgttaagtcaactaataacacacatgactaccatgctacctccattttaccagcatctcgtattagtgaagatctggtgacagattacatcaagcaagagagatgaccatgtcagcaggcaatagcgcatcatcatactaggatacgtgtattccatgttcagaatccaatccaataatccgaatagtgtacaacccaaccaagtaatctcatacaacctaacgggatagtaaacccaaccaattacaccgtaactaaggtaatgtgttaacaagaacaatgcactgagcactggacgcgtcacattcacaacagcatactatagtcagatatagttgtgattaattagtgagtagagtgtgatacctggactttgagagctagaaatggcaccgacttcgacgttcccggtcatcaacatggagttgctcgccggggaggagcgacctgcggcgatggagcagctggatgatgcttgcgagaactggggattcttcgagatcctgaaccacggcatctcgacggagctgatggacgaggtggagaagatgaccaaggaccactacaagcgtgtgcgcgagcagaggttcctcgagttcgcgagcaagacgctcaaggaaggctgcgacgacgtgaataaggcggagaagctggactgggagagcaccttcttcgtccgccacctcccggagtccaacatcgccgacatacccgacctcgacgacgactacaggcgcctcatgaagcgcttcgcggcggagctggagacgctggcggagcggctactggacctgctctgcgagaacctcggcctcgagaagggctacctcaccaaggccttccgtggccccgcgggcgcacccaccttcggcaccaaggtcagcagctacccgccgtgcccgcgccccgacctcgtcaagggcctccgcgcccacaccgaccgcggcggcatcatcctgctcttccaggacgacagcgtcggtggcctccagctgctcaaggacggcgagtgggtggacgtgccgcccatgcgccactccatcgtcgtcaacctcggcgaccagctggaggtgatcaccaacggcaggtacaagagcgtgatgcaccgggtggtggcgcagaccgacggaaacaggatgtccatcgcgtccttctacaaccctggcagcgacggcgtcatctcccctgcgccggcgctggtgaaggaggaggaggccgtcgtggcgtaccccaagttcgtgttcgaggactacatgaagctgtacgtgcgccacaagttcgaggccaaggagcccaggttcgaggcgttcaagtccatggaaaccgagacctccaaccgcatcgccatcgcttagcaaccccggcctcgctcgctctgttctgtgtactgtgtgtgtgcatgaactgtggtttcgtcgtcgttttgtgatactcctacataggattcgtcagagtggttcgtactgtactgaataaaagagcatgcagctagccaggtgtagccgtgtaggtatgaatagattactactcgcgacgagctcgaaagtttgtaccgtgtc

SEQ ID NO: 385288 - DNA, 1300 bp, Oryza sativa
tagattcttaatacacaacccagctggtgaaagagaggaacttgagagttagctagcatggcggcagattgtcgttcccgatcatcgacatgagtctgctcgacggggcagagaggcccgcggcgatggggctgctccgcgacgcatgcgagagctggggcttctttgagatcctgaaccacggcatctcgacggagctgatggacgaggtggagaagatgaccaaggaccactacaagcgtgtgcgcgagcagaggttcctcgagttcgcgagcaagacgctcaaggaaggctgcgacgacgtgaataaggcggagaagctggactgggagagcaccttcttcgtccgccacctcccggagtccaacatcgccgacatacccgacctcgacgacgactacaggcgcctcatgaagcgcttcgcggcggagctggagacgctggcggagcggctactggacctgctctgcgagaacctcggcctcgagaagggctacctcaccaaggccttccgtggccccgcgggcgcacccaccttcggcaccaaggtcagcagctacccgccgtgcccgcgccccgacctcgtcaagggcctccgcgcccacaccgaccgcggcggcatcatcctgctcttccaggacgaccgcgtcggtggcctccagctgctcaaggacggcgagtgggtggacgtgccgcccatgcgccactccatcgtcgtcaacctcggcgaccagctggaggtgatcaccaacggcaggtacaagagcgtgatgcaccgggtggtggcgcagatcgacggcaacaggatgtccatcgcgtccttctacaaccctggcagcgacgccgtcatctcccctgcgccggcgctggtgaaggaggaggaggccggcgagacgtatcccaagttcgtgttcgaggactacatgaagctgtacgtgcgccacaagttcgaggccaaggagccccggttcgaggcgttcaaggccatggagaacgagacccccaaccgcattgccatcgcttgatagcgtgtgtaccacagcgacccctaccgggtcggtgtcagtaaggtttagtcgtgttcgtagtgatcagtgcgtgcatggtcagctactcagctcgcgttttctacctgaataaattaagctccgtcgtcgtcgtctcgtcaccttggataattgtcagttggtgtggcgtgctgttgcacgtacggccatgtatctttgtcggctgtcctcgtgtggtacttgatagcttgtgcggcgtgctgtaccgtgtacggtttattatctactccagt

SEQ ID NO: 385289 - DNA, 348 bp, Oryza sativa
  unsure (1)..(348): unsure at all n locations
tttttttttagcgcatcatcatactaggatacgtgtattccatgttcagaatccaatccaataatccgaatagtgtacaacccaaccaagtaatctcatacaacctaacgggatagtaaaccccaaccaattacaccgtaactaaggtaatgtgttaacaagaacaatgcactccacgatcacatgctccaccttgaatccaacaagctcaaggaccggttcatccttgttcagcaagctccttttagctgtaagtgcccatgccaatgttggagccaccgtacggggcacccccagcagcatcgcgggacttggagtagctaacgtntagaattcgcttgaggatgg

SEQ ID NO: 385290 - DNA, 1189 bp, Oryza sativa
ccacgcgcgcgctcccaccttctcccttctcctcgctcctccccctccgccgccgccgcagcggagcagcaacagcaggcgagcgacatgggagggtttgtcaagacccagaagacccatgcctacttcaagcgtttccaagtcaagttcaagagacggaggcagggcaagactgactacagggccaggattaggctcaccaaccaagataagaacaagtacaacacaccgaagtaccgcttcgttgtgagatttacaaacaaagatatcacagctcaaattgtctatgctaccattgcgggtgatatcgtgatggctgctgcctactcccatgagctgcctcgttatggtcttgaagttggtctcaccaactatgcggcagcttactgcactggcttgcttctggctcgccgtgtgctcacgctccgtggtttggaccaggagtacgagggcaatgttgaggccactggggaggactactatgttgaaccagctgatgaaaggaggcctttccgtgctctcttggatgttggcctcattaggacaaccactggaaaccgtgtctttggtgccctcaagggagctttggatggtggtcttgacattcctcacagtgacaagaggtttgctgggttcaagaaggacgagaagcagcttgattctgatattcaccgcaagtacatctacggtgggcacgtggctgactacatgaggtctatggctgaggaggaacctgagaaattccaagcccactttagtgagtacctcaagaagggaattgacgctgatggcatggaatcactgtacaagaaggtccatgctgccatccgcgccgatcctaccatggccaaatcgaccaagaaggaaccggctacccacaagagatacaacctcaagaagctgacctacgagcagaggaaggccagtctcgtcgaaagattgaatgctctcaactcctccgctggtgctgatgatgatgacgaggaagaggatgacgagtgagagagtagccttatcacagtagtttcatcttatgctgccaaacaaactccatatggcatttaagtttacctgtagtcttgcaatttgcaacaggcatttttgtttatgttctgcactctgctcaaagaacctatttctttcggtttttggttctcaacctggagtgtgagaagctgccgtttggata

SEQ ID NO: 385291 - DNA, 817 bp, Oryza sativa
  unsure (1)..(817): unsure at all n locations
ttacgaggcaatattgagcccactggggaggactnnctatgttgaaccagctgatgaaagcggcttttccgtgctctcttggatgttggcctcattaggacaaccactggaaacccgtgtctttggtgcccctcaagggagctttggatggtggtcttgacattcctcacagtgacaagaggtttgctgggttcaagaaggacgagaagcagcttgattctgatattcaccgcaagtacatctacggtgggcacgtggctgactacatgaggtctatggctgaggaggaacctgagaaattccaagcccactttagtgagtacctcaagaagggaattgacgctgatggcatggaatcactgtacaagaaggtccatgctgccatccgcgctgatcctaccatggccaaatcgaccaagaaggaaccggctacccacaagagatacaacctcaagaagctaacctacgagcagaggaaggccagtctcgtcgaaagattgaatgctctcaactcctccgctggtgctgatgatgatgacgaggaagaggatgacgagtgagagagtagccttatcacagtagtttcatcttatgctgccaaacaaactccatatggcatttaagtttacctgtagtcttgcaatttgcaacaggcatttttgtttatgttctgcactctgctcaaagaacctatttctttcggtttttgattctcaaccttgagctatcggttatcttatttatgtgagaagctgccgtttggatattgatataattgtgttctgcctgcctaaaaaaaaaaaaaaaannnnnnnnn

SEQ ID NO: 385292 - DNA, 579 bp, Oryza sativa
  unsure (1)..(579): unsure at all n locations
ctcccacctctcccctctcctcgctcctccacgcgccgccgccgccgcagcggagcagccacagcaggcgagcgacatgggagggtttgtcaagacccagaagaccaatgcctaccacaagcgtttccaagtcaagttcaagagacggaggcagggcaagactgactacagggccaggattaggctcaccaaccaagataagaacaagtacaacacaccgaagtaccgcttcgttgtgagatttacaaacaaagatatcacagctcaaattgtctatgctaccattgcctggtgatatcgtgaatggctgctgcctactcccatgacgctgcctcgctatgggcttgcaagttggtctcaaccaactcatgcggcaggttttatttgcaccttggcttgcttttttggctcgccgtggtgcctcaaggctccgtggttttgaccaggngtacgagggcaatattnaggccatggggaggnctactattttgaccagcttgtgaaaggggctttccgggtcttttgatgtngctatagggaacatggaccgttntttggcccaaggggtttgatgnggnt

SEQ ID NO: 385293 - DNA, 1539 bp, Oryza sativa
  unsure (1)..(1539): unsure at all n locations
cacaccttcacacctcaccaccatcacctcctcctcctcctcctcttcctccgcgcgcgcgagatccagggagagggagagggagagatcatggcggggacggtgacggtgccgtcggcgtcggtgccgtcgacgccgctgctcaaggacgagctggacatcgtgatcccgacgatccgcaacctggacttcctggagatgtggcggcccttcttccagccctaccacctcatcatcgtgcaggacggcgacccgaccaagaccatccgcgtccccgagggcttcgactacgagctctacaaccgcaacgacatcaaccggatcctcggccccaaggcctcctgcatctccttcaaggactccgcatgccgctgcttcggctacatggtctccaagaagaagtacgtcttcaccatcgacgacgactgcttcgttgccaaggacccatctggcaaggacatcaatgctcttgagcagcacatcaagaacctcctcagcccgtccaccccgttcttcttcaacaccttgtatgatccctaccgcgaaggcgctgactttgtccgtggttaccccttcagcctcagggagggagccaagactgctgtctctcacggcctgtggcttaacatccctgactatgatgctcctactcagatggtcaagcctcgtgagaggaactccaggtatgttgatgctgtcatgactgtgcccaagggaaccttgttccccatgtgtggcatgaaccttgcttttgaccgtgatctcatcggtcctgcaatgtactttggtctcatgggtgatggccagcctattggtcgctacgacgacatgtgggctggatggtgcatgaaggtcatctgtgaccacctgagcctgggagtgaagactggactgccgtacatctggcacagcaaggctagcaaccccttcgtgaacttgaagaaggaatacaagggcatcttctggcaggaggacatcatccccttcttccagaacgccaccatccccaaggagtgcgacaccgtccagaagtgctacctctccctcgccgagcaggtcagggagaagctcggcaagatcgacccctacttcgtcaagcttgccgatgccatggtcacctggatcgaggcctgggatgagctgaacccctcgactgctgctgtcgagaacggcaaggccaagtagattgatcctgggagcttgtgtgtcgcaggatggaaagtaccctttaagtgaaagtgttgctgtggcctaggccccctagatatagctctttttgagatgaagggagagattacttaagcaactttataattctttgttgttatgctggttcttttgtagctggaaaaggatttgttatcatcgtttacataattcaagacaataataattttatcatgtaattttgatagtcgtgctttggttgctaaatggtgttattgtatttaataacctttgcaaatcactatacctgttggttgttctgagaattgtatgcactaccaaaaaaaaaaaaaaaaaaannnnnnnnnnnnn

SEQ ID NO: 385294 - DNA, 5229 bp, Oryza sativa
  unsure (1)..(5229): unsure at all n locations
gagaagcccgcgcagaaggctgcagatttgaatgaaatcttatcagaacgtggtgcttgtggtgttggatttgtcgcaaacttgaaaaatgagccttcattcaatattgtccgggatgcccttgtggctcttggctgcatggagcaccgtggtgggtgtggagcggacaatgactccggtgacggttcaggactgatgagtggtatcccatgggacttgttcaatgactgggccaacaagcaagggcttgctcccctggacagaacaaatacaggtgtcggaatggtctttcttccacaagacgagaattctatggaagaagccaaagctgttgttgccaaggtattcactgacgaaggccttgaggttcttggctggagaactgttccttttaatgtatcagtggtaggtcgctatgcaaaagaaaccatgcctaatatacaacagatatttgtgaaagttgcaaaagaagataatgctgatgacatagagagagagttgtacatctgccggaagctgatagagcgggccacaaaatctgctagttgggcagatgaactttatttctgttctttgtcaagcagaactatagtctacaaggggatgcttcgatctgagattcttgggcaattctatttggaccttcagaatgaactctacaaatcaccttttgccatataccatcgaagatacagtaccaatacaagccctagatggcctcttgctcaacctatgaggttacttggacacaatggagagattaatacaatacaggggaacttgaactggatgcgatcaagggaagccacactacaatctcctgtatggcgtgggcgtgagcatgaaatacgtccatttggtgatcctaaagcatctgattcagcaaaccttgacagtactgctgaattactgctaagaagtggcagaagtcctgctgaagctatgatgattctcgttcctgaggcatacaagaaccatcctacattgtcaataaaatatcctgaggtaatcgacttctatgactactataaaggtcaaatggaggcttgggatgggcctgctttgctcttatttagtgatggaaggacagtaggagcatgtcttgatcggcacgggctccgcccagcacgctattggagaacatctgatgattttgtttatgttgcatctgaggttggtgttataccaatggatgagtcaaaggtagtaatgaaaggaagattgggtcctggaatgatgataacggttgacctacaaactggccaggtgcttgaaaacacagaagtgaagaaaagtgtggcttcagcgaacccctatggatcctggttgcagcaaagtacacgttcaataaagcctgtcaacttccagtcatctgttgctatggacaatgaaacggtcttgagacaccagcaggcctttggatattcgagtgaagatgttcaaatggtaattgaaacaatggcttcacaaggcaaggaaccaacattttgtatgggtgacgacattccattagctgtgttgtcacaaaagccacacatgttatttgattatttcaaacagcgatttgcacaagttacaaatcctgctattgatcccctcagagaaggtttggttatgtctcttgaagtcaatattggtaaacggcgcaatatcttggaagttggccctgaaaatgctgatcaggttaccctatcaagtcctgtgcttaatgaaggtgaactagaatcacttttgaatgactcaaaactgaagcctaaagtactctcgacatacttcgacatccgtaaaggtctagatggttcccttgataaggctattaaggttctttgtgatgaagctgatgctgctgtgcggaatggttctcaacttcttgtgctttctgatcgttctgaagcactcgaaccaactcgccctgccatcccgatacttctagctgttggtgccatccaccagcatttgattcaaaatggtcttcggatgtctgcttccattgttgctgatactgctcagtgttttagcacccatcagtttgcttgcttgatcggatatggtgccagtgctatatgtccgtatctggcactagaaacatgccggcaatggaggctgagcaacaaaactgttaatttgatgcgaaacgggaagatgcccacggtgaccattgagcaggcccaaagaaactttatcaaggcagtaaaatctggcctactcaagattctttcaaaaatgggaatatcattgctctcaagttattgtggagcccagatcttcgaaatttatggccttggtcaagaggttgttgatctcgccttctgtggaagtgtatcgaaaattggaggtctcacccttgatgagctgggtagagaaacattatcattctgggtgaaggcgttctcagaagatactgcgaagaggctagagaactttggattcattcaatccagacctggaggtgaatatcatgcaaataatcctgagatgtcaaagctgctgcacaaagcagttcgtgaaaaaagtgacaatgcatacaccgtctaccaacaacatcttgcaagccgtcctgtcaatgttcttcgagatcttctagagttgaagagtgatcgtgcccctattcctatcggtaaagttgagcctgcaacctccatcgttgagcgattttgtacaggtggaatgtcccttggagctatttccagagaaacacatgaagctattgcaattgcaatgaatagaataggtgggaaatctaactccggagaaggtggtgaggacccaatccgctggagtccccttgcagatgtagaggatgggtattctccaacacttcctcatctcaagggtctacagaatggagacactgccacaagtgccattaagcaggttgcatctggacgctttggggttacaccaacatttttagtaaatgctgaacaaattgagataaagattgcacaaggggcaaagcctggtgaagggggccaacttccagggaaaaaagtcagtgcatacattgctcggctgagaaactccaaacctggagttcctctcatatccccaccaccccaccatgacatctattcaatcgaggatctagcacagttaatttatgatcttcatcagatcaatccaaaagcgaaggtatctgtaaagcttgtagctgaagcaggaattggaactgtagcttctggagtatccaaaggaaacgcagacataattcagatatcaggtcatgatggtggcactggagctagcccaattagttcaatcaagcatgctgggggtccttgggaacttggtctttcagaaacgcaccagacacttatacaaaatggattgagagagagggtagtacttagggtggatggtggattcagaagtggcctagatgtccttatggctgctgccatgggcgcggatgaatatggttttggttctgtggctatgatagctactggatgtgtcatggcacgcatttgccacacaaacaattgcccagttggagttgctagtcagagagaagaacttcgtgctaggtttcctggtgttcctggtgatcttgtaaactacttcctctttgttgcagaagaggtacgagcgacattggcccaattgggttttgaaaagctcgatgatataattgggcgaacagatatacttaaagcaaagcatgtctctttggcgaaaacacagcacattgacctcaaatacctcttatcgagtgctggattacccaaatggagtagctctcagataaggagtcaagatgtccacagtaatggccctgttcttgacgagacaatccttgccgatcctgatatatccgatgcgattgagaatgagaaggaggtttccaagacatttcaaatttacaatgttgacagggctgtctgtggtcgagtagcaggtgtcattgccaagaagtatggtgacacaggatttgcaggccagctcaacattacgtttactggaagcgcagggcagtcctttggatgtttcctaactcctggaatgaatattcggctagttggagaggccaacgattatgtgggaaagggtatggctggtggagagctggttgtagttcctgtagaaaaaacaggatttgttcctgaggatgctgctatagttggtaacacttgtctgtatggagctactggtggtcaggtatttgtgagaggcaaaacaggtgaaagatttgcagttagaaactcccttggtcaagcagtggttgagggcactggagatcattgctgcgagtacatgactggtggctgtgtagttgtacttggcaaagttgggaggaatgttgcagctggaatgacgggtggccttgcctatattctagatgaggatgatacactcgtcccaaaggttaacaaggagattgtgaagatgcagagagtgaatgctccagccgggcagatgcagctgaagggcttgattgaggcttacgttgaaaaaacaggcagcgagaaaggtgccacgattttgagagaatgggaggcatatctgccactcttctggcaactggtaccaccaagtgaagaagactctcctgaagcttgtgccgagtttgaacgagtacttgccaagcaagcaacaacagtacaatcggcgaagtgatctactgcaattcccaagtgatcagattagacaacaggaaggtgttctttggtactttccaggtgattttttcctgggaccgcatcaaggaaaacaaaataacaactggcatacttgtgaagcaccgaagtgcccccaaagactgcgattttgtggaagctctgcccaaggcatcttttgaaacgaagtttcacatgatcgtggaggattcttctttgcgcccttgcacttgcacgccctagttaaccacccccctgtaaattggtttgctgacgctaggttgctatttgcagaggcagtgaagacacacttctaaacttctccattcctgtacaggattcgtgtcctatgtaatcgtatttttggttctggacacattagttcttacatttatacccgtccagtgggggcatgcgagtcgcatgtgcatacagctatagtgaataaagtgtactgtcaagtagttttctcaggttgttgccagtggaccgtggtgttatcgttatggattataattcaaggtgtcaaatacttcaattattatnnnnnnnnnnnnnnnnnnnnnnnnnnnnnnnnnnnnnnnnnnnnnnnnnnnnnnnnnnnnnnnnnnnn

SEQ ID NO: 385295 - DNA, 1744 bp, Oryza sativa
  unsure (1)..(1744): unsure at all n locations
gtcgccgatccgtttcctcctcgattgccggcaagcggaagagggagagcggaaggngngaggaggaggatcgaggcagcgggcgcaacgtggcgcgcgctttgcttgcaacggaagcgtggggattataaaagagggggcgcgagatccagatctggcgccgatgcgcccccctccctgctctccctcaccctcgactccgcgctcctccgcatcgcccacctccacgacctctcccgcctccccgaccacctcctcatcgacctcttccgtagaactatagctgccggtaagctgacagaaaaagtcctgaagttgtttctggcaacggattgcgaggaaatcgccttgcttgttcagttgctcaacattaagcagccgcttgtaccggtccttcccacgaggtgctctgagaagttctagaagtgacactgattaggtcagtcttggggcacggagaaaagatgtctttggaaattcaggacagtgaggtcgacattgtgattgcagcactccagcccaacctgactactttctttgaggcatggaggccatttttctctcggttccacatcattgttgtcaaagatccagatatggctgaggagcttcaaatccctacaggttttgatctcaaggtttatacgaagtcagatatgggagtgcttggagccacatccatcgacttctctggtcactcatgccgttactttgggtaccttgtctcacgcaagaagtatgtcatctcaattgatgacaattgcctcccagcgaaggacaatggtgggttgactgttgatgcagttgcacagcatatgtccaatctgaagacacctgctacacctttctttttcaacacattgtatgatccattccgcaaaggggctgactttgtccgtggatacccatttagtctgcgcgagggggttgagtgcatgctctcttgtgggctgtggcttcacaatgcagactatgacccaatgactcatgttgtgaagagaaatcaacgcaacacaacgtatgtggatgctgtgatgacagttccacttggtgcgatgatgcctgtgagcgggataaatgttgcattcaaccgtgaggtgctgggacctgtaatgttccctgctctgcggctgcgcaaggaaggaaagcacagatgggatacacttgaagacgtttggaatggcttgtgtgctaaagtggtgtgtgatcgcttacggtatggcgtgaagacaggtcttccttatgtgatgagaagtgatgcagaagcaggtaaggctctcgagagcttgaaagaatgggaaggggtgaaagtcatggacgtcgttcttcccttcttcgaatctctgaagctatcgagtacttcagttactgttgaagactgtgttaaggaactaaccagcattgtcaaggagaaactgggaccgcagaatgcaatcttcgctaaagctgctgatgcaatggaggaatggaccaaactctggaaatctcacggagctcaaagcgcttaggctgaaatttggttatctgttatgagcatatctgatttcgatacccactgttatgaaactgaataaaccgcattcctgtatgctgggaattttctcgttagtgtacgctccaatactcgtgccgttttcaaagacaagcagtgatatgcaaaaaaaaaaaaaaaaaactcgagggggggcccggngttttttttaatggtgatttcgttcatngttttcagaaaaaaaaaaaaaaa

SEQ ID NO: 385296 - DNA, 804 bp, Oryza sativa
aattcaccatcccatccaatcttgacgacgatgccgccgagatcgccgcttctcgccctcgtcttcctcgccgccggcgtcctatcctcggccacctctccgcctccgccgccgtgcagccgctcgtgcgccgccctcaactgcgactccgtagggatccggtatggcaagtactgcggcgttggctggagcggctgcgatggagaggagccctgcgatgacctcgacgcctgctgccgcgaccacgaccactgcgtcgacaagaaaggtctgatgagtgtgaaatgccatgagaaattcaaaaactgcatgaggaaggtaaaaaaggctggcaagattggcttctctaggaaatgcccgtacgagatggctatggcaacaatgacctcagggatggacatggccatcatgctcagtcagttgggcacccagaagttggaactgtagctttaatttggcttctccttacggaggtactccatttcttagatgatggttaaccgtatttgattgcaccaaagtttgattttttttttacaggaatgtattgatttgggcagcctaaaaagatttcttttccccttgctgcacaatttgcagcatatagtattttttttgtacaagagatttggcatgtaaactgaaccaaatgttccggctcactgggtatgggtaaaaagggttttcctttcctttatgctgtaacattatccatttactttgctttgatacgttggatcagtaggggtctggatctctttaacataataatgtaacactcctgagtctctgagcatgttatgg

SEQ ID NO: 385297 - DNA, 877 bp, Oryza sativa
cacctctccacccgtttctttctcggcccatccaacacgcgctcttgcttgaacgcgcaaagagaaacacgacgggcgaggcgagcgagatgaggttcttcctcaagctcgctcctcggtgttccgtgctgcttctcctcttgctggtgacggcgtcgcgggggcttaacatcggcgacctgcttggcagcacgccggcgaaggaccagggatgtagccggacgtgcgaatcccagttttgcacaattgcacctctgctgaggtacggcaagtactgcgggatcctctacagcgggtgccccggcgagaggccatgcgacgcgctcgacgcctgctgcatggtgcacgaccactgcgtcgacacccacaacgacgactacctgaacacgatgtgcaacgagaacctgctgagctgcatcgaccgggtgagcggggcgacgttcccggggaacaagtgcaacgtcggccagacggcgtccgtcatcaggggggtcatcgagacggccgtgttcgccggcaagatcctccacaagcgcgacgacggccaatagctagccaccacgtttcgcacatacacacgctgtacagtgaatcagtgatagtacaaagaagcctagaggtaataaaaccgcgcggcggcgtccaccggtggccgtggcgtggcggtgcggcaaccagaacgcggcatgcgcgcgcttgctggcagctggaccacctgtggtttgtaggcgtaggcattggacctcggttgttggtgcggcaatggcgttggccactggcgacggggaggagtaacattatgctctgttagtcaataagacggaacatgttacaaaaaaaaaaaagaaattattaaatggaacatggttggttattg

SEQ ID NO: 385298 - DNA, 939 bp, Oryza sativa
tcgacccacgcgtccgccctcgcgtctttctcttctacggaaaaaattttctcctcctctttctcttctctctgtgtcactgcgtgtgaggagcgtagcttagagtgagaaaataatggcgttggagacgtgcttcagagcctgggcgactctgcacgccccacagccaccgtcctccggcggcagtagggacagactcctcctctccggcgccggcagcagccagtccaagccaaggttgtccgtcgcctcgccgtcaccgctccgacctgcctcccgcttcgcctgccagtgcagcaacgtcgtcgacgaagtggtggtggcggacgagaagaactgggacagcatggtgctggggagcgaggcgccggtgctggtggagttctgggcaccgtggtgcggaccgtgcaggatgatcgcgccggtgatcgacgagctggccaaggagtacgtcggcaagatcaagtgctgcaaggtgaacacggacgactcaccaaacatcgccaccaactacggcatccggagcatccccaccgtcctcatgttcaagaacggcgagaagaaggagagcgtcatcggcgccgtccccaagaccaccctcgccaccatcatcgacaagtacgtcagcagctgattgcatcatcatcgtcgtcttcttcctcttcttcttcagctgcatcaatcaaatcagacttgatcgatcagagcttcgtttgtaagttgtaactaagctaccccctgctttgcctctctatgtgtatcgccagccacccctttctcttcatcgtccttaattgttgtaatcctactactccatggaatcaatactgtaactattattgattgatgataccatcttttgactagcaaagaggaatcaaactgtgctacatatacatatatgatggccacatctggttgaaccttgattgtatatgc

SEQ ID NO: 385299 - DNA, 533 bp, Oryza sativa
attcgacacgagctcgtagccgaattcggcatgagcggggttggtcccgtgctgaaaggtgaacactggacgactcaccaaacatcgccaccaactacggcatccggagcatccccaccgtcctcatgttcaagaacggcgagaagaaggagagcgtcatcggcgccgtccccaagaccaccctcgccaccatcatcgacaagtacgtcagcagctgattgcatcatcatcgtcgtcttcttcctcttcttcttcagctgcatcaatcaaatcagacttgatcgatcagagcttcgtttgtaagttgtaactaagctaccccctgctttgcctctctatgtgtatcgccagccacccctttctcttcatcgtccttaattgttgtaatcctactactccatggaatcaatactgtaactattattggttgctgaacacaaacctaacaactaaatctaatataacgaaattaaaaatgaaactaaacgtatgactaaaatcacattatatactaaaaaaactaaaaggggcgg

SEQ ID NO: 385300 - DNA, 417 bp, Oryza sativa
ctagaaaagccaaagaaggagtactctagtacagcgagaagaaggagagggttttgagagcagtcccaaagaccaccctcgccaccatcatcgacaagtacgtcagcagctgattgcatcataatagtagtcttcttcctcttctgcgccacgcgccccaatcaaatcagacttgatcgatcagagcttcgtttagtaagttgtaactaagctaccccctgctgtgcctctctatgtgtatcgccagccacccctttctcttcatcgcccttaattgttgtaatcctactactccatggaatcaatcctgtaactattattgattcatcactaccatcttttgactggcgaagaggcctctgacacgatcgacaacgtggaggccaagatccaagacaaggacggtatccccccggg

SEQ ID NO: 385301 - DNA, 1818 bp, Oryza sativa
gcatttgctgcctctccacccacccctcgatctctcgctcgctcgccgccgatcggatcgcgtggttggatcatcacaactctgcaaagatgagagagatcctgcacatccaaggcgggcaatgtggcaaccagatcggtgccaaattctgggaggtggtgtgtgatgagcatggcattgaccctaccgggcggtacacaggcaactcagatctgcagttggagcgtgtcaatgtgtactacaatgaggcctcctgcggtcgctttgtgcctcgtgctgttctcatggaccttgagcctggtactatggacagtgtccgcactggaccctatggccagatcttccgccctgacaactttgtgttcgggcaatctggtgctggtaacaactgggccaagggacactacactgagggtgccgagctaattgattctgttttagatgttgtgaggaaggaggctgagaactgtgactgcctgcaaggattccaagtatgccactctcttggtggtggtactggatctggtatgggtacacttttgatatcaaagatcagggaggagtaccctgaccgcatgatgctgacattctcagttttcccctcaccaaaggtatctgatactgtggttgagccatacaatgctacactctcagtccatcagttggttgagaatgctgatgagtgtatggttcttgataatgaggctctctacgacatttgcttcaggactctcaagctgaccacacctagctttggggatttgaaccatttgatttctgccaccatgagtggagtcacatgctgcctaaggttccctggtcagttgaactctgacctccgtaagctggcagtgaaccttatcccctttccccgtctccacttcttcatggtcggattcgccccgctgacatcacgtggctcccagcagtaccgtgcccttactgttcctgagctcacacagcagatgtgggatgccaagaacatgatgtgcgctgctgatcctcgccatggccgttacctcaccgcctctgccatgttccgtggaaagatgagcaccaaggaggttgatgagcagatgatcaatgtccagaacaagaactcatcctacttcgtcgagtggatccccaacaatgtgaagtccagtgtctgtgacattccaccgagaggcctctccatggcatcgaccttcattggcaactcaacatccatccaggagatgttccggagggtgagcgagcagttcactgctatgttcaggaggaaggctttcttgcactggtacactggcgaaggcatggacgagatggagttcaccgaggcagagagcaacatgaacgaccttgtctctgagtaccagcagtaccaggatgccaccgccgatgaggagggcgagtacgaggacgaggagcagcaggaggctgacgacatgtaaggtggcttttgcttggtggttctagggcagggttttgtgtgcttggtgtttccgtcttacattatcaccgtattaccgcctcgtacgccaccgcccgcttcctatgtcttcgctttgttttttcgtctgtgctatgggaacctttttgggtactgtattacttgatgctggtctgcgattgttgatatttcggatgaattttacctttccgcgttggtcctcgtgtgtaatatttgcaaattacggaactaggaaggtagcccgcgcattcgcgtgggcatgtatcgtaggctgtatttgagataatcgtaagtaataggctgattgtgttaaaatgttgcatttgttatatagtaaactataggcatatggatcttaaaaaaaa

SEQ ID NO: 385302 - DNA, 1853 bp, Oryza sativa
gcggccgcggatccgcaaccccgtctcctccgcttcgctactctcctcgtcgtctccggctccggctccggtttccggcgagcggcggcgcgatcccgggcggcgaaggagggggaagccatgagggagatcctccacatccagggcgggcagtgcgggaaccagatcggggccaagttctgggaggtgatctgcgacgagcatggcgtggacgcgacggggcggtacgcgggggactccgacctgcagctggagcggatcaacgtctactacaacgaggcgagcggcgggaggtacgtgccccgcgccgtgctcatggacctcgagcccgggaccatggactccgtgcgctccggccccttcggccagatcttccgccccgacaacttcgtcttcgggcagtccggcgccggaaacaactgggccaaggggcactacaccgagggcgccgagctcatcgactccgtcctcgacgtcgtccgcaaggaggccgagaactgcgactgcttacaaggattccaagtttgccattcattgggaggaggcactggatctggcatgggaacccttcttatttctaagattagggaggagtacccggatagaatgatgttgacattttccgtcttcccatcaccaaaggtctcggatactgttgtggagccttacaatgctaccctttctgttcaccaacttgttgagaatgctgatgaatgtatggtgcttgacaatgaagctctctacgacatatgcttccgcacactaaagcttgctacccctacctttggtgacctcaatcatcttatctctgcaaccatgagtggtgttacatgctgcttgaggttccctggtcagctcaactctgatctgcgcaaacttgctgtgaatctcatccctttcccccgtctccacttcttcatggttggctttgcgccattgacttcacgcggatcacagcagtaccgtgctctcaccgttcctgagctgacacagcaaatgtgggatgcgaagaacatgatgtgcgctgctgatccccgccatggccgctacctcacagcttctgccatgttccgtgggaagatgagcaccaaggaggtggacgagcagatgctcaatgttcagaacaagaactcctcatactttgtcgagtggattcccaacaacgtcaaatccagtgtctgtgacattccgcccagggggctgaagatggcggcgaccttcgtcgggaactccacctccatccaagagatgttccgccgggtcagcgagcagttcactgccatgttcaggaggaaggctttcttgcactggtacacaggcgagggaatggacgagatggagttcaccgaggcagagagcaacatgaacgatctcgtcgcggagtaccagcagtaccaggacgccacagccgatgaagagtacgaagacgaagaggaagaagctgaggccgaatagcattgagccccatttgcccttcacaggttgttttgccagtgaagagttttgtgtctttgtgatgctgtgctcttttttctttctctgacgtgcgtgatggatgtatgggtgaggtttgcgtccgtgcttcgttttgtcacctgtgctgcgtagcaggctgcagtcccgttttgtaagacgtctctggtggtcagtagctgaaggcttgaaaagtgttttgagtgccctccttgagctaaatcacctgtaagttctgacatgtattggtagtggttttctcatctctgtgaagcttctgtgtagtctgttactatatccagtttctctgtatatcgatcgtagtgtcatcttgcttggctgaaacgttttaaagatcactctggagtacgctgttaacc

SEQ ID NO: 385303 - DNA, 1707 bp, Oryza sativa
aaatcctcctccctccctcccctaaacctcgccggaatccaacccctccgccgccgccatgagggagatcctgcacatccagggggggcaatgcgggaaccagatcggggccaagttctgggaggtgatctgcgacgagcacgggatcgaccacaccggcaagtactcgggcgactccgacctccagctcgagcggatcaacgtctactacaacgaggccagcggcggcaggttcgttccgcgcgccgtgctcatggacctcgagccgggcaccatggactcggtgcgctccggtcccttcggccagatcttccgccccgacaacttcgtcttcggccagtccggcgccggcaacaactgggccaaggggcactacaccgagggcgccgagctcatcgactccgtcctcgacgtcgtccgcaaggaggccgagaactgcgactgcctccaaggatttcaagtctgccactctctaggaggaggaactggttctggtatgggtaccctgctcatctcaaagatcagggaggagtacccggacaggatgatgttgacattctcagttttcccctcaccaaaggtttctgataccgtggtggaaccttacaatgccacactatctgtccatcagcttgttgagaatgccgatgagtgcatggtacttgacaatgaagctctatatgacatctgcttccgcactctgaagctcgccacacccacttttggtgatctgaaccatcttatttctgcaaccatgagtggtgttacatgctgcctgcgcttcccgggacagctgaactctgacctccgcaagctggcggttaacttgatccccttccctcgtctccatttcttcatggtcggctttgcaccgctgacctcgaggggatcccagcagtaccgcgccctcactgtcccggagctgacccagcagatgtgggacgccaagaacatgatgtgcgccgccgaccccaggcacggacgctacctcacggcgtcagccatgttccgcgggaagatgagcaccaaggaggtggacgagcagatgctcaacgtccagaacaagaactcgtcctacttcgtggagtggatcccgaacaacgtgaagtcgagcgtgtgcgacatccctcccaacggcctgaagatggcgtccaccttcatcggcaactcgacgtcgatccaggagatgttccgccgcgtgagcgagcagttcacggccatgttcaggaggaaggccttcttgcactggtacaccggggaggggatggacgagatggagttcaccgaggccgagagcaacatgaacgacctggtggccgagtaccagcagtaccaggacgcgacagccgacgacgaggaagaggactacggcgacgaggaggaagacgaggttgctgcctaagccacctacctgcctgccattcctctcgctctcgtcatccatcgtagatgatgattgaggatgtgctcccttgtgttattattacctagtactgtattgcaactgtcgatctgggtcgtaagatgtttattttaggtgatttgatgctctagttactcttttttttccttgtgttgattaatggtgtgttgtcgatgcgaattgtgatactagctttaactgtggacttaaattactagatcctggaattgatactgtttgccagtaaaaaaaaaaaaaaattgcggccgcttttttccactacg

SEQ ID NO: 385304 - DNA, 1821 bp, Oryza sativa
  unsure (1)..(1821): unsure at all n locations
ggccgcccgcctgaccggcccgaattcccggctccggacccacgcgacgcgttctcttcaacctctcccaaaattagccccgatccgatcgcttcctagccctgattcgaggtaaaaaaggggaggagaagatgagggagatcttgcacatccagggcgggcagtgcgggaaccagatcgggtccaagttctgggaggtggtgtgcgacgagcatggcatcgacccgacggggaggtacgccggcacgtcggacctgcagctggagcgcgtgaacgtctactacaacgaggcgtcgtgcggccggttcgtgccgcgcgccgtgctcatggacctggagccgggcaccatggactccgtccgcacggggccctacggccagatcttccgtcccgacaacttcgtcttcggccagtccggcgccggcaacaactgggccaagggccactacaccgagggcgccgagctcatcgactccgtcctcgacgtcgtccgcaaggaggccgagaattgcgactgcctccaaggtttccaggtgtgccactcgctgggcggaggcactggatctggaatgggcacactcctgatctccaagatcagagaggagtaccctgaccggatgatgctcacattttctgtcttcccttcaccaaaggtctcagacacagttgttgagccttacaatgcaactctctctgtccatcagttggtggagaatgctgatgagtgcatggttcttgacaatgaggcactttatgacatctgcttccgcaccctcaagctgaccactcctagctttggcgacctgaaccacttgatcagtgctacaatgagtggagttacttgctgccttcgcttccctggtcaattgaactctgacctccgcaagctggccgtgaacttgatccctttccctcgcctgcacttcttcatggtgggctttgcgccactcacctcgcgtggctcgcagcagtatcgcgccctcactgtccctgagctcacccagcaaatgtgggacgccaagaacatgatgtgtgccgctgacccgcgccatggccgctacctcacggcctccgccatgttccgtggcaagatgagcaccaaggaggtggacgagcagatgatcaacgtccagaacaagaactcgtcctacttcgtcgagtggatccccaacaacgtgaagtccagcgtgtgcgacatcccgccgcgcggcctctccatggcgtccaccttcatcggcaactccacctccatccaggagatgttccgccgcgtgagcgagcagttcaccgccatgttcaggaggaaggccttcttgcattggtacaccggcgagggcatggacgagatggagttcaccgaggccgagagcaacatgaacgaccttgtctccgagtaccagcagtaccaggatgccaccgccgacgaggagggcgactacgaggacgaagaggagcaggtccccgaagacgagtaatctcgccggagtttctcctgggatcccatcttgagtgtcgcctgttgtgtcctaccgtttgggcaatctttattattgtttcggtatgatgatgcttaattggttatgtgcttttgggtaatgtagtagtagtacaatgctgtgtggtccgtagcgccgctgatgctactgccactttaatccgtttcacctaccagaccatgtttggattcgtatgctatcgcatatgtttggggagtgtattggattcttgtactggttttgattgctccaaaaaaaaaaaaaannaaaaaaannnnnnnnnnnnnnnnnnnnnnnnnnnnnnnnnnnnnnnnnnnnnnnnnnn

SEQ ID NO: 385305 - DNA, 1652 bp, Oryza sativa
ccccctacacactccacccacgtacaagccacaaccgaagccgactcccactcccactccctacactcccacgccatctccaacgccgcctcctcctctcctcctcaaccccacccacctcgccgccgccgccgtcgccgccgccgccgccgccatgagggagatcctgcacatccaggggggccaatgcgggaacaagatcggggccaagttctgggaggtgatctgcgacgagcacgggatcgaccacaccggcaagtactccggcgactccgacctccagctcgtgcggatcaacgtctactacaacaacgaggccagcggcggtcgctacgtgccccgcgccgtgctcatggacctcgagcccggcaccagtgactccgtccgctccggcccctatggccagatcttccgccccgacaacttcgtcttcggccagtccggcgccggcaacaactgggccaagggccactacaccgagggcgccgagctcatcgactccgtcctcgacgtcgtccgcaaggaggccgagaactgcgactgcctccaagggttccaggtttgccactcgctgggcggaggaactggctccgggatgggcaccctgctcatctccaagatcagggaggagtaccctgaccggatgatgctcacgttctcggtcttcccatcgcccaaggtgtacgacactgtcgtcgagccctacaatgctaccctttgtcaccagcttgtcgagaatgcggatgagtgcatggttcgtgacaatgaggctctctacgacatgtgcttccgcacgctcaagctcgcgacacctactttcggtgatctcaaccatcttatctctgcaacaatgagtggtgttacctgctgcctccgcttccctggccagttgaactctgacctccggaagcttgctgtcaacctgatccctttcccgcggctccacttcttcatggttggattcgctcctctgacttccaggggatcccagcagtaccgtgccctcactgtaccagagctgacccagcagatgtgggatgcaaagaacatgatgtgtgctgctgacccccgccatgggcgctacctcacagcctcagccatgttccgcggaaagatgagcaccaaggaagttgatgagcagatgctgaatgtccagaacaagaactcgtcatactttgtggagtggatccctaacaatgtcaagtcgagtgtgtgtgacattccacccattggcctgaagatggcatccacattcatcggcaactcgacctcaatccaggagatgtggaaggctttcttgcactggtacactggtgagggaatggacgagatggagttcaccgaggctgagagcaacatgaacgaccctggcctggtagctgaataccagcagtaccaggatgccaccgctgaggaagaggactatgaggaggaagaggaggacgaggaggttgctgcctaagccacctctctgcatgtttgagctatatagatatcccttgtgacatttgctactactagttaccatcgttgattgggggtgcttgttagatgctaggttaatgttattatttccaaatactatgttgccttgtcggactatttttatctgggttaatggtatgttcaacattattgtcttgaggtggatt

SEQ ID NO: 385306 - DNA, 453 bp, Oryza sativa
agtgagcagttcaccgccatgttcagggggagggctttctggcactggtacaactggtgagggaatggacgagatggagttccccgaggctgagagcaacatgaacgacctggtagctgaataccagcagtaccaggatgccaccgctgaggaagaggactatgaggaggaagaggaggacgaggaggttgctgcctaagccacctctctgcatgtttgagctatatagatatcccttgtgacatttgctactactagttaccatcgttgattgggggtgcttgttagatgctaggttaatgttattatttccaaatactatgttgccttgtcggactatttttatctgggttaatggtatgttcaacattattgtcttgaggtggattaactgttggaagtatgtagcaaagcttgaggtggaatgcatatgaaactgaactttagctaagc

SEQ ID NO: 385307 - DNA, 870 bp, Oryza sativa
  unsure (1)..(870): unsure at all n locations
antcncccagncagattttggacgccaagaacatnatgtgcgccgccnacccgcgccacgcccgntactgacggcttcggccatgttcccgcggcaanatgagcaccaagganttggacgagcagatgatcaacgtgcagaacaagaactcgtcctacttcgtggagtgatccccaacaacgtcaagtcgagcgtgtgtgacatcccgccgcgcggcntctccatggcgtctacgttcgtcggcaactccacctccatccaggagatgttccgccgcgtcagcgagcagttcacggccatgttcaggaggaaggcgttcttgcactggtacacgggcgagggcatggacgagatggagttcaccgaggcggagagcaacatgaacgacctcgtctccgagtaccagcagtatcaggacgccaccgccgacgaggccgagtacgaggaagaagaggacgcgatacaggagtagagactgtctgggcaatggtacctcgtatcccctgcccatcgttaccctaatatgtttgcctgaacatcatcgcagttgcatcaccatagctacctccgcaccttaaaatttgatgcttgtttgtatgctatcgcgtgtatcaggagtgcgtactggttccgtatgctaaagtcttggctattgatgttctgtttgcttgcttacaagttactgtgctgagcgaaccattgcaactccgattgaaagagtgatgggatttttttttttttggactggaagatttttataggatttcgttcagttcctttgagaatctttcagaattcttttgttctaaaaatgagactttgcggaacttcgactgaaatagtgaaatgtatggaagcactattcaatct

SEQ ID NO: 385308 - DNA, 456 bp, Oryza sativa
  unsure (1)..(456): unsure at all n locations
cccagatgccaccgccgaccaagaaggccgacntacgaggacgaaaaggaagaaggtcccccgaanacgaagtaatctcgccgnagttccccctgggatccccatcttgagtgtcgcctgttgtgccctaccgtttgggcaatctttattattgtttcgggtatgatgatgcttaattggttatgtgcttttgggtaatgtagtagtagtacaatgctgtgtggtccgtagcgccgctgatgctactgccactttaatccgtttcacctaccagaccatgtttggattcgtatgctatcgcatatgtttggggagtgtattggattcttgtactggttttgattgctcccgttgctgtctcttgtcttgctgcatcgatgagaatcttgctgctgctttgttgcaaaaaaaaaaaaaaaaaacccaagcgtcncgggcacgtccgcggangcgtgn

SEQ ID NO: 385309 - DNA, 405 bp, Oryza sativa
ctttacgccgccgccgcctcctcctccggccgggccaccgccgccgccgcctacgaggaagaagaaagaagaggaaggagaagatgagggagatcctccacatccagggtgggcaatgcgggaaccagatcggcgccaagttctgggaggtggtgtgcgcggagacgggatcgacgccaccgggcgctacgacggcgactccgacctgcagctggagcgcgtcaacgtgtactacaatgaggcctcctgcgggcgcttcgtcccgcgcgccgtgctcatggacctggagccgggcaccatggactccgtccggtccggcccctacggccacatcttccgcccggacaacttcgtcttcggccagtccggcgccggcaacaactgggccaagggacactacaccga

SEQ ID NO: 385310 - DNA, 275 bp, Oryza sativa
cctctctccatcgatcgatcgcaaaccacctcccaagaacaaccaagaaagagatcggatcaccgatcggcgcgcggcgagcgatcgatcgaggtgcaagcgatcgaagatgagggagatcctgcacatccagggcgggcagtgcggcaaccagatcggcgccaagttctgggaggtgatctgcggcgagcacggcgtcgaccccacggggacgtacaccggcacgtcgccgcagcagctcgagcggatcaacgtctacttcaacgaggcgagcg

SEQ ID NO: 385311 - DNA, 252 bp, Oryza sativa
catttgcacacccaccccccccttcactcctctcctcttcggccgctgccccgctactcgcttctccgaggcaccaaccggcagccatgagggagatcctgcacatccagggcgggcagtgtggcaaccagatcggctccaagttctgggaggtggtctgcgacgagcacggcatcgaccccaccggccgctacgtcggcacctccgacctccagctcgagcgcgtcaacgtctactacaatgaggcctcct

SEQ ID NO: 385312 - DNA, 776 bp, Oryza sativa
  unsure (1)..(776): unsure at all n locations
ngagcggngnancngntggctgagnaacggtgctgngnancggtttgtggcggacgttaagagggagcaagaaccaccccgaggcatccatttgcacaccggagggcgtctcgcagttcaagaggatcgccaatttccaggactaccacggcctcccggagttcagaaaggcgatggcccagtttatggggcaggtgaggggaggcaaggcaacgtttgaccccgaccgtgtcgtcatgagcggcggcgccaccggcgcccaggagacgctcgccttctgcctcgccaaccccggcgaggccttcctcgtgcccacgccatactacccagctttcgaccgcgactgttgctggaggtcaggaataaagctgctgccgatcgagtgccacagcttcaacgacttcaggctcaccaaggaggccctcgtgtcggcgtacgacggcgcacggaggcagggcatctccgtcaaggggatcctcatcaccaacccgtccaacccgctcggcaccatcaccgaccgcgacacgctggccatgctcgccaccttcgccaccgagcaccgcgtccacctcgtctgcgacgagatctacgcggggtcggtgttcgccacgccggagtacgtgagcatcgccgaggtcatcgagcgcgacgtgccgtggtgcaacagggacctgatccacgtcgtgtacagcctctctaaggacatcggcctccccggcttccgcgtcggcatcatctactcgtacaacgacgccgtcgtggcggccgcgcgcagg

SEQ ID NO: 385313 - DNA, 1892 bp, Oryza sativa
cgtcgcgcatccgacggccactcaccatcggcgtcgggggaggcgaaaacagcggctgcaattccgcttccaggtggagggggaggaggcccggtttgtgtgccacgccgccccactccgtccgtggtttgctacccaagaagacaagaagaaggaagtggcgaaacctcaccctccatcctccatcctctcctttcttccttcgaggaggaggagctatatatagacggggatggttcatctagcctcctcaccggttttgatttgatctgtgtgatttgagtgagtgagtgagattctttggaggagggattttggtttggtttggtttggtggtttgtgcgggattttgtggggaggagagtaatggcgaccgcaggaaaggtgatcaagtgcaaagcggcggtggcatgggaggccgcgaagcgctggtgatcgaggaggtggaggtggcgccgccgcagcattggaggtgcgcgtcaagatcctcttcacctcgctctgccacaccgacgtctacttctgggaggccaagggacagactcccgtgttccctcggatcttcggccatgaagctggaggtattgtggagagtgttggagagggtgtgactgatcttgcccctggtgaccatgttctccctgtgttcactggggagtgcaaggagtgtgcccactgcaagtcagcagagagcaacatgtgtgatctgctcaggatcaacactgacaggggtgtgatgattggtgatggcaaatcacgcttttccatcaacgggaagcccatttaccatttcgtcgggacttcgaccttcagcgagtacactgtcatgcatgttggttgcgttgcgaagatcaacccggcagctccacttgataaagtttgcgttcttagctgtggtatttctactggtcttggtgctacaatcaatgtggcaaagccaccaaagggttcgacggtggcgatatttggtctaggagctgtaggccttgctgccgcagaaggtgcaaggattgcaggagcgtcaaggatcattggcattgacctgaacgccaacagatttgaagaagctaggaaatttggttgcactgaatttgtgaacccaaaggaccatgacaagccagttcagcaggtacttgctgagatgaccaatggcggagttgaccgcagcgttgaatgcactggcaacatcaacgccatgatccaagcatttgaatgtgttcatgatggctggggtgttgctgttttggtcggcgtgccacacaaggacgccgagttcaagacccacccgatgaacttcctgaacgagaggactctcaagggaaccttcttcggcaactacaagccacgcaccgatctgcccaacgtcgtcgagctctacatgaagaaggagctggaggtggagaagttcatcacacacagcgtgccgttctcggagatcaacacggcgttcgacctgatgcacaagggcgagggcatccgctgcatcatccgcatggagaactgaggtttttcaggggattatggtgttgggtaataagattgggcagcttgagcagcctgccttgggtgaatgatgatatacggttcttctgtgtatcctgggcaaatttctggctttgtcaatcagtaatagtacggtatgaattccagtgtctgtagctgcaaagagtttgttaagaatcagtgatcttttggcgtaatattatcatatatttatacgagtttcagttcgtcaccctcttcacttttcagaacttttttaagtcttatgacttcagagccaccaaacgtgctgtttttgaattccatggtggcttgaatttggtacatgttcatgtaaatgtgggatatttgtcatcagagatttgtgcgctcgaaaaaaaaaaaaaaaa

SEQ ID NO: 385314 - DNA, 1667 bp, Oryza sativa
ggcgtacttgcccgcgagactcctaccactctctgatccctatatatacaccccctcctcccctctcgtctcctcaccagaattccaagcaacgaactgcgagtgattcaagaaaaaagaaaacctgagctttcgatctcttcggagtggtttcttgttctttgaaaaagagggggattaatggcgacagcggggaaggtgatcaagtgcaaagcggcggtggcatgggaggccgggaagccgctgtcgatcgaggaggtggaggttgcgccgccgcaggccatggaggtccgcgtcaagatcctctacaccgccctctgccacaccgacgtctacttctgggaggccaaggggcaaacacctgttttccctaggatcttgggccatgaagctggaggcattgtggagagtgtgggagagggtgtgaccgaactcgcgccgggcgaccatgtcctcccggtgttcaccggcgagtgcaaggagtgtgatcactgcaaatcggaggagagcaacatgtgtgacctcctcaggatcaacgtcgaccgcggcgtcatgatcggcgacggcaagtcccgattcaccatcaaggggaagcccatcttccactttgttggcacatccaccttcagcgagtacaccgtcatccatgtcggctgcctcgcgaagatcaacccggaggcgcctctcgacaaggtctgcattctcagctgcggtttctctaccggttttggtgcaacagtgaatgtcgcgaaaccgaaaaagggccagaccgtggctattttcggtcttggagctgttggtcttgctgctatggaaggtgccaggctgtctggagcatcgaggatcattggtgtggacctgaaccctgcgaaattcgaacaagctaagaagtttggctgcactgacttcgtaaaccccaaggaccacagcaagccagtgcacgaggtgctgattgagatgaccaacggtggactcgacagggccgttgaatgcacgggcaacatcaacgccatgatatcctgcttcgaatgtgtccatgatggatggggcgttgcggtgctggtcggcgtgccgaccaaggatgatgtgttcaagacccacccgatgaacttcctcaacgagaagacgctcaaggggacgttcttcggtaactacaagccgcgcaccgacctgcccaacgtcgtcgagctgtacatgaagaaggagctggagctggagaagttcatcacgcacagcgtgccgttctcggagatcaacacggcgttcgatctcatgctcaagggggagagtctccgctgcgtcatgaggatggatgagtagagatgatgatgatctatctctctctctctctctcttgcagtttcagtgcatacaagaaaccaaaaatgaaagcaaaaaatggatgagaagtttgaggttttccatttaagtttaataatggtcgtgagacagggcttgtgtggagtcagctctgtttactccctcctttcatggcttgatcttgtttattgtcagcattgtggcttagcagattttcaccagttttaccctgtaaattagtaccattctgatcaatcgtaataaactactagcagtgtgaggtactattgctggaactgaattgattgtgcagtaaagaggtgaatagcagccagtatgaaggtttt

SEQ ID NO: 385315 - DNA, 736 bp, Oryza sativa
  unsure (1)..(736): unsure at all n locations
ccacgcgtccgcccacgcgtccgcctagagctcaccctagcgcgccgccgccgcagccatctccgccgccgctcgtcgggctctctccatctcccatccaggatgaagttcatttctgcctatctgatggcctatctggctggcaactccagccccactgcggaggatttgacaacgattctggagtcagttggttgtgaaatcgacaatgcaaagatggaactcctgttgtctcaagtgagtggcaaggacatcactgagctcatcgcttgtggcagggagaagtttgcttcagttccatctggtggtggtggtgtagctgttgctgctgctgctcctgctgccggtggtgctggtggtgctcctgcagctgaggcgaagaaagaagataaggtcgaagagaaggaagaaagtgatgatgacatgggcttcagtttgtttgactgagtgatgcggtcacctcttctatcatcaataccagactttgcgcaggaaactagagtgatgatgtttgggattttagcttttcttctttagttaagttgaaaacacttgaggaaagactatgcttcctactatgttttgatatgtagtaacgcagccataggttgctggttacttcactggtgaaccatgcttttgctatcaaaattcaatgcttaatggaggatgaattgtgctcggcagtaatttttagctgtgttcaannnnnnnnnnnnnnnnnnnnnnnnnnnnn

SEQ ID NO: 385316 - DNA, 798 bp, Oryza sativa
  unsure (1)..(798): unsure at all n locations
ccacgcgtccgcgaggatcattggtgtggacctgaaccctgcgaaattcgaacaagctaagaagtttggctgcactgacttcgtaaaccccaaggaccacagcaagccagtgcacgaggtgctgattgagatgaccaacggtggactcgacagggccgttgaatgcacgggcaacatcaacgccatgatatcctgcttcgaatgtgtccatgatgtcagtctctttcttacaaacatgaaacatgatagtaacaaattgaagatgatcatttcagcaatgcctccagttctgctgtaaactgtatcctgaaaactaagagtggcaatctgaaacctgaatccagggatggggcgttgcggggctggtcggcgtgccgcccaaggacgccgtgttcaagacccacccgatgaacttcctcaacgagaggacgctcaaggggaccttcttcggcaactacaagccacgcaccgatctgcccaacgtcgtcgagctctacatgaagaaggagctggaggtggagaagttcatcacacacagcgtgccgttctcgnagatcaacacggcgttcgacctgatgcacaagggcgagggcatccgctgcatcatccgcatggagaacttagagntgttcactggtnttattcctnctgccaatgatgntggtgatgctcctgcagctgaggcgaagaaagaagataaggtcgaagagaaggaagaaagtgatgatgacatgggcttcagttttgtttgactgagtgatgcggtcacctcttctatcatcaataccagactttgcg

SEQ ID NO: 385317 - DNA, 571 bp, Oryza sativa
  unsure (1)..(571): unsure at all n locations
gcccttcgacgcctggactccaccgcggtggcggccgctctaaactagtggatcccccgggctgcacgaattcggcacgacaggacgccgacttcaacacccacccgatgaacttcctgaacgagaggactctcaagggaaccttcttcggcaactacaagccacgcaccgatctgcccaacgtcgtccagctctacatcaacaacgagccgggtggtggacaagttcatcacacacagcgtgccgttctcggagatcaacacggcgttcgacctgatgcacaagggcgagggcatccgctgcatcatccgcatggagaactgaggtttttcacgggattatcgtgttcggtaataacattggggcaccttgagccccctccccttgggtttgaatgaatgatataccggttcttctgtttttcctgggcaagtttctggcttttgtcaatcccttaatattaccgttttgaatccccttgtctgttacttcccaaaagtttgtttaaatccttgatcttttnggcttnatnttttccttttttttttccnnnnnnnnnnnnnnnnnnnnn

SEQ ID NO: 385318 - DNA, 896 bp, Oryza sativa
  unsure (1)..(896): unsure at all n locations
ccacgcgtccgcccacgagctcggcccacgagttgggttggcttctcctccccctcccggttcggttcggttcgggtccggttcgatttcgtttttttttcttcttcgtggggttggtgggaaagcatggcggcgccggatgttgagtaccgctgcttcgtcggcggcctcgcctgggccaccgacgaccgctccctcgaagccgccttctccaccttcggcgagatcctcgagtccaagatcatcaacgatcgggagacggggaggtcgcgcgggttcgggttcgtgacgttctcgagcgagcaggccatgcgcgacgccatcgaggggatgaacggcaaggagctcgacggccgcaacatcaccgtcaacgaggcccagtcgcgccgctccggaggcggaggcggaggcggctacggccagcgcggcggaggcggaggctacggtggcggcggctacggtggtggtggcggcggcggtggctacggccagcgccgtgaaggcggctacggcggtggcggtggctacggtggcggccgtggtggcggcggctacggcggcggctacggcggcggctacggcagccgcggcggcggcaactccgacgggaactggaggaactgagcggtggggccctcatggccaagttatctatctatctaatcgagctaccatcatcatcatccgatcgttatcatcgttagttttgtgtggaactatctagtttgtgttaactgtgtggttgcccatctgtgtttttgatcgcaagaagaaagctcgtctcgtttgctttgatcaaatgaatgaatgaatgaatcttagtgtgctccgctctcgtcaaaaaaaaaaaaaaattttgtgccgggnccggcacgagctctttcaaaanganccgc

SEQ ID NO: 385319 - DNA, 890 bp, Oryza sativa
ggcaagcagtgcctcctcgtgccctctttgaggtgggttggcttctcctccccctctttaccttttcctcctcggttcggttccgtggttcgtctagggtttagtgggttgagatggcggcgccggatgtcgagtaccgctgcttcgtcggcggcctcgcctgggccaccgacgaccgctccctcgaggccgccttctccacctacggcgagatcctcgactccaagatcatcaacgacagggagacggggaggtcacgtgggtttggcttcgtcaccttctcctccgagcagtcgatgcgcgacgccatcgagggcatgaacggcaaggagctcgacggccgcaacatcaccgtcaatgaggcccagtcccgccgctccggcggcggaggcgggggctacggcggcggcggtggcggctacggcggcggtcgtggaggcggcggctacggaggaggtggcggcggcggctacgggcgccgtgagggcggctacggtggcggcggcggctacggcggcggccgtggcggcggcggcggcggctacggtggcagccgtggcggcggctacggcggcgactccggcgggaactggaggaactgattggtggggcccatcgtggccagttatccttagctatccgtgtcagaatcatcttatcatcgagtcgagtcgttatcgtgtccagtggctctctcgagtcgagaagccctctatccatccatccagtgttaggtgttcttcgtccgtgatgttaccatgaattgagttcgctttggttatggtgtttgaactgcttgttgctatctatcggaatgaaatgaaatagaaaacaaggagaaaaaaaagagttcgaaagttttgttcgcaaaaaaaaaaaaaaaaaccaac

SEQ ID NO: 385320 - DNA, 949 bp, Oryza sativa
acgagcttctcctccccctcccggttcggttcggttcggttcgggtccggttcgatttcggtttttccttcggttcgggggttggtgggaaagcatggcggcgccggatgttgagtaccgctgcttcgtcggcggcctcgcctgggccaccgacgaccgctccctcgaagccgccttctccacctacggcgagatcctcgagtccaaggtccgatggattccctcttctctgtgtttttttttgatgcgatttggtggtggtgttcgtcagatctggttgcgtaaatctgactatgggggtgggtatgcggtgcaaatcatcaacgatcgggagacggggaggtcgcgcgggttcgggttcgtgacgttctcgaacgagcaggccatgcgcgacgccatccaagggatgaacggcaaggagctcgacgggcgcaacatcaccgtcaacgaagcccagtcgcgccgctcccgaagcggaagcggcggtggctactgccaccccggcggaagcggaagctaccgtggcggcggctacggtggtggtggcggcggcggtggctacggccaacgccgtgaaagcggctaccgcggtggcggtggctacggtggcggccgtggtggcggcggctacggcggcgggtacggcagccgcggcggcggcaactccgacgggaactggaggaactgagcggtggggccctcatggccaagttatctatctatctaatcgagctaccatcatcatcatccgatcgttatcatcgttagttttgtgtggaactatctagtttgtgttaactgtgtggttgcccatctgtgtttttgatcgcaagaagaaagctcgtctcgtttgctttgatcaaatgaatgaatgaatgaatcttagtgtgctccgctctcgtcaaatcccagaacaagatagatctaacagatcacaatcagaaaattg

SEQ ID NO: 385321 - DNA, 864 bp, Oryza sativa
  unsure (1)..(864): unsure at all n locations
gcgttcgcggacgcgtgggcggacgcgtgggttttttcttcttcgtggggttggtgggaaagcatggcggcgccggatgttgagtaccgctgcttcgtcggcggcctcgcctgggccaccgacgaccgctccctcgaagccgccttctccaccttcggcgagatcctcgagtccaagatcatcaacgatcgggagacggggaggtcgcgcgggttcgggttcgtgacgttctcttgagcgagcgagcagcccatgcgcgacgcccttcggaggggatgaacggcagggggctcgacggtccagcaacttccaccgtcaacagaggccccattcgcgcaccacttccaggaggcacgagacgcgcggtggcggcatacggcccagcgcggctgaggcggtggctacttaacgggggncgcggaaacgggtggtggatgncggcggcggtggcnnacggcccagccccgtgaaggcgnntaacngcggtggcggnggctacggtggcggcccgtggtgggcggcagntacggtggtggntacggcagccgcggcggcggcaactccgacgggaactggaggaactgagcggnggggccctcatggccaagttatctatctatctaatcgagntaccatcatcatcatccgatcgttatcatcgttagttttgtgtggaacnatctagtttgtgttaactgtgtggttgcccatctgtgtttttgatcgcaagaagaaagctcgtctcgtttgctttgatcaaatgaatgaatgaatgaatcttagtgtgnaaaaaaaaaaaaaaaaaaaaaaactcgagggggggcccggtacccaattcgccctatagtgagtcgtatnacaatt

SEQ ID NO: 385322 - DNA, 680 bp, Oryza sativa
  unsure (1)..(680): unsure at all n locations
ntgaaacncaagttgaaataacctcataagggaaaaaagngnttccncggggggggccgttaaaaataaggancccccnggnggcagaattggccagngggaanttttggagngaccagccatgngggacccnatggggggtgacggcanggagttgacggccncaaaatcaccgttaaaggagccccantcgcnccgnttccggagcggaggcgcggtggttacgcccagcgcggcggaggcggagttacggtggcggcggttaccgttaccgcggtggtggcggcggcggtggctacggccagcgccgtgaaggcggctacggcggtggcggtggctacggtggcggccgtggtggcggcagctacggttggtggctacggctacggcagccgcggcggcggcaactccgacgggaactggaggaactgagcggtggggccctcatggccaagttatctatctatctaatcgagctaccatcatcatcatccgatcgttatcatcgttagttttgtgtggaactatctagtttgtgttaactgtgtcggttgcccatctgtgtttttgatcgcaagaagaaagctcgtctcgtttgctttgatcaaatgaatgaaaaaaaaaaaaaactcgagggggggcccggtacccaattcgccctatagtgatcgtatacaatt

SEQ ID NO: 385323 - DNA, 780 bp, Oryza sativa
ggcttctcctcccctcccggttcggttcggttcgggtccggttcgatttcggtggttttcttcttcgtggggttggtgggaaagcatggcggcgccggatgttgagtaccgctgcttcgtcggcggcctcgcctgggccaccgacgaccgctccctcgaagccgccttctccaccttcggcgagatcctcgagtccaagatcatcaacgatcgggagacggggaggtcgcgcgggttcgggttcgtgacgttctcgagcgagcaggccatgcgcgacgccatcgaggggatgaacggcaaggagctcgacggccgcaacatctaccgtcaacgaggcccagtcgacgccgcgctccggagtgcgagaggcgacggtgtctacggccagcacgtcgcaggcgtaggctacggtggcgacggctacggtggtggtgtcgtcgacggtggctacggccagcgccgtgaaggcggctacggcggtgacggtggctacggtgacgaccgtggtgacgacgtctacgtcggcggctacgacatccgcgccgtcgacaactccttcgggaactgcagtaactgagcggtagggccctcatggccaagttatctatctatctaatcgagctaccatcatcatcatccgatcgttatcatcgttagttttgtgtggaactatctagtttgtgttaactgtgtggttgcccatctgtgtttttgatcgcaagaagaaagctcgtctcgtttgctttgatcaaatgaatgaatgaatgaatctaagtgtgc

SEQ ID NO: 385324 - DNA, 742 bp, Oryza sativa
ttcttctcctccccctctttaccttttcctcctcggttcggttccgtggttcgtctagggtttagtgggttgagatggcggcgccggatgtcgagtaccgctgcttcgtcggcggcctcgcctgggccaccgacgaccgctccctcgaggccgccttctccacctacggcgagatcctcgactccaagatcatcaacgacagggagacggggaggtcacgtgggtttggcttcgtcaccttctcctccgagcagtcgatgcgcgacgccatcgagggcatgaacggcaaggagctcgacggccgcaacatcaccgtcaatgaggcccagtcccgccgcgctccgtcgcggcggaggcgggggctacggcgggcggcggtggcgggctacggcggcggtcgtggaggcggcggctaccgagagaagtggcggcggcggcggctaccggtggcagccgtgggcggcggctaccggcggcgacttccggcgggaactggaggaactgattggtggggcccatcgtggccagttatccttagctatccgtgtcagaatcatcttatcatcgagtcgagtcgttatcgtgtccagtggctctctcgagtcgagaagccctctatccatccatccagtgttaggtgttcttcgtccgtgatgttaccatgaattgagttcgctttggttatggtgtttgaactgcttgttgctatctatcggaatgaaatgaaatagaaaccaaggag

SEQ ID NO: 385325 - DNA, 397 bp, Oryza sativa
ggctacgggcaccgtgaggacggctacggtgacgacgcaggttacgacggcggccgtggcggcggcggcggcggctacggtggcagccgtggcggcggctacggcggcgactccggcgggaactggaggaactgattggtggggcccatcgtggccagttatccttagctatccgtgtcagaatcatcttatcatcgagtcgagtcgttatcgtgtccagtggctctctcgagtcgagaagccctctatccatccatccagtgttaggtgttcttcgtccgtgatgttaccatgaattgagttcgctttggttatggtgtttgaaactgcttgttgctctctatcggaatgaaatgaaatacaacacaaggagaaaaaaaagagtccgaaacaaaaa

SEQ ID NO: 385326 - DNA, 376 bp, Oryza sativa
gcgtcgccccacgcgtgccgttgatcctacgtccccctctttaccttttcctcctcggttcggttccgtggttcgtctagggtttagtgggttgagatggcggcgccggatgtcgagtaccgctgcttcgtcggcggcctcgcctgggccaccgacgaccgctccctcgaggccgccttctccacctacggcgagatcctcgactccaagatcatcaacgacagggagacggggaggtcacgtgggtttggcttcgtcaccttctcctccgagcagtcgatgcgcgacgccatcgagggcatgaacggcaaggagctcgacggccgcaacatcaccgtcatgtcagcccagtcccgccggctccggcggctggccc

SEQ ID NO: 385327 - DNA, 480 bp, Oryza sativa
gtcgagtaccgctgcttcgtcggcggcctcgctgggccaccgacgaccgctccctcgaggccgccttctccacctacggcgagatcctcgactccaagatcatcaacgacagggagacggggaggtcacgtgggtttggcttcgtcaccttctcctccgagcagtcgatgcgcgacgtcatcgagggcatgaacggcgactccggcgggaactggaggaactgattggtggggcccatcgtggccagttatccttagctatccgtgtcagaatcatcttatcatcgagtcgagtcgttatcgtgtccagtggctctctcgagtcgagaagccctctatccatccatccagtgttaggtgttcttcgtccgtgatgttaccatgaattgagttcgctttggttatggtgttatagagagcatgttgagagcgtgaatgttttaatctatgtctagacgagcatggtgatgatagtttttaa

SEQ ID NO: 385328 - DNA, 504 bp, Oryza sativa
  unsure (1)..(504): unsure at all n locations
ngaggagngnancgntggncagagnacggtgcnggnacggttnggggcttctcctccccctcccggttcggttcggttcgggtccggttcgatttcgttttttttttcttcttcgtngggttggtcggaaagcatggcggcgccggatgttgagtaccgctgcttcgtcggcggcctcgctggggccaccgacgaccgctccctcgaagccgccttctccaccttcggcgagatcctcgagtccaagatcatctccgcgttcgggagacggggaggtcgcgcgggctccgggttccggtgcgcgtcgttctcgagcgagcaggccatgcgcgacgncatcgaggggatgaacggcaaggagccctcatggccaagttatctatctatctaatcgagctaccatcatcatcatcccgatcgttatcatcgttagtttttgtgtggactactatctagtttgtgttactgtgtggttgcccatctgtgtttttnatcgaaagaagg

SEQ ID NO: 385329 - DNA, 659 bp, Oryza sativa
tctttgaggcgggttggcttttcctgaacctctttaccttctcctactgggacctgctccggggccggcaccacggctagtggggtgagatggcggcccccgatgtagtgcccctcgggctgtcgtcgcggtctccgctgggccaccgactaccgctccctcgagggctgcttcttcacctacggcgagatcctcctctacaagatcatcaacgacagggagacggcaaggtcacgtgggtttggctatagcaccttctactccgagcaggcgatgcgcaacgccatcgagggcatgaacggcaaggttgctctacggccgcaacatcaccgtcaatgaggcccagtcccgccgctccggcggcggaggcagaggctactgaggcggcggtggcggctacgcgagcagccgtggaggcggcggctacggaggaggtggctgtagcaggctaccgtcgctctgagggcggctacggcggcggcggaggctacggatggtgacgtgaccaccaccagaggcggctacggtggcagacgtggcggcggataccgccgccactcctgcgggaactggaggaactgattggaggggcccatcgcggacagctatccttagctatccgcgtcagaatcatcttatcatggagtcgagtcgatatc

SEQ ID NO: 385330 - DNA, 302 bp, Oryza sativa
  unsure (1)..(302): unsure at all n locations
cacgcgtccgcccacgcgtccgcctacggcgagagcctgcnagtccaagatcatcaacgacagggagacggggaggtcacgtgggtttggcttcgtcaccttctcctccgagcagtcgatgcgcgacgccatcgagggcatgaacggcaaggagctcgacggccgcaacaccaccgccgtggcgactcggggccgcccgcctaagcccactgccgccgctcccgagagtggaggcgggcggatccgcgtgctgccggcgctcccgttcctgccaggcccctcccaaggaccaacggccgtgg

SEQ ID NO: 385331 - DNA, 439 bp, Oryza sativa
tcccggtcgacccacgcgtccggttggcttctcctccccctctttaccttttcctcctcggttcggttccgtggttcgtctagggtttagtgggttgagatggcggcgcccgatgtccagtaccgctgcttcctcatgcgaccctcccggggcccagcgcgatcgcatcggatgccggtccttggccttacgctttgggcatggtcgctcagtgttctgtgccagctgcattactggtaaccagcatgagtggcgccggtatccttcagtaccgacatgcttcgtcggcgggctcgcttgggccaccgacgacctctgcctggaagccgccttctccacctacggcgagatcctcgagtccaagatcatcaacgatcgtaagacgggaaggtctcgcggcgttctgttttcggaacgttttcgagcgagcaaggccatg

SEQ ID NO: 385332 - DNA, 902 bp, Oryza sativa
ccacgctcggcctccctcctctcctcgtccctcctccccgccgccgccgcagcagatttaatcctcaatggcggccttcaacaagctcggtagcttcctcaggcacagtggcttgacaagcagtgcctcggccggctcttcccctgccatgttcaatgctgctcgtctgatgtccaccaagcttttcgttggtggtctttcttggaatactaatgacgattcgctgaaagaggcattcaccagcttcggggatgtgactgaagctcgggtgatcaatgacagagaatctggaaggtcaagagggtttggctttgttagctttgccaatggcgatgatgccaagagtgccatggatgccatggacggtaaggaacttgagggacggagtatccgcgtgaacttcgcgaatgagagacctccagggaaccgaggtggcggcgggtatggtggtggtggcggtggttatggtaaccaaggaggctatggtgatggcaaccgaggctatggagggcagtactaaagtgggcactgacttgcttaaataatgagcttaggacctgatgtggcttatgtgaagccttattattgtttacttttgtaccgtttagtatccgtcgtcgttgaaattctaggtgaagattaaatcttcatattgcactttatatgcttggcgtgaaggcctaggatgcgaatggtgcttttttgtgagtgagaactgagaacacatgcatgtcttcatatctattgcaatgtgtagagggtcattactcgagtgtgtcagcaagtcttattatttcatatttgatctgcatcgagcattcgttcacaagacaaatcgcctgagcagcgtccgtgaaccatttgatcaacgtcatgtgtatcctccgcgttgcttcctgtca

SEQ ID NO: 385333 - DNA, 1738 bp, Oryza sativa
gaattcatcaattcagagttcagagcagagtgtccctgcttctgtgcagaggagagagatcgagctatagagctagcctggctgctgccatgcggaccggacgacgcctctccatgatcctcctcctcctccttctcggcttggcttccggcgacaagattctcttccaggggttcaactgggagtcgtggaggcagagcggagggtggtacaacctgctgatggggaaggtcgacgacatcgtcgccgccggcgtcacgcacgtctggctgccgccgccgtcgcactccgtctccacgcaagggtacatgcctgggcggctgtacgacttggatgcgtctaggtacggcacgtcgatggagttgaagtcgttgatcagcgcgctccacggcaagggcattcaggcgatcgctgacgtggtgatcaaccaccgctgcgccgactacaaggacagccgcggcatctactgcatctttgagggcggcacacctgacggccgcctcgactggggcccccacatgatctgccgcgatgatacccagttctccgacggcacaggcaacctcgacaccggcgccgacttcgccgctgcccccgacattgaccacctcaatggtgtcgtccagcgggagctcaccgactggctcctctggctcaagtctgacgaggttggcttcgatgcgtggcggctcgacttcgcaagggggtactcgccggaggtggccaaggtgtacattgaggggacaacgccggtggggttggcggtggcggagctgtgggactcgatggcgtacggcggagacgggaagccggagtacaatcaggacgcacaccggcaggcgttggtggactgggtggacagggtgggtgggacggcgtcggcggggatggtgttcgacttcacgacgaaggggatcatgaacacggcggtggagggggagctgtggcggctgatcgaccagcaggggaaggcaccgggggtgatcgggtggtggccggcaaaggctgtcaccttcgtcgacaaccacgacactggctcgacgcaacagatgtggccattcccctccgacaaggtcatgcagggctacgcctacatcctcacacatcccggcaacccatgcatcttctacgaccatttcttcgattgggggttaaaggagcagatcgcggcgctggtggcggtgaggcagcggaacggcgtgacggcgacgagctcgctcaagatcatgctgcacgacgccgacgcctacgtcgccgagatcgacggcaaggtggtgatgaagatcggctcccgctacgacgtctccagcctcatcccgcccggcttccacctccggccatggccgtacgccgtctgggagaaaacgccgccgccgccgccgccgccgccgatcatcgcacctcttccagcgcatcgctctgattgattagcgatatgatgcttttgtgccacctcttatgttttacttctgctgtatatggaacaggctcttctaccttcaaaggtacgtactttcgtcactgatatgtgggaccgataaaccatgggtctaagccatgatgactttgaagacataggatttcaatccctgtatatagataagtacatatgtaatatacatacgcatgattagtgacatatatatacactggaattcgttggctgtgatcgaccgtcggtattggctggagatgtaaaccatttatattatcttaagagaaaaatatatacacagtt

SEQ ID NO: 385334 - DNA, 1960 bp, Oryza sativa
gtcgacccacgcgtccgcggacgcgtgggcgagctcactgttgcctgcgtcgtcgtcctcggctcggctcctcccttccctcgcggatctgagttctatatcttgtcaacttggatttggtaatccctggaactaaaaaggccattcaaaatggtggttcttgcagcttctattatatcgaagtctggaaaagctcttgtttcgagacaatttgttgacatgtcccggataaggatcgatgggctgcttgcagcatttccgaagctggtcggaagtggaaagcaacatacttatgttgagactgaaaatgttcgttatgtctatcaaccaattgaagcactgtatttgcttctcatcacaaataagcaaagtaacattcttgaagatctggatactttaaggctactctccaagcttatacctgaatatgctccctctttggatgaagagggtgtctgtaaggcagcattcgagcttctgtttgcctttattgaagccatttctcttggaaacaaagagaacgtaactgttgcacaagttaaacaatactgtgaaatggagagccatgaagaaaagctgcacaagctggttatgcaaagcaaaataaatgaaactaaggatgtcatgaggaggaaagtcactgagattgagaaaagcaagactgatagagggaagcctgacaagggaggatttggatccttgagaactccaaacagcttcagtgacatgggcattagaggtggtggtccagggggcgatcctatatttggtgatatggactcgttcacccacaaggccaaaggccgcccatctgctcctgctcctgcatctgcttctactaaagttcctggtggtatgaaattaagcaaagcacagaagacaaaccagttccttgagtctttgaaagctgaaggagaagtcattttggaggacactcaaccaagtgcaactcaatcaaggtcatcatatatcccaccaagcgatcctatcacagtgacaattgaagagaagctcaatgtcactgttaaaagggatgggggagttagcaattttgatattcaaggaaccctggctctccaaattctgaatgacactgatggttttattcagttacagattgagaaccaagatgtacctggccttaacttcaagacacaccccaatatcaacaaagagttattcaacagtcaacaaattgtgggggcaaaagatccaaacaggcctttccccagtggtcaaaatgaaacaccgttggtgaaatggagaatccaggagttgaatgagtcatctcttccattggcagtgaactgttggccttcggtgtccggaaatgaaacctatgtgaacattgaatatgaagcttcagagatgtttgatttgcacaatgttgtcatctctatccctctccccgcacttagggaggctccaggtgttaggcagatagacggagaatggaggtatgactcaagaaattcagtgttggagtggtccattattcttgttgatcaatcaaaccgcagtggttctttggagttcactgtccctgcagctgatccatcaacattcttcccgatatctgttgggttttctgcatcaaatacatttagtgatttgaaggtgaccgccatccgtccgctgagggaaggtagcccaccaaagttttctcagaggaatcgattggttacttataactaccaagtggtttgacgcgcaaattaaagttagtttgttccagtcaagtaattgcgcacatttgcagtacataggagcttctgattttctgccaagcttagatagcttgctcagtgagttgtcccgacgtggataaatatgtggtatacgtaatgcatgctgtttttcctttacactgtaaaatgttaccccaaagttatgctttttactggagtgttacagaattgttttttaagaatggaatataaaaatacgaagagttcatcct

SEQ ID NO: 385335 - DNA, 846 bp, Oryza sativa
ccacgcgtccgcccacgcgtccgcaagtctctcttcttcccatctccgcttcccttcttcttcttcttcgttgatccactcacccgccgcgcgcagaggaggccatggcggatcagctcaccgacgaccagatcgccgagttcaaggaggccttcagcctcttcgacaaggacggcgatggttgcatcacaaccaaggagttgggaactgtcatgcgttcactagggcagaacccaacggaagctgagctccaggacatgatcaacgaggttgatgctgatggcaatggaaccattgattttcctgagtttctcaatctgatggctcgcaagatgaaggacactgattcagaggaagaactcaaggaggccttccgggtgtttgacaaggaccaaaatggcttcatctccgctgctgagctccgccatgtgatgacaaatcttggcgagaagctaactgacgaggaggtggatgagatgatccgtgaggctgatgttgatggtgatggtcagataaactatgaggagtttgtgaaggtcatgatggccaagtgagccatggaaccatactctaaggcagaggagattgtgtgttgcatagtcctagttaagatgcaacacttgttttatcaatttccagtgaagcatcctactagctgtagtcgctaaaaaggattttcctgctatgttcctctgaagtgtgttttcagatctcttgtgttttatgtgaaccagtaattcttgtccttggtatgtccagattgcagttgggcctgtatgtagttatatattttttcatcaatttatgctcgagtctagtatcaaaaaaaaaaaaaaaatttttttt

SEQ ID NO: 385336 - DNA, 864 bp, Oryza sativa
  unsure (1)..(864): unsure at all n locations
gccactcgttccccttccttcctctcctcctctcgcggaaccttctcgaagcttccacacccccaacctcgcctccaccaccaaccccccatggcggaccagctcaccgacgagcagatcgccgagttcaaggaggcgttcagcctcttcgacaaggacggcgacggttgcatcactactaaggagcttggaaccgtgatgcggtcccttggtcagaacccaactgaggcggagctgcaggacatgatcaacgaggttgatgctgatggcaatgggaccattgacttcccagagttcctgaacctgatggcgaagaagatgaaggataccgactctgaggaggagctcaaggaggccttccgtgtgtttgacaaggaccagaacggtttcatctcggctgctgagctccgccacgtcatgaccaaccttggtgagaagctgaccgacgaggaagtcgacgagatgatccgtgaggctgacgtcgatggcgatggccagatcaactacgaggagttcgttaaggtcatgatggccaagtgaggagggttcccattaaataagttctgtctgaagtgaactaaaactgtcagggcctacaacaaagctgtactttgtgatgttccttttaagtacctatctttgctggtggtaatgttgagtagcgatcgggttaggtggtctagtcatgcgaaacaacatcagatgcctggtttcttttgattgtgatgcttatcttgcgcctgccggagcataggatttgttggggtttcatcatttttcttggatccgttgtgcagatatgcattgcctggttcctttctatcatcaaaaaaaaaaaaaaaaaaaagggnnnnnnnnnnnnnn

SEQ ID NO: 385337 - DNA, 950 bp, Oryza sativa
ccacgcgtccggccattctctccgcgacggtctcgtcttccccacccctcgcctcctcgcgcgctcggtgagagaagcgaagaagaagaagaagaggaggaggaagaagccaggctaagcccagcggcatggcggaccagctcaccgacgaccagatcgccgagttcaaggaggccttcagcctcttcgacaaggacggcgatggttgcatcacaaccaaggagctgggaaccgtgatgcgttcgctggggcagaacccaacggaggccgagctccaggacatgatcaacgaggtcgacgcggacggcaacggcaccatcgacttcccggagttcctcaacctgatggcacgcaagatgaaggacaccgactcggaggaggagctcaaggaggcgttcagggtgttcgacaaagaccagaacggcttcatctccgccgccgagctccgccacgtcatgaccaacctcggcgagaagctgaccgacgaggaggtcgacgagatgatccgcgaagccgacgtcgacggtgacggccagatcaactacgaggagttcgtcaaggtcatgatggccaagtgaggcaccacttcccctgccgatgatggcatagtaccctgggaggaggaaaccgtgcattgccgtattagtaaggggatgcaaacactggtttcagtcgtcttccctgatgaagaaaaccgaaccgtactagttgtagttgctgaacatttttctatctctccagtctctccggtgtgccatggaacttcttgcttgatttttctgtgtgaatctgttaaggcttgctctgatctctccgaaccctgaattgcattgcagttgagtcccgtctttttgtagcactgtttttcttttccgtcagatctgatcggatcatttttagcatcatccatcaatgaacaggcagttgctttccgttgccgttatcctaaa

SEQ ID NO: 385338 - DNA, 574 bp, Oryza sativa
  unsure (1)..(574): unsure at all n locations
tccgaatcccggtcgaccacgcgtggcgtccgcacgactcccctctccttcctctctctctcgctcgcgcgcgcctgcgtcgccaatggcggaccagctcaccgacgaccagatcgccgagttcaaggaggccttcagcctcttcgacaaggacggcgacggttgtattactactaaggagttgggaactgtcatgcgttcgctggggcagaacccaactgaggcagaactacaagacatgatcaatgaggtggatgctgacggcaatggaacaatcgatttccctgaatttctcaacctgatggcccgcaagatgaaagatactgattctgaggaagagctcaaggaggcgttccgtgtgttcgacaaggaccaaaatggttttatctctgctgctgaattgcgtcacgtcatgactaaccttggtgagaagctgacagatgaggaggttgaagagatgatccgtgaggccgatgttgatggtgatgggcagatcaactacgatgaattcgttaaagtcatgatggccaagtaggtgaagcattatgccatctagttactntcctggtggtag

SEQ ID NO: 385339 - DNA, 1815 bp, Oryza sativa
cgcgcatcgcagccgagacgagccgccccccgcaccgcactctccgccgccggccgcgccgacctcctccgccgcgccgcctccccggcgcgcgcccccgtcaccctctctcgcctcgccgccgccgccgctgcctcctcgtgaggggggacggtggtgggggcctctgcctatggcgagcggcgacggcggcgacgacgcgggcgtgaagcgcgtggcggaccgctacctgaagcgcgaggtcctgggagagggaacctacggcgtcgtcttcaaggccgtcgacaccaagactgggaatacagtcgcaataaagaaaatccggctagggaagtacaaggaaggtgtcaatttcactgcattgagggaaattaaacttcttaaggagctgaaagattctaatattatagagctgattgatgctttcccttacaagggaaacttacatcttgtatttgagttcatggagactgatttggaagctgtcatacgagataggaacattgtattatctccagctgatacaaaatcttatattcagatgatgttaaaaggtttagccttctgccataagaaatgggtgctacacagggatatgaaaccaaataatttactcattggcgctgatgggcagcttaagcttgctgactttggtctggcgcgcatatttgggagtccagagcggaacttcactcatcaggtctttgcacgatggtaccgagcaccagaattattatttggcaccaagcagtatggatctgcagttgatatttgggctgctggttgtatttttgctgaactgctgcttaggcgaccgtttctccagggttctagtgacattgatcaacttgggaagatctttgctgcatttggaactccaaagtcttctcaatggccggacatggtttatcttccagattatgttgaataccaatttgtctctgcacctccacttcgctcattgtttccaatggccagtgatgatgcattggatcttctatcaagaatgtttacatatgatccaaaagcaagaattacagctcagcaggctctagaacaccggtactttttatcagtaccagcgccaacaaaaccatcacagcttccaaggccaccacctaagggtgattcagggaataacaagataccagacttgaacctgcaggacggccctgttgttctgtccccgccaagaaagttgcgcagggtgactgcccatgaagggatggaagtccatatgcatcgggcggatagaacagaagagcatccttcaggggcaaggcacatggatgacatgtccagccagagttctagaataccaatgtcagttgatgttggagctatttttgggacacgacctgctcctagaccaacgttaaacagtgccgacaagtctcgtttaaaacggaaacttgatatggatccagaatttggatacacagagtaaatcaccattttttccatactggcttgttgatttttaaaatattctttggggagatagttccactatctaccaacaaaagaggattgtgtcgaaagccataaaaacttcactgaagggcgctgacaggatggcacagccaactatgctgttatcgtttttgactaccaaagccggctcaggaagaggaaactgaagagttacgtgttacgatgctaatttacaccaggacgtgcacatgccatttcattttggctggcatacataaatctgtaatctttattgcatagatgagtttgcttgtgtgagcatgtttcttccagtgttcgcaaagattattatgaagtttatgtctcaaaaaaaaaaaaaaa

SEQ ID NO: 385340 - DNA, 2040 bp, Oryza sativa
gcggccgcaacttccactgtcaccaaagggggactcgccatctaccttgttcctcagttcatgcgaatttcatgcggtcctgggctgtgactgggagtagattgagggttgatctcgtttgcggagtaacaaatttgcaagcctacaactgctagggagaatttgactaaaaatggggtcgtgttgcagcagagctacgtctccagattctggtcgaggaggagcaaacggttatggctattctcaccagacaaaacctgctcagacaactcctagctataaccatcctcagccgccgccgccagctgaggtgaggtacacaccatcagcaatgaaccctccggtagtcccacctgtggttgccccaccgaagcccaccccagacacaattcttggaaagctgtatgacgatgtgcgctcggtttactcccttggaaaggaactcggaaggggacagtttggggtgacatacctgtgcacggagatcgctagtggtaagcagtatgcttgcaaatccatctctaagcgcaagcttgtgagcaaggccgacaaggaggacattcgccgggagattcagatcatgcagcacctatctggacaacaaaacattgtcgagttccggggagcatatgaggacaagagcaatgtccatgttgtcatggagctctgcgctggtggggagctgtttgatcggatcattgccaaggggcactactcagagcgtgcggctgctaccatctgcagggcagtggtgaatgttgtcaacatttgccattttatgggagtgatgcatcgtgatttgaaaccggagaacttcttacttgcaaccaaagaagagaatgcaatgctcaaagccactgattttggtctctcagttttcattgaagaaggaaaaatgtatagagacattgttggaagtgcttattatgttgctcctgaagtccttcggcggaattatggtaaagagattgatgtatggagtgcaggcgttattttgtacattcttctcagtggtgttcctccattttgggctgaaactgaaaagggaatatttgatgctattcttcaaggggagattgactttgagagtcaaccatggccatcaatatccgagagtgctaaagaccttgttagaaagatgttgacacaagatccaaagaaaagaattacttcggcccaagttctccaacatccctggctcagagatggagaagcatctgacaaacctattgacagcgctgttctttctaggatgaagcaattcagagcaatgaacaagctgaaaaagatggctctgaaggttattgcttcaaaccttaatgaggaggagatcaagggcctgaagcaaatgttcacaaacatggacacagacaacagcgggaccatcacatatgaagaactcaaagcaggattagccaaacttggatcaaagctttcagaagctgaagtaaagcagttgatggaagctgctgatgtagacggcaatggatccatcgactatgttgaatttatcactgccacaatgcatagacacaagctcgaaagagatgagcatttgtttaaggcattccagtattttgacaaagacaacagtggcttcatcacaagagatgaactggaatccgctttaatcgagcatgaaatgggcgatacgagtaccataaaggatattatatcagaagtcgacacggataatgatgggaggattaactacgaggaattttgcgctatgatgagaggaggggggatgcagcagcctatgaggctcaaatagtctgtttccttgtagaaaatgatgtacaattacattagtaaactgttttcgccttcttttttttgttccatggatggtagttgacggataaaaggtttaccctggacgcagcttttgcattgttgagatgattgtgtatattttcttgccttgcccgtgtatggtgtagtgatttgaatgtcctcccttttgtaagttgtttctgcaagtacacacaataaaagagcatttttgcacctcaaaaaaaaaaaaaaaattgcggccgc

SEQ ID NO: 385341 - DNA, 2788 bp, Oryza sativa
ctatttttttcatcctatcgattttctcgtgccgaattcggcacgagaaggatttcgagcccggtccctaggctcgatccggccgtgtcctttgctccgatcgagcgcgcgaggtctcgtaaggtccatcctgagcttgttgctgtggagtgcgcgattccgcgctcgatttcgtttcttccggcgcagatttcgtgtttttggcctagatttggcttgtgggtgaccgcctaggcgtttctcgcgtgtttcggctttttgtctgggatcgatttgtggctggatttgcttgttcctggctgcggagcttggatcttagcattagaaaccctcagattggggatttcctgccggaggaagctttttggaggagctgcctttgggaggaactcttccagttctgagggtttcggtgtttgttgctcgcctggctcgagaagaactgggaaatctcgtattttagggcgggttctagtagatttcgtgtagtggagagcaaaaagtttgtgtggttttggtggtcaagtctggtggtggaagcccctcaggccggagatttcctccttccggtggacgaccaaaggagccgcccttggaaggaatttcttgccatcccagaggttggggatttcctcacgcccaggaagccaagcaagggctgccttagcgaggaactcttccaattggacgggtttgcgcgtagcggtgcggctatataagtggaaatctgcatccctgggaaggatacaattgttttgaggctgggaactttggaattggtttgcataaggagttcttggaatggggaatcagtgccagaacgggactcttgggagtgattaccacaatcggttcccaagggagcatgccgttgggtacgttcagggggatagctacttggacttgaagaagttcgatgatacttggcctgaggtgaacaacttcaagcctactgctgctagtattctcaggcgggggttggatcctacatctatcaatgtccttgggcggaagacagcggacctaagggagcattatatcattggtcggaagcttggtcaggcccagtttggcacaacttacctctgtaccgagatcaatacagggtgtgagtatgcttgcaagaccatcccaaagcgcaagctcatcaccaaggaggatgtagaagatgtgcgccgtgagattcagataatgcaccatttgtcgggccacaagaatgttgttgcaatcaaggatgtctatgaggatgggcaagcggtgcacattgtgatggagctctgcgctggtggggagctctttgacaggattcaggagaaggggcattacagcgagcggaaggctgcagagcttataagaataattgtcagcattgtggctatgtgccattcgctcggggtgatgcaccgtgatcttaagccagaaaatttcctccttttggataaagatgatgatctgtcaataaaggcaatagattttggtctatccgtgttcttcaaaccaggtcaggttttcactgagctggttgggagtccatattatgttgctcctgaggtattgcacaaacgttatggaccagaatctgatgtgtggtcagctggagtgatactttacgttttgctgagtggagtgccaccattttgggcagagacacaacaaggaatatttgatgcagttctgaagggtcacattgattttcaatctgatccatggccaaagatatctgacagtgcaaaggatcttataagaaaaatgctctctcattgcccttcggagcgtttgaaggcccatgaagtgctaaggcatccttggatctgtgaaaatggagttgccactgatcaagctctggatcccagtgttatctctcggctcaaacaattctctgcaatgaacaagttaaagaagttggctctgagagtgatagctgagcgtctttcagaggaggagattgctgggttaagagaaatgttcaaggcagtggacacaaaaaatagaggtgttatcactttcggtgagcttagagaaggtttaagaagatttggcgctgaatttaaggatacagagattggtgatataatggaagcggcacacaacgacaataatgtaacaatccattatgaagaatttattgctgcaactctacctcttaacaagatagaacgtgaggagcacctgctggcagcttttacatattttgacaaagatgggagtggttatatcacagttgacaagcttcaacgagcttgtggagaacataacatggaggattcactccttgaagagattatttcagaggttgatcaaaacaatgacggccaaattgactacgccgaatttgtagccatgatgcaaggcagcaacgttggactagggtggcaaacaatggaaagcagtttgaatgtagcattaagagacgcacctcaagtacattgatgcacgaatgtatagattttgttctcttctcttgtccattcattcttcactacccaattcgggtctgtgacttgtatgagaagagatcaagtcaattcatttagttggtatttattccaagcaagtgtgagttgataagtagcgtagtctctatggagacaatagcatgagcatatagtggtggtatattggttgatgtagttgcaaggccgcctagcaattaaaaaagaacccaaaagaggtgcattcgctttgttggttgttctttcaacgacctgtattacgcaatgaaagtcgtcatgtttgcgttaaaaaaaaaaaaaaaaaaaaaaaaaaaaaaaaaaaaaattgcggccgc

SEQ ID NO: 385342 - DNA, 686 bp, Oryza sativa
  unsure (1)..(686): unsure at all n locations
ctgccttcccgacccacgcgtcccgtgctggaccccttgacatatctatgacagagatgggagtggttatatcacagttgacaagcttgaacgagcttgtggagaacataacatggaggattcactccttgaagagattatttcagaggttgatcaaaacaatgacgcccaaattgactacgccgaatttgtagccatgatgcaaggcagcaacgttggactagggtggcaaacaatggaaagcagtttgaatgtagcattaagagacgcacctcaagtacattgatgcacgaatgtatagattttgttctcttctcttgtccattcattcttcactacccaattcgggtctgtgacttgtatgagaagagatcaagtcaattcatttagttggtatttattccaagcaagtgtgagttgataagtagcgtagtctctatggagacaatagcatgagcatatagtggtggtatattggttgatgtagttgcaaggccgcctagcaattaaaaaagaacccaaaagaggtgcattcgctttgttggttgttctttcaacgacctgtattacgcaatgaaagtcgtcatgtttgcgtaactctaatctcaatgcttgcgttcctataatatctttaaagattataatattacatttccatgtcnnnnnnnnnnnnnnnnnnnnnnnnn

SEQ ID NO: 385343 - DNA, 1585 bp, Oryza sativa
  unsure (1)..(1585): unsure at all n locations
gccaagctcgaaattaaccctcactaaagggaacaaaagctggagctccaccgcggtggcggccgctctagaactagtggatcccccgggctgcaggaattcggcacgagccgcgtcgcttcccttccttcgcgcggcgctgctccggtagggttttagccggcgatctctcccctctcgcgcgctcggcgactgagaatggtcgaggtggaggaagtcagcaacaagatgcaggtgcagatgcgcctccaccccgccgcggcggcggaggaggaggacgccgacctcccgctccccgccctcttcgacaaggcgtcccacctccactccctcgcctccagctcctccctcgaccaggaagggatccgcaagggggtcgacctgctgcggcggtgcgacgagatggtcagtaaggtcggcctcttctcctccaacgagaccaaggatgacatctccaccgccaacctcaaatacctactcgtaccgtactaccttggggaaatgactgaaagggtagcgcaggaagatcggatcccagtccttaaggcgtcgcaggatcatttgaaggaattcatttctatctgtgaagcactggagcttatatcagaggatgagcttgaaatatctaggcagaagaacctgataccatggcaaatcgaagagcacagaaggttgcacggttcaagcgccaaaaggctgcagaaacaaagctctagaatcaaggagaggaaagaaaggcgtaggcgtcatgagagcagctgcttatcagctcctattgagctgggaggagatcttttgaggatgatggagaaggaaagagaaggcatggttagctactatctcattggctctatcgaaggctttgaccttcttgacatgttaaagaaggaagaagaaatcgttccggcagtaaaagaaggaaagcgaaggatggtaatgcatttgctcgtgaaatgcttgatgaacgtacaaaaagggctgaagcatggcaccataatgctgccaaccgtgcaccatactccaaaccagctgatccaatcacttgtgcaactaaccagtgaaagagagagaatggcagcacaagtttttcagccaagttataggttgccaacgatgagcatagaagaagctggcttacgtgagatgaaaatgatggagaaatggcaagaaagaactgccaagatgattcaagaatcaaactccgcatggcacaaggatggcagtcggtcagcccaagaggacgaggacgccgaagaggagaaagcgagaggatgggatgactggaaggacgataaccctcgtggtgcaggcaacaagaagctcactccctgtggctaaattatatgctatggcaattctattgaacttacatctgaaactgaagctcgtgtaaaaatatgtggtttttactaactttccttactgcggcatttgttgattgctgagtaataatgtgttccatatgtatattataattgtgcatggtttccttctgccaatatatgggcaaccaagtaatgccagaaaagctgatttgagaagcnnnnnnnnnnnnnnnnnnnnnnnnnnnnnnnnnnnnnnnnnn

SEQ ID NO: 385344 - DNA, 1340 bp, Oryza sativa
  unsure (1)..(1340): unsure at all n locations
gttgctgtcggccaaacactgcacacaccagctagctttccctccttatataaagccatgctcccaccgcttcttaacatcactgcaactcagcagcaagcaactaactccattttgctttgcattgccaccatgagagcgctcgccgtggtcgtggtggccacgcgctttgcggtggtggccgtgcgcggcgagcagtgcggcagccaggccggcggcgcgctctgccccaactgcctctgctgcagccagtacggctggtgcggatccacctccgcctactgcggctccggctgccagagccagtgctccggcagctgcggcggcggcggcccgaccccgccctccggcggtggcggcagcggcgtcgcctccatcgtgtcgcgctcgctcttcgaccagatgcttctccaccgcaacgacgcggcgtgcccggccaagaacttctacacctacgacgccttcgtcgccgccgccaacgccttcccgagcttcgccacaaccggcgacgccgccacccgcaagcgcgaggtcgccgcgttcctggcgcagacgtcgcacgagaccacgggcgggtgggcgacggcgcccgatggcccctactcgtggggctactgcttcaaggaggagaacaacggcaacgttgggtccgactactgtgtccagagctcgcagtgcccgtgcgccgccggcaagaagtactacggccggggacccatccagatctcctacaactacaactacggcccggcggggcaggccatcggctccaacctgctgagcaacccggacctggtggcgtcggacgccaccgtctccttcaagacggcgttctggttctggatgacgccgcagtcgcccaagccgtcgtgccacgcggtgatgacagggcagtggacgcccaacggcaacgaccaggcggcggggcgcgtgccgggctacggcgtggtgaccaacatcatcaacggcggcgtggagtgcggccacggcgcggacagcagagtcgccgaccggattgggttctacaagcgctactgcgacatgttgggcgtcagctacggcgccaacttggactgctacaaccagaggcctttcaactcctaatagctcgttctagcttcaagctttgcactgataaccactgatcggatgctttacatcgatgaataagaattcatccgagcagacaaataatacaatcatcagtaatgcccacaatggctgatggaaaatatattgtgcttccgattattaataattaatacttctacataattaaaannnnnnnnnnnnnnnnnnnnnnnnnnnnnnnnnnnnnnnnnnnnnnnnnnnnnnnnnnn

SEQ ID NO: 385345 - DNA, 1793 bp, Oryza sativa
  unsure (1)..(1793): unsure at all n locations
aaataataatgtcttgccttttgtagatccgcgtggctcgtactgctacatgttcatatcgctgcctgtttcttcgatttctgacaaaaaaagcgttcgtgttctgacaaaatttcggtttggtttttctacagtagaacgtcagcaatggagaacatgagatctgagaactttaaccaaggtgtttcaatggagggcgtcaagcatgcgcccgagatggcaaacaccaacaggagggctctgcgggacatcaagaacatcatcggagcacctcaccagcacatggctgtgagcaagaggggtttgctagataaacctgccgctaagaaccaatctggacaccgtcctatgacgaggaaatttgctgcaacactggcaaaccaaccctccattgctcccctggcacccattggaagtgagaggcaaaaaaggacagcagattctgcatttcatggtccagcagatatggagtgcaccaagatcacatctgatgatttgccattgccaatgatgtctgagatggacgaagtgatgggttctgaactgaaagaaattgagatggaagacattgaggaggcagcacctgatattgacagctgtgatgcaaataactcccttgcagtagttgaatatgttgatgaaatttacagcttctacaggaggagtgagggtttgagctgtgtctctcctaattacatgttgagccaaaatgacataaatgagaagatgcgcggcattctcatcgattggctgatagaggtgcattacaagttagagctattggatgagaccctcttccttactgtgaatatcatagaccgattcttggctcgcgaaaatgtggtgcgaaagaagcttcagttggttggcgtgactgccatgctgctcgcctgcaagtatgaagaagtgagcgttcctgtagtggaggatcttatcctaatctgcgaccgcgcctacacaagaacagatattctcgaaatggagaggatgattgtaaacactcttcagtttgatatgtcagttccaactccatactgtttcatgagaaggttcctcaaggctgcacaatctgacaagaagcttgagctcatgtctttcttcataattgagctgagccttgtcgagtatgagatgctcaaattccagccgtcaatgctggcggctgctgccatctacactgctcagtgcaccattaatgggttcaagtcctggaacaaatgctgtgagctgcatacaaaatactctgaagaacagctgatggagtgctccaagatgatggttgagctccaccaaaaagcaggacatgggaagcttactggagttcatagaaagtacagcacatttaggtatggttgccccgcaaaatcggagcccgccgtcttcttgctcaagagcgtggcactgtaactgattggctcactatacacactctaactacttccatggaaagagggaatgaggggtgtatatatagaggccggctgctttgatgaaattacagagaagagatctgcatatatgcaacagctgttgcaaaggattatttgatgggtgggttgggttggtgcaatgtgtgcctttacttccaataacttaacatcgtcgagacattgatctgcgtttggatgttttaggttgcttccaattaaatctgttggaacttgatttcatgttgtatttaagagaattattcttcatttgttctgtggcacatgcaatttgccaataaacattaattgaattgcctgttnnnnnnnnnnnnnnnnnnnnnnnnnnnnnnnnnnnnnnnnnnn

SEQ ID NO: 385346 - DNA, 1067 bp, Oryza sativa
gcaattttgcaaagcgagaaattccacacaggttacaccagtatatacgcatcttgctaaaccgactactgatcgagatcgctatggcggaggaggcggctagcaaggcagcgccgaccgatgcgctgtcgtccgtggcggcggaggcgccggtgacgagagaacggccggtccgagcggacttggaagtgcagattccgaagccctatttggcccgagctctggttgctccggacgtgtaccatcctgaaggaaccgaggggcgtgaccaccggcagatgagtgtgctgcagcagcatgtggctttcttcgacctggatggcgacggtatcgtttatccatgggaaacttatggaggactacgggaattgggcttcaacgtgattgtttcgttctttttggcgatagccataaacgttggtctaagctacccaactctgccaagctggataccatctctcctgttccctatacacataaaaaacatccacagggctaagcacggcagcgatagctcgacgtacgacaacgagggaaggtttatgccggtcaatttcgagagcatcttcagcaagaacgcccgcacggcgccggacaagctcacgttcggcgatatctggcggatgaccgaaggccaaagggtggcgctcgacttgcttgggaggatcgcgagtaagggggagtggatattgctctacgtgcttgcgaaagatgaggaaggattcctcaggaaggaggctgttcgccgctgcttcgatgggagcctattcgagtcgattgcccagcagagaagggaggcacatgagaagcagaagtagcctcctaatttcatcgtcccgggacctgggatgtgcttgattgcttgtgtgtgttgttgtgtggactatagctatagccacatcatgtttgtccatctgaaaaaacaatggaaataaggtttaccggttggaacatacattatgtactatccatgtgattattgaaatgtgtctgtaacctgaaagtgtgattgacatataaaattctgtgattgaagtaaaggtaagcattaaaaaaaaaaaaaaaaa

SEQ ID NO: 385347 - DNA, 1188 bp, Oryza sativa
  unsure (1)..(1188): unsure at all n locations
ttcaccggcagcacacgcgcgcacacatggccggctcgtcagccgcaacgtcgtgtgctcggttcctggcattgctggcgacatgcctcctctggaacgaggccgcatcgttcacggcgtccggctggaacaaggcgttcgccaccttctacggcggcagtgacgcttcaggaacgatgggtggggcgtgtgggtacggggacctgtactcgacggggtacgggacgaacacggcggcgctgagcacggtgctgttcaacgacggggcgtcgtgcgggcagtgctaccggatcatgtgcgactaccaggcggacaggcggttctgcatctccggcacgtcggtgaccatcacggcgaccaacctctgcccgccgaactacgcgctccccaacgacgccggcgggtggtgcaacccgccgcggcagcacttcgacatggccgaaccggcgttggctcaagatcggcgtctacgtcggcggcatcgtgccggtgatgtaccagcgggtgccgtgcgccaagcagggcggggtgaggttcaccatcaacggcagggactacttcgagctggtgctcgtctccaacgtcggcggcgtcggctccatccagtcggtgtcgatcaaggggtcgaggaccgggtggatggccatgtccaggaattggggcgtcaactggcagtccaacgcctacctcgacggccagagcctgtcgttcaaggtcaccagcagcgacggccagacgctcaccttcctcgacgtcgccccggcgggctggacgttcggccagaccttctcgacctcacagcagttctcttaagtaattaaatattaatgagttattactggtccattcatatatgtgtttaattccgagcgtatattatcatcggcgtcggcgtgtaaagactaaagatatattactagtagctgtttgggttgcccacaagtttggagcatgcgcgcacaagtgtttggtgtggcgagctatatatatgatttgcaagctaaggacacctgcttttttcaatgcgaattaaaacggtatatatatgtacagtttgcgaggtgcttgccaatcgatgatcggcatgctttactgtaacgaccacacaaggagttttcactttcctgaactattactgtccatagtttcgtccatctgattggctnnnnnnnnnnnnnnnnnnnnnnn

SEQ ID NO: 385348 - DNA, 1526 bp, Oryza sativa
ctcctctttataacccgtctcccttctcatctttttctccacagtcgcctcctcccctgccaaaccagtctcccccaaatctcctttgcgtcctctcgattcctcagcgaccatgtcggcctactgcggcaagtacaaggacgagctcatcaagaatgctgcctacattggcactcctggcaagggtatccttgctgcagatgagtccactggcaccattggcaagcgctttgccagcatcaatgtcgagaacgttgaggagaaccgccgctctctccgcgagctgctcttcaccacccctggtgccctccagcacctaagtggtgtgatcctcttcgaggagaccctgtaccagaagaccaaggacggcaagcccttcgtcgatgtcctcaaggagggtggtgtcctccctggcatcaaggttgacaagggtaccgttgaggttgccggcaccaacaaagagaccaccacccagggccacgatgatcttggcaagcgttgcgccaagtactacgaggccggtgcccgcttcgccaagtggcgtgctgtcctcaagattggccccaacgagccatcgcagctttccattgacctgaatgctcagggtcttgctcgctatgccatcatctgccaggagaacgggctggtgccgattgtcgagcctgagatccttgtcgatggctctcatgacattgagcgctgtgcctatgtcaccgagaaggtcctcgctgcctgctacaaggccctcaacgaacaccatgtcctcctggagggttccctcctgaagcccaacatggtcaccccaggatctgaatccaagaaggtttcccctcagctcatcgccgagtacaccgtccgcgccctccagaggactgtccctgctgccgtgcctgccattgtcttcctctctggtggacagagcgaggaggaggcgaccgtgaacctcaacgccatgaacaagctcagcaccaagaagccgtgggctctgtccttctccttcggccgtgctctccagcagagcacgctcaaggcctggggcggcaagacggagaacgtggtgaaggcgcagaaggccttcatcaccaggtgcaaggccaactctgaggctacccttggtacataccagggtgatgctgtgctcggcgagggtgcctctgagagccttcacgtcaaggactacaagtactgatctgcttctggtggtggctgaagatccgattggacatcctccgtatgcatatttagggttctgagtgtggtttggctatcaagcgtccaatcttacgggtatcaaaaacttttgtcgcaataatctgaacctgtgctttttaataattaatacctgtcatcggtagtagttttttggtattcctgtaatcaaatgctgcgtatggtaaattggagcagcggctttaattccatgctatctttttattgttattttctgctgtactcctatgttaattaaaccttttacctaaaaaaaaaaaaaaataaaaaaaccccaaaaaaaaaaaaaaccaaaa

SEQ ID NO: 385349 - DNA, 1432 bp, Oryza sativa
  unsure (1)..(1432): unsure at all n locations
ggtcacccccctccccctcccttctcgcctcattccccacagccgccgcctccttcctctcctcgatctccctattcgtcgtagcctcctccctcgttcgctccgcccgcaaccatgtcggcctactgcggcaagtacaaggacgagctcatcaagaacgctgcctacattggcactcctggcaagggtatccttgctgcggatgagtccactggcaccattggcaagcgcttcgccagcatcaacgtcgagaacgttgaggagaaccgccgctccctccgcgagctcctcttctgcacccctggcgccctccagtacctcagcggcgtgatcctcttcgaggagaccctgtaccagaagaccaaggatggcaagcccttcgtcgatgtcctcaaggagggtggtgtcctcccgggcatcaaggtggacaagggcacaatcgaggttgccggcaccgagaaggagaccaccacccagggccatgatgaccttggcaagagatgcgccaagtactacgaggctggtgcccgcttcgccaagtggcgcgccgtcctcaagatcggccccaacgagccgtcgcagctcgccattcatctgaatgcgcagggcctcgctcgctacgccatcatctgccaggagaacgggctggtgccgatcgtcgagcccgagatccttgttgatggccctcacgacatcgacccgtgcgcctacgtctcggaggtggtcctcgctgcgtgctacaaggccctcaacgagcaccatgtcctcctcgagggtaccctcctcaagcccaacatggtcaccccaggctctgacgccaagaaggtgtctcccgaggtcatcgctgagtacaccgtccgcaccctccagaggaccgtccccgctgccgtgcccgccatcgtcttcctgtccggtgggcagagcgaggaggaggcgaccctgaacctcaacgccatgaacaagctcagcaccaagaagccgtggtcgctgtccttctccttcggccgtgccctccagcagagcacgctcaaggcctggtccggcaaggcggagaacattgagaaggccagggcggccttccttaccaggtgcaaggccaactccgaggctaccctcggtacatacaagggtgacgctgtcctcggcgagggcgcctccgagagccttcacgtcaaggactacaagtactgatttgccttgggaggtgctggctaccattggaacattctgcggctgttgcttaatgtggttttgatatctagagggcaatctatggttatctaaaatgtcttgtcgtaataattctggaacctttttgtgtaacacattaccaaatatcaattgcctggattgaaatatcgtttttatcaaaaaaaaaaaaaaaannnnnnnnnnnnnnnnnnnnnnnnnnnnnnnnnnnnnnnnnnnnnnn

SEQ ID NO: 385350 - DNA, 1509 bp, Oryza sativa
tctcctctcgaaccttccaaagtccaaaccctagtggtgacctcgcctcggcctcgaaaccctagccgcagatctcgcctctccttgccccgcgccatggacgacgacttcgagatgccgccgcccggcgccgacgacgacttgatgatgggggaggacgggatgggcgacttcggcggcgccgacgggccgccgctgaaggtcggagaggagaaggagatcgggaagcagggtctcaggaagaagctgctcaaggagggcgaggggtgggagacccccgaggtcggcgacgaggtcgaagtacactacactggcacactgcttgatggaaagaagtttgattcaagccgtgaccgtgggacacccttcaagtttaagttgggacaaggtcaagtgataaaaggttgggatctaggtatcaagaccatgaagaaaggcgaaaatgctgttttcaccattcctcctgatttggcctatggtgaatctggttcacctccaactattccagccagtgccacactgcagtttgatgttgagttgctttcttggacaagtgtcaaggacatttgccaagatggtggtatattcaagaagatactgaaggagggagtccgcccacgcgtccgaaaagatcttgatgaagtatttgtgaaatatgaggctcggcttgaggatggcactgttatatcaaagtctgagggcgctgaatttactgttaaagatggtttcttctgccctgcgctggcgaaagctgtcaaaaccatgaaaaaagcagagaaagtgctccttacagttaagccacaatatggatttggtgagaatggtagaccagcagctggtgaggaaggtgctgtgccaccaaatgccactcttcttgttaatcttgagttggtttcatggaaaacagtcacagaaataggtgatgataagaaaatcttgaagaaagttctgacggagggtacagggtatgagcggcccaatgaaggtgcagttgttaaagtcaaaataactggaaaacttcaggatggtacaatatttacaaagaaggggcatgatgaaccagagccatttgaattcaagactgatgaagaggaggtcattgatggtattgaccgtgctgtgctaaacatgaagaatggcgaggttgctcttgtaacaattcctcctgaatacgcatttggttctactgagtcaaagcaggatctcgctgtagttccaccaaacagcactgtgatttatgaggttgagcttgtatcattcgtgaaggataaagaatcttgggacttgaacaataccgagaagattgagactgctggggcaaagaaagaagaggggaatgcattgttcaagctgggcaaatatgtcagggcttcaaagcgttatgagaaggctgcaaaattcattgagtatgacaactctgaggctacccttggtacataccagggtgatgctgtgctcggcgagggtgcctctgagagccttcacgtcaaggactacaagtactgatct

SEQ ID NO: 385351 - DNA, 749 bp, Oryza sativa
  unsure (1)..(749): unsure at all n locations
ccacgcgtncgcccacgcgtccgcgaccccttgggggcctgtgcccattggccagcctgagatccttgtcgattgctttcattacattgagcgctgtgcctatgtcaccgagaaggtgctcgctgcctgctacaaggccctcaacgaacaccatgtcctcctcgtaccctcgatcctcaagcccaacatggtcaccccaggctctgacgccaagaaggtgtctcccgaggtcatcgctgagtacaccgaccgcaccctcagaggaccgacccgctgccgtgcccgccatcgtcttcctgtccggtgggcagacggaggaggaggcgaccctgaacctcaacgccatgaacaagctcagcaccaagaagccgtggtccgtgtcttctcttcggccgtgcctccacgagagcaccgtcaaggctggtccgacggagacatgagagcaggcctctacaggtcagcaactcaggctgctcgtacatacaaggtgacgctgtccctgagggcctccgagagctcacgtcaagactacaagtactgatttgccttggaggtgctggctgccattggaacattctgcggctgttgcttaatgtggttttgatatctagagggcaatctatggttatcttaaatgtcttgtcgtaataattctggaacctttttgtgtaacacattaccaaatatcaattgcctggattgaaatatcgttttaatcgaaaaaaaaaaaaaaaactcgtgccgaattc

SEQ ID NO: 385352 - DNA, 658 bp, Oryza sativa
  unsure (1)..(658): unsure at all n locations
tcccgttggaccaganccgaggaaggaaggcgacgctgaaacntgaaccccttgaacaagctccagcgccaagaaccctggtcnctgtccttctcctttggccntgccctgcagcagagcacgctcaaggccctgggctggcaagacggagaacgtagagaaggccagggcggccttcctcgtcaggtgcaaggccaactccgaggctaccctgggtacttacaagggtgatgctgtcctcggcgagggcgctgctgaaagcctgcacgtcaaggactacaagtactgatctgcatcaggcgctggcctgctatggcttggctacctgatcgattgcccattctggggccgttacttaattcggttttgatatctagaggctctaacaggattcacaatttcggatcggaatttcagaattttttccctttccgatagatcgaaccctggggcacaatatatctgtggttatctaaaagccttgtcttaataatccagaaccttgtttttttcttgtaaaatatttgctgatgaacatcagctggcccggagtttttgtttttatcaatcactttgtaactgtctgatttgcccggtgctgtgtgattttgttgaatgaaattaacttcacttctttgagtttaaaaaaaaaaaaaaa

SEQ ID NO: 385353 - DNA, 1077 bp, Oryza sativa
  unsure (1)..(1077): unsure at all n locations
ccacgcgtccgcccacgcgtccgcccacgcgtccgcccacgcgtccgcttcaggatggtacaatatttacaaagaaggggcatgatgaaccagagccatttgaattcaagactgatgaagaggaggtcattgatggtattgaccgtgctgtgctaaacatgaagaatggcgaggttgctcttgtaacaattcctcctgaatacgcatttggttctactgagtcaaagcaggatctcgctgtagttccaccaaacagcactgtgatttatgaggttgagcttgtatcattcgtgaaggataaagaatcttgggacttgaacaataccgagaagattgagactgctggggcaaagaaagaagaggggaatgcattgttcaagctgggcaaatatgtcagggcttcaaagcgttatgagaaggctgcaaaattcattgagtatgacagctcatttagcgaagatgagaagaaacaatccaagcaactgaaggttacctgcaacttgaacaatgctgcctgcaagctgaagctgaaagattacaagcaagctgagaagctttgcaccaaggttctggaacttgacagccaaaatgtcaaggctttatacaggagggcccaagcttacatgcaacttgctgacctagagttagcagaggtggatattaagaaggcacttgaaattgatcctgataacagggatgtgaagttgacatacaagaacctcaaggaaaaggtcaaggagtacaacaagaaggatgccaaattctacagcaatatgttcgccaagatgaccaagcagccagccgaagacggcaaagctggatctggagctgaatcgaagcaaggatcggaacctgttactgctgcctaaggacaggacactcacgacatatcttagattttgtgtgctggctaatctttgttctagtggtgcactgatgagaaacgttacttcccaagttgtcgggcgatgatgattcttgttgagattttcaaattgcaatccatatttgaaccaatctcgtcaagtttctagtgtctttctggatgaatgttccaccnnannnnnnnnnnnnnnn

SEQ ID NO: 385354 - DNA, 585 bp, Oryza sativa
  unsure (1)..(585): unsure at all n locations
gggggantccgcccngncgcatttttcttttggggaaaggggagggggggggcccggacctaaacccacgaaaagttagcacaggaccgggggggtggcttttccttcgccgggtttccagcagagcaggtcaaggcctgggcggcaagacggagaacgtggtgaaggcgcagaagccttcatcaccaggtgcaaggccaattctgaggtaacccttggtacataccagggtgatgctgtgctcggcgagggtgcctctgagagccttcacgtcaaggactacaagtactgatctgcttctggtggtggctgaagatccgattggacatcctccgtatgcatatttagggttctgagtgtggtttggctatcaagcgtccaatcttacgggtatcaaaaacttttgtcgcaataatctgaacctgtgctttttaataattaatacctgtcatcggtagtagttttttggtattcctgtaatcaaatgctgcgtatggtaaattggagcagcggctttaattccatgctatctttttattgttaaaaaaaaaaaaaaaaaaannnnnnnnnnnnnnnnnnnnnnnn

SEQ ID NO: 385355 - DNA, 592 bp, Oryza sativa
tcgctagaccccatttcggtgcttaaccaaactgaggataatatcagttcatccacagcaatgtcggcctactgcggcaagtacaaagatgagctcataaaaaatgctgcctacattggcaccccgggcaagggtatcctcgccgcggacgagtccactggcaccatcggcaagcgcttcgccagcatcaatgtcgagaacgtcgaggagaaccgccgctgccctccgcgagctcgctcttctccacccctggcgccctccagcaccatcagcggcgtgatcctcttcgacgagaccctgtaccagaagaccaaggacggcaagcccttcgtcgatgtcctcaaggagggccggtgtccctcccccggcatcaaggtggacaagggcaccgtcgaggtcgccggcaccgacaaggagaccaccacccagggccacgatgactgcagcgtgccagactcaggcggccgtcgcagtggtcttctagatgccacagctgagttcatgcgatgtagctgtgttgctattcagaacgctggcatgtagctgactgcatgttatacatacgtgcatgacgagagctgtgctgtcagct

SEQ ID NO: 385356 - DNA, 2373 bp, Oryza sativa
  unsure (1)..(2373): unsure at all n locations
ggaaaaatggggtgcccatgcggccctgcccaatagcgttgctgtacctttcagctttataatctcgcccctcgcgagagagactccccccatcctgcagactcgccccactctcttgctcagctcctcctcttcatccagtcctcaaaactctctctgatctctctctcttgctgaaaattctccgcacactccggtgggcttaagcggtggcggcgtctcgcctgggtgggcgagatccctctcttgctcgtccgcaaggtcgctccccctgcgagtccaatctactgacgagctgggaggagcaaaggagggggcaattggagctccgctcggttccaattcagccccaattttgagccccccggctgcggggttcggccagttgagacgccatgtatcgggtgaagagcgagagcgactgcgagatgatccatcaggagcagatggactcgccggtggccgacgacggcagcagcggggggtcgccgcaccgcggcggcgggcccccgctgaagaaggggccatggacgtcggcggaggacgccatcctggtggactacgtgaagaagcacggcgaggggaactggaacgcggtgcagaagaacaccgggctgttccggtgcggcaagagctgccgcctccggtgggcgaaccacctgaggcccaacctcaagaagggggccttcaccgccgaggaggagaggctcatcatccagctccactccaagatggggaacaagtgggctcggatggccgctcatttgccagggcgcactgataatgaaataaagaattactggaatactcgaataaagagatgccagcgagctggcctacccatctatcctaccagcgtatgcaatcaatcctcaaatgaagatcagcagtgctccagtgattttgactgtggcgagaatttgtcaaacgatcttctgaatgcaaatggtctttacctaccagattttacctgtgacaatttcattgctaattcagaggctttaccttatgcaccacatctttcagccgtttctataagcaatctccttggccagagctttgcatcaaaaagctgtagcttcatggatcaggtaaaccagacagggatgctaaaacagtctgatggtgtgcttcctggattgagcgataccatcaacggtgtgatttcctcggtggatcaattctcaaatgactctgagaagctcaagcaggctgtgggttttgactatctccatgaagccaactctaccagcaagattattgcacctttcgggggtgcacttaatggcagccatgcctttttaaatggcaatttctctgcttctaggcccacaagtggtcctttgaagatggagctcccttcactccaagatactgaatctgatccaaacagctggctcaagtacactgtagctcctgcgttgcagcctactgagttagttgatccctacctgcagtctccagcagcaaccccttcagtgaaatcagagtgcgcgtcgccaaggaatagtggccttttggaagagttgattcatgaagctcagaccctaagatccgggaagaaccaacagacatctgtgataagttctagttcttctgtcggtacgccatgtaatactacggttcttagcccagagtttgatatgtgtcaggaatactgggaagaacaacatcctggtccattcctcaatgactgtgctcctttcagtggcaattcattcactgaatccacccctcctgttagcgctgcatcgcctgacatctttcagctctccaaagtttccccagcacaaagcacttcaatgggatctggagagcaagtaatggggcctaaatatgaacctggggacacttcacctcatcctgaaaacttcaggccagatgcattgttttctgggaatacagctgatccatcagttttcaacaatgccatagcaatgcttctgggcaatgacttgagtatcgattgcagacctgttcttggcgacggtatcatgttcaattcttcctcgtggagcaacatgccacacgcctgtgaaatgtcagaattcaaatgaattctgtatttggtatttgccagacgctaaagcagattcttggtatcgttcttgctcattgtttggatcataacttgaggaagatctcgtcggttgtaattctgcattgctgacagagtccttgatggcatgcaggcactatcagatgttctcttatgcgactagcccttttgtccaataaagtagtgcatggagataagccggttaattattgttttcttttttgtattagagaaccctttttgtcatctctattgccggaattctgttggaaattcgtcatgtttgtttgnnnnnnnnnnnnnnnnnnnnnnnn

SEQ ID NO: 385357 - DNA, 1907 bp, Oryza sativa
  unsure (1)..(1907): unsure at all n locations
gtccgnattcccggtcgccccgcgtccgcccgcgtccgcccgcgtccgcccacgcgtccgcccacgcgtgcggttcattagtcctacaacaacatggcatccataaatcgccccatagttttcttcacagtttgcttgttcctcttgtgcgatggctctctagcccagcagctattaggccagagcactagtcaatggcagagttctcgtcgtggaagtccaagagaatgcaggttcgataggttgcaagcatttgagccaattcggagtgtgaggtctcaagctggcacaactgagttcttcgatgtctctaatgagcaatttcaatgtaccggagtatctgttgtccgtcgagttattgaacctagaggccttctactaccccattacactaatggtgcatctctagtatatatcatccaagggagaggtataacagggccaactttcccaggctgtcctgagacctaccaacagcagttccaacaatcagggcaagcccaattgaccgaaagtcaaagccaaagccataagttcaaggatgaacatcaaaagattcaccgtttcagacaaggagatgttatcgcgttgcctgctggtgtagctcattggtgctacaatgatggtgaagtgccggttgttgccatatatgtcactgatatcaacaacggtgctaatcaacttgaccctcgacagagggatttcttgttagctggaaataagagaaaccctcaagcatacaggcgtgaagttgaggagtggtcacaaaacatatttagtggctttagcactgaactgcttagcgaggcttttggcgtaagcagccaagtggcaaggcagctccagtgtcaaaatgaccaaagaggagaaattgtccgtgtcgaacacgggctcagtttgctgcagcccatatgcatcattgcaggagcaggaacaaggacaagtgcaatcaagagagcgttatcaagaaggacgaatatcagcaaagtcaatatgggagtggctgctctaacggtttggatgagaccttttgcaccatgagggtaaggcaaaacatcgataatcctaaccgtgctgatacatacaatccaagagctggaagggttacaaatctcaacagccagaatttccccattcttaatcttgtacagatgagtgccgtcagtaaagtaaatctataccagaatgcactcctttcaccattttggaacatcaacgctcacagcgtcgtgtatattactcaaggccgtgcccgggttcaagttgtcaacaacaatggaaagacagtgttcaacggcgagcttcgtcgtggacagctgcttattgtaccacaacactatgcagttgtaaagaaggcacaaagagaaggatgtgcttacattgcattcaagacaaaccctaactctatggtaagccacattgcaggaaagagttccatcttccgtgctctcccaactgatgttctagcaaatgcatatcgcatctcaagagaagaggctcagaggctcaagcataacagaggagatgagttcggtgcattcactcccctccaatacaagagctaccaagacgtttataatgtggcggaatcctcttaagttggcaatgcggataaagaataactaaataaataaataaataaattgcaagcaattgcgttgctgctatgtactgtaaaagtttcttataatatcagttctgaatgctaaggacatccctcaagatggtctttctatttttgtgttcccgttccaatgtactgttggtatcctcttggagattcatcaatatgagaaaacagagaatggacaaccctcccttatcttatggaaaaaaaaaaactcgagggggggcccggtacccaattcgccctatagtgagtcgtattacaattcnnnnnntgcnnc

SEQ ID NO: 385358 - DNA, 1758 bp, Oryza sativa
  unsure (1)..(1758): unsure at all n locations
cccacgcgtccgcccacgcgtccggttctagatcgcgagcggccgcaaaaccatccaagttcattagtactacaacaacatggcatccataaatcgccccatagttttcttcacagtttgcttgttcctcttgtgcaatggctctctagcccagcagctattaggccagagcactagtcaatggcagagttctcgtcgtggaagtccaagagaatgcaggttcgataggttgcaagcatttgagccaattcggagtgtgaggtctcaagctggcacaactgagttcttcgatgtctctaatgagcaatttcaatgtaccggagtatctgttgtccgtcgagttattgaacctagaggccttctactaccccattacactaatggtgcatctctagtatatatcatccaagggagaggtataacagggccaactttcccaggctgtcctgagtcctaccaacaacagttccaacaatcaggccaagcccaattgaccgaaagtcaaagccaaagtcaaaagttcaaggatgaacatcaaaagatccaccgtttcagacaaggagatgtaattgcattgcctgctggtgtagctcattggtgctacaatgatggtgaagtgccagttgttgccatatatgtcactgatctcaacaacggtgctaatcaacttgaccctaggcaaagggatttcttgttagctggaaataagagaaaccctcaagcatacaggcgtgaggttgaggagcggtcacagaacatatttagtggctttagcactgaactacttagcgaggctcttggcgtaagcggccaagtggcaaggcagctccaatgtcaaaatgaccaaagaggagaaattgtccgtgtcgaacacgggctcagtttgctgcagccatatgcatcattgcaggagcaggaacaaggacaagtgcaatcaagagagcgttatcaagaaggacaatatcagcaaagtcaatatggaagtggctgctctaacggtttggatgagaccttttgcaccctgagggtaaggcaaaacatcgataatcctaaccgtgctgatacatacaatccaagagctggaagggttacaaatctcaacacccagaatttccccattcttagtcttgtacagatgagtgcagtcaaagtaaatctataccagaatgcactcctttcaccattttggaacatcaacgctcacagcgtcgtgtatattactcaaggccgtgcccgggttcaagttgtcaacaacaatggaaagacagtgttcaacggcgagcttcgccgcggacagctgcttattataccacaacactatgcagttgtaaagaaggcacaaagagaaggatgtgcttacattgcattcaagaccaatcctaactctatggtaagccacattgcaggaaagagttccatcttccgtgctctcccaaatgatgttctagcaaatgcatatcgcatctcaagagaagaggctcagaggctcaagcataatagaggagatgagttcggtgcattcactccaatccaatacaagagctaccaagacgtttataatgcggcagaatcctcttaggtcggcttgcggataaagaataactaaataaataaattgcaagcaattgttttgctgctatgtactgtccagtctttcgactaatgatgataaagcctctctttatccttaaaaaaaaaaaaaaannnnnnnnnnnnnnnnnnnnnnnnnnnnnnnnnnnnnnnnnnnnnnnnnnnnnn

SEQ ID NO: 385359 - DNA, 1685 bp, Oryza sativa
  unsure (1)..(1685): unsure at all n locations
cggaaaaagcattgagttcagtcccacaaaaacatggcaaccatcaaattccctatagttttctccgtcgtttgcttgttcctcttgtgtaatggttcgttagcccaacttcttagccaaagtactagtcaatggcaaagttctcgccgtggaagtccaagagagtgcagatttgatcggttgcaagcatttgagccgattcgcactgtaaggtcccaagctggtacaactgagttttttgatgtctctaatgagttgtttcaatgtactggagtatttgttgtccgtcgagttatcgaacctagaggtcttctgttacctcactactccaatggagcaactttggtatatgtcatccaaggcagaggtataacaggaccaactttcccaggatgtcctgagacctatcaacaacagtttcagcaatccgagcaagaccaacaattggaaggccaaagccaaagccataaatttagagatgaacatcaaaagatccaccgttttcaacagggggatgtagttgcattgcctgctggtgttgctcattggtgctacaatgatggtgatgcaccaaggttgttgccatatatgtcactgatatatacaatagtgctcatcaacttgatcctagacacagggatttctttttagctggcaacaataagataagtcaacaattgtatagatatgaggcaagggacaattcgaagaacgtctttggtggatttagtgttgaactacttagcgaggctcttggcataagcagtggagtagcaagacaactccagtgccaaaatgaccaaagaggagaaatagttcgtgttgttgagcatgggcttcccttgctccacccatatgcatcgttgcaagagcaacaacaagaacaggtgcaatcgagagactatggccaaacacaatatcaacaaaaacaacttcaaggtagttgctctaatggtttggatgagaccttttgtaccatgagggtaaggcaaaatatcgacaacccaaacctcgcagatacatacaaccccagagcaggaaggatcacatatctaaatggccaaaagttccccattcttaatcttgtacagatgagtgccgttaaagtaaatttatatcagaacgcactcctttcacctttttggaacatcaacgctcatagtgtcgtgtatattactcaaggtcgtgcccgagttcaagtcgtcaacaacaatggaaagacagtgttcgatggagagctccgtcgtgggcagcttctaattataccacaacaccatgtagtcattaaaaaggcacaaagggaaggatgctcatatattgcattgaaaaccaaccctgactccatggttagccacatggcaggaaagaattccatcttccgcgcacttcctgacgatgttgtagcaaatgcatatcgtatctcaagagaagaagctaggaggctcaagcacaacaggggagatgagttaggtgtgttcactcctagtcatgcctacaagagctaccaagacatatctgtgagtgcataaccaagaaatgtcaatcataggcttggattgctaaggatggttttcaaataaatcataagaaataaaagagtgcatgttgttgcaaaaaaaaaaaaaaaaaactcgagggggggcccggtacccaattcgccctatagtgagtcgtattacaattnc

SEQ ID NO: 385360 - DNA, 653 bp, Oryza sativa
  unsure (1)..(653): unsure at all n locations
aaacatccaggggaggaaaatttaaaccggattcccttttatttgacggggggcgtcaagtaatttaaccggaagcatccttcaccattgggaaatcaagtcacagtttggtatatattcaagccggccgggttcaagtttcaacaacaatggaagacagtgttcaacggcgagttcccgcggacagtgcttattataccacaacactatgcagttgtaaagaaggcacaaagagaaggatgtgcttacattgcattcaagaccaatcctaactctatggtaagccacattgcaggaaagagttccatcttccgtgctctcccaaatgatgttctagcaaatgcatatcgcatctcaagagaagaggctcagaggctcaagcataatagaggagatgagttcggtgcattcactccaatccaatacaagagctaccaagacgtttataatgcggcagaatcctcttaggtcggcttgcggataaagaataactaaataaataaattgcaagcaattgttttgctgctatgtactgtccagtctttcgactaatgatgataaagcctctctttatccttaaaaaaaaaaaaaaaaaaaactcgagggggggcccggtacccaattcgccctatagtgagtcgtattacaattnc

SEQ ID NO: 385361 - DNA, 896 bp, Oryza sativa
  unsure (1)..(896): unsure at all n locations
cggacgcgtgggcggacgcgtgggcggacgcgtgggcggacgcgtgggtgcaatcaagagagcgttatcaagaaggacaatatcagcaaagtcaatatggaagtggctgctctaacggtttggatgagaccttttgcaccctgagggtaaggcaaaacatcgataatcctaaccgtgctgatacatacaatccaagagctggaagggttacaaatctcaacacccagaatttccccattcttagtcttgtacagatgaggcgtcagtcaaagtaaatctataccagaatgcactcctttcaccattttggaacatcaacgctcacagcgtcgtgtatattactcaaggccgtgcccgggttcaagttgtcaacaacaatggaaagacagtgttcaacggcgagcttcgccgcggacagctgcttattaataccacaacactatgcagttgtaaagaaggcacaaagagaaggatgtgctgcctttgcattcaagaccaatcctaactntatggtaagccacattgcaggaaagagttccatcttccgtgctctcccaaatgatgttctagcaaatgcatatcgcatctcaagagaagaggctcagaggctcaagcataacagaggagatgagttcggtgcatccactccaatccaatacaagagctaccaagacgtttataatgcggcagaatcctcttaggtcggcttgcggataaagaataactaaataaataaattgcaagcaattgttttgctgctatgtactgtccagtctttcgantaatgatgataaagcctctctttaaaaaaaaaaaaaaaaaaaaaactcgagggggggcccggtacccaattcgccctatagtgagtcgtattacaattncnnnnngngcnnnnn

SEQ ID NO: 385362 - DNA, 825 bp, Oryza sativa
agttaacgcgtgcgatccaagcagaccgagtcgacgaagcagcgaagcaaagcagcagcagcagcgagcgagcgcgcgcggccgccgccggtgaggcgaagatgtcgtggcaggcgtacgtcgacgaccacctgatgtgcgagattgacggcaaccacctcaccgccgccgccatcgtcggccacgacggcagcgtctgggcgcagtcccccaacttcccgcagtacaagcctgaggagattactggcatcatgaaggactttgatgaacccggcagtctcgcaccaactggtcttttccttgggggcacaaaatacatggtgatccaaggtgaaccaggggttgtcatccgaggaaagaagggcactggaggcatatgtgtcaagaagactggcctgtcgttgattcttggaatctatgatgagccgatgaccccaggccagtgcaacatgattgtggagaggcttggcgattatctgatcgagcagggttgctaagtcctcaatatgctattttggtcatttgggactaagtttactccctatttggttcagtaatgtgagcttgcatctgcttgcgtatcacatgatatggagtgaataatttagctccggtttgttggttggtgaacgtgttgaaaaatatttacctgtggtttatgtttggcatcgtgtcgtatcaaactcagctgtccattcactgagttctgtacatttacctggtcatggtacctgtgggttctgctttatgaagatgattgcattttattgaaaaaaaagggttggcctattctcggactaagaataaagtttgggtttggtaaat

SEQ ID NO: 385363 - DNA, 745 bp, Oryza sativa
  unsure (1)..(745): unsure at all n locations
cgtccgcccacgcgtccgcggacgcgtgggagcccaggttcaagttgtcaacaacaatggaaagacggtgttcaacggagagcttcgtcgtggacagctacttattgtaccacaacactatgtagttgtaaagaaggcacaaagagaaggatgtgcttacattgcattcaagacaaaccctaactctatggtaagccacgagtgcaggactgagcttccatctccccagtgcgctcccaactgatgttctagcaaatgcatatcgcatctcaagagaagaggctcagaggctcaagtcatcaccaaagagattcctctagtangaggacaggagggcatacatcaaatttgctaccagagacatatgatgaggccggaagtcattggactgacagccaatggttcaggttctcgcgtacgatcatttggccaagctcaagaaaacagtatggagccagtaggcttggatgagaattcagtagatattggctctgaaggtgcacttgatccctatatcatggaaaagctgagtgaagaaaacatcggtctgttcacaaggcgtgaagaacttcgacaacgagatacacagttgaggcaaacggtcggggagctagagcaacaactagcggagacaaaaaagaaagtgtgctcagcttgctgatgacctgcgtataaggaagagccagcagcagcagcagcccccttacatataaaggttaatttatcggtggancacagangtgct

SEQ ID NO: 385364 - DNA, 632 bp, Oryza sativa
  unsure (1)..(632): unsure at all n locations
ggaagtgccngtacccagttgataacncataagganaaagngnttcncgggngggcctttagaataggaaccccgggtgcaggattggaagggcaacatggaanacattttgatggggagtcctttggggcagtttntattataccacaanaccatttattcattaaaaggcacaaggggaggatgttcatatattgcattgaaaaccaaccctgaatccatggttagccaacatggcaggaaagaattccatcttccgcgcacttccctgacgatgttgtagcaaatgcatatcgtatctcaagagaagaagctaggaggctcaagcacaacaggggagatgagttaggtgtgttcactcctagtcatgcctacaagagctaccaagacatatctgtgagtgcataaccaagaaatgtcaatcataggcttggattgctaaggatggttttcaaataaatcataagcaataaaagagtgcatgttgttgcagctatgtaatagtggatggttggaagaataataataaatttgtgttcctttaagtaactaaaaaaaaaaaaaaaaaaaaaaaaaaactcgagggggggcccggtacccaattcgccctatagtgagtcgtattacttnnn

SEQ ID NO: 385365 - DNA, 634 bp, Oryza sativa
  unsure (1)..(634): unsure at all n locations
aattaacccactacataaaggagaaccaaaacgcatgagaagcatccccaccagcagagtggcggccgcatcatagaactagtggatcccccgggctgacaggaattcggcaacgaggcacaaagagaaggatgtgcttacattgcattcaagaccaaccctaactctatggtaagccacattgcaggaaagagttccatcttccgtgctctcccaactgatgttctagcaaatgcatatcagcatctcaagagaagaggactcagaagagctcaagcataacagaaggagaatgagttcggtgacaattcacatacccctcacaatacaagagctaaccaagacgtttataatgagcggcggaatcctcttaggtcggcctaggcggataaagaatagctaactaaataaattgacaagcaattgntttnctgctatgtactgtccagtctttcgactcatngctgntaaagcctctctttattcctanaannacccnaaccancaaaaaaaccncgcgggngggcccggtnacccaaattngccctcntcgncncgtcgtntttacanttcnctgggcccgtcgnttnaccaacggntagnngaccntngggaaancccctgggnggttaan

SEQ ID NO: 385366 - DNA, 396 bp, Oryza sativa
ggagagggagcctgagaaacggctaccacatccaaggaaggcagcaggcgcgcaaattacccaatcctaactctatggtaagccacattgcaggaaagagttccatcttccgtgctctcccaaatgatgttctagcaaatgcatatcgcatctcaagagaagaggctcagaggctcaagcataatagaggagatgagttcggtgcattcactccaatccaatacaagagctaccaagacgtttataatgcggcagaatcctcttaggtcggcttgcggataaagaataactaaataaataaattgcaagcaattgttttgctgctatgtactgtccagtctttcgactaatgatgataaagcctctctttatccttatgttaaaaaaaaaaaaaaa

SEQ ID NO: 385367 - DNA, 544 bp, Oryza sativa
cccacgcgtccgcccacgcgtccgcgcacgcgtgcgcccacgcgtccgcaggccaggccaagcccaattgtccgaaagtcaaagccaaagtcaaaagttcaaggatgaacatcaaaagatccaccgtttcagacaaggagatgtaattgcattgcctgctggtgtagctcattggtgctacaatgatggtgaagtgccagttgttgccatatatgtcactgatctcaacacccgtggctaatcaacttgaccctaggcaaagggatttcttgttagctggaaataagagaaaccctcaagcatacaggcgtgaggttgaggagtcggtcacagaaacatatcttagtggctttagcactgaactgcttagcgaggcttcttggcgtaagcagccaagtggcaaggcagctccagtgtcaaaatgaccaaagaggagaaattgtccgcgtcgaacgcgggctcagtttgctgcagcaccatatgcatcattgcaagagcaggcaccaggccaaatgcatcaagcgcgcattatcaagaaggacga

SEQ ID NO: 385368 - DNA, 234 bp, Oryza sativa
atacagagctaccaagtgtttataatgtgccggaatcctcttaagttggcaatgcggataaagaataactaaataaataaataaataaattgcaagcaattgcgttgctgctatgtactgtaaaagtttcttataatatcagttctgaatgctaaggacatccctcaagatggtctttctatttttgtgaggcgggggggatgacaatgggcattggcacgcagatttattaat

SEQ ID NO: 385369 - DNA, 166 bp, Oryza sativa
aatacaagagctaccaagacgtttataatgcagccctctttgggcggcttgcggataaagaataactaaataaataaattgcaagcaattgttttgctgctatgtactgtccagtctttcgactaatgatgataaacccctctctcgatcctaaaaaataataaaa

SEQ ID NO: 385370 - DNA, 1772 bp, Oryza sativa
  unsure (1)..(1772): unsure at all n locations
cccacgcgtccgcccacgcgtccgcccacgcgtcgaagtccccattagcaagtacaaatagctatggcgagttccgttttctctcggttttctatatacttttgtgttcttctattatgccatggttctatggcccagctatttaatcccagcacaaacccatggcatagtcctcggcaaggaagttttagggagtgtagatttgatagactacaagcatttgaaccacttcggaaagtgaggtcagaagctggggtgactgagtacttcgatgagaagaatgaattattccagtgcacgggtacttttgtgatccgacgtgtcattcagcctcaaggccttttggtacctcgatacacaaatattcctggcgtggtctacatcatccaagggagaggttctatgggtttaaccttccccggttgccctgcgacttaccagcaacaattccaacaattttcatctcaaggccaaagtcagagccaaaagtttagagatgagcaccaaaagattcatcaatttaggcaaggagacattgttgcactcccagctggtgttgcacattggttctacaatgatggtgatgcacctattgttgccgtatatgtttatgacgtaaacaacaacgccaatcagcttgaacctaggcaaaaggagttcctattagccggcaacaacaatcgggctcagcaacaacaagtatatggtagctcaattgagcaacactctgggcaaaacatattcagcggatttggtgttgagatgctaagtgaggctttaggcatcaacgcagtagcagcaaagaggctacagagccaaaatgatcaaagaggagagatcatacatgtgaagaatggccttcaattgttgaaaccgactttgacacaacagcaagaacaagcacaagcacaagatcaatatcaacaagttcaatacagtgaacgacagcaaacatcttctcgatggaacggattggaggagaacttctgcacgatcaaggcgagagtaaacattgaaaatcctagtcgtgctgattcatacaacccacgtgccggaaggataacaactgtcaatagtcagaagttccccatccttaacctcatccaaatgagcgctaccagagtaaacctataccagaatgctattctctcgccgttctggaacgtcaatgctcatagtttggtctatatgattcaagggcgatctcgagttcaagtcgttagtaactttggaaagactgtgtttgatggtgtccttcgcccaggacaattattgatcattccgcaacattatgctgtcttgaagaaagcagagcgtgaaggatgccaatatatcgcaatcaagacaaacgctaacgccttcgtcagccaccttgcagggaaaaactcagtattccgtgccttgccagttgatgtagtcgctaatgcgtatcgcatctcaagggagcaagcccgaagcctcaagaacaacaggggagaagagcacggtgccttcactcctagatttcaacaacaatactacccaggattatcgaatgagtccgaaagcgagacctcagagtaatgtaattgagaactagtatcggcgtagagtaaaataaaacaccacaagtatgacacttggtggtgattctattcgatatcagtactaaataaaggttacaaacttcttaaaaaaaaaaaaaaaaaaaactcgagggggggcccggtacccaattcgccctatagtgagtcgtattacaattcaagngagttcttttttttttntnntnn

SEQ ID NO: 385371 - DNA, 1764 bp, Oryza sativa
  unsure (1)..(1764): unsure at all n locations
cccacgcgtccgcccacgcgtccgcccacgtttccaataacatcctcaaatagctatggcgaccatagctttctctcggttatctatctacttttgtgttcttctcctatgccatggctctatggcccagctatttggtccgaacgtaaatccatggcacaaccctcggcaaggaggttttagggagtgtagatttgatagactacaagcatttgaaccacttcggagagtgaggtcagaagccggggttacagagtactttgatgagaagaatgaacaattccagtgcacaggtacatttgtcatccgacgtgtcattgagcctcaaggccttctggtacctcgatacagcaatactcctggcatggtctacatcatccaagggagaggttctatgggattaactttccccggctgcccagcaacctaccaacaacaattccaacaattcttgcctgaaggccaaagccagagccaaaaatttagggatgagcaccaaaagatccaccaatttagacaaggagatatcgttgcactgccagctggtgttgcgcattggttctacaatgaaggcgatgcaccagttgttgctctatatgtcttcgacttaaacaacaacgctaatcagcttgaaccaaggcagaaggagttcttattggcgggtaacaacaacagggagcaacaaatgtatggtcgctcaatcgagcaacactctgggcaaaacatatttagcggtttcaacaatgagctactaagtgaggccttaggcgtcaatgcattggtagcaaagaggctacaaggccaaaacgaccaaagaggagagatcatacgggtaaagaatggccttaaactgttgagacctgcttttgcacaacaacaggaacaagcacaacagcaggaacaagcacaagctcaataccaagttcagtacagtgaagaacaacaaccatctacgcgttgcaacggtttagatgagaacttctgcacaatcaaggcaaggttgaacatcgaaaatcctagccatgctgatacttacaacccacgtgctggaaggatcacacgtctcaacagtcagaagttccccattcttaaccttgtacaattgagtgctactagagtaaatctataccagaatgctattctctctccgttttggaacgttaatgcccatagcctggtgtatatcgttcaagggcatgctcgagttcaggtcgttagtaaccttggaaagacggtattcaatggcgttctacgtccaggtcaattgctgatcattccgcaacactacgttgtcttgaagaaagcagagcatgaaggatgccaatacatttcattcaagaccaatgcaaactccatggtgagccaccttgcagggaagaactcaatattccgtgccatgccagtggatgtgatcgctaatgcttaccgcatatcgagggagcaagcacgaagccttaagaataataggggagaagagctcggtgccttcactcctagatatcaacaacagacctacccaggcttctcaaatgagtcggagaacgaggccttagagtgatgtactaatgaaatagtataggtgtatcaaaaaaataatgccacaagtatgtgaaactttgtggcggttctgttctaagtttatgaagcactaataaaatgctacaactgttttattcaaaaaaaaaaaaaaactaaaacctcgagggggggcccggtacccaattcgccctatagtgagtcgtattacaattccnnnnnnncttn

SEQ ID NO: 385372 - DNA, 814 bp, Oryza sativa
  unsure (1)..(814): unsure at all n locations
ggcacgagatacagtgaacgacagcaaacatcttctcgatggaacggattggaggagaacttctgcacgatcaaggcgagagtaaacattgaaaatcctagtcgtgctgattcatacaacccacgtgccggaaggataacaactgtaatagtcagagttccccatccttaacctcatccaaatgggggtaccgggntaccntaaccggagtntttttncctttngggaagtcaggtnaaagttggttanaggattcaggggaatttgggttaatttgttagtaanttgggaangatgtgttgatggtttctttgcccaggacattattgatcattccgcaacatatgctnttttgaagaaagcagagcgtggaaggatgccaatatatngcaatcaagacaaacgtaacgcttcgtcagccaccttgcagggaaaactcagtattccgtgccttgccagttgatgtagtcgctaatgcgtatcgcatctcaagggagcaagcccgaagcctcaagaacaacaggggagaagagcacggtgccttcactcctagatttcaacaacaatactacccaggattatcgaatgagtccgaaagcgagacctcagagtaatgtaattgagaactagtatcggcgtagagtaaaataaaacaccacaagtatgacacttggtggtgattctattcgatatcagtactaaataaaggttacaaacttcttaattttcctaaaaaaaaaaaaaaaaaaaaaaaaaaaactcgagggggggcccggtacccaattcgccctatagtgagtcgtattacaattnc

SEQ ID NO: 385373 - DNA, 699 bp, Oryza sativa
  unsure (1)..(699): unsure at all n locations
naggngagataattnacatggattcccatttacctgacctgggggttgggttattttaccagatgtnttttttccgttttggaagttatgcccatagcctggtgtatnttgttcaagggcatgttcgagttcagttgttagtaaccttggaaagacggtattcaatggcgtttaagtccaggtcaattgctgatcattccgcaacactacgttgttcttgaagaaagcagagcatgaaggatgccaatacatttcattcaagacccaatgcaaactccatggtgagccaccttgcagggaagaactcaatattccgtgccatgccagtggatgtgatcgctaatgcttaccgcatatcgagggagcaagcacgaagccttaagaataataggggagaagagctcggtgccttcactcctagatatcaacaacagacctacccaggcttctcaaatgagtcggagaacgaggcctcagagtgatgtactaatgaaatagtataggtgtatcaaaaaaaaaataaaatgccacaagtatgtgaaactttgtggcggttctgttctaagtttatgaagcactaataaaatgctacaactgttttgttcatgcaaaaaaaaaaaaaaaaaaaactcgagggggggcccggtacccaattcgccctatagtgagtcgtattacaatttcnnnnnnnncnnngnn

SEQ ID NO: 385374 - DNA, 791 bp, Oryza sativa
  unsure (1)..(791): unsure at all n locations
agcaaagaggctacagagccaaaatgatcaaagaggagagatcncccnngtgaanaanggccnncaatngtngaaaccgactgggacacnncngnangaacaagcacaagcacaagatcaatatcaacaagtccaatacagggaacgacagcaaacatcncctcgatggaacggatgggaggagaactnctgcacgatcaaggcgagagtaaacaggaaaatccagtcggctgatcaacaacccacggccggagaaaacaacgccatagcagagtcccacnacccaccaagagcgcacagagtaacaacagagcatcccgcgcgacgcatagcccaccgtgggcccccctgggattgaaggaatttggacgaggtcgttagtaactttggaaagactgtgtttgatggtgtccttcgcccaggncaattattgatcattccgcaacattatgctgtcttgaagaaagcagagcgtgaaggatgccaatatatcgcaatcaaggcaaacgctaacgccttcgtcagccaccttgcagggaaaaactcagtattccgtgccttgccagttgatgtagtcgctaatgcgtatcgcatctcaagggagcaagcccgaagcctcaagaacaacaggggagaagagcacggtgccttcactcctagatttcaacaacaatactacccaggattatcgaatgagtccgaaagcgagacctcagagtaatgtaattgagaactagtatcggcgtagagtaataaacgccacgtgcctgtgggattcgttgctgcgctng

SEQ ID NO: 385375 - DNA, 650 bp, Oryza sativa
  unsure (1)..(650): unsure at all n locations
tcnggntgcgatataagcagtgcananagttccgatgaaaggggcaggggccaaancattatggggttagtcaatcattgggcacccgggttaaaaattagnttcgggttgnatgtnggggggattgggagcggatacaatttaacacaggaacagtatgaccatgataacgccaagntcgaaattaaccntcactaaagggaacaaaagctggagctcccaccgcggtggcggccgctctagaactagtggatcccccgggctgcaggaattcggcacgagggcgccttgcccagtggatgtggtcgctaatgcgtatccgcatctcgagggagcaagcaccgaagcctcaagaacaacaggggagaagagctcggtgccttcactcctagatttcaacaacagtcctacccaggcttctcgaatgagtcggagagcgaggcctcagagtgatgtacttgtgaactagtataggtgtagcaaagtaaaaataaaacgccacaagtatgtgacacttggtggcgggttctgttcgaagtttatcaagcactaattaaaggctacaactgttttattcaaaaaaaaaaaaaaaaaaactcgagggggggcccggtacccaattcgccctatagtgagtcgtatacaattnc

SEQ ID NO: 385376 - DNA, 533 bp, Oryza sativa
ggcacgacctcgtgcaattcggcagctagtaagttccccatccttaacctcatccaaatgagcgctaccagggtaaacctataccagaatgctattctctcgccgttctggaacgtcaatgctcatagtttggtctatttgattcaagggcgatgctcgagttcaggtcgttagtaaccttggaaagacggtgttcgatggcgtccttcgcccaggtcaattatgctgatcattccgcgaacactacgttgtcttgaaggaaagcagagcatgaaggatgccaatacatttcattcaagaccaagtcaactcaggtgtagccaccttgcagggaagaagaactcaatatgccgtgccatgccagtggatgtgatcgctaatgcttaccgcatatcgagggagcaagcacgaagccttaagaataataggggagaagagctccggtgccttcactctagatatcaacaacagacctacctaggcttctcaatgagtcggagaacgagcctcagagcgatgtatcaacgaaatag

SEQ ID NO: 385377 - DNA, 891 bp, Oryza sativa
  unsure (1)..(891): unsure at all n locations
ggacggcngcgnacgtgtggggctgaagtagcaacgcagctcatcagtgtcaagatggctactactaagcatttggctcttgccatccttgtcctccttagcattggtatgaccaccagtgcaagaaccctcctaggttatggccccggaggaggaggtggaggtggtggtggtggtgaaggaggcggtggtggttacggtggatcgggctatggttctggttctgggtatggtgagggaggtggtagtggaggtgctgccggtggcgggtatgggcgtggtggaggcggcggcggcggtggtggtgagggtggtggctccggctctggctatgggtctgggcaaggctctggctatggtgcaggtgttggtggtgctggcgggtatggtagtggtggcggaggtggtggtggccaaggtggtggtgctggcggctacgggcaagggtctggctatggttccggctatgggtcgggtgctggtggtgctcatggtggtggttatggaagtggtggcggtggcggtggcggtggaggccaaggtggaggctccggctctggctctggctctggatatggctctggctctggcggaggcaacggacaccactaagctcatttcctctatcagctagctacaatatagcctgttgttataagtgaaccgtgatcagtgatgagtctctctcgctgctttacaaagagcttgtcggattgtatcgatatagcactgtgtactggcttgccgtttcatcacataaagttggcaaagcctagtaaataaaacgaccttttgtactcagatcatacttctgttattcacggagctgatgttcactaatattgatatgcaagcacatatatttaacaaaaaaaaaaaaaannnnnnnnn

SEQ ID NO: 385378 - DNA, 1042 bp, Oryza sativa
atttcttcgtggactcttgggcagagtgcggagaccgcagtgtggagcaacagatctatccatccatcccatcctcgatccttcattcctgcccggcggcgagcgagagagaggcggaggagatccgagatggcggggagcgggtggaggaggatcccggcggtgaggaggccgcccatgtcgcgcccggcctcggtctgcctctggatcgtgctcgtcgccgccaccctggcgctcgcccaggcgaagaaatcgaaggcggatttgactgaggtcacccacaaggtctacttcgacgtcgagattgatggcaagcccgcaggacgggttgtcatgggacttttcgggaagactgttcctaaaacggcagagaacttccgagcactttgcacaggagagaaaggaactggaaagagtggcaaagcactccacttcaagggaagtgcattccacagaattatacccagctttatgatccaaggaggtgacttcacacttggtgatggaaggggtggtgaatctatctatgggacgaagttcgccgatgaaaacttcaagatcaagcacaccggaccaggcctcctgtccatggccaatgctgggagagacacaaacgggtcccagtttttcatcaccactgtaaccaccagctggttggacgggaagcacgtcgtgttcggtaaggtgctgtctggaatggatgtggtttacaagattgaagctgagggccagcagagtgggtcaccgaagagcaaagttgtcatcgcggacagcggcgaactgccgatgtaatgagctgaaatgatgtttcactgaagctactgctactgcttctcgttgtagaactgttattagctgctctgttttgctatgcttctaccccgaatctggttggagtaaatttctgttagactataacagcgtgcttatatcgcctcttagttgtgggcgatttggagtgaactagcataaaaaggtcgaaactttacttaagtcgtcttcttgttctaagtcgccttatcctttgaagtgacttgcttaa

SEQ ID NO: 385379 - DNA, 712 bp, Oryza sativa
caagatggctactactaagcatttggctcttgccatccttgtcctccttagcattggtatgaccaccagtgcaagaaccctcctaggttatggccccggaggaggaggtggaggtggtggtggtggtgaaggaggcggtggtggttacggtggatcgggctatggttctggttctgggtatggtgagggaggtggctccggctctggctatgggtctgggcaaggctctggctatggtgcaggtgttggtggtgctggcgggtatggtagtggtggcggaggtggtggtggccaaggtggtggtgctggcggctacgggcaagggtctggctatggttccggctatgggtcgggtgctggtggtgctcatggtggtggttatggaagtggtggcggtggcggtggcggtggaggccaaggtggaggctccggctctggctctggctctggatatggctctggctccggcggaggcaacggacaccactaagctcgtttcctctaccagctagctacaatatagcctgttgttataagtgaaccgtgatcagtgatgagcctctctcgctgctttacaaagagcttgtcggattgtatcgatatagcactgtgtactggcttgccgtttcatcacataaagttggcaaagcctagtaattaataaaacgaccttttgtactaaaaaaaaaaataaataaacaacaatctatgc

SEQ ID NO: 385380 - DNA, 1723 bp, Oryza sativa
gagaaaccaaaaggtgacaagaagagcaagaagaagaaaactttggggaagggtacttctgctgtactgatgttgcttagggaccttgtgaccaacggaaaggaggttctttcggtgaattctgcactacttgcagagtggggaaccgagctctcactgttgtttgatccaaagtgtcccagattggtgtcccttgtggacaaggtgaaggagattgttgagaccaatgaagtgaggagattgcctaaaattcccaagggaacacgtgactttgggaaagagcaaatggccataagggagcatgccttctcaataataacaggggtattcaagatgcacggtgccgtttcacttgatacacctgtatttgagctgagagaaacacttatgggcaaatatggtgaagactcaaagttgatttatgaccttgctgatcagggtggagagctttgctctttgcggtatgatctgactgttccatttgcccgatatgttgctatgaataacataagttcattgaagagataccagatagctaaagtatacaggagagataacccgtccaagggaagatatcgagaattctaccaatgcgactttgacatagctggagtatatgaaacaatggaaccagattttgaagttatcaaagttttaactgagttgttggatcagttggatataggcacgtatgagataaaactaaaccacagaaagttgcttgatggaatgttagagatctgtggtgtgcctcctgaaaagttcagaacggtttgctcaagcattgacaagctagacaagcaaacatttgaacaagtgaaaaaggaactggtggacgagaagggcatatctaatgaaactgcggataagattggtgatttagtgaaaactaggggaccaccgctggaagttttgctggaattgagaaaggaaggtagcaagtttatggggaacgctgggtctgttactgcactaaatgagctggagatactattcaaagctctagataaagcaaatgcaataggcaagattgtttttgatttaagccttgctagaggccttgattactacactggtgtgatatatgaagctgtgttcaagggcaccactcaggttggctccattgctgctggaggcaggtatgacaaccttgttggtatgtttagtgggaagcaagtccctgccgttggtgttagccttggaatagaaagagttttcgcaatcatggagcaacaggagatggaaaagaatcagatccgggccaccgagacggaggtattggtgtcgattatcggcaaggacctcatattggccgctgagcttgttagtgaactgtggaatgctgggataaaggcagagttcaaactcactactaggatacagaaccacttgaagtacgcgacgcaatctggcattccgtggatggtgctggttggtgagtctgaaataagcagtggaaaggtgaagctgaagaacttggcagccagccaggaagaggaggttgacaggacagagtttgctcaggtgttgaaacagaaattgagaaacccatagagaagatttttagaatataattttgtagttcatgtttcaacttgtgatgcatcatacttgcctgtgtgagttcctggaaaattccgttcggcgttttgatttatactggctgtttgaattggtttacatgttaaagcgcttggtgtaattgaatcaaattaccaaattc

SEQ ID NO: 385381 - DNA, 823 bp, Oryza sativa
  unsure (1)..(823): unsure at all n locations
ccacgcgtccgctttccacgccagtttggtcgctctcgatttcgatttcccccaaatccaccgcaagagaaagccaagtcgccgccgagaagcgaagaggagatggcccgtacgaagcagaccgcccgcaagtccaccggcggcaaggccccgaggaagcagctcgccaccaaggcggcgaggaagtctgctccgaccaccggcggcgtgaagaagccccaccgctacaggccggggacggtggcgctccgcgagatccgcaagtaccagaagagcacggagctcctgatccgcaagctccccttccagcgcctcgtccgcgagatcgcgcaggacttcaagaccgacctccgcttccagagccacgcggtgctcgccctccaggaggccgccgaggcctacctcgtcggtctcttcgaggacaccaacctctgcgccatccacgccaagcgcgtcaccatcatgcccaaggacatccagctcgcccgccgcatccgcggcgagcgcgcgtaagccgccgccttcgacgcggttgcgttgcgtagcgccgaagcgatctggggggatcaacgacgacgacgtgacgtggtcaacttgttgattcccctctcgcttccgcgttttagatctcgttttcattagcagctttgtaatagggtttggtcggttaattagtgtaaaaacagggttcggttaaagactcaaaatcaaatgttattgccgttctttggattttgcggttaagcaaaacagtgttgaagactattaatattcgtttactatatggagatttgttcgtaatcaaaaaaaaaaaaaaaannnn

SEQ ID NO: 385382 - DNA, 700 bp, Oryza sativa
ccggggcggaaccgccgggttgatccacgcgggccctcaatcaccaagggccccaaagccaccgcaggagaaagccaagaggccgcccagaagcgaccaccagacggcccgtacgaagcagaccgcccgcaagtccaccggcgggaaaggccccgaggaagcagctcgccaccaaggcggcgcggaagtcggccccggccaccggcggcgtgaagaagccccaccgcttcaggcccggcaccgtcgcgctccgcgagatccgcaagtaccagaagagcacggagctcctcatccgcaagctccccttccagcgcctcgtccgcgagatcgcccaggacttcaagaccgacctccgcttccagagctccgccgtcgccgcgctgcaggaggccgccgaggcgtacctcgtcgggctgttcgaggacaccaacctgtgtgccatccacgccaagcgcgtcaccatcatgcccaaggacatccagctcgcgcgccggatccgcggcgagcgcgcttaggcgatccgccctcctttggttcttgcttggttcgtagggacttgtcatgttctaccagttcttgttaattattagatccttgccttgtcatgtcgtagtctttgattcttagttgcaatgtaaccgctggttattctgaaattgcaaccgaagtaatctgttttatccccaaaaaaaaaaaaaaa

SEQ ID NO: 385383 - DNA, 653 bp, Oryza sativa
  unsure (1)..(653): unsure at all n locations
ggcctccttgcacgagatctccaagccacagcgccgccagagagccccgaggcctcctcctccctcctccgcgatggcccgcacgaagcagacggctcggaagtcgaccggcgggaaggcgccgaggaagcagctggcgacgaaggcggcgcggaagtcggcgccggccaccggcggcgtgaagaagccgcaccggttccggccgggcaccgtcgcgctccgggagatccgcaagtaccagaagagcacggagctgctgatccgcaagctccccttccagcggctcgtccgggagatcgcgcaggacttcaagacggacctccggttccagagctccgccgtcgccgcgctccaggaggccgccgaggcctacctcgtcgggctcttcgaggacaccaacctctgcgccatccacgccaagcgcgtcaccatcatgcccaaggacatccagctcgcccgccgcatccgcggtgagcgcgcttaaaattagttcaataatctgatcgcttcatcgttctcagctacctcttcctagtagaaccaggatgtactagtagtagcttgttgcaatgaactgtttatctgattgattatcaatggaaaaatgatgttcaaatcgggctaaaaaaaaaaaaaaaaaaannnnnnnnnnn

SEQ ID NO: 385384 - DNA, 703 bp, Oryza sativa
cccaaatccacccgagcattcgaagcttgtagaagaagccctagcctctcctcctcatcaccgatggcccgcaccaagcagacggcgaggaagtccaccggcggcaaggcgccgaggaagcagctggcgacgaaggcggcgcgcaagtcggccccggccaccggcggcgtgaagaagccccaccgcttccgccccggcaccgtcgcgctccgggagatccgcaagtaccagaagagcaccgagctgctgatccgcaagctgccgttccagcgcctggtgcgggagatcgcgcaggacttcaagaccgacctccgcttccagagctccgccgtcgccgcgctgcaggaggcggccgaggcctacctcgtcgggctcttcgaggacaccaacctctgcgccatccacgccaagcgcgtcaccatcatgcccaaggacatccagctcgcccgccgcatccgtggcgagagggcctaggcgtgatctgctcgagaggctgtgataccctggtagttctagtggtggttcctgtgtctagtctgcacatgtagagatttgatggggttccttggttggtgtttgatctcagatctgtcatggcctagttggggtgttgcgtatgtaatttatctgtcttactcttatgtgatcccatggtgttggaatgaaatggaagtgaagaattctacttaaaaaaaaaaaaaaa

SEQ ID NO: 385385 - DNA, 686 bp, Oryza sativa
  unsure (1)..(686): unsure at all n locations
ccacgcgtccgctcaaatccaaagaaatcactcgccgcccccgcctcgccttctccgccgcgccaagctctcctctcctcctcctcgatggcccgcacgaagcagacggcgcgcaagtccaccggcgggaaggcgccgaggaagcagctggcgaccaaggcggcgcgcaagtcggcgccggccaccggcggcgtgaagaagccgcaccgcttcaggccgggcaccgtcgcgctccgtgagatccgcaagtaccagaagagcacggagctgctcatccgcaagctccccttccagcgcctcgtccgcgagatcgcccaggacttcaagaccgacctccgcttccagagctccgccgtcgccgcgctgcaggaggccgccgaggcctacctcgtcgggctcttcgaggacaccaacctctgcgccatccacgccaagcgcgtcaccatcatgcccaaggacatccagctcgcccgccgcatcaggggcgagagggcttgatgccgttattgttcgagttcatggcttgttagatctagaagtgttaattaacccatggatctgtgttatcctgtaatcactcgcttgaattgggttcgcattgatggaatacaatctgttcttggcnnnnnnnnnnnnnnnnnnnnnnnnnnnnnnnnnnnnnnnnnnnnnnnnnnnnnnnnnnnnnn

SEQ ID NO: 385386 - DNA, 343 bp, Oryza sativa
cttccaaaactccgcagtcaccagccctgcaagaaggccccggaggcgtacctagtcaggctgttcaaggacaccaacctgtgcgccatccacgccaagcgcgtcaccatcatgcccaaggacatccagctcgcccgccggatccgcggcgagcgcgcttaggccatccgccctcctttggttctcgcttgattcgtagggacttgtcatgttctaccagttcgtgttaattattagatcctcgctttgtcatgtcgtagtcttagattcttagttaatccttggttgcaatgtaactgctggttattctgaaattgcaatcgaagtaatctgttttatcccc

SEQ ID NO: 385387 - DNA, 1285 bp, Oryza sativa
accaccaccacctcctcccccggcgccggatcatcctccccgtgggccgccgcgctcaactccatcgtcggcgacgtgaggcgggatcaggccgcggcgcatgctgccgcggcggtgggggttggggttgggggcgaggagatgtaccaggggagggcgtccacgtcgccggacagcgcggcggcgctgtcgagcgcgagcgggaagagggagagggagctggagcggtcgggatccggggttgacgacgacgacggcgcggacggcgccggcgggcggaagaagctcaggctgtccaaggaccaggccgccgtgctcgaggagtgcttcaagacgcactccactctcaaccccaagcagaaggtggcgctggcgaacaggctggggctgcggccgcggcaggtggaggtgtggttccagaaccggagggcgaggacgaagctgaagcagacggaggtggactgcgagtacctgaagcggtggtgcgagcgcctcgccgacgagaacaagcgcctcgagaaggagctcgccgacctcagggcgctcaaggccgcgccctcgccggcgtccgcgtccgcgatgcagccctcctcctccgccgccgccacgctcaccatgtgcccctcctgccgccgagtcgccaccgccggcgcgccgcaccagcctaaccaccaacaatgccatcccaaatctaacatcaccatctcctcctcctccaccgccgccgccgccgtcgccgtcgccggcggcaacgtgctgcccagccactgccagttcttcccggccgccgccgccgccgccgaccggacaagccagagcacgtggaacgccgccgcgccgctcgtcaccagagagctcttctagaaacaatccatccatcgccatgacaaacttgggaaaggatcaagctttgattggtcaagacagtgtttttaccaggtggtgatttggttaattaattaattataattaatcactcaagaggaggggattaattgccttgatttggtacctaattactagtatgattagcagtagtagtagtagcaaatttggtttggattaattcagtttgattccatgatatgaacaaaggaacaaagcaacaaaaaaatggccgtctgctttttcttggacggcattcttatatgtaccaattcaccaaatctgctggttggtggattaacagcttgataattggtatattgattgtactactaccactaattgattgaattatgagaaaagttaatgaaaaaaaaaaaaaaaaaacagcaaaacaaaa

SEQ ID NO: 385388 - DNA, 1332 bp, Oryza sativa
  unsure (1)..(1332): unsure at all n locations
ctccatttccatcaagcccaagaacgaactcaccacgctagtgttgagaagtggagagagttgagaggaatcaatggagatgatggttcatgggaggagagacgagcagtatggcgggctcgggctcgggcttgggcttgggctcagcctcggcgtcgccggtggtgcagccgacgacgagcagccgccgccgcgccgtggtgccgccccgccgccgcagcagcagctgtgcggctggaacggcggcggtctcttctcctcgtcttcctccgatcatcgggggaggtcggcgatgatggcgtgccacgacgtcatcgagatgccgttcctacgggggatcgacgtgaaccgtgcgccggcggcagagacgaccacgacgacggcgagggggcccagctgcagcgaggaagacgaggagcccggcgcgtcctcccccaacagcacgctctccagcctcagcggcaagcgcggcgcaccatctgccgccaccgccgccgccgccgccgccagcgacgacgaggactccggcggcggatcccgcaagaagctccgcctctccaaggaccaagccgccgtcctcgaggacaccttcaaagagcacaacaccctcaatcccaagcagaaggcggcgctggcgaggcagctgaatctgaagccgcggcaggtggaggtgtggttccagaacaggagggcgaggacgaagctgaagcagacggaggtggactgcgagctgctcaagcgctgctgcgagacgctcaccgacgagaaccgccgcctccaccgcgagctccaggagctccgcgccctcaagctcgccaccgccgccgccgcgccgcaccacctctacggcgcccgcgtcccgccgcccaccaccctcaccatgtgcccctcctgcgagcgcgtcgcctccgcagccaccaccacccgcaacaactccggcgccgcccccgcgcggccggtgcccacccgcccgtggccgccggcggcggcgcagaggtcgtcggcgtagagaccccactactgattaattagttaattagagatgagtagtggctttttcttaattagcagggtactaattaattacttaattagggttggacccctgtagttttcttgtttatactacgtgtataatttagctccggttttgaactttttaattagtttcataatctttttttttcctatctctcacttcaccctgtttgttgtttactcagcaaagaatatggtgtctttgtataaagtgatgcatgaaatggatcataaaagttttcnnnnnnnnnnnnnnnnnnnnnnnnnnnnnnnnnnnnnnnnnnnnnnnnnnnn

SEQ ID NO: 385389 - DNA, 1849 bp, Oryza sativa
  unsure (1)..(1849): unsure at all n locations
tatttttctatggactgagaagaccactgagaaggaaatttctgatgatgaagatgaggaagagaagaaggatgctgaggagggcaaggttgaggatgttgatgaagagaaggaagaaaaggagaagaaaaagaagaagatcaaggaggtttctcatgagtggtccctggtcaacaaacagaagcctatctggatgaggaagcctgaggagatcactaaggaggagtatgctgctttctacaagtccctgacaaacgactgggaggagcatcttgctgtcaagcacttctctgtggagggtcagctggaattcaaagctgttctctttgttcccaagagggcaccattcgacctctttgatacgaggaagaagctcaacaacatcaagctctacgtccgccgagtcttcatcatggacaactgtgaggagctgatccctgagtggctgagctttgtcaagggcattgttgactccgaggatcttcccctcaacatctcccgtgagatgctgcagcagaacaagattctcaaggtcatcaggaagaaccttgtcaagaagtgcgttgagctcttcttcgagattgctgagaacaaggaagactacaacaagttctatgaagccttctccaagaacctcaagctcggtatccacgaggactccaccaacagaaacaagattgccgagctcctgaggtaccactccaccaagagcggcgatgagctgaccagcctcaaggattacgtgacgaggatgaaggaaggccagaacgacatatactacatcaccggcgagagcaagaaggccgtggagaactcccccttcttggagaagctgaagaagaagggttacgaggtcctctacatggttgatgccatcgacgagtatgctgttggtcagcttaaggagtttgagggcaagaagctcgtctctgccaccaaggaaggtctgaagcttgatgagagtgaggacgagaagaagcggcaggaggaactcaaggagaagttcgagggtctgtgcaaggtgatcaaggaggtgctcggtgacaaggtggagaaggttgttgtctctgaccgtgtggtggactctccctgctgtctagtcactggggagtatggctggactgctaacatggagaggatcatgaaggcccaggctctgagggactccagcatggccggctacatgtctagcaagaagaccatggagatcaacccggagaatgccatcatggacgagctccgcaagcgtgccgatgcggacaagaatgacaagtccgtgaaggacctggtgatgctgctcttcgagactgccctgctgacctccggtttcagcttggaggaccccaacaccttcggcaccaggatccaccgcatgctcaagctcggcctgagcatcgacgaggacgagtccgccgaggctgacgccgacatgccgccgctggaggacgacgccggcgagagcaagatggaggaggtcgactaaacgtcatggacccatggatgccattctgtcccttctagttatccctctcctagttctcttctcatagctatctgactgctgctgttcgctttctttttggtacgttggatgcatcagttttgtctttgtcttagctcttaaacaatgcgtggtaccttgtcatactgtttgcgttgcaatgctactagccgaagtatatgccagcttcttattcatacttataacgtctttttttatcaaattatgttggctgaatcccttggagtgtgccaatttccatcttgaacttgagtattccaagtagctgttgtgagcagcccgaccagtattctggaacttcttcctnnnnnnnnnnnnnnnnnnnnn

SEQ ID NO: 385390 - DNA, 961 bp, Oryza sativa
ctcgttttttctcgtcctctccacgcccccgagatctcaggagcacaggaggaagaagctcgtctctgccaccaaggaaggtctgaagcttgatgagagtgaggacgagaagaagcggcaggaggaactcaaggagaagttcgagggtctgtgccaaggtgatcaaggaggtgctcggtgacaaggtggagaaggttgcttgtctctgaccgtgtggtggactctccctgctgtctagtcactggggagtatggctggactgctaacatggagaggatcatgaaggcccaggctctgagggactccagcatggccggctacatgtcgagcaagaagaccatggagatcaacccggagaattccatcatggacgagctccgcaagcgtgccgatgctgacaagaacgacaagtctgtgaaggacctggtgatgctgctcttcgagactgccctcctgacctccggcttcagccttgaggaccccaacaccttcgggcaccaggatccaccggatgctcaagctcggcctgagcatcgacgaggacgagtctgctgaggctgacgccgacatgccgccgctggaggacgacgccggcgagagcaagatggaggaggtcgactaagcgccatggttgtcattcggcccccatctcctggagccctagttctctatagctttatctgactctgtgctcttcgccatttttgctatgctggatgtatcggtattgccgtatcttagcgcctgaacatttcgtggtatttgctcaaacagttacgttttaaatttaaatatgctagttaattaatccagaatctgtattttcttattctgcattagcccttttatagtaactctttgttctgcattatctccactttgttcttagcttgaatgggcctttttttttctctgttgcccccatctctttcaatcgtagtagtacatctatctttgatcc

SEQ ID NO: 385391 - DNA, 641 bp, Oryza sativa
  unsure (1)..(641): unsure at all n locations
tttgataggatccnggncggatcgnagggggatcagatgcngtaaanttagcagagacaggaataaccggngatccataatggagagtccgcaggggtgccggtgcggaaaggaaggacaattccgggaaggactggggatgctgtttttttgagactgccctgccgaacctccggtttcagcttggacggaccccaaacacctttcggccaccaggattccaccgcatgntcaagctcggccggagcatcggacgaggacgagtccgccgaggctgacgccgacatgccgccgctggaggacgaacgccggcgagagcaagatggaggaggtcgactaaacgtcatggacccatggatgccattctgtcccttctagttatccctctcctagttctcttctcatagcttatctgactgctgctgttcgctttctttttggtacgttggatgcatcagttttgtctttgtcttagctcttaaacaatgcgtggtaccttgtcatactgtttgcgttgcaatgctactagccgaagtatatgccagcttcttattcatacaaaaaaaaaaaaaaaaaaaaaaaaaaaactcgagggggggcccggtacccaattcgccctatagtgagtcgtattacaattc

SEQ ID NO: 385392 - DNA, 768 bp, Oryza sativa
  unsure (1)..(768): unsure at all n locations
tgcaagtcatcaaggagttgctcggagacaagttcgagaagttgttggtntcggaccgtntggtggactccccgtgctgcntcgtcaccggcgagtatggntggacggccaacatggagaggatcatgaaggcccaggcgctgagggactcgagcatggccgggtacatgtcgagcaagaagacgatggagatcaacccggagaacgccatcatggaggagctccgcaagcgcgccgacgccgacaagaacgacaagtccgtcaaggacctcgtcttgctcctcttcgagacggccctcctcacctccggcttcagcctcgacgaccccaacacttcggcagcaggatccaccgcatgctcaagctcggcctgagcatcgacgaggacgagacggcggaggccgacaccgacatgccgccgctcgaggacgacgccggcgagagcaagatggaggaggtcgactaagcgggtttccttttttttcccctcgtcaaatccttcgcagcgaaagtacaccatggagcattggagctagcttatctgttttaccttttgaacatcgcgttgttgggtcggttcggtttattttgtgcgatttgctttacctttacctagcctgcaatgcatggggctagattgtgctatgggttctcgaactgcgtacgttaattatattgctaaatatgagtattatattagtgtcctcatgagttgtctattttttcctctgcaagttagatgtatcaattaattttgcgaataaaaaa

SEQ ID NO: 385393 - DNA, 600 bp, Oryza sativa
  unsure (1)..(600): unsure at all n locations
aagccggnaattttgcangagccaggaatnaaccggggaagncntnnggggggtccgcagggtccgatgggaaaagaaaaaaaattccnngaaaggactggggatgttttttttggagaagcccnggggacctccggtttaggtggggaggacccnaacaccttgggcaccaggatccacccgcatgctcaagctcggcctgagcatcggacgaggacgatgtcccgcccgaggctgacgccgacatgcccccgctggaggccgtcgccggcgagagcaagatggcaggaggtcgactaaacgtcatggccccatggatgccattctgtcccttctagttatccctctcctagtgtctcttctcatagctatctgtatgctgctgttcgctttctttgtggcccgatggatgcatcagtgttgtttttgtgggagctcttgaacaatgcgtggttccctgtcattctgtgtgcgttgcaatgctactagccgaagtacagtgccagcgtcttagtcatagtgataccccctttgtttatcaaacccaaaaaaaaaaaaagggcgcgcgcaaaatagggtccacgcgtacgtgcgcgcgcg

SEQ ID NO: 385394 - DNA, 737 bp, Oryza sativa
  unsure (1)..(737): unsure at all n locations
tctgttggcggcgattgcactgacgctgatccacccggaaaaaaacttttgannggtcactgtcatggtggatgaactggataacaccatcgttactggtctagtggntgaataaggtggtcgtctctgaccgtgtggtggactctccctgctgtctagtcactggggagtatggctggactgctaacatggagaggatcatgaaggcccaggctctgagggactccagcatggccggctacatgtcgagcaagaagaccatggagatcaacccggagaattccatcatggacgagctccgcaagcgtgccgatgctgacaagaacgacaagtctgtgaaggacctggtgatgctgctcttcggaggactgccctcctgacctccggcttcagccttgaggaccccaacaccttcggcaccaggatccaccggatgctcaagcctcggcctgagcatcgaccgacgatcgagtctgctgaggctgtcgccgacatgttgtcgttggaggagtatgtggtgagagcaagatggaggaggtggtttaagcgccatggttgtcatttggcccccatctcctggagtcctagttctctatagctttatctgactttgtgctctttgccatttttgaatgatggaatgaaagagtattaaagaatattagagaataaaaaattagtggtatatgataaaaaagaaaagttttaagtttaaacaagatagtttaaaaaaacaa

SEQ ID NO: 385395 - DNA, 1911 bp, Oryza sativa
aagcagcctcctcccatcaccgaggagagagagagagagagagagtagtgagagaggaagacgagagagccgcctccgcggccatcgccgccgccgcagcagcggggccactaccccgactgccccctcccctcctcccatggccgcgatgccaggtgggcccgaccttgccggggccggtggcgccgtcgccgtcgccgtcgacgcgatgcaggtcgacgacccgccgcgtgcgtccgccgaggagaagcatggtcccactataatgggaggaaatgatccagtcacaggtcatataatttcaactactattggagggaagaacgatgagcccaaaaggactattagctatatggctgaacgagttgttggaactggatcctttggtgttgtattccaggcaaaatgccttgagactggtgaaactgttgccattaagaaggtcttacaggacaaacgatacaagaacagagagttacagataatgcgatcaatggatcattgcaatgtcatctccctaaagcattgtttcttctctaccacaagcagagatgaacttttccttaacttagtcatggagtttgttcccgagtcactttatcgtgtcctgaaacactacaaagatatgaagcagaggatgccacttatatatgtcaaactttacatgtatcagatattccgcggattagcttacattcacactgttcctggagtttgtcaccgagatataaagccacaaaatatcttggttgatcctcttacccaccaagtgaaactctgtgattttgggagtgctaaaatgctgattaaaggtgaagcaaatatatcttacatatgctcacgttactatcgtgctcctgagctcatatttggtgcaactgagtacacaacatcaattgatatatggtctgctggatgtgttcttgctgagctgcttcttggtcaacctctgtttcctggtgaaagtgcagtggaccaacttgttgaaataattaaggttttgggtactccaacgcgagaggaaatccgttgtatgaatcccaattacacagaattcaaatttccgcagataaaagcatgcccatggcacaagatcttccacaagcgaatgcctcccgaagcaatagatcttgtgtcccgtctccttcagtattcgccaaatctgcgatgtactgcgctggaggcatgtgctcattcattttttgatgagttacgagaaccacatgcaaaactgccaaatggccgtccgtttccgcctctgttcaactttaagcaagaattagcaaatacacacccagagctcgtgagcaggctgttaccagaacatgcgcagcggcattcaggattttaattcattgttttgcactggaccataggacgaagtgtggtatgacgacatttacacttgtctgctcatacctgtgtatgccaaagggcaaataacatttctcaccttaaggttttagaacctaatcatcttcttgcaaagctgaaaatgggctcccctgacaaggtagtgtgcggtgtgccgtactacaatcaaatgttaaaccttgaggaggccattgtgtccagtgttctgccaagaggagcccgaatagctggagggatggtgggtgtattgttaagctgtggagggtgacttttatgttgaaacttcctttgctgtatgttccatgcctgtaccgcacctgcatccattcaacctcatattcacaactgatgtaatcatgataaaattgaatgtgtcaatgatggtcgattcgtatgccattatatgcgaattgactgttgtttctattgatgatcaacttatcctgttattactgatggcaatgcccctgtggacgcgtggccaagcgtgctgctgagaggacatatggggtctgatattatatgttgaaagaaact

SEQ ID NO: 385396 - DNA, 969 bp, Oryza sativa
  unsure (1)..(969): unsure at all n locations
gatcaagataatcgagcaaaatccatcagagttctaacattcgcgcgtgaatttcgaggttaatttttgaagcttaggatcaatggcttcccaccaggaccaggctagctaccgcgccggcgagaccaaggcccacaccgaggagaaggcggggcaggtgatgggggcgagcaaggacaaggcgagcgaggcgaaggacagggcgtcggaggcggcggggcacgccgccggcaaggggcaggataccaaggaggcgacgaaggagaaggcgcaggcggcgaaggagagggcgtcggagacggcgcaggcggcgaaggacaagacctccagcacgtcgcaggcggcgagggacaaagccgccgagagcaaggaccagaccggcggcttcctcggcgagaagaccgagcaggccaagcagaaggccgccgagaccgctggcgccgccaagcagaagaccgccgagacggcgcagtacaccaaggactctgccatcgccggcaaggacaagaccggcagcgtcctccaacaggcgagtgagcaggtgaagagcacggtggtcggcgccaaggacgcggtgatgagcacgctggggatgaccgaagacgaggccggcaccgacgacggcgccaacaaggacacctctgccaccgccgccgccacggagacgacggcgagggatcactagacgccgtgaatgatttccctttgggtctatttatgtatgttttcacttcaaattcggtgcaagtttgaatttgtttttgtgtcgttttgagtctgtatcgatgctgtatgaagtggtggtcgtcgcaggggaggatttctgacgggtgtgggtgatgtgtactgatgatgttcagttgttttcgtcagagtttctcgtctgtgttctgtttattatggcgtaacaataataaaagtttgggcctaaagcccgcatttgtggtttaaaaaaaaaaaaaaaaaaan

SEQ ID NO: 385397 - DNA, 689 bp, Oryza sativa
  unsure (1)..(689): unsure at all n locations
cagcaaccgccccccgccgctctgccacttcccacccaccccactaatccactataaatacgcgagcgacgtcacaccgcagagatgggaatcgcctcctcctcctcctcgaccccggaatccaggaagatggcgctcgccaaggccaaggagaccgtcgcctccgctcccgtcgtcgtctacagcaagtcttactgtcctttttgcgtccgtgtgaagaagttgttcgagcagcttggagcaactttcaaggccattgagttggatggggagagtgatggatctgagctgcagtcggcacttgctgaatggactggacaaaggactgttccaaatgtcttcatcaatgggaagcatattggtggctgtgatgatactttggcattgaacaatgaagggaagctggtgcctctgctgaccgaggctggagcaattgccagttctgcaaagacgacaatcaccgcatagttcttcgtgggacactgggactagccttcgttgacctctttatactgcatccattctattagataataaaggtggatgtttgtttggcaagaccattacttgttgccgtctagtatcgtgtgatagctatcctgtgcccgtgtgaaactccttggacatcaataatatcgtctttgtgatagcagttcgctgaaaaaaaaaaaaaaaannnnnnnnnnnnn

SEQ ID NO: 385398 - DNA, 1173 bp, Oryza sativa
  unsure (1)..(1173): unsure at all n locations
ccacgcgtccgtccacgcgtccgcccacgcgtccgcccacgcgtccggctaattaagcaaaagaagaagaagaagaaagaagaagaagaagatgcagaccgctgctagcagtgtcgttggattgtcggccgtgttgcccgctgctgtgaaggggcgcagcctgcagattcaggctcctcgccgtgttgcgttgcgcgttcgtgcggcggcggcggcggtggcagtggaggctgcggaggtggactacagctctaacatctcggtgtttccgatggaggcgtgcgacctcatcggcggcgaggcgtgcaacgtgcagatgtacccagaggccaagctctcatcatcggctgctgttgctgtttctcgtgcggcggcggaggaagtcgacagggactacctatcctacgacgagcccaccacggtgttccccgaggaggcgtgcgacgatctgggcggagagttctgcaaggccacctgatcccattcccatccatggagaattggagtcttctatcatccttcctcctctgctccactaccttaattccatgtagctacagatttatatgttaatcatcatgtaatggtacatatctccttgttaataaggcacgctagtctagctcctcaaaatgatttacaataatataatatttacatacatataatacacttactccatcgaacaatacctctgttatctcatggttacttcccatgatcccatcatcaacaccaacattcatcacactttgctgcgttagagcaggtacaatggcaggctataagccagctacaaacatattttacgaagataaatcaagagagagaagagcaacgggctacagatttgtagccagctgtagcacggactccaagacgcagtgtgtctatgacaggtgggactagatattaatagtgtagtatgtaactattgtatgaatgggctattagattgactatagatgaattggagctagtagttggctatactattgaacttgctcttatatagcaacaggtacagtatatgaattaattatctcacaactattggaaagttggcgccagaaaactgagggagcactgaaacaaatttgttgtgcggaaacatttatattaaaaaaaacatatattatggacatatgtgattnnnnnnnnnnnnnnnnnnnn

SEQ ID NO: 385399 - DNA, 646 bp, Oryza sativa
  unsure (1)..(646): unsure at all n locations
ttggttgcangattcgggcccgatctcgtgccgaattcggcgccgggctcgccgcggctagcagtgtctttggattgtcggccgtgttgcccgctgctgtgaaggggcgcagcctgcagattcaggctcctcgccgtgttgcgttgcgcgttcgtgcggcggcggcggcggtggcaatggaagctgcggangtggactacaacccctaccatctcggtgtttccgatggacggcgtgcgacctcatcggcggcgaagcgtgcaacgtgcacatgtncccagaggccaagctctcatcatcggctgctgttgctgtttctcgtgcggcggcggaggaagtccacagggactacctatcctacgacgagcccaccacggtgttccccgaggangcgtcgcgacgatctgggcggagagttctgcaaggccaccttgatccccttcccatccatggagaaattggagtcttctatcatccttcctcctctgctccactaccttaattccatgttagctacagatttatatgttaatcatcctgttatggtacatatctccttgttaataaggcacgctagtctagctcctcnaaatgatttacaataatataatatttacatacatataatacacttactccatcgaac

SEQ ID NO: 385400 - DNA, 935 bp, Oryza sativa
  unsure (1)..(935): unsure at all n locations
ccacgcgtccgcccacgcgtccgcggacgcgtgggttgaggtaagataagtatgaagagatagggtagaaatatctttacaagagtacaaagatgcggggcattgggggtggggccctgtagcgagcaagccaaatgggagaacaccacatatcagctgaatcttatccatagaaaagagggaattgaaggggcaggaaggatacccccgcccggccgcacacttgactggagatgtatttagtgaggaggatgtgaagaaagaagagatctaccaccaagctgggtgagcaacaccaagaagaagaagaaagaagaagaagaagatgcagaccgctgctagcagtgtcgttggattgtcggccgtgttgcccgctgttgtgaaggggcgcagtctgcaattcaggctcttccccntnnggtgagggtttgngnggggggggggnggggnannggggttngggaggggaaaacagtttaaanatttcgggnttccgggggggggggggacttcntcgcggggggggggggnaagggnnagaggnacccnngggccnangttttcantnntgggnggtgtngcngtttttcgtgcgggcggcggaggaattcgacagggactacntatcttacggacgagcccaccacggtgttccccgaggaggcgtgcgacgatctgggcggagagttctgcaaggccaccngatcccattcccatccatggagaatnggagtcttctatcatccttcctcctctgctccantaccttaattccatgtagctacagatttatatgttaatcatcatgtaatggtacatatctccttgttaataaggcacgctagtctagctcctcaaaatgatttacaataatataatatttacatacatataatacacttactccatcgaacaataaaaaaaaaaaaaaaaaa

SEQ ID NO: 385401 - DNA, 701 bp, Oryza sativa
ccacgcgtccgggcacacttgactggagatgtataaagagaggaggatgtgaagaaagaagatatctaccaccaagctaattaagcaaaagaagaagaagaagaaagaagaagaagaagatgcagaccgctgctagcagtgtcgttggattgtcggccgtgttgcccgctgctgtgaaggggcgcagcctgcagattcaggctcctcgccgtgttgcgttgcgcgttcgtgcggcggcggcggcggtggcagtggaggctgcggaggtggactacagctctaacatctcgggtgtttccgatggaggcgtccgacctcatcggccggcgaaggcgtgcaacgcccagatgtacccagagcccaagctgtcatgatagacttttgtttttgtttctcgtgaggcgtcggagtaagtaaccagggactttttatcctagaatgagtccaacacggtgttctctgaggaggcgtattccgatctggccggacagttccgcaaggccacctgatcccattcccatccatggagaattggagtcttctatcatccttcctcatatgctgcactaccttaattccatgtagctacagatttatatgttaatcatcatgtaatggtacatatctccttgttaataaggcacgctagtctagctcctcaaaatgatttcccctcatccaatatttacatacatataata

SEQ ID NO: 385402 - DNA, 316 bp, Oryza sativa
actgtgtcttggagtcctagctccagcaggctaagaacccggagcccgaggctcgtatccatctggagcacgcaccgcaaaacacggtgggactaggccaggagccagccgatgttcatgctctagtacgtcacagtggtatgaatgggctattagattgactatagatgaattggagctagtagttggctatactattgaacttgctcttatatagcaacaggtccagtatatgaattaattatctcacaactattggaaagttggcgccagaaaactgagggagcactgaaacaaatttgttgtgcggaaacaa

SEQ ID NO: 385403 - DNA, 1418 bp, Oryza sativa
  unsure (1)..(1418): unsure at all n locations
gtctaattgcgccccttatgcattagagcccccggagtcccctctgtttcgcagataagtcctttggttcccatctttttattacattcaggtcctcctagtttcttttcctttcgagtctactccttgcattcttgcgaggaagcccctcgggttggtcgaattttagtttccactccctctcctcgcggagtcgttgctgttcttgttcttggtcgaggttgaggttggtggcgtagatccgatctgaggaatgtttacctatcctttcctctaacgttcgccgtactccgatgaagttgaacgtgctccgccgccgccgttcccactccttctccgtcgccttcctctactggttctacgtcttctcatgaactcatcgccttcctcccaagaacaccatctccagcctctaattgattagatcttgatttctttttcatcctcctactagtttctttcttgtgttctttggaatttttttgatctcttgaagagatccggttcttggattaagttttggacaagaaccgtactgtgaccatgtcgtcgccttcgcgccggagctccagcccggagagcaacaccagcggcggcggcggtggcgccgacgagcggaagaggaagaggatgctgtcgaacagggagtcggcgaggcggtccagggcgaggaagcagcagaggctggaggagctgatcgccgaggcggcgcgcctccaggccgagaacgcgcgcgtcgaggcgcagatcggggcctacgcgggggagctgagcaaggtcgacggcgagaacgcggtgctccgcgcccgccacggcgagctcgccgggcgcctccaggcgctcggcagcgtcctggagatcctccaggtggccggcgcgcccgtcgacatcccggagatccccgacgacccgctgctccgcccatggcagccgccgttcgcggcccagcccatcgtcgccaccgccatggccgacgccttccagttctgagccaccatggagagctcgcacgccatggccattggcatcaatggcatggttgcagctgcattacaactagtagtactagcctctgtggttgtgtctgatgatgcttattatgtttaattatggtttgcttcatgttgttttcattaatctagaccattaataagcaatgtgtgttgtaatcttgtctagtcttatgtgagatgtgttcatctccagtgctccttgctaataagggtggaagagaacaatccgatttgatgtaattcttggagagcacatgtgtgctggtttgtgatgtgatgaactgatgattgtaatattttgacattgaacctatgctataatgtttgcagcaatgaatctatccttgtgtcactgnnnnnnnnnnnnnnnnnnnnnnnnnnnnnnnnnnnnnnnnnnnnnnnnnn

SEQ ID NO: 385404 - DNA, 1292 bp, Oryza sativa
ccacgcgtccggaagaattaagcatgtcgacgccgagagcggcggcgagcctcgccaagaaggcggcgctggtggcgctggccgtcctggccgcggcgctcgcgacggcggcgcgcgccgagcagtgcggcgcgcaggccggcggcgccaggtgcccgaactgcctctgctgcagccgctggggctggtgcggcaccacctccgacttctgcggcgacggctgccagagccagtgcagcggctgcggcccgacgccgacgccgacgccgccgagcccctccgacggcgtgggctccatcgtgcccagggacctgttcgagcggctcctcctccaccgcaacgacggggcgtgccccgcgcgcgggttctacacctacgaggccttcctcgccgccgccgccgcgttcccggcgttcggcggcaccggcaacaccgagacgcggaagcgggaggtcgccgcgttcctgggccagacctcccacgagaccaccggcgggtggccgaccgcgcccgacggccccttctcctggggctactgcttcaagcaggagcagaacccgccgtccgactactgccagccctcgccggagtggccgtgcgcccccggccgcaagtactacggccgcggccccatccaactctccttcaacttcaactacgggccggcggggagggcgatcggggtggacctgctgagcaacccggacctggtggcgacggacgcgacggtgtcgttcaagacggcgctgtggttctggatgacgccgcaggggaacaagccgtcgagccacgacgtgatcacggggcggtgggcgccctcgccggccgacgccgcggcggggcgggcgccggggtacggcgtgatcaccaacatcgtcaacggcgggctggagtgcgggcacggccccgacgaccgcgtggcgaaccggatcggcttctaccagcgctactgtggcgcgttcggcatcggcaccggcggcaacctcgactgctacaaccagaggccgttcaacagcggctcgtcggttgggttggcggagcagtgacgactgacgacgagaaaaataaaaaataaaatggaaacatttgcacggccgcatccgcatgtgccggtgaattgaacgagctccatcatgcatgatagttcagttcacgatgctaataataaagctgggctatgaataaaaaaaaaaaaaaaaagtaaattggtataaattgtagccggtgggatgtttggttacaagatcaacggaacaatcgcgtgaaaggaaccataaaaacccggaaccaaa

SEQ ID NO: 385405 - DNA, 1291 bp, Oryza sativa
ctcccatctcgaaatcaagcacgaggactcccaagtccagccatgaaagccacgacgacagcagtggccctcctcgtggccgccgcggccatggtggcgcaggtagtcgccgagcagtgtggctcgcaggccggtggggcgctgtgcccgaactgcctctgctgcagctcctacggctggtgcggctccacttccgactactgcggtgacggctgccagagccagtgcgatggctgcggcggcggaggaggtggcggcggcgggggcggcggtggaggtggtggtggcggcgcggtggaggcggtcgtgtcgaaggagctcttcgagcagctgctgctccaccgcaacgacgcggcgtgccccgccagagggttctacacctacgacgccttcgtcacagccgccgccgcgttcccggacttcgccgcgacgggagacgacgaggcgcgcaagcgtgaggtcgccgcgttcctcgggcagacctcccacgagaccacgggcgggtgggcgaccgcgcccgacggcccctactcgtggggctactgcttcaaggaggagatcgcagccgcggcctcctactgcgtcgccagcgccgagtggccgtgcgccgccgacaagaagtacttcggccgcggccccatccaactctcctacaactacaactacgggccggcgggggaggccatcggcgaggacctcctgaacaacccggagctggtggcgtcggacccggtggtgtcgttcaagacggcgctgtggttctggatgacgccgcagtcgccgaagccgtcgtgccacgacgtgatcacggggcagtggacgccgagctcgggggacatcgcggccgggcgggtgccggggtacggcgtgatcaccaacatcatcaacggcgggttggagtgcgggttcggccccgacgaccgggtggcgaaccggatcggcttctaccagcgctactgcgacgtgctcggcatcggctacgggagcaacctcgactgctacgaccagaggccgttcaacagcgggttggcggcggtgcagtgaacagctagcctcgccggcggcgaccggctataaaataagagtgtttgccactcactcctatacgtgtcgtcgtacacagtacgtgtacttacaacgtactagtattgagtcgaagtatatatggtgtgtcagtgtgtgccataaacttgtaaccgggctgaaaccgatatatatgcatgtggcacagtgtcagtccaatatttcagaataaataaatggacaataaaattctcttttaatcatgcag

SEQ ID NO: 385406 - DNA, 811 bp, Oryza sativa
aacacacaacaaacaagacttgcatacgtcccaaactcccaaatcgccctctttgcaatcgcttcttccgttccatttcagtagcccacaacttcgcatcagaaagcgaaagatagagcaaccatgtcgctggtgaggcgcagaacgtgttcgacccattctccctcgacctctgggaccccttcgacagcgtgttccgctccgtcgtcccggccacctccgacaacgacaccgccgccttcgccaacgcccgcatcgactggaaggagacgccggagtcgcacgtcttcaaggccgacctccccggcgtcaagaaggaggaggtgaaggtggaggtggaggaaggcaacgtgctggtgatcagcgggcagcgcagaaaggagaaggaggacaagaacgacaagtggcaccgcgtggagcgcagcagcgggcagttcatgcggcggttccggctgccggagaacgccaaggtggaccaggtgaaggccggactggagaacggcgtgctcaccgtcaccgtgcccaaggccgaggtcaagaagcctgaggtgaaggccattgagatctccggttaagctcctgaagatgtgatcggtgagggaagaagtcatgtttggtgtcagtaattcagtatttcagtgtgtgtttgtttggtcgtgcaagtatggtctgctgctggtgtgtcgtacgcgttgggagtccgagtggctgagtcggccggtttcatgtattcctttgtgagtacttgagtaatcgccttcttagttcttgctcgttgaggaataaataaagagcttttcaggttgcaaaa

SEQ ID NO: 385407 - DNA, 461 bp, Oryza sativa
  unsure (1)..(461): unsure at all n locations
agctagtagtggtcacatcgccaattcacagtcgaatcaagcaaaccatccaaatcacacccaactcttcttcttcccatcctccagagatccaagcagcttagccatgtcgctggtgaggcgcagaaccgtgttcgaccccttctccctcgacctctgggaccccttcgacagcgtgttccgctccgtcgtcccggccacctccgacaacgacaccgccgccttcgccaacggccgcatcgactggaaggagacgccggagtcgcacgtcttcaaggccgacctccccggcgtcaagaaggaggaggtgaaggttggaggtggaggaaggcaacgtgcttggtgatcagcggccaacacaaagggaagaaggaggacaagaacgacaagttgcaccccgttgaaccaanaatctggcaagttnatgcggccgttccgctttccgagaacttcaaagttgg

SEQ ID NO: 385408 - DNA, 2830 bp, Oryza sativa
ctactactactagctaccgagcactgagcactgcactctgctgctctagaactgaagctttgcattggttggttagtgagagattaattattccaagatgttgggcgggatcatcggcggcctgacgggcaacaagaacgcccgcctcaagggctccctcgtcctcatgcgcaagaacgccctcgacatcaacgacttcggcgccaccgtcatcgagcgcatctccgagttcctcggccgcggcgtcacctgccagctcgtcagctcctccctcgtcgaccccaacaatgggaacagggggagggtggggacggaggcgagcctggagcagtggctgacgagcctgccgtcgctgacgacgggagagtccaagttcggggtgacgttcgagtgggaggtggagaagatgggcatacccggcgccatcatcgtcaagaacaaccacgccgccgagttcttcctcaagaccatcaccctcgacaacgtccccggccacggcgccgtcgtcttcgtcgccaactcctggatctaccccgcctccaagtatcgctacaaccgcgtcttcttctccaacgacacttcactgccgagcaagatggcggcggcgctgaagccgtaccgcgacgacgagctccgcaacctgcgcggcgacgaccagcagggcccgtaccaggagcacgaccgcgtctaccgctacgacgtctacaacgacctcggcgagcccgactccggcaaccctcgccctgtcctcggcggctcccccgaccgcccctaccctcgccgcggccgcaccggccgcaaacccaccaaaactgaccccaccgcggagagcaggctgtcattgctggagaacatctacgtgccacgcgacgagcggttcgggcacctgaagatggccgacttcctgggctactccatcaaggcgctcgtcgacggcatcgtgccggcgatccgcacctacgtcgacctcacacccggcgagttcgactccttcaaggacatcctcaagctctacgagggcggcctcaagctgcccagcatcccggcgctggaggagctccgcaagcgcttccctctccagctcgtcaaggacctcatccccggcggcgactacctcctcaagctccccatgccgcacgtcatccgggaggacaagaaggcgtggatgaccgacgacgagttcgcccgcgagatcctcgccggcgtcaaccccatggtcatcgcccgcctcaccgagttcccgccggagccgctcgacccggccaggtacggcgaccagacgagcaccatcacggcggcgcacgtcgagcgcgggctcgaggggctcaccgtgcagcaggcgatcgacggcaaccttctctacgtggtggaccaccacgatcatttcatgccctacttgttggatatcaatagcctcgacgacaacttcatctacgccacgcggacgctgctgttcctgcgcggcgacggcacgctggcgctcgccatcgagctgagcttgccgcacctgcaggacgacgggctgatcaccgccaggagcaccgtgtacacgccggcggccgcggcggcaccggcgccggcgctggagtggtgggtgtggcagctcgccaaggcgtacgtcaacgtgaacgactactgctggcaccagctgatcagccactggctcaacacgcacgccgtgatggagcccttcgtcatcgccaccaaccggcagctcagcgtggcgcacccggtgcacaagctgctgctgccgcactaccgcgacaccatgaccatcaacggcctggcgcggcagacgctcatcaacggcggcggcatcttcgagatgaccgtgttcccgcggaacgacgcgctcgccatgtcgtcggcgttctacaaggactggagcttcgccgaccaggcgctccccgacgaccttgtcaagcgcggcgtccgtacggacccggcgagcccgtacaaggtgcggctgctcatcgaggactacccgtacgccaacgacgggctggccgtctgcacgccaatcgagcagtgggccaccgagtacctcgccatctactaccccaacgacggcgtgctccagggcgacgccgagctgcaggcgtggtggaaggaggtccgcgaggtcgggcatggcgacatcaaggacgcgacgtggtggccggagatgaagacggtggcggacgtggtcaaggcgtgcgccaccatcatctggatcgggtccgcgctgcacgccgccgtcaacttcgggcagtacccgtacgccgggtacctcccgaaccgtccgtcggtgagccggcgcgcgatgccggagccgggaacgaaggagtacgacgagctggcgcgcgatccggagaaggtgttcgtccggacaatcaccaagcagatgcaggccatcgtggggatctcgctgctggagatcctgtccaagcactcctccgacgaggtgtacctcggacagcgcgacacgccggagtggacgtcggacgccaaggcgctggaggcgttcaagcggttcggcgcgcggctgacggagatcgagagccgcgtcgtcgccatgaacaaggacccccaccgcaagaaccgtgtcgggccgaccaatttcccctacacgctgctctacccaaacacctccgacctcaagggcgacgctgccggcctctccgccaggggcatccccaacagcatctccatctgatctccatctcatcagatgaggctgctccacggaggcgccagcgtggacaagagtagttttacggtggtctttaccggtagtattttactttcaataattgccatgacacctacacccggaggtgtcatggaggat

SEQ ID NO: 385409 - DNA, 961 bp, Oryza sativa
ggcacagatgaaatcatagctacttaaagccccctacattcccgggaattctcatcgatcgatctcacctgcagcagcaaacgagcaccacacaccagcagcagcagcaagtcgatcgatcgtcagcacacacgaccaagatcgagatggcccgtgcacagctggtgttggtcgccctcgtggcagctctgctcctggcgggcccacacaccaccatggccgccatcagctgcggccaggtcaactccgccgtgtcgccctgcctcagctacgcccgcggggctccggcccgtcggcggcctgctgcagcggcgtcaggagcctcaactccgcagccagcagcaccgctgacaggcgcaccgcgtgcaactgcctcaagaacgtggccggcagcatcaggggcctcaacgccggcaatgccgccagcatcccctccaagtgcggcgtcaggatcccctacaccatcagcccctccatcgactgctccagcgtgaactaatctgatcgatcgatcgctaccggccggagggtgtgacatcgcaggccgtacatgcacctgtcgtcgtctcacgctttgtatcttgtgttatctgtgtttatgctgaataaaatgagagctagctagctaggtcgatccatcgatcgccatgcatgacgagactagctagcattgctgctagatcgatgcatgcatatggttgatcgcccggtcactacgctatctgtttccttaatttattcgtcgatcgactacgtacgtacctgagagctagagatcagtttctgtaccatgcatatgcatatgaacttctgcatgtacatgcagtactacttgtactacgtgcgtgtacgttgtggattatacattatatagacagctccttttggtatacatatacatgttctacaccgaatatcaagcttatcgataccgtcgacctcgaaggggggcccggtaccc

SEQ ID NO: 385410 - DNA, 858 bp, Oryza sativa
taccgtccgaattaacgtcgtgccggacccccgatctcatcatcagcaaccaattcgcaccgatcgatcgatcgatccagcaactagatcaacagtactagctaggaagcatggcccgtgcacagttggtgttggtcgccctggtggcagctctgctcctcgccgccccgcacgccgccgtggccatcacctgcggccaggtcaactccgccgtcgggccctgcctgacctacgcccgcggcggcgccgggccgtcggcggcctgctgcagcggcgtgaggagcctcaaggcggcagcaagcacgaccgcagaccggcgcaccgcctgcaactgcctcaagaacgcggcccgcggcatcaaggggctcaacgccggcaacgccgccagcatcccctccaagtgcggcgtcagcgtcccctacaccatcagcgcttccatcgactgctccagggtgagctgagccatcgatcagagagacggatcatatatatacagcagcgcgccggttgccacctagtagattctgcctgggtcgatgtgtggagccgaattctgtatccagtactagtagtatcatatctgtattctggaataaaagatgagctagctaaggtctcgatcaatcaccatgcatccatggttgatcggcccggtcacgctagctagctttcttcttcttgtgtgttcgtctcgtacgttttgctccttttcgaggggtacgtgtaccagagagagctagagattctacatgcatgtactgcaactccttgtactacgtgcttgttttggattattacacatacatatagctctttttcgtacatttatagctccttgtaaaaaaaaaaaaaaaaaaa

SEQ ID NO: 385411 - DNA, 795 bp, Oryza sativa
  unsure (1)..(795): unsure at all n locations
cacctgcagcagcaaacgagcaccacacaccagcagcagcagcaaagtcgatcgatcgtcagcacacacgaccaagatcgagatggcccgtgcacagctggtgttggtcgccctcgtggcagctctgctcctggcgggcccacacaccaccatggccgccatcagctgcggccaggtcaactccgccgtgtcgccctgcctcagctacgcccgcggcggctccggcccgtcggcggcctgctgcagcggcgtcaggagcctcaactccgccgccaccaccaccgccgaccgccgcaccgcctgcaactgcctcaagaacgtggccggcagcatcagcggcctcaacgccggcaatgccgccagcatcccctccaagtgcggcgtcagcatcccctacaccatcagcccctccatcgactgctccagcgtgaactaatccgatcgatcgctaccggaggatgacatgcagcgccggccgagatgcagctgtcgtctcacgctttgtatcttgtgttatctgtgtttatgctgaataaaatgagagctagctagctaggtcgatccatcgccatgcatacatggttgatcgcccggccggtcactacgctatctgtttccttaatttattcgtcgatcgactatacgtacctgagagctagagatcagtttttgtaccatatgcatatgtacttctgcatgtacatggagtactacttgtactacgtgcgtgtacgttgtggattatacatagatatatagctctttttcgtataaaaaaaaaaaannnnnnnnnnn

SEQ ID NO: 385412 - DNA, 879 bp, Oryza sativa
ccacgcgtccgcgtgcaccgcatctgtgcatgcatccacactagcaactctacctatttaagcccctgcattcccgcgtattctgctcatccatctcatcagccacgaaccaattcacaccgatcgatcgagcaacagtagtaggaaccatggcccgtgcacagttggtgttggtcgccgttgtggcagctctgctcctcgccgccccgcacgccgccgtggccatcacctgcggccaggtcaactccgccgttgggccctgcctcacctacgcccgcggcggcgccggcccgtcggcggcctgctgcagcggcgtgaggagcctcaaggccgcagccagcagcaccgctgacaggcgcaccgcgtgcaactgcctcaagaacgcggcccgcggcatcaaggggctcaacgccggcaacgccgccagcatcccctctaagtgcggcgtcagcgtcccctacaccatcagcgcttccatcgactgctccagggtgagctgagctatcgatcggatggatcatttatatgcatacagaagcgcgacggtgggtcgatgtgtggagccgatcgaattctgtatccaatattagtagtatctgtacgtattctggaataaaaagatgagctagctaaggtcgatcaatcaccatgcatgcatgtgtgtgcatccatggttgatcggcccggccggtcaggctagctagctttcttcttcttgtgtgttcatctcgtacgttttgctccttctcgaggtgtacgtgtaccagagagagctagctagagattctacatgcatgtactgcaactccttgtactacgtgcttgttttggaatattacacatacatatagctctttttggtacaaaaaaaaaaaaaaa

SEQ ID NO: 385413 - DNA, 729 bp, Oryza sativa
ccaccacaagctctagcttacagctcactaccagtgtacattgttgctagttagctagagctagatctcgatcgagacaatggcgggtgctcgcaggacgatggcgctggttgcgttggtggcggtggtggcggcggcggtggtggcggagagggcgtcggcggcggtgagctgcggcgacgtgacgtcgtcgatcgcgccgtgcctgtcgtacgtgatggggagggagagctcgccgtcgtcgtcgtgctgcagcggggtgaggaccctcaacggcaaggcctcgtccgtcggccgaccgccgcaccgcctgcagctgcctcaagaacatggcctcctccttcaggaacctcaacatgggcaacgccgcctccatccccagcaaatgcggcgtctccgtcgccttccccatcagcacctccgtcgactgctccaagatcaactaattactagcttgatcatctccagctgagatcgatatgtatgggaagatctagagagtgactgttcactgctagctttgtttattttcttgctgcatgcgtacgtgcactatataatgtaataatgcgtttcaatgtttacatgtagtgtactatgtacactacttatatatttttcatatataataatctaataatgataataatgtcgtactgataaatgcgaacacacacttgaacttgctgtgccccgtttttttacttcaataagtaatagtatatggat

SEQ ID NO: 385414 - DNA, 946 bp, Oryza sativa
  unsure (1)..(946): unsure at all n locations
aaacnttntaaaacgacggccnttgagcgcgcgtaatacgactcactatagggcgaattgggtaccgggcccccccgcggcgtccgcccccgcgacgaagcaattcttgagctcaatcagcaacaacatctatctccttcttgcttagttaagtccttcgccctcccaagaagaagaagatgtcttgctgcggcggcaactgcggctgcggcagcggctgccagtgcggcggcggctgcggcggatgcaagatgttccctgatgtggaggccacagccaccaccaagaccttcgtcctcgctgctccatccaacaaggcgagctctggaggaatggagatggcggtggagagcggcgagaacggcggctgcggctgcaacacctgcaagtgtggcaccagctgcagcggctgctcctgctgctcctgcaactgaatctatcgtcgtcgtcgcccggctgcatgaggatttatcgtatggatgctgctactgtcgatcagagctttgatcgaggccttaatttgcttgcattagtacccagcttatatgtaggcaggccttgccttttgctctgacgcctaaataaaaccgtcgtcgtcgttgtcagtgtgtgcgtgtgtcgatcaatgttggatggatccctagctagcttggatggatcatctatcatcatggtgatctcatcatgtactcctgctccatctcctcatgcgtgccaggcttcttaatataatctacctctgctttcatcccaaaaaaaaaaaaaaaaaaaaaaaaaaaaaaaaaaaaaaaaaaaaaaaaaaaaaaaaaaaaaaaaaaggaagaaaagaataaagagaaacaaaaccagaaaaagcaaaaaaaaaaaaaaaaaagggggcgcccgttttaaaggtaccaagtttacttccccgggcttgcaaaatattagtttttttattgggccc

SEQ ID NO: 385415 - DNA, 586 bp, Oryza sativa
  unsure (1)..(586): unsure at all n locations
ggngggggagcagantcctgatnggngcaaaccaccaccaagacttgtcttggtgtcatccaacaagggaagcttcgggaggaaatggagatgccggcggagaaccggcgagaacggcggctgcggttgcaacaaccggcaagggtggcaccagctgcaggcgggctgctccttggtgcccgtcccgcaacgggaatcgatggtggttggtcgcccgggctgcatgaggatttatcgtatggatgctgctactgtcgatcagagctttgatcgaggccttaatttgcttgcattagtacccagcttatatgtaggcaggccttgccttttgctctgacgcctaaataaaaccgtcgtcgtcgttgtcagtgtgtgcgtgtgtcgatcaatgttggatggatccctagctagcttggatggatcatctatcatcatggtgatctcatcatgtactcctgctccatctcctcatgcgtgccaggcttcttaatataatctacctctgctttcctcccgccgaattcgtgcagcccgggggatccagtatttagagcggcggccacggcggttgaaagggggggggaaa

SEQ ID NO: 385416 - DNA, 471 bp, Oryza sativa
  unsure (1)..(471): unsure at all n locations
gcaagaagcaattcttgagctcaatcagcaacaacatctatctccttcttgcttagttaagtccttcgccctcccaagaagaagaagatgtcttgctgcggcggcaactgcggctgcggcagcggcctgccacgtgcggcggcggctgcggcggatgcaagatgttccctgatgtggaggccacagccaccaccaagaccttcgtcctcgctgctccatccaacaaggcgagctctggaggaatggagatggcggtggagagcggctgctcctgctgcgcttcctgcaacttgaatctatcgtcgtcggtcgcccggctgcattgaggggatttaatcgtatgggatgctgctactttcgatcagagctttgatcgaggccttaattttcttgcattaggtacccagcttatatgtagggcagggcttgctttttgctctngacgcctaaataaaaccgtcgtcgtcgttg

SEQ ID NO: 385417 - DNA, 1207 bp, Oryza sativa
cggagcagccgcctcccttccaagaacacacaacgcaagaggagcagagcagttcagatcagagcagggaaggagcaagcacaatggggagggctccgtgctgcgagaagatggggctcaagaagggtccatggacgccggaggaggacaaggtcctcgtcgcccacatccagcgccacggccacggcaactggcgcgccctgcccaagcaagccgggctgctgcgttgcggcaagagctgccggctccggtggatcaactacctgcggccggacatcaagcggggcaacttctccaaggaggaggaggacaccatcatccatctccacgagctgcttggcaacaggtggtccgcaattgccgccaggttgcccgggaggacggacaacgagatcaagaacgtgtggcacacccacctcaagaagcgcctcgatgcgccggctcagggcggtcatgtcgcggcgagcggcggcaagaagcacaagaagccgaagagcgcgaagaagccagccgccgccgccgccgcgccgccggcgtcgcccgagcggtccgcctcgtcgtcggtgacggagtcctcgatggcctcgtcggtggcggaggagcacggcaacgccgggatcagctcggcgtccgcgtccgtgtgcgccaaggaggagagctccttcacctcggcttccgaggagttccagatcgacgacagcttctggtcggagacgctgtcgatgccgctggacgggtacgacgtgtccatggagcccggcgacgcgttcgtcgcgccgccatccgccgacgacatggactactggctcggagtgttcatggagtccggcgaagcgcaagacttgccgcagatctagagaaagagagagaattttaccgtttcttcggttaattgatttgttttttctctctctgccgccatcttgcaccggagggacatagctaacagacaagagtgtccatgagcgaatcatcaagcaggaagaacgcgaatcatgcgatgcgatgcgatgagatgcacccagtagctttgatagttaattttctttttttacctccttcctgtatgtatagaaacagaagagatcagtgatcgaaacctgagatcctttctcacaatgtgcaaactggatcatcagaaaacgggctctgcgtttctcatttgattaattaaattcaacttgcacgctaaaaaaaaaaaaaaaaa

SEQ ID NO: 385418 - DNA, 2101 bp, Oryza sativa
ggatccacattctctatcataatggcagcactaccattacaagcactgacgtgtggaacaataggagtatatgacccacatacctgtcacggtaatggtagtgatattatgttatccggttgtaagaaatcaggctgctccaaaaatactcaatgaagttggtgtactgctctagtcttccactgagtaagtagacaattaactgtgcaccagtaatcaaatctttgcatttactcgcacatttagtaatgcaaatctcagcacaatgaattactggtactagcatccaagtcaagttcatggaaccgaatctgagagtacattaaacaccaaagatatatcatatcatatcaaatatcaaatcaaacggctagaatgcaaaacatacacgcacgcatgtcacgcgtttgagccagtcgaggaccaccggtgggcccagctgtcagcgaacgtgggagttggcacaggagagcgcgtcatcgagccgagccgatcgatcagtgggtgagggtgagagtggccggccttggccttctataaaacgtggcacctctcgctcctcctcgcatcatcgctcgcagtcgcagcacaaaaacatttctctcgcgagtcgcgagttgcaccgatcgaattaagggtcgaagatgtttgggttcgggcaccaccacaaccaggcaccggcggcgccgtcggacccgaaccagatcttcaagatcttctgccgcgccaacgagaactactgcctcaccgtccgcgacagcgccgtcgtcctcgcccccgtcaaccccaaggacgagcaccaggtcaggtcccccttcttatatatgccttttcttttgtttctatattcgatcggattttgatgtatactgaaatggaatgaattgaaatgcagcactggttcaaggacatgaggttcagcaccaaggtgaaggacggggagggcatgccggcgttcgccctcgtcaacaaggccaccggactcgccgtcaagcactccctcggccagtcccaccccgtaatactatatttctattttgctgctagctttgtgcgtgctgccatggaagatcgaagaacgttgacttcgatgtcatggactcatggcgggtgatgggtgtgcaggtgaagcttgtgccgttcaacccggagtacgaggacgcgtcggtgctgtggacggagagcaaggacgtcggcaagggcttccgctgcatccgcatggtcaacaacacccgcctcaacttggacgccttccacggcgacaaggaccacggcggcgtccgcgacggcaccaccgtcgtgctctgggagtggtgcaagggcgacaaccagagctggaagatcctcccctggggccccgaggctcactcctcctcccccggcgccgccaccgcctgcaccatcggcggcgtccccgtccacaccgtccgcgtcttctcccccgcaggcgaggactactgcctcaccgtccgcaacggcaccgcctgcctcgcccccaagaaccccagggacgactaccaggtacgtatcctcctcttaattatatactactattcagatagagaaaaaccttgagagatttgtggttgtggtttgtagtactggatcaaggacatgaggcacagcaacaagatcagggacgaggaaggctacccggcgttcgcgctggtcaacaaggtcaccggcgaagccatcaagcactccaccggacagggccacccggtgagcaaatcttttcttacaaaataaatattttcttacatatgcaacgaatctctgaatcacaacgaacgattttctctgcgcatgcaggtgaagctggttccctacaacccagagtaccaggacgagtctgtactgtggagggagagcaagcatgtgggcaagggcttccgctgcatccgcatggtgaacaacatctacctcaacttcgacgccttccatggcgacaaggatcacggcggcatccacgatggcaccgagatcgtgctgtggaagtggtgcgagggtgacaaccagcgctggaagatcctcccctggtgtaagttccaccgctaacaatgcacaatgccatcgctgatcgattaatttcttcggatcc

SEQ ID NO: 385419 - DNA, 1482 bp, Oryza sativa
cccacgcgtccgcccacgcgtcacgtttgatccatcacactcacacaacacaaccctccccaaaacctcccgaagagagcaagatgttcggcttcgggcaccacggccaccatggccaagaccagccgccccagcaccacggcggcggcggcggcggcgcgcaccagcccaccttcaagatcttctgccgcgccgacgaggggtactgcgtcgccgtgcgcgaggggaacgtcgtcctcgccccgaccaacccgcgcgacgagcaccagcactggtacaaggacatgcgcttcagcgccaagatcaaggacgaggagggcaacccggcgttcgcgctcgtcaacaaggccaccggcctcgccatcaagcactccctcggccagggccacccggtgaagctggcgccgttcaacccggagtacccggacgagtcggtgctgtggacggagagcggcgacgtgggcaagagcttccgctgcattcgcatgctgaacaacatccgcctcaacttcgacgcgttccacggcgacaaggaccacggcggcgtgcacgacggcaccaccatcgtgctctgggagtgggccaagggcgacaaccagtgctggaagatcctcccctggggcgacgaggcctacgccggcggcagcgccaacgcaccccgcggcggcaacgagcccaccgtccgcatcttctgcaaggccgacgagggcttcagcgtcaccgtccgcggcggctccgtctgcctcgcccccaccaaccctcgcgacgagtaccagcactggatcaaggacatgaggcacagcaacagcatcaaggacgaggaaggctaccccgccttcgccctcgtcaacagggtcaccggcgaggccatcaagcactcccaaggcgaaggccaccctgtgaagctggtgccgtacaaccccggataccaggacgagtcggtgctgtggacggagagccgcgacgtcgggcacggcttccgctgcatccgcatggtgaacaacatctacctcaacttcgacgccctccacggcgacaaggaccacggcggcgtccgcgacggcaccaccgtcgcgctctggaagtggtgcgagggcgacaaccagcgctggaagatcgtcccctggtaaatgcggtgtgctggagctgcattggtcgtcgccgtgatctgtggagttgggagagtttgcgcccgtggcctgctgccctctgcctttgttgctagaataaaagtcgtgtgcgatgatcagtggtgatggtcttgtgtctgtgtccgtgtgtaatgcttttagtcgttttctcgagtcctgcttttgtgacaaaatgggggtgagaggagaggtgtcgtttccgtgaactatctcgaaggcgtttggccttgcagcttgttcttcagatgttcggagtttcagaccttttgatgagtaccctgctttatcatttatcagccatgtgtctagttcgatcaaaaaaaaaaaaaaa

SEQ ID NO: 385420 - DNA, 1616 bp, Oryza sativa
  unsure (1)..(1616): unsure at all n locations
cccggggaattttctgtcgaaaaattgtataggtaatccctaataaatttctaaatgtgcttggctgattccttttcttctcgatcgatcccgttattcctttttaatcttttcttgtgcggaattgcagcactttttctctgcttgatcacaacgcagcaaggacatgagaatacgtgagattctccgggcgatggagctgcaccgtggctttgctatcgtctcgcgtcggctcgcctgcaataatacggcagccagatcgagatggttcccaaaacgactagaaacggaatcacgtaaagcaccatggatggatggaatcaccttttccccaggaaagcgcaagtgtggaatggcatcatctatcctaccaagttcctaagcccctgaccatgcagtgcacgaataatgcacatcgatcagctatctagagagagagagagagagagagagagagatagatagcatctcgatcagtgctactgatcaatcgatcatcccctataaatcccccatcccattgccatgcatagaggcagcacatcaacgatcgaacgaacaacgcactctgcagctagctatacaatctctgtttaattagctaggtagctagcgagtcataaatcaagaagccatggacttttacgggcggcgcgagcagtacggcgggtatggcgggtacggtggcggcggcgccctggcgacgccggggtacgcgccggcggcgccgtacgggatgtcgcaggtgaacatcgaggggaacgggtgtggcaggacgctgccgccgcagccgacggtgaaggtgtactgccgggcgaacccgaactacgcgatgacggcgcggaacggcgcggtggtgctggcgccggcgaaccccaaggacgagtaccagcattggatcaaggacatgaggtggagcaccagcatcaaggacgaggagggctaccctgccttcgcccttcgtcaacaaggccaccggccaggccatcaagcactccctcggccagtcacaccctgtaagctagtctcagcgttctttctctgaatctgaatccgccggccattgatggcgatcgacgacgatgctcttgcgtgcaggtgaggctggtgccgtacaacccggaggtgatggacgagtcggtgctgtggacggagagccgcgacgtggggaacgggttcaggtgcatccgcatggtgaacaacatctacctcaacttcgacgccttccacggcgacaagtaccacggcggcgtccgcgacggcaccgacatcgtgctctggaagtggtgcgagggcgacaaccagcgctggaagatccagccctactactgagctgatcgatacatcgatccagctctctatcaaggctcaagttgatatcaacgaatctggtgcagaataattattctctgctagctacccacctatatacgtagctaagagtaacttatgctcgtccgtaccgtatgattatcgtgtggtgtgcttgtatcttgtacaagttaattaattacctggcaataagagctcctctcgctgggcggcgacatccatataaacacatacagttggggcttgattcaaattgcnnnnnnnnnnnnnnnnnnnnnnnnnnn

SEQ ID NO: 385421 - DNA, 1246 bp, Oryza sativa
ccacgcgtccgcccacgcgtccgcccacgcgtccgaataaatctcctccattcccccaaatccatccatcatggagttccctcatcgccaccaccaccacggccaccgcggcgacgacgacgacgacgatcgccgccgccatcccgctcccgctcccgcctacggccacgactcagcccctccgccgggtccctacggccaagcgcctcctccggctgatccctacgctcgccacccgccttcccacgactacgctcatcctcctccggcgtatgggggagggggctacggcaacgtcgtccacgtttcccacgaggtctccgaccaccagaggcccacgccgcactacggtggatccgagtacatcagccccgtccaagagacccgcccttaccacggtggcggaggagccccaccggtgacccacaggatctactgcaaggccggggaggacaactacagcctcgccgtcagagatggcaaggtctgcctcgtccgctccgatcgcgacgaccacacgcagcactgggtgaaggacatgaagtacagcacgagagtgaaagacgaggaagggtaccctgccatggcgctcgtcaacaaggccaccggcgacgccctcaagcactccatcggccaatcccaccctgtccgtttggtgcgctacaatccagagtacatggacgagtctgtgctgtggacggagagcagggacgttgggagtgggtttcggtgcatcaggatggtgaacaacatctacctcaacttcgacgcgctccatggagacaaggaccacggcggcgtgcgcgacggaaccaccctggtgctctgggagtggtgcgagggtgacaaccagcgctggaagattgttccctggtgatcaaatcaaatctatctgtctatctctacatatgagtgagggaggtttatggaataataagaggcgcctctgatcgatggaggggccggcaggtgtggtcgctcgactggccctagctaagtgttttgttttgtttggtccagctctgtaataatccagccatctcattgtttggaatgtttgttgttgatccataaaatttggtcccggtacgaatatgaacatgtcacgtctgtgtgtgtgtgatactgttacttgtgatgcatctacgtacattgcatacaagctgctgttggttaattgtgttgcggactactacgtactgtatttgtgtgcaaagatatatttgcaaaaaaaaaaaaaaaaaaa

SEQ ID NO: 385422 - DNA, 761 bp, Oryza sativa
ccacgcgtccgcggacgcgtggcggacgcgtgggcgaacgaacaacgcactctgcagctagctatacaatctctgtttaattagctaggtagctagcgagtcataaatcaagaagccatggacttttacgggcggcgcgagcagtacggcgggtatggcgggtacggtggcggcggcgccctggcgacgccgcgggtacgcgccggcggcgccgtacgggatgtcgcaggtgaacatcgaggggaacgggtgtggcaggacgctgccgccgcagccgacggtgaaggtgtactgccgggcgaacccgaactacgcgatgacggcgcggaacggcgcggtggtgctggcgccggcgaaccccaaggacgagtaccagcattggatcaaggacatgaggtggagcaccagcatcaaggacgaggagggctaccctgccttcgccctcgtcaacaaggccaccggccaggccatcaagcactccctcggccagtcacaccctgtgaggctggtgccgtacaacccggaggtgatggacgagtcggtgctgtggacggagagccgcgacgtggggaacgggttcaggtgcatccgcatggtgaacaacatctacctcaacttcgacgccttccacggcgacaagtaccacggcggcgtccgcgacggcaccgacatcgtgctcctggaagtggtgcgagggcgacaaccagcgctggaagatccagccctactactgacgctgctgatcgatacatcgatccagc

SEQ ID NO: 385423 - DNA, 986 bp, Oryza sativa
  unsure (1)..(986): unsure at all n locations
gttcgacgccacgcgtccgcccgacgcgtccgcccacgcgtgggcgaacgaacaacgcactctgcagctagctatacaatctctgtttaattagctaggtagctagcgagtcataaatcaagaagccatggacttttacgggcggcgcgagcagtacggcgggtatggcgggtacggtggcggcggcgccctggcgacgccggggtacgcgccggcggcgccgtacgggatgtcgcaggtgaacatcgaggggaacgggtgtggcaggacgctgccgccgcagccgacggtgaaggtgtactgccgggcgaacccgaacttcgcgattgccggcgcggaaccgccgcggtggtgctggcgccggcgaaccccaaggatcgagtacccagcatttggatcaaggacatgagttggagcaccagnntcaaggaccgaggagggctaccctgctttcgcccttgtcaacaaggccaccggccagnccatcaagcactccctcggccagtcacaccctgtgaggctggtgccgtacaacccggnggtgatggacgagtcggtgctgtggacggagagccgcgacgtggggaacgggttccaggtgcatccgcatggtgaacaacatctacctcaacttcgacgccttccacggcgacaagtaccacggcggcgtccgcgacggcaccgacatcgtgctctggaagtggtgcgagggcgacaaccagcgctggaagatccagccctactactgagctgatcgatacatcgatccagcnctctatcaaggctcaagttgatatcaacgaatctggtgcagaataattattctctgctagctacccacctatatacgtagctaagagtaacttatgctcgtccgtaccgtatgattatcgtgtggtgtgcttgtattttgtacaagttaattaattacctggcaataagagctcctctcgctgggcgacacatatataaaaaaaaaaaaaaaa

SEQ ID NO: 385424 - DNA, 752 bp, Oryza sativa
  unsure (1)..(752): unsure at all n locations
gggaaggacccctcttgccccaaaaccccngggggnnccgganngattaagaatgggcacncaacanatngggacgnggaggnaaccnggntttgcgtgtcaacaagttaccggngaaccattaagcattccaccggacaggccacccggggaagtggttccctacaacccagagtaccaggacgagtctgtgcttgtggacggagagcaaggatgtgggcaagggcttccgctgcatccgcatggtgaacaacatctacctcaatttggacgccttccatggcgacaaggatcacggcggcatccacgatggcaccgagatcgtgctgtggaagtggtgcgagggtgacaaccagcgctggaagatcctcccctggtagattccggggagggggagctgcattgcattgccatcgtcgtcgcgtctgctctgcttctactctagctaataatttgatcgatctgctaccgaaataagaccgtgttcgttcgttcgatcgatcggagtatggcagtcaatggtgtccgtccgtcctcgagtttgtgtcagtgtgtgtccttttgcgagccagtgattgctatgagatgaaacagtgggtgatgtaagtgcaggaggaggggccatatgattcagaaatctgatgcaactcatcttgctttcccctgtactctctacttttcgtatgcctaatgaatgaattatgaatgcctcatttgtctcgatgcaacgcnnnnnnnnnnnnnnnnnnnnn

SEQ ID NO: 385425 - DNA, 857 bp, Oryza sativa
  unsure (1)..(857): unsure at all n locations
tctttggcgcgcggagcctgatccatcacactggggcgaatataatcctctccaatgcctgcagaagagagcaagatgttcgggttcgggcactcactgccatcatggccaagagcagacagcccatcaccacgtgcgcggatgatgcagcgcgcaccattccaccttcaagatcttctgacccgcctacgaggggtactgcgtcgccaggcgcgaggggaacgtacttctatatctgaccgcgaaccccagaggacgagcaccagcactgttggatcaaggacatgcgctggagcgccaagcatcaaggactgaggagggctacccggcgttcgccctcgtcaacaaggccaccggccaggccatcaagcactccctcggccagtcacaccctgtgaggctggtgccgtacaaccccggagntgatggacgagtcggtgctgtgggacggagagccgcgacgtggggaacgggttcaggtgcatccgcatggtgaacaacatctacctcaacttcgacgccttccacggcgacaagtaccacggcggcgtccgcgacggcaccgacatcgtgctctggaagtggtgcgagggcgacaaccagcgctggaagatccagccctactactgagctgatcgatacatcgatccagctctctatcaaggctcaagttgatatcaacgaatctggtgcagaataattattctctgctagctacccacctatatacgtagctaagagtaacttatgctcgtccgtaccgtatgattatcgtgtggtgtgcttgtatcttgtacaagttaattaattacctggcaataagagctcctctcgctgggcaaaaaaaaaaaaaaaaa

SEQ ID NO: 385426 - DNA, 871 bp, Oryza sativa
  unsure (1)..(871): unsure at all n locations
cgtccgnactcccggtcgcccacgcgtncgccacgcgtcgccacgcgtccgccacgcgtcagcacaaaaacatttctctcgcgagtcgcgagttgcaccgatcgaattaagggtcgaagatgtttgggttcgggcaccaccacaaccaggcaccggcggcgccgtcggacccgaaccagatcttcaagatcttctgccgcgccaacgagaactactgcctcaccgtccgcgacagcgccgtcgtcctcgcccccgtcaaccccaaggacgagcaccagcactggttcaaggacatgaggttcagcaccaaggtgaaggacggggagggcatgccggcgttcgccctcgtcaacaaggccaccggactcgccgtcaagcactccctcggccagtcccaccccgtgaagcttgtgccgttcaacccggagtacgaggacgcgtcggtgctgtggacggagagcaaggacgtcggcaagggcttccgctgcatccgcatggtcaacaacacccgcctcaacttggacgccttccacggcgacaaggaccacggcggcgtccgcgacggcaccaccgtcgtgctctgggagtggtgcaaggccgacaaccagcgctggaagatcctcccctggttaatcgagagaccggcaacaaaagcatcgatcgatccgtcacctgggcttgcatttggcgactgttagagttcggccatgcatgcaggtcgtgttgctgttagcgtgtcctgtgtttatggccctgcagaataaatcagggtctcgctgtcagcagagatcagatgaccccctccctactgtttggtgtggatccatgcgtataggggcatcttttgatcgaagttgtacaagttcatgtc

SEQ ID NO: 385427 - DNA, 736 bp, Oryza sativa
  unsure (1)..(736): unsure at all n locations
ggggcagcgtcaccgtccgcggcggctccgtctgcctcgcccccaccaaccctcgcgacgagtaccagcactggatcaaggacatgaggcacagcatcaagcactcccaaggcgaaggccaccctgtgaagctggtgccgtacaaccccggataccaggacgagtcggtgctgtggacggagagccgcgacgtcgggcacggcttccgctgcatccgcatggtgaacaacatctacctcaacttcgacgccctccacggcgacaaggaccacggngtgctgttcccgcgacggcaccaccgtcgcgctctggaagtggtgcgagggcgacaaccagcgctggaagatcgtcccctggtaaatgcggtgtgctggagctgcattggtcgtcgccgtgatctgtggagttgggagagtttgcgcccgtggcctgctgccctctgcctttgttgctaaaataaaagtcgtgtccgatgatcagtggtgatggtcttgggtctgggcccgtggtgtaatgcttttagttcgttttccccagtcctgcttttgtgccaaaatgggggtgaaaggaaaggtgtcgtttccgttaactttttcgaaggcgtttggccttgcagcttgttcttcaaaggttgggggtttcagccctttttatgggtgccggggtttatcctttctccaatttaaaaaaaaacaaccaaaaaaaaaaaaaaaaaaaaggagagttatttaagaag

SEQ ID NO: 385428 - DNA, 859 bp, Oryza sativa
ccttggaagctagctagcatgtcaggccacattggcaccggcccgggccattccaagcttccggcgactggtccccagcacgagccgacgttcaagacttctggccggcccaccaagggtactgtcttacacggcccacaacaccctgtgctctcgccaaacaaaccccggagaactgtgacaactgtgacacaggcacagcgcgacacaacacgagggtaaggcacgaggaggcacaccgggtttgcgctcttgaaacccgccacacgcctctccgtgaaaagctctctctcggccaatcccaccccgtgaagctggtgccgtacaacccagagtaccaggacgagtcggtgctgtggaccgagagcaaggacgtcggccatggcttccgctgcatccgcatggtcaacaacatctacctcaacttggacgccttccacggcgacaaggcccacggcggcgtccgcgacggcaccaccgtcgtgctctgggagtggtgcaagggcgacacccagtgctggaagatcctcccctggggccccgaggctcactcctcctcccccggcgccgccaccgcctgcaccatcggcggcgtccccgtccacaccgtccgcgtcttctccgccgcaggcgaggactactgcctcaccgtccgcaacggcaccgcctgcctcgcccccaagaaccccagggacgactaccagcactggatcaaggacatgaggcacagcaacaagatcagggacgaggaaggctacccggcgttcgcgctggtcaacaaggtcaccggcgaagccatcaagcactccaccggacagggccacccggtgaagctggttccctacaacccagagtacca

SEQ ID NO: 385429 - DNA, 573 bp, Oryza sativa
gggacgactaccagcactggatcaaggacatgaggcacagcaacaagatcagggacgaggaaggctacccggcgttcgcgctggtcaacaaggtcaccggcgaacatcaagcactccaccggacagggccacccggtgaagctggttccctacaacccagagtaccaggacgagtctgttcgcgtgggcggacagcgtgggtgtgggcaagggcttccgctgcatccgcatggtgaacaacatctacctcaacttcgacgccttccatggcgacaaggatcacggcgggcatccacgatggcaccgagatcgtgctgtggaagtggtgccaagggtgacaaccagcgctggaagatcctcccctgggtagattccgggggagggggagctgcattgcattgccatcgtcgtcgcgtctgctctgcttctactctagctaataatttgatcgatctcttcccctccccttcttgtccctccttctttgtgttttgtattatttcctctgtgatttgttgaatgtgatctagatgtgttcaaggatttgatgcaatttagttcatgtgttcatgg

SEQ ID NO: 385430 - DNA, 459 bp, Oryza sativa
  unsure (1)..(459): unsure at all n locations
canacaaaaacatttctctcgcgagtcgcgagtttgcaccgatcgaattaagggtcgaagatgtttgggttcgggcaccaccacaaccaggcaccggcggcgccgtcggacccgaaccagatcttcaagatcttctgccgcgccaacgagaactactgcctcaccgtccgcgacaggcccgtcgtcctcgcccccgtcaaccccaaggacgagcaccagcactggttcaaggacatgaggttcagcaccaaggtgaaggacggggagggcatgccggcgttcgcctcgtcaacaaggccaccggacttcgccgtcaagcacttcctcggccagttccaccccgtgaagtttgtgccgttcaacccggagtacgaggacgcgtcggtgcttttggccggagagcaaaggacgtcggaaagggtttccgttgcatccgaatggtcaacaacacccgcttaa

SEQ ID NO: 385431 - DNA, 343 bp, Oryza sativa
gttttagatcgcgagcggctctgcagcacaaaaacatttctctcgcgagtcgcgagttgcaccgatcgaattaagggtcgaagatgtttgggttcgggcaccaccacaaccaggcaccggcggcgccgtcggacccgaaccagatcttcaagatcttctgccgcgccaacgagaactactgcctcaccgtccgcgacaggccgtcgtcctcgcccccgtcaaccccaaggacgagcaccagcactggttcaaggacatgaggttcagcaccaaggtgaaggacggggagggcatgccggcgttcgcctcgtcaacaaggccaaccggacttcgcgtcaagcac

SEQ ID NO: 385432 - DNA, 432 bp, Oryza sativa
  unsure (1)..(432): unsure at all n locations
cgctttctcgtagaagagacggcacaatttacacttcgggccctccaaatcttctcctgggccccctccgcctcctgggtcggaagatagtttgggttcgggcaccaccacaaccaggcaccggcggcgccgtcggacccgaaccagatcttcaagatcttctgccgcgccaacgagaactactgcctcaccgtccgcgacagcgccgtcgtcctcgcccccgtcaaccccaaggacgagcaccagcactggttcaaggacatgaggttcagcaccaangtgaaggacggggagggcatgccggcgttcgccctcgtcaacaaggccaccggactcgccgtcaagcacnccctcggccagtcccacnccgtgaagcttgtgccgttcaacccggagtacgaggacgcgtcggtgctgtgggacggagagcaa

SEQ ID NO: 385433 - DNA, 1444 bp, Oryza sativa
  unsure (1)..(1444): unsure at all n locations
cccacgcgcccatcctcttccactctctcctctccccttcgtggcggcggcggcggcggcggcggcgtgacgaggaggagcaatggcgatggcctcctccgcctacgccccagcgggcggcgttggcacccactccgcgccgggcaggatcaggccgccgcgcggcctcggcttctccaccaccaccaccaagtcgaggcccctcgtgctcaccaggcgtgggggaggcggcggcaacatctccgtggctcggctgaggtgcgcggcgtcgtcgtcgtcggcggcggcgaggccgatgtcgcagccgcggttcatccagcacaagaaggaggcgttctggttctaccgcttcctctccatcgtctacgaccacgtcatcaacccgggccactggacggaggacatgcgggacgacgccctcgagcccgccgacctctacagccgcaagctcagggtcgtcgacgtcggcggcgggacggggttcaccacgctcgggatcgtcaagcgcgtcgacccggagaacgtcacgctgctcgaccagtccccgcaccagctcgagaaggcccgggagaaggaggccctcaagggcgtcaccatcatggagggcgacgccgaggacctccccttccccaccgacaccttcgaccgctacgtctccgccggcagcatcgagtattggcccgatccgcagcgaggaatcaaggaagcttacagggttttgaggcttggtggagtggcttgcatgattggccccgtgcacccaaccttctggctgtctcgctttttcgctgacatgtggatgctcttcccgaaggaaggggagtatattgagtggttcaaaaaggcagggttcaaggatgtcaagctcaaaaggattggaccaaaatggtaccgtggtgtccgaaggcatggcctgattatgggatgctctgtgacgggcgtcaaaagagaacatggagactcccctttgcagcttggtccaaaggttgaggatgtcagcaaacctgtgaatcctatcaccttcctcttccgcttcctcatgggaacaatatgtgctgcatactatgttctggtgcctatctacatgtggataaaggaccagattgtgcccaaaggcatgccgatctaagggagatgaactgagctgcaagagaggatagccaatatctgaattaggcttctctatattaggcactttctgtcagttctgtatttacttctgttgtccctgttgttatgtacttcttttactgtggttcttgtttgtggggaaataatattatgagaccttgattaagctcatccgaactcctgagcatggaatggatcgtgtgtagcataattagaatggacatgtgacatttctgcattccaagtattctgaatggtagacaaacaaataatatctgattttgatccccnnnnnnnnnnnnnnnnnnnnnnn

SEQ ID NO: 385434 - DNA, 2243 bp, Oryza sativa
  unsure (1)..(2243): unsure at all n locations
cggacgngtcngagtacaaaacctcgtacattttcagctagccacaagcaacacaagtccaagacaagtcaagcgttcgcaccaagtcaaaccgcgcctcactgccaccttcgtttgcgcaccatggagcttgccctggttggcaacccttcgaatggcgtggcgaaggtccgtgcaactccgtcggctcgctgcccgtcgtcagctccaacgccgtcatcaacccgccggtgaccagcgcggcgggcgccacgctcggcaggcacctcgcgaggcgcctcgtgcagatcggcgccaccgacgtgttcgccgtccccggggacttcaacctcaccctgctcgactacctcatcgccgagcccgggctcaagctcatcggctgctgcaatgagctcaacgccgggtacgcggccgacggctacgcccgcgccctggtcggcgccttcgtcacgttcaccgtcggtggcctcagcgtgctcaacgctatcgccggcgcctacagcgagaacctccctgtgatctgcatcgtcggcgggcccaactccaacgactacggcaccaaccgcatcctgcaccacaccatcggcctcccggacttctcacaggagctccgctgcttccagaccatcacctgctaccaggccgtcattaacaacctcgacgacgcgcacgagcagatcgacaccgccatcgcgacggcgctaagggagagcaagcccgtctacatcagcgtgggctgcaacctggcaggcctctcccacccaacgttcagtcgcgagccagtgccactattcatctcgccaaggctgagcaacaaggcgaacttggagtacgccgtcgaagccgcggcggacttcctgaacaaggcggtgaagccggtgatggtcggtgggccaaagatccgggtggccaaggcgaagaaggcgttcgccggcatcgcggagtcgagcgggtacccgttcgcggtgatgccgtccgcaaagggcctcgtgccggagcaccacccgcggttcatcggcacgtactggggcgccgtgagcaccaccttctgcgccgagatcgtcgagtccgccgacgcctacctcttcgccggcccaatcttcaacgactacagctccgtcggctactccctgctgctgaagcgggagaaggccgtcatcgtgcagcctgaccgcgtggtggtcggcaacggcccggcgttcggctgcatcctcatgacggagttcctcgacgcgctcgccaagcgcctcgaccgcaacacgacggcatacgacaactaccgccgcatcttcatccccgaccgcgagccgcccaatggccagcccgacgagccactcagggtcaacatcctcttcaagcacatcaaggagatgctgtctggcgacaccgccgtcatcgccgagaccggcgactcgtggttcaactgccagaagctcaggctccccgagggctgcgggtacgagttccagatgcagtacggctcaatcggttggtccgtcggcgccacgctcggatacgcccaggcggccaaggacaagcgcgtcatctcctgcatcggcgacggaagcttccagatgacggcgcaggacgtgtcgacgatgctgcggtgcgggcagaagagcatcatcttcctcatcaacaacggcgggtacaccatcgaggtggagatccacgacgggccgtacaacgtcatcaagaactgggactacaccggcctcatcgacgccatccacaactctgacggcaactgctggacaaagaaggtccggactgaggaggagctgatagaggcgatcgcgacggcgacgggcgccaagaaagactgcctctgcttcatcgagatcatcgtgcacaaagatgacacgagcaaagagcttctcgagtggggatccagggtctcggctgccaacagcaggccgcctaatccccagtgatcttgctgctcgtcttctcaggacgcacactcgaaattgctgggctgccaatgtctaagatgtgctgcttatcatcgtctgtgaattaattgtttaacgcttctgtttctgtatccattcaaaattttcttagagaagaggttgaattagtacatgtcgatgggtgttacctatcctatgataatgtatgtaattcaaatgcttggaattaatgttttgtaaacctacactatattgcgatgcaataacatggacgatttgaaggagnnnnnnnnnnnnnnnnnnnnnnnnnnnnnnnnnnnnnnnnnn

SEQ ID NO: 385435 - DNA, 968 bp, Oryza sativa
  unsure (1)..(968): unsure at all n locations
aacatcctcttcaagcacatcaaggagttgctgtccggcgacaccgcgctcatcgccgagaccggtgactcgtggttcaactgccagaagctcaggctccccgagggctgcgggtacgagttccagatgcagtacggctcgatcgggtggtccgtcggcgccacgctcggctacgcccaggcggccaaggacaagcgcgtcatgtcctgcatcggtgacggtagcttccagatgacggcgcaggaagtgtacacgatgttgcggtgcgggcagaagagcatcatcttcctcatcaataatggtgggtacaccatcgaggtggagatccacgacgggccgtacaacgtcatcaagaactgggactacaccggcctcatcgacgccatccacaactctgacggcaactgctggacaaagaaggtccggactgaggaggagctgatagaggcgatcgcgacggcaacgggcgccaagaaagattgcctctgcttcatcgagatcatcgtgcacaaggatgacacgagcaaagagcttctcgagtggggatccagggtatcggctgccaacagcaggccgccgaatccccagtgattttgctagctggtcttctcatgacgcacactcgaatgcgctagtctgccaatgtccgagatatgctgcccattatcgtctgtgaattaattgtctaatgcgtctgcatccagttaaattttctcagccgagaggttgaagtatttatgtagatggggttgcccgtcttatgattatgtttgtaattcaatatgcttggcattaatgttttgtaaacctgtaatgtattgcgatgaaataacatggacgatttgaaggagaagaaaatcacataaatacaaaaaaataaannanttcgttncntanttnntnnnnnnctnntngntnggcttntgggcctgtctnntgtttnnnnttgttntgntntntngcttttt

SEQ ID NO: 385436 - DNA, 574 bp, Oryza sativa
aacagtttattatcgatcgatcggacaattaattaagggagagcaacggcggtggaggaggatctcccaaggaggcagcggtggtggtgccgtcctccggcgacgccaccctgggcgggcacctggctcggcgcctcgtgcaggtgggcgtgagcgacgtgttcgccgtgccgggggacttcaacctgacgcttctggaccacctgatcgccgagcccgggctccgcgtggtgggctgctgcaacgagctgaacgccggatacgcggccgacgggtacgcgcgggcccgtggcgtgggcgcctgcgccgtgaccttcaccgtgggcgggctgagcgtgctgaacgccatcggcggggcgtacagcgagaacctgccgctgatctgcatcgtggggggccccaactccaacgactacggcaccaaccgcatgctccaccacaccatcggcctcccggacttctcccaggagctccgctgcttacaacccctcacctgctaccaggccgtcgtcacaacctcgacgacgcccacgaccagatcgaccgcgccatctccaccgtcatcagggagagc

SEQ ID NO: 385437 - DNA, 1395 bp, Oryza sativa
ccacgcgtccggttgctacgagtacttgctaggaaagaaactgcagtgtgctctgttccaaagagtagtgatggcttctgcctcttctcttggcctattactgatgctcgcggcgctggtctccacggccaccgcgcatttgtcgccgacgttctacgacacgtcgtgcccccgagccatgtccatcatcaagagcaccgtgacggccgccgtgaacaacgagccacgcatgggcgcgtctctgctcaggctgcacttccacgactgcttcgtccaaggctgtgacgcctcaattttgctggccggaaacgagaggaatgcagccccaaacttttctgtcagaggctacgacgtcatcgacagcatcaagacgcagatcgaggccgtgtgcaagcagaccgtctcctgcgccgacatcctcaccgtcgccgcccgcgactctgtcgtcgcgcttggaggtccgtcatggagtgttccgctagggagaagggattccaccggagccgctaccgcggcccaggtgattagcagccttgctccttctacagatagcctcgcacagctcatcagcgcgtacgcgagcaagggacttagcgccactgacttggttgctctctcaggtgcgcacacgattggtatggcacggtgcaggggcttcaggacgaggctatacaacgagaccaacatcgacgccgccttcgcggcggcgctcaaggccaactgcccggcgacgccgggcagcggcgacggcaacctggcgccgctggacacgacgacgcccaccgcgttcgacaacgcctactaccgcaacctgctgtcgaacaaggggctcctgcactccgaccaggagctgttcagcaacggcagcacggacaacacggtcaggagcttcgcgtccagcgcggcggcgttcggcgccgccttcgcgacggccatggtgaagatggggaacatctcgccgctgaccgggacgcagggacagatcaggctcatctgctccgccgtcaactcgtgatctgatcgaccggtttgtatatatccagacgctgggcactcgacaacatgattaattaccagtgcacgaatgcatcaaggaaagaattccagttgcaattaattacaggtgaaacatacttctccgtcctagattctccgtcctagaaagaatccaatcctaacaatgaaatcttgacacatgttcgttattaggattagatttttttttcttggaacggagggggtacgctcgtattagcatacgcaattatagtcctttaaaatcgtagagcattcagtgaagatgtcaccgagaatgtcatgaggaatgttactgaatctgcgtccgtttattagcaggtttgcatgcttcttgatctgtaaaaaaaaaaaaaaaaa

SEQ ID NO: 385438 - DNA, 1329 bp, Oryza sativa
  unsure (1)..(1329): unsure at all n locations
cccacgcgtccgcagaaagtgcaattagcctgcaggcagctaatcagtagtagcttgctagccatggcttctgcaactaattcttcacttagcttaatgctgctggtggctgcagctatggcgtcagtggcatcggcgcagctctcggcgacgttctatgacacgtcgtgccccaatgcgttgtccaccatcaagagcgtcataacagccgccgtgaacagcgaggctcgcatgggggcgtcgctgctcaggctgcacttccacgactgcttcgtccaagggtgcgacgcgtcagttctgctgtccgggcaggagcagaatgctggcccgaacgtggggtcgctgaggggattcagcgtcatcgacaacgccaaggcgcgggtggaggccatctgcaaccagaccgtctcctgcgccgacatcctcgccgtcgccgcccgtgactccgtcgtcgcgctgggagggccatcatggacggttctgttggggagaagggactccaccactgcaagcgaggccttggcaaataccgacctccctgccccttcctctagcctcgcagaacttatcggcaatttctccagaaagggactcgacgcaaccgacatggttgctctctcaggagcacacacgatcgggcaggcgcagtgccagaacttcagggacaggatctacaacgagaccaacatcgattccgccttcgcgacgcaacgccaggccaactgcccacggccgacgggcagcggcgacagcaacctggcgcccctggacacgacgacgcccaacgccttcgacaacgcctactacagcaacctgctgtccaacaaggggctcctgcactccgaccaggtgctcttcaacggcggcagcgcggacaacacggtcaggaacttcgcgtccaacgcggcggcgttcagcagcgccttcacgacggccatggtgaagatggggaacatctcgccgctgaccgggacgcaggggcagatcaggctcagctgctccaaggtgaactcctaattaaggagtagtatgacgggatgcgttcgttgctggaagcaaatcgtgtcgacgacgacataaacgggccacaccacatatacccatatatgtagtataaccacaagtataggtacggtggtgttgtactagtacacgtaaagtatatggcagccagctcgctctagcaatccatcaagtgtatggagcagagcagccatggcattagcacctagtataccaaaataaaagctcctcatgcgaaggcatgcatggaggatcaatgaactgttaccttcacgcnnnnnnnnnnnnnnnnnnnnnnnnnnnnnn

SEQ ID NO: 385439 - DNA, 1339 bp, Oryza sativa
ggccagcgaaaaagcttaaaaaaaactgcagttatttaggtaggattaagcattacgcgcacggcgcatcatatcgctcactctgcatggcttcggcttcttctgtcagcttaatgctgctcgtggctgcagctatggcctcagccgcctcggcgcagctgtcggcgacgttctacgacacgtcgtgcccaaacgcattgtccaccatcaagagcgcagtgacggccgccgtgaacagcgagccccgaatgggagcctcgctggtcaggctgcacttccacgactgcttcgtccaaggctgtgacgcgtctgttctgctgtccggccaggagcagaatgcaggcccgaacgctgggtcacttcggggattcaacgtcgtcgacaacatcaagacgcaggtcgaggccatctgcagccagaccgtctcctgcgccgacatcctcgccgtcgccgcccgtgactccgtcgtcgcgctcggagggccgtcgtggacggttctattgggaagaagggactccaccactgcgaacgaaagccaagcaaataccgacctccctgccccttcctctagcctcgctgaacttatcggcaatttctccagaaagggactcgacgtaaccgacatggttgctctctcaggcgcacacacgatcgggcaggcgcagtgccagaacttcagggacaggctctacaacgagacaaacatcgactccagcttcgcgacggcgctcaaggccaactgcccacggccgacgggcagcggcgacagcaacctggcgccgctggacacgacgacgcccaacgccttcgacagcgcctactacaccaacctgctgtccaacaagggcctcctgcactccgaccaggtgctcttcaacggcggcagcacggacaacacggtcaggaacttctcctccaacacggcggcgttcaacagcgccttcacggcggccatggtgaagatggggaacatctcgcccttgactggaacccaggggcagatcaggctcaactgctccaaggttaactagccggtgatgacgagtacgtgatggtctcagggaataaagctaggccccgacattgctgccaatagcgtgcagctagctgtggccatctcatcactttcatggttcaatggtttcatcagcaagtgcacggaacagactagagagtgtaggtgtatgcatgtgtgatgtcatgtaacgagttgccatgcaaaggcatgaggattacggacctctctttcgtcgtaatcctagcagctacagatttcaactgtcgtgttaaccaagtgaagtgctagtttcgaatgtgttggcccaaaaaaaaataaaaa

SEQ ID NO: 385440 - DNA, 1246 bp, Oryza sativa
gcatttgcaagagtagtagtagtggtgctctggtagtctactgctgcttgatcgatcgatcgatcgccatggcttcttctctgtcagtggccgtgctcctgtgcctcgccgccgccgccgcggcgcagctgtcgccgacgttctacgacacgtcgtgccccagggcgctggccaccatcaagagcgccgtgacggccgccgtgaacaacgagcctcgcatgggggcgtcactgctcaggctgcacttccatgactgctttgtccaagggtgcgatgcgtccgtactgctggcggacacggccacgttcaccggcgagcagaatgctcttcctaacaagaattctctcagaggcttcaacgtcgtcgacagcatcaagacgcagctcgagggcatctgcagccagaccgtctcctgcgccgacatcctcgccgtcgccgcccgcgactccgtcgtcgcactgggagggccgtcatggacggttggtctcgggaggagggactcaaccacggcgagcatggacagcgctaacaacgacctgcctcctcctttcttcgacctcgagaacctcatcaaggcgttcggcgacaagggtttcagtgtcaccgacatggttgctctctcaggtgcgcacacgatcgggcaggcgcagtgcaccaacttcaggggaaggatctacaacgagaccaacatcgacgccggctacgcggcgtcgctcagggccaactgcccgccgacggccggcaccggcgacagcaacctggcggcgctggacacgacgacgccctactcctttgacaccgcctactacagcaacctgctgtccaacaaggggctcctgcactccgaccaggtgctcttcaacggcaacagcacggacaacacggtcaggaacttcgcctccaacagggcggcgttcagcagcgccttctcgtcggccatggtgaagatggccaacctcggaccactcatcgggagccagggacagatcaggcttagctgctccaaagtgaactaataattaagtaaagaatcaaactggatacaaaagcaaacacaaatttgggaataaggctgggccatatatgtcacagtagtagtattttactagtctgaaatgtttgctaagagtgttttctctgatcagcacaaagtgtttgaaacagatcaggaagcccatgttatgtaccgatcagtatggttttgaagttatcaaggaatgcatgaatgataaaaaaaaaaaaaaaa

SEQ ID NO: 385441 - DNA, 517 bp, Oryza sativa
ccgcccacgcgtccgcggacgcgtgggtttgcattgtagattgacaatggcctcttgtctgtcagtcctgttgctcttgtgtctagcacttgcaggttcagtctccgggcaacaactgtcggctacattctattcgaggtcgtgcccgagagctctggccatcatcagggccggcgtgagagctgcggtggcgcaggagcctcgcatgggggcgtcactgctcaggcttcacttccatgactgctttgtccaagcaagtcgtgcatttccacactaccttgacttacatttttatatccatcagtcaattacattgtggtcgcagcctttgcagtttcagttctttacactctttcagtctctcttccagtttaatgtgctgcgtcagaacagaatggactcgtagcactgtgttgacgttggattagagagactatggccaccgaatttgctctcaagtcatactagttcctactactactctgaattaacctgaaaaaattaactcaacgtgcta

SEQ ID NO: 385442 - DNA, 688 bp, Oryza sativa
ccacgcgtccggcgacctgccacctccgtccttcgacgtcgccaacctcaccgcctcgttcgccgccaaggggctgagccaagccgacatggtggcgctctccggcgcgcacacggtcgggcaggcgcagtgccaaaacttccgcgacaggctctacaacgagaccaacatcgacgccgccttcgcggcggcgctcaaggccagctgcccgcggccgacgggcagcggcgacggcaacctggcgccgctggacacgacgacgcccaccgcgttcgacaacgcctactacaccaacctgctgtcgaacaaggggctcctgcactccgaccaggtgctcttcaacggcggcgccgtcgacggccaggtccggtcgtacgcgtccgggccgtcgaggttcagaagggacttcgcggcggccatggtgaagatggggaacatcgccccgttgacgggaacgcagggacaaatcaggctcgtctgctccaaggtgaattaattagcggtgatcatcaacgaaaattctgagtgcatgaggggacaataataaggctatatatgccactgaaatcgatatttgtgctttgcactgatcagtgatcatgttcacgctttcttggatcaaattgtgtccgagaaagtggcgtgtttgcaagaatttgatcgtgtacactgaattctgaagagccct

SEQ ID NO: 385443 - DNA, 666 bp, Oryza sativa
  unsure (1)..(666): unsure at all n locations
ccacgcgtccgcacagagttgtttgcattgtagattgacaatggcctcttgtctgtcagtcctgttgctcttgtgtctagcacttgcaggttcagtctccgggcaacaactgtcggctacattctattcgaggtcgtgcccgagagctctggccatcatcagggccggcgtgagagctgcggtggcgcaggagcctcgcatgggggcgtcactgctcaggcttcacttccatgactgctttgtccaagggtgcgacgcgtccgtactgctgaacgacacggccaacttcaccggcgagcagggggcgaaccccaacgtcggatccatcagaggattcaacgtcgtcgacaacatcaaggcgcaggtcgaggccgcgtgcaagcagaccgtctcctgcgccgacatcctcgccgtcgccgcccgcgactccgtcgtcgccttgggtgggccgtcatggagggttcttctcgggaggcgtgactcgacgacggcgagcttggcgctggcgaacagcgacctgccacctccgtccttcgacgtcgccaacctcaccgnctcgttcgccgccaaggggctgagccaagccgacaatggggcgctctccggcgcgcacacggtcgggcaggcgcagtgccaaaacttccgcgacaggctctacaacgagac

SEQ ID NO: 385444 - DNA, 699 bp, Oryza sativa
ggcgaagatgcagatcttcgtgaagaccctgacggggaagacgatcacgctggaggtggagtcctcggacaccatcgacaacgtgaaggcgaagatccaggacaaggaggggatcccgcccgaccagcagcggctcatcttcgccggcaagcagctggaggacgggcgcaccctcgccgactacaacatccagaaggagtcgaccctccacctggtgctccgcctccgcggcggcgccaagaagcgcaagaagaagacgtacaccaagcccaagaagcagaagcacaagcacaagaaggtgaagctcgccgtgctccagttctacaaggtggacgacgccaccggcaaggtcacccgcctccgcaaggagtgccccaacgccgagtgcggcgccggcaccttcatggccaaccacttcgaccgccactactgcggtaagtgcggcctcacctacgtctacaaccagcaggcttaggcgtaggctcctgttctttgggggcggaagtaaggaaggaggaggaaatcgaactggttattagatgataattaatccttttttgtcatgtcgtattaaactagtctccttggaactgaacaccttagcatcacctctgtgaagattgtgatgccctacttttggttttgaaatcatgttatgtactactgtcgaattatgtttgggttaatcatctttttatc

SEQ ID NO: 385445 - DNA, 832 bp, Oryza sativa
  unsure (1)..(832): unsure at all n locations
cgccaccaacaccaccgccatttccactcgctcgagagcaccagattagcggaggagataggggtccgcgactcgcgagnggagaggaaagcaagcggagttgaggatgcagatcttcgtgaagacgctgacggggaagaccatcaccctcgaggtggagaacagcgacgccgtcgccaacgtcaaggccaagatccaggacaaggaaggtatcccgccggaccagcagcgcctcatcttcgccgggaagcagctggaggatggccgcacgctggccgactacaacatccagaaggagtccacgcttcacctggtgctttcgcctacgcggcggccacatcttggatcgagccctcgctcagggtcctcgcctacaagcacaacatcaacaaagattggtcttcaaggaagtgcttatgcaactcttgcctcccagggctacaaactgccgcaagaagaagttttggccacagcaatcagctgaggccaaagaaggtgaggtggtgcaggtacttcaacttctgaagagtcatctcatccatcattccatcagtatcatcagagtcaccagcgttcaagcgttatcaaagctaaagttcctactggatgccgaatctagactattactttgactacttgttactgccttgagtaataagcacttgttacctagtactttatgtgctagctgtttctttttcagccatgtcaagtttgctggatgttgaatcttgactaaaccttttggggacggttaatagcaagcatgcatagtaggtggaagtaacatggaggcataaccatcccttaatttccataaaaaaaaaaaaaa

SEQ ID NO: 385446 - DNA, 1518 bp, Oryza sativa
  unsure (1)..(1518): unsure at all n locations
acccttccggctgcttccgatcaaatcgatccccaaattcccggatccccgcagccgctcctgcgactcgtaggtctcgtcaagtcggcggcgacgactttgatctctattcaagatgcagatctttgtgaagactctcactggcaagaccataacccttgaggttgagtcctcggataccattgacaatgtaaaggccaagatccaggacaaggagggaatcccaccggaccagcagcgtctcatcttcgctggcaagcagcttgaagatgggcgcacgcttgctgactacaacatccagaaggaatccaccctccaccttgtcctccgcctccggggaggcatgcaaatcttttgtcaagaccttgactggcaagactatcancccttgaggttgagtcttctgatactattggacaacgttaaggcaaagatccaggacaaggaaggggattcccccggacccagcaagcgtcttatcttttcttggcaagcagctcgaggatggtaggacccttgcttgcttcaacatccagaaggagtccacccttcaccttgttctccgcctaaagggaggaatgcaaatcttcgtgaagaccctttactgggcaagaccattacgcttgagggtgagtcatcaaacacgatcgacaacgtgaaggggaagatccaggacaaggagggcattcccccagatcaggagcgtcttatttttgcctgcaagcatctggaggatggcatgaccctctctgactacaacatccagaaggagggcacccttcaccttggtctgcgcctaaggggtggaatgcagattgttctgaagactctcactggcaagactattaccctggagggtgagagctcatacaccattgacatacatgaaagcgaatagccaggagtttgacggcatccccccggaccagcagagactcatcttcgcttgtaaacaactggaggattggcgcacccttgccgactacaacattcagaaggaggctaccctacactttggtgctccgcctcaggggtggtatgcagatcttcgtcaagactcttactggcaagaccattactctggaggttgagagctccgatacccatcgacaatgtgaaggctaagatccaggacaaggaaggtattcccccagaccagcagcgcctgatcttcgccggcaagcagctggaagatggccgtaccctcgccgactacaacattcagaaggagtctaccctccacctggtgctccgcctcaggggtggtcagtaatcattgattgatggaattgctgctgtactgttatcctgtgtctgcattatcctcgtgaaaactttatttgtgcttgtaggggaccatcgagtccgtttaaatgtgctgtactggtgtccgaacatttgctgggtcatagcagtttaaactaattaataagtaaactattaatctgcgttgctaaatttgcttatagttctgcacccattacaactcttcattcaaatctgcctacatttcagatt

SEQ ID NO: 385447 - DNA, 825 bp, Oryza sativa
gcctcgcccggccgttccggtatggaaggctcggctcgacccacgcgtttttctttcccacacccgtctcgccgtcgcagcgcgcggaggctacccctcccccgcggccgtcaagatgcagatcttcatgaagaccctgacggtgaagaccatcacgctggaggtggcgtcctaggacaccatctgcaacgcgtaggtcactatccaggacaaggaagggatccccccggaccagcagcgcctcatcttcgccggcaagcagctcgaggatggccgcaccctcgccgactacaacatccagaaggagtccaccctccacctcgtgctccgcctccgcggcggcgccaagaagcgcaagaagaagacgtacaccaagcccaagaagatcaagcacaagcacaagaaggtgaagctcgccgtgctccagttctacaaggtggacgacgccaccggcaaggtcaccaggctcaggaagggagtgccccaacaacgactggcggcgcgggcaccttcatggccaaccacttcgatcgccactacttgcggcaagtgcggcctcacctacgtctacaaccagaaggcctaggttgatgcttgcttgctgctcgctttgctctgatctgatgggcttttcatcccttttatctgttattatcatgagctgagatgagctgctgctggttacatgttattcaagattatatgcgttttgttctccgtttacaattggaaaactttgagtagtagcctctgtgaatatcattatctgtttctgaattgatgatgcgatgtgagttcacttgtgttttctgattcctgttggat

SEQ ID NO: 385448 - DNA, 1462 bp, Oryza sativa
  unsure (1)..(1462): unsure at all n locations
cccacgcgtccgaccacgcgtccggccacgcgtgcggcgaagctatgcgttctctaatcgcctcgtcaagatgcagatattcgttagagaccctcactggcaagaccatcaccttggaggttgagtcctccgatacgattgacaatgtgaaggctaagattcaggacaaggagggcatccctccggaccagcaacgccttatcttcgctggcaagcagcttgaggatgggcgtactctcgcggattataacatccagaaggagtccaccttgcaccttgttctccgccttcgtggaggcatgcaaatatttcgtgaagaccctcaccgggcaagaccattaccctggaggtcgagtcctccgacaacgatcgataatgttgaaggccaagatccaggacaaggaggggaatcccaccagaccagcagcgtctcatcttttgctggggaagcagctcgagggatagccgcacccttgcagactacaacatccgaaaggtttccaccctgcaccttgtcctgcgcctccggggcggtatgcagatctttgtgaagacccttactggcaagacgatcaccttgggaggttgagtcctctgacacgatcgacaatgtgaagggccaagatccaggacaaggagggtattccaccagaccagcagcggctcatcttcgctggcaagatgccttgaggacggccgcacccttgctgactataacatccagaaggagtccaccttgcacttggtcctccgccttcgtggagggtatgccagatcttcgtgaagacccttcaccggcaagaccatcaccctggaggttgagtcgtcttgacacgatcgacaatgtgaaggcccaagatccaggaacaaggagggtattccaccagaccagcagcgccctcatctttcgcttggcaagcagctttgaggatgggtcgccacccttgcagattacaacattccagaaggagtccaccctgcaccttgtcctgcgccttcgtggaggtatgcagatcttcgtgaagaccctcactggcaagaccatcactctgggaggttgagtccctctgacaccatcgacaacgtgaaggcccaagatccaggataaggaggggcatccntccagaccagcagcgcctcatcttcgccggcaagcagctcgaggatggccgcacccttgccgactataacatccagaaggagtcccccctgccccttgtcctgcgcctccgtggtggtctctgagcgtgtgctgtggtgcagccttgggcttccattatacctatgccgctcgtctgtcatatcatcgtgttcatgagttgtgttgtgttctggtttaaagtccctaagttgtgttgatactattatccctactagtacaatttgcttccctgtgcaccggggcccatcgatgatattatccttccccttctgttaatgtttctgagatgtttgatccgag

SEQ ID NO: 385449 - DNA, 815 bp, Oryza sativa
  unsure (1)..(815): unsure at all n locations
tttttgcaccggccgccactaatctgcgggagagagcgttcgttcgttcgccggggattggnagngccagcaagatgcaagatccctcgtgaagacgctgacggggaagaccgatcacgctggagttggaagagcagcgacacccatcgacaacgtcaaggccaaagatcccaggaccaaggaaggtatcccgccggaccagcagcgcctcatcttcgccgggaagcagctggatgacggccgcaccctggccgactacaacatccagaacggagtcgacgctgcacctggtgctccgcctccgcggcggcagcagggggcggctaccccaaggggatcgagcccaacctccgcgagctcgcgcagaagtacaacgagaacaagctggtttgccgcaggtgctatgcacgccttcccctcaggtccaccaactgccgcaagaagaagtgtggcccacagcaaggagctggaggttgaaagaagaagttcatcaactcgcttttcgatagcgtgagccactggaaagtgttcaccagctgaatcaatctcttggatctccccgtgtgcgcagctaccatgttatgtccgtagtctagaagtactccgtagttgttaatctcttggaacttcgtatgcccagctaccatgttatgtccgtagtctagaagtagttgtggtacttagtacgcttgagagctctgggttgttgcttaaagaagttgtaaccctgcgaagctgcgactgggatgttgaaccctctatcatcactctgaatgaagaagttatcgttactagtagtaaaaaaaaaaaaaaaa

SEQ ID NO: 385450 - DNA, 3599 bp, Oryza sativa
  unsure (1)..(3599): unsure at all n locations
tttttttttttttttttggacacaatgattagggatcacttattcattatagttcttccatgctgctctaccacagcaaaacgtttcagacaccatcaaaccagacttaaggatacacattacaggtaaatagtacacaatgaaacgggacacgaccaaggaccagaccagacaaccatagcctccattgggngaagacaaataggcagacttgtgaaccctagaacagcagcagcttccatggcctggaggacttactgggccaccacggagggcggagcaccaggtggagctgtggacttccttctggattgttgtaatcccgcaagggttgcgggccatccctaaagctgcttaccaggcaaagatcaagacgctgctggtccgggggggatgccctccttgtcctggatctttgccttcacgttgtcaatagtgtcggacgactcaacctcaagggtaaatggtcttgccagtcagggtcttcacgaagatctgcatcccacccctgagcctgagaaccaggtgaagggtggactcctttgtggatgttgtagtcagccaaggtgcgcccatcctccaagctgcttgccggcgaagatgaggcgctgctggtccggggggataccctccttggtcctgggatcttggccttcacgttgtcgaatcgtgtccgaggactcgacctcaagcgtgatggtcttgccggtcagggtcttgacgaagatctgcatacctccccctgagcctaagcacaaggtggagggtggactccttctggatgttgtagtcggcaagggtgcggccatcctccagctgcttgccagcaaagatgagacgctgctggtccggggggatgccctccttgtcctggatcttggccttcacgttgtcgatcgtgtccgaggactcgacctcgagggtgatggtcttgccggtcagggtcttgacgaagatctgcatacctcccctgagcctgagccacaaggtggagggtggactccttctggatgttgtagtcagcaagggtgcggccatcctccagctgcttgccggcgaagatgagacgctgctggtctggggggatgccctccttgtcctggatcttggccttgacattgtcaatggtgtcagacgactcgacctcaagggtgatggtcttgccagtcaaggtcttgacgaagatctgcatgcctcccctgagcctgagcacaaggtggagggtagactccttctggatgttgtagtcggccagggtgcggccatccctcagcttgcttgccaacgaaagatgaagacgctgctggtccgggggaatgccctcccttgtcctggatcttggccttgacattgtcaatgggtgtcagacgaactcgacctcaaagggtgatggtcttgcaagtcaaaggtcttgacgaagatctgcatgcctcccctgagcctgagcaaaaaggtgaagggtggactccttctggatgttgtagtcggccagggtgcggccatcctcaagctgcttgccagcaaagatgagacgctgctggtccggggggatgccctccttgtcctggatctaggcctggacatctgtcaatggtgtccgaggactcaacctcgagggagatggtctggccggtgagggtctctcacaaagatctgcatcttgagaaggcgattcgacgcttcgcttcgaggggagatttttttttccccacgcgtccgcggacgcgtgggcggacgcgtgggcggacgcgtgggcggacgcgtgggcggacgcgtgggcgaaaaatttgtgccgaatctcgcgaggctctgggcgtctttatcgaatcctctcgcgtcctcaagatgcagatctttgtgaagacattgaccggcaagactatcaccctcgaggtggagtcctctgacaccatcgataattgtcaaggctaagatccaagataaggagggcatccccccggaccagcagcgtctcatctttcgctggcaagcagctggaggatggcaggacccttgctgactacaacatccagaaggagtcgacccttcaccttgtcctccgccttccgtggtggcatgcagatctttgtcaaagactctgaccgggcaagactatcaccctttgaggtggaggtcttcttgacaacatcgacaacgtcaaaggccaaagatccagggacaaagaggggcttccccccagaccagcagcgtcttcatgcttcgccggcaagcagctgggaggatggcaggacccttggctgactacaacatccagaaggagtccaccctccaccttgtcctccgcctccgtggtggcatgcagatctttgtaatgttcactgaccggcaagaccatcacccttcgaggtggaatcttctgacaccatcggacaacgtcaaggccatagtatccaggacaaggagggcatttccccgggaccagcagcgtctcatctttgccggcaagcagcttgaggacggcaggacccttgctgactacaacatccagaaggagtcaacgcttcaccttgatcctccgtctcaggggaggcatgcaaatcttcgtgaagactctgaccggcaagaccatcaccctcgagggtggagtctttctgataccatcgacaatgttcaaggccaagatccacgacaaggagggcattcccccggaccagcagcgcctcatcttttgctgggcaagcagctggaggatgggcaggaccctttgctggacttacaacattccagaaggagttccacccttccaccttgttgcttccggctttcgttggtggtatgcaaatcttttgtcaagaccttcacaggcaagaccatccacccctggaggttgagagcgtcggacacccatccgacaacgtcaaggcccaagagtccagggacaaggaggggcatccccccccagaccagcagcgtctcatcttcgccggcaagccagctcgaggatggccgcacccttgcccgantacaacatcccagaaggagtctaccctccaccttggtgcttcgtctccgtggtggtatgcagatcttccgtgaagaccttgactggggaagacccatcactttggagtttgagagctcccgacacccattgataaatgtgaaggccaaagatcccaggacaaggtaggggattcccccagaccagcagcgtctgatcttcgctggccaagcagctgggagggatggacgcaccctcgccgactacaacatccagaaggagtccaccctccacctgggtgctcacgccctccgttggttggttcagtaaatcaagccagtttggtggagcctgccgaatgtgcctggtcatcaccgagacctctgttcgtcaagtatttgtggtgcctaaatgtgctacttgtgtctggtttaaatggaccgatcgagtccgtatgatatgttagttttaagaaacagtttcctgttgggacagcagtatgctttatgaataagttggatttgaacctaaatatgtgctcaatttgctcatttgcatctcattcctgttgatgttttatctgagttgcaagtttgaaaatgctgcatattcttattaaatcgtcatttacttttaa

SEQ ID NO: 385451 - DNA, 888 bp, Oryza sativa
  unsure (1)..(888): unsure at all n locations
nttttttaattttttttttgnaacancaaggnagnaangncnntttcnangncacaactntnagngttttnaggtgcaagcatgccatttgaaccacaaaaatgttgngcnatgnacacgggcatgtnagttgtagcattcacaacataccgggtttctttttaggaggtaaaactctacgggtctcacagcatagtaaaaggtatcgtgccgtgcacgacacaatattgtctacaccatctggaatcttgtttaacactagtattgtagaatcagcaatggcagcatacaccagcaagatctttgccctgtttgccttaattgctctttctgcaagtgccactactgcaatcaccactatgcagtatttcccaccaacattagccatgggcaccatggatccgtgtaggcagtacatgatgcaaacgttgggcatgggtagctccacagccatgttcatgtcgcagccaatggcgctcctgcagcagcaatgttgcatgcagctacaaggcatgatgcctcagtgccactgtggcaccagttgccagatgatgcagagcatgcaacaagttatttgtgctggactcgggcagcagcagatgatgaagatggcgatgcagatgccatacatgtgcaacatggcccctgtcaacttccaactctcttcctgtggttgttgttgatcaaacgttggttacatgtactctagtaataaggtgttgcatactatcgtgtgcaaacactagaaataagaaccattgaataaaatatcaatcattttcagacttgcaaaaaaaaaaaaaaaaaactcgagggggggcccggtacccaattcgccctatagtgagtcgtattacaattcactgggccgccgttttnaacncgtgn

SEQ ID NO: 385452 - DNA, 675 bp, Oryza sativa
  unsure (1)..(675): unsure at all n locations
aatactataggacaagngntcncggnggcgtngataggaccccggtgcnggaattggcagggccttgggtttgtttaaaaatatgttgtggatcacattggcggcaaacccgcaaattttgcccgtttccctgattgtttttttgcagggccactactgcatcaccacttatgcagtatttcccaccaacattagccatgggcaccatggattccgtgtaggcagaacctatgatgcaaacgttgggcatgggtagctccacagccatgttcatgtcgcagccaatggcgctcctgcagcagcaatgttgcatgcagctacaaggcatgatgcctcagtgccactgtggcaccagttgccagatgatgcagagcatgcaacaagttatttgtgctggactcgggcagcagcagatgatgaagatggcgatgcagatgccatacatgtgcaacatggcccctgtcaacttccaactctcttcctgtggttgttgttgatcaaacgttggttacatgtactctagtaataaggtgttgcatactatcgtgtgcaaacactagaaataagaaccattgaataaaatatcaatcattttcagaaaaaaaaaaaaaaaaaaaaaactcgagggggggcccggtacccaattcgccctatagtgagtcgtattacaattnc

SEQ ID NO: 385453 - DNA, 668 bp, Oryza sativa
  unsure (1)..(668): unsure at all n locations
cgttagaataggatcccgggggcgggattgggaggngatttttaacccnttgggattgttaanattgtatgtggatnagcatggcngcaaacaccacnagaattgccctgttgccntaaattgtttttttgcaagtgcaattntgcantcaccaattatgcagtatttcccagcaacattagccatgggcaccacggaatcgtataggcagtaaatgatgcaaacgttggggcatgggtagntccacagccatgttcatatcacagccaatggntcccctgcagcagcaatgttgcatgcagctgcaaggcatgatgcctcagtgcaactgtgacaccagttaccagatgatgcagagcatgcgaacaagttatttgtgcgtggactcggcgcagcagcacgatgatgatgaacatggtcggaatcgcagatgccatacatgtgcaacatggtcccctgtcaacttccaactctcttcctgtggttgttgttgatcaaacgttggttacatgtactctagtaataaggtgttgcatactatcgtgtgcaaacactagaaataagaaccattgaataaagtatcaatcaatttcagacttgcaaaaaaaaaaaaaaaaaaactcgagggggggcccggtacccaattcgccctatagtgagtcgtatta

SEQ ID NO: 385454 - DNA, 675 bp, Oryza sativa
  unsure (1)..(675): unsure at all n locations
gnaatatgttccccngggtgnnggattgggcagggtggtttttttttaaanatagtttggggattcancatggcggcaaaccccacnanatntttgccctgntnnccttaattgtttttttggcaagngccaataattgccaattcaccaattaggcngtatttcccacccaaacattacccnttgggcaccatggatccgngtaggccagtaacatggatgcgggcctgcgggcatgggtggacccgcagccatgttcatgtcagcagccaatggcggtcccctgcagcagcaatgttgcatgccagctgcaaggcatgatgcctcagtgccactgtggcaccagttgcccagatgatgcagagcatgcaacaagttatttgtgctggactcgggcagcagcagatgatgatgaacatggcgatgcagatgccatacatgtgcaacagggcccctgtcaacttccaactctcttcctgtggttgttgttgatcaaacgttggttacatgtactctagtaataaggtgttgcatactattcgtgtgcaaacactaggaaataaggaaccattgaataaagtatcaatcattttcagacttgcaaaaaaaaaaaaaaaaaactcgagggggggcccggtacccaattcgccctatagtgagtcgtattacaatttc

SEQ ID NO: 385455 - DNA, 769 bp, Oryza sativa
agggaacaaaagctggagctccaccgcggtggtcggccgctctagaactagtggatcccccgggctgcaggaattcggcacgagatacaccagcaagatctttgccctgtttgccttaattgctctttctgcaagtgccactactgcaatcaccactatgcagtatttcccaccaacattagccatgggcaccatggatccgtgtaggcagtacatgatgcaaacgttgggcatgggtagctccacagccatgttcatgtcgcagccaatggcgctcctgcagcagcaatgttgcatgcagctacaaggcatgcatgcctcagtgccactgtggcaccagttgccagatgatgcagagcatgcaacaaagttatttgtgctggactcgggcagcagcagatgatgaagatggcgatgcagatgccatacatgtgcaacatggcccctgtcaacttccaactctcttcctgtggttgttgttgatcaaacgttggttacatgtactctagtaataaggtgttgcatactatcgtgtgcaaacactagaaataagaaccattgaataaaatatcaatcattttcagacttgcaaatattgggtatttggatttctgtcccatgtccctcttgaaagccatgctgtacatgttggagttcccccttggacccaacctactccatgctcccatgttgatcttaaattccctgttcccccagagcatgtaaattttcttatgctaatcagagcaagctcgatgtctcattaaca

SEQ ID NO: 385456 - DNA, 661 bp, Oryza sativa
gaattccctgcaggaaaggatgccttccacctcagggttcgggttcacccgttccatgtgctccgtatcaacaagatgctttcgtgtgccggggcagataggctccagactggaatgaggggtgcttttgggaagccacagggaacctgtgctagggtggatattggccaggtcctcctttctgtgcggtgcaagcccaacaatgctgtccatgccagcgaagccctccgtcgtgccaagttcaagttccctggtcgccaaaagatcattgagagtagaaagtggggtttcaccaagttcagccgcgatgaatacgtcaggcttaagagcgagggtagaatcatgcctgatggtgtcaatgctaagctacttggttgccatggtcgcctctctgctcgtgcccccgggaaggccttcctctcagccgcttagatatatctatccttatcatctgtgggaaacgaaatatcggacctttttgtttgtttgtagactcgatcatatatcactttgttgaaccctgaatcaccaagtgtctggtgctatattgcctggtctgaagctatcttgtgttgaacatctttatctgaaatatatatcagatgactttcgtgtcgctaaaaaaaaacacaaaaaaaaagggcggcgctcgcgatctaaa

SEQ ID NO: 385457 - DNA, 984 bp, Oryza sativa
cagctcgatcgctcgtatcactcatggctcaaagagggtaaccgagttagaaactgaggaggaagcaactcgacgacaccaaccaatggcggagcacgccacgggagtgtacgggcacccgtacccgcgcgtcgaccagtacgggaaccctgtgccgccggtcgaccagtacggcaaccccgtcccggacgagccggcgccgcgcgacacggccgcggggtacgtggcgccgccggaccccgcggtgtcgactggcgactacggcctcgccggcgcggaggcgccggcacccgcacgagagcgcggtgatgagcggcgcagccggcgctgccgtcgcaccaggaggcgaggcgtacacgcgcgacggcggcggcgtagttcccccggccggcgagaagacgttcgcctacgagggcacggtcagcgccgccggctcacgggcgcctccgggcagctccagcccaccaccagggaggaggggcacacgacgctcggcgagacgttgcgccgctccggcaaatccagctccagctccagctcgtcgtcggaggatgacgggcaaggtgggcggaggaagaagaagagcatcaaggagaagataaaggagaagcttcccggcagccacaagcaggaggagcagaagcaagctggccacacggctccggcggccgggacggggacggggacggggacgcatgcagcggggaagcacgagaagaagggcatcgtggagaagatcaaggagaagctccccggccacggccaccactgagcgagagctcgcgcgcacgcactttcatcggttgacgttcgtgcaactgtccatgcatgtatgtataataccagtcgtgtttcagttcgttaattttacggtcgatgtgtggtctcggtaaaactaggtggtgtacagtgcgtctatgcatgtacggtgtatccaataatccagagtcagatctcttttaattatcaaaaaaaaaaaaaaaa

SEQ ID NO: 385458 - DNA, 1557 bp, Oryza sativa
cagcaccaccaccacctccacctcctcccccctcgctgccggacgacgagctcctcccccctccccctccgccgccgccgcgccggtagaagatggctgacgccgaggatatccagcccctcgtctgcgataatggaactggtatggtcaaggctgggttcgccggagatgatgcgcccagggctgtcttccccagcattgtcggccgccctcgccacaccggtgtcatggtcggaatgggccagaaggacgcctacgtcggcgacgaggcgcagtccaagaggggtatcttgaccctcaagtaccccatcgagcatggtatcgtcagcaactgggatgatatggagaagatctggcatcacaccttctacaacgagctccgtgtggccccggaggagcaccccgtcctcctcaccgaggctcctctcaaccccaaggccaatcgtgagaagatgacccagatcatgtttgagaccttcaacacccctgctatgtacgtcgccatccaggccgtcctctctctgtatgccagtggtcgtaccacaggtattgtgttggactctggtgatggtgtcagccacactgtccccatctatgaaggatatgctctcccccatgctatccttcgtctggaccttgctgggcgtgacctcactgactacctcatgaagatcctgacggagcgtggttactcattcaccacaacggccgagcgggaaattgtgagggacatgaaggagaagctttcctacatcgccctggactatgaccaggaaatggagactgccaagaccagctcctccgtggagaagagctacgagcttcctgatggacaggttatcaccattggtgctgagcgtttccgctgccctgaggtcctcttccagccttccttcataggaatggaagctgcgggtatccatgagactacatacaactccatcatgaagtgcgacgtggatattaggaaggatctatatggcaacatcgttctcagtggtggtaccactatgttccctggcattgctgacaggatgagcaaggagatcactgccttggctcctagcagcatgaagatcaaggtggtcgcccctcctgaaaggaagtacagtgtctggattggaggatccatcttggcatctctcagcacattccagcagatgtggattgccaaggctgagtacgacgagtctggcccatccattgtgcacaggaaatgcttctaattcttcggacccaagaatgctaagccaagaggagctgttatcgccgtcctcctgcttgtttctctctttttgttgctgtttcttcattagcgtggacaaagttttcaaccggcctatctgttatcattttcttctattcaaagactgtaatacctattgctacctgtggttctcacttgtgattttggacacatatgttcggtttattcaaatttaatcagatgcctgatgagggtaccagaaaaaatacatgtgttctggttgtttttgagttgcgattattctatgaaatgaataacatcgaagttatcatcccaaaaaaaaaaaaaaa

SEQ ID NO: 385459 - DNA, 953 bp, Oryza sativa
  unsure (1)..(953): unsure at all n locations
ccagcgtccggtcccttacaatttcccgttcagcagtggtagtgaaggacatcaagnagaagcttgcatatgtggcccttgactatgagcaggagctggaggctgcaaagagcagctcatctgtggagaagagctatgagctgcctgatggacaggtgatcaccattggggcagagaggttccgatgccctgaggtcctcttccagccctctttcatcggtatggaagctcctggaatccatgagaccacttacaattccatcatgaagtgtgatgtggatatcaggaaggacttgtatggtaacattgttctcagtggtggatcaaccatgttccctggtattgctgaccgtatgagcaaggagatcactgccctcgcaccaagcagcatgaagatcaaggtggtggcaccgcctgagaggaaatacagtgtctggataggagggtccatccttgcctcccttagcaccttccaacagatgtggatctcaaagggagagtatgatgagtcgggtccagcaattgttcaccggaagtgcttctaagctctggctttttaatcgcttatctacaaggcagtttcttttcagttttcacaagcccttgtcatgtaagctactctgtttgggattgttggtgtcctatcagaatgttgttggatttgtttcatggctgaatattatgcaccttctgaactcttggtatgcatttgtccggtggctgctgtattatacatggcatgcatggtccaacttttgtcatgctaagtttgtggttagtggtaggaccaaaagaaaaatgggagatgtacccactacctaggatcgtctattgtaatcgtacttgtgcgagtcatgttatcatttatcttgtacattcatctccaagataagtgatctggttctttgatcgtttgattgatggtttttggttcttaaaaaaaaaaaaaaaaa

SEQ ID NO: 385460 - DNA, 850 bp, Oryza sativa
  unsure (1)..(850): unsure at all n locations
ctagctgttacaaggtttgttgggtagcctagctacacaagaaagagaaggaggaggagaaggaagagggaggaggaaaagaaagaagagctagagaagaagtttgttgtatttgcagtagtaagaagaaagaaagaaagtagcaggtagagagagagatggcggacgctgatgacatccagcctctggtgtgcgacaacgggacggggatggtgaaggccgggttcgcgggggacgacgcgccgcgggcggtgttcccgagcattcgtggggaggcctcggcacacgggggtgatggtggggatggggcagaaggtcgcgtacgtcggggacgaggcgcagtcgaagagaggcatcctgacgctcaagtaccccatcgagcacggcatcgtcagcaactgggacgacatggagaagatatggcaccacaccttctacaacgagctccgcgtcgcccccgaggagcacccggtgctgctgacggaggcccccctcaaccccaaggccaaccgcgagaagatgacccagatcatgttcgagaccttcaacgcccccgccatgtacgtcgccatccaggccgtgctctccctgtatgccagtggacgtacaactggtatcgtgttggactctggtgatggtgtcagccacaccgtgccaatctatgaaggatatgcccttcctcatgccatcctgcgtctggacttgctgggcgtgacncactgacacttgatgagattcttactgagagaggtatccttcataccatgctgacgggaattgtaaggncatcaggagagctgcaatgtggcctgatatgancagactgagntggaaaggagcattttggaaa

SEQ ID NO: 385461 - DNA, 337 bp, Oryza sativa
caacgttggattgcttctgattttggcgatggagtgagaaagacagcgcctacctatgacggatctatccttactaatgccatcctgcgtctggaccttgctgggcgtgacctcactgacagctcgatgaagattcttactgagagaggttactccttcactaccactgctgaacgggaaatcgtaagggtcatcaaggagaagcttgcatatgtggcccttgactatgagcaggagctggaggctgcatagagcagctcatctgtggagaagagctatgagctgcctgatggacaggcgttctcccttgttttatagattggttttttttctccca

SEQ ID NO: 385462 - DNA, 748 bp, Oryza sativa
  unsure (1)..(748): unsure at all n locations
aaaaaaaattgtntccgttcttgagatcactttagtctttatagctatatatagaaaccacccatagatagctatccctctcataaacaaattgatagttaagattttctgcaacaaaaatatggcttccaacaaggtagtgttctcagtgttgcttctcgccgtcgtctccgtgctcgcggcgacggcgaccatggcggagtaccaccaccaagaccaggtggtctacaccccgggcccgctctgtcagccaggaatgggctacccgatgtacccgctcccgcgttgccgggcgttggtgaagcgccagtgcgtcggccgtggcacggccgccggccgccgagcaggtccggcgagactgctgccggcagctcgccgccgtcgacgacagctggtgcaggtgcgaggcgatcagcacatgctgggaggcatctacagggagctcggcgcccccgatgtcgggcaccccatgtccgaggtgttccgcggctgccggagaggggacttggagcgcgcggcggcgagcctcccggcgttctgcaacgtggacatccccaacggcggaggtggtgtctgctactggctggcgagatctggctactagctaggctactgtagctagctgtgcatgtatgtggtgtggttactaaaataattagtgttttccttttgtttggaagcatatgtgtggtgaataaatgatgaactccgatgttcctctctataaaaataaaaaaaacactagctc

SEQ ID NO: 385463 - DNA, 665 bp, Oryza sativa
cccacgcgtccgcccacgcgtccgctctcatacaaattcagactaaagattttctgcaaacaaaaagccatggcttccaacaaggtagtgttctcggcgttgctcctcatcatcgtctccgtgctcgccgcgacgggacccatggcggaccaccacaaagaccaggtggtgtacagcctcggcgagcgttgtcagccaggaatgggctacccgatgtactcgctgccacgctgccgggcggtggtgaagcgccagtgcgtggggccacggcgcacccggcggcgcgtggacgagcaactccggcaggactgctgccggcagctcgccgcggtcgacgacagctggtgcaggtgctcggcgctcaaccacatggttggaggcatctacagggagctcggcgccaccgatgttgggcaccccatggccgaggtgttccccggctgccggagaggggacttggagcgcgcggcggcgagcctcccggcgttctgcaacgtggacatccccaatgggacaggtggtgtctgctactggctaggttatcctaggaccccgagaactggtcactaggctactaaagctagctgtgtgtatgactctgtggggttgctaaataactagtgctttcatttgtcaggaagcatatatacatatggtgaataaat

SEQ ID NO: 385464 - DNA, 660 bp, Oryza sativa
  unsure (1)..(660): unsure at all n locations
nnggccttnaaaaagancccgggngngattgaaggaaacaaggagtgtttcagggttttcctttttcggtgtggggagggacatggggataccaccaccagacaggtgttaaacccggcccgttttcagccaggatgggtaccgattaccgtccgggttcccggggttgggaagccccagtgcttcggccgtggcacgcccgccgccgccggagcagttccggcgagactgttgccggcagttccccgcccgtcgacgacagcttggtgcaggtgcgaggcgatcagccacatgctgggaggcatctacagggagctcggcgcccccgatgtcgggcaccccatgtccgaggtgttccgcggctgccggagaggggacttggagcgcgcggcggcgagcctcccggcgttctgcaacgtggacatccccaacggcggaggtggtgtctgctactggctggcgagatctggctactagctaggctactgtagctagctgtgcatgtatgtggtgtggttactaaaataattagtgttttccttttgtttggaagcatatgtgtggtgaataaatgatgaactccgatgttcctctctataaaaaaaaaaaaaaaaaaaaaactcgagggggggcccggtacccaattcgccctatagtgag

SEQ ID NO: 385465 - DNA, 749 bp, Oryza sativa
ctccatttcctgaaccactttagtctttatagctatatataaaaccacccatagatgggagagcttctatccctctcatgcaaattaacaatcaagaatttctgcaaacaaaaaaaaatggcttccaacaaggtagtgatctcggcgttgctcgtcgtcgtcgtctccgtgctcgcagcaacgacgacaatggcggaccaccaccaagaacaggtggtctacactcccggccagctatgtcagccaggaatcggctacccgacgtacccgctgccgcgatgccgggcgttcgtgaagcgccagtgcgtcgcccccggcacggtggacgagcaggtccggcgaggctgctgccggcagttcgccgccatcgacagcagctggtgcaggtgcgatgcgctcaaccacatgctgaggatcatctacagggagagcggcgccgccgacgctgggcaccccatggccgaggtgttccgcggctgccggagaggggacatcgagcgcgcggcggcgagcctcccggcgttctgcaacgtggacatccccaatggcgtaggcggtgtctgctactggctaccgggaactggctactagccttctgtatgtagctagttattggctgttcatgtgtgtgatttggttactaaataatttgtgtttccttttatctggaagcatgtatgatgaataaatgatgaactcagatgttcttctgtttaaaaaaaaaaaaaaaggggcccacccgtggagct

SEQ ID NO: 385466 - DNA, 630 bp, Oryza sativa
cgggtgcgaccacgagttaagatttttcacaaactaagcaaaatatggcttccaacaaggtagtgttctcggtattgctcctcgtcgttctctccgtgctcgcggcggcgatggcgaccatggcggaccaccaccaagtctacagccccggtgagcaatgtcggccaggaataagctatccgacatactcactcccgcaatgtcgaacattggtgaggcgccaatgcgttggccgtggcgcggcagcgccgcggaacgagcaagtctggcaagactgctgccggcagctcgccgccgtcgacgacggcttggtgcaggtgcggggcgctcgatcacatgctgtcaggcatctacagggagctcggcgccaccgaggccgggcaccccatggccgaggtgttccccggctgccggagaggggacttggagcgcgcggcggcgagcctcccggcgttctgcaacgtggacatccccaatgggcctggtggtgtctgctactggcttgggtatcctaggaccccaagaacccggtcactaggctactatagttagctgtgtgtgtgtgactatgtggggttgctaaataattagtgctttcttttgtcaggaagcatctatttatatatatgt

SEQ ID NO: 385467 - DNA, 767 bp, Oryza sativa
cggacgggtccgcgcaaatcgcatcgacttcgattcgcttcgtttcgttctcgctgttgatttgttcgtgagatttgaattctagcaatggctcctctcggtgacggagcggcggcggcggcggcggcggagccaacctggtggtgtcgttcggggagatgctgatcgacttcgtccccgacgtcgccggcgtctcgctggccgagtccggcggcttcgtcaaggctcccggcggcgcccccgccaacgtcgcctgcgccatctccaagctcggtggctcctccgccttcgtcggcaagtttggtgatgatgagttcgggcacatgctggtggacatcctgaagaagaacggggtgaacgcggaggggtgcctgttcgacgagcacgcgcgcacggcgctggcgttcgtgaccttgaaaagcaacggcgagcgcgagttcatgttctaccggaacccgagcgccgacatgctcctgacggaggcggagctcaacctggacctgatccggcgcgccaagatcttccactacggctccatctccctcgatggcgtgtatataaaatccggggtgggattcgtctcgttgcggaggaaatttagaagaatttagaagggatctggtttttaggattgatcccttgcttccatccatctctgcttttttttttcttgcgttttctcccgaattgtaatctcgagatgaaatgtaatctggatctgagatagatctactcgcttgtggcgaagtatgatgcatcagatccat

SEQ ID NO: 385468 - DNA, 1132 bp, Oryza sativa
  unsure (1)..(1132): unsure at all n locations
ctgtgttgcagtttggtgatgatgagttcgggcacatgctggtggacatcctgaagaagaacggggtgaacgcggaggggtgcctgttcgacgagcacgcgcgcacggcgctggcgttcgtgaccttgaaaagcaacggcgagcgcgagttcatgttctaccggaacccgagcgccgacatgctcctgacggaggcggagctcaacctggacctgatccggcgcgccaagatcttccactacggctccatctccctcatcaccgagccgtgccgctccgcccacgtcgccgccatgcgcgccgccaagtcggccggcatcctctgctcctacgaccccaacgtccgcctcccgctctggccgtccgaggacgccgcccgcgccggcatcctctccatctggaaggaggccgacttcatcaaggtgagcgacgacgaggtcgccttcctcacccagggcgacgccaacgacgagaagaacgtgctctcgctctggttcgacggcctcaagctcctcatcgtcaccgacggcgagaagggatgcaggtacttcaccaaggacttcaagggctccgtccccggcttctccgtcaacaccgtcgacaccaccggcgccggcgacgccttcgtcggctccctcctcgtcaacgtcgccaaggacgactccatcttccacaacgaggagaagctgagggaggcgctcaagttctcgaacgcgtgcggagccatctgcaccaccaagaagggtgccatcccggcgctgcccaccgtcgccgtcgcgcaggagctcatcagcaaggcagccaactagagctcctcggtttcgtcgtcgatcgccgccattgggggcctcggaattttaggtcgatttaatttagttgctgcttcgttttagacaaggaagaggaggggcttgggtgtgttcatgtctgtcttttgtgtgctaagttagttgcttccgtgtgagaacttttggcgtttatttttactattattattaataagaagctcttggatttgcggtggatattttggtctgaatttgtgtaatgaggcagctacttggcgaaatttattgtgtcatgtctttgttcagaggaaaagaaaatcttttcgtgtgctcnnnnnnnnnnn

SEQ ID NO: 385469 - DNA, 1245 bp, Oryza sativa
  unsure (1)..(1245): unsure at all n locations
gctgcgctcntttgaacgaggtgaaatgnccccgaacccanagctagctggttctccccgaaatgcgttgaggcgcagcagttgactggacatctaggggtaaagcactgtttcggtgcgggctgcgcgagcggtaccaaatcgaggcaaactctgaatactagatatgacccaaaaataacaggggtcaaggtcggccagtgagacgatgggggataagctcgtccatcgtcgagagggaaacagcccggatcaccagctaaggcccctaaatgaccgctcagtgataaaggaggtgggggtgcaaagaccgccaggaggtttgcctagaagcagccaccctttaaagagtgcgtaatagctcactgatcgagcgcccttgcgctgaagatgaacggggctaagcgatctgccgaagctgtgggatgtcaaaatgcatcggtaggggagcgttccgccttagagggaagcaaccgcgaaaggggggtcgacgaagcggaagcgagaatgtcggcttgagtaacgaaaacattggtgagaatccaatgccccgaaaacccaaggtttcctccgcaaggttcgtccacggagggtgagtcagggcctaagatcaggccgaaaggggtagtcgatggacaacaggtcaatattcctgtactaccccttgttggtacggagggacggaggaggctaggttagccgaaagatggttataggtttaaggacacaaggtgaccctgctttttcagggtaagaaggggtagagaaaatgcctcgagccgaggtccgagtaccaagcgctgcagcgctgaagtatgagccccgtggactagccattgcttctccacgaggctcataccaggcgctacggcgctgaagtatgtaacccatgccatactcccaggaaaagctcgaacgaccttcaacaaaggggtacctgtacccgaaaccgacacaggtgggtaggtagagaatacctagggggcacccctttccaacatttggcacgagctcgtgccgaattngatatcaagcttatngataccgttgacctngagtttttttttttttttttttgcaaggtagggagggggccttgagagttcctcttgtggtagcaagttacttcgcaacctgcttcaatttggccttatagggtcgggaactaatgaataaaaagggttggataccgcccaaccacccagccttttaccagtatngacgccgagtaccgcaatccngagg

SEQ ID NO: 385470 - DNA, 597 bp, Oryza sativa
  unsure (1)..(597): unsure at all n locations
tagctcactgatcgagcgcccttgcgctgaagatgaacggggctaagcgatctgccgaagctgtgggatgtcaaaatgcatcggtaggggagcgttccgccttagagggaagcaaccgcgaaagcgggggtcgacgaagcggaagcgagaatgtcggcttgagtaacgaaaacattggtgagaatccaatgccccgaaaacccaaggtttccgcacgcaagcgtgcgtccaccgagggtgagtcacggcctaagatcacgccgaaaaggcatattcgatggacaacaggtcaatattcctgtactaccccttgttggtacggagggacggacgaggctaggttagcccaaagatggttataggtttaaggacacaaggtgaccctgctttttcagggtaagaaggggtagagaaaatgcctcgagggggggcccggtacccaattccgccctataatgagtcgtattacaattcactggccgtcgcttattacaacgtcgtgactgggaaaaccctggcgtttcccaactttatcgccttgcnncacatccccctttcnccnnctngcgtnatnncnaanaggccccaccgatcgcc

SEQ ID NO: 385471 - DNA, 687 bp, Oryza sativa
  unsure (1)..(687): unsure at all n locations
aaccnggcnnnttgcagataaatttncaanaaaggttcaacagcgtttcagggtgtttnccttcttccgtgtgggggagggacatggggcatacacaccaggacagtgttaaaccccgggcccgtttttcacccaggatgggtaaccgatgtacccgttcccgcgttgccgggcgttgctgaagcgcccatgcntcggccgtggcacgccgccgccgccggagcagttccggcgagacttgctgccggcagcttcgccgcccgtcgacgacagcttggtgcaggtgcgaggcgatcagccaacatgctgggaggcatctacagggagctcggcgcccccgatgtcgggcaccccatgtccgaggtgttcccgcggctgccggagaggggacttggagcgcgcggcggcgagcctcccggcgtttctgcaacgtggacatccccaacggcggaggtggtgtctgctactggctggcgagatctggctactagctaggctactgtagctagctgtgcatgtatgtggtgtggttactaaaataattagtgttttccttttgtttggaagcatatgtgtggtgaataaatgatgaactccgatgttcctctcaaaaaaaaaaaaaaaaaaaaaaaaaactcgagggggggcccggtacccaattcgccctatagtgagtcgtattacaat

SEQ ID NO: 385472 - DNA, 680 bp, Oryza sativa
  unsure (1)..(680): unsure at all n locations
aaaaanagtcaaaagagtttcagtgttgttctcccctttttcccgttggggagggacatggggatacacaccaagacaggtgttanacccggcccgtttttaaccaggatgggtacccgatataccgctcccgcgttcccgggcgttggggaagccccagtggtcggccgtggcacggccgccncccgccgagcagttccggcgagatgctgccggcagttcnccgccgtcgacgacagctggtgcaggtgcgaggcgatcagccacatgctgggaggcatctacagggagctcggcgcccccgatgtcgggcaccccatgtccgaggtgttccgcggctgccggagaggggacttggagcgcgcggcggcgagcctcccggcgttctgcaacgtggacatccccaacggcggaggtggtgtctgctactggctggcgagatctggctactagctaggctactgtagctagctgtgcatgtatgtggtgtggttactaaaataattagtgttttccttttgtttggaagcatatgtgtggtgaataaatgatgaactccgatgttcctctctataaatcttgatgattcgctagctaaaaaaaaaaaaaaaaaaaactcgagggggggcccggtacccaattcgccctatagtgagtcgtattacaattncnnnnnnnnc

SEQ ID NO: 385473 - DNA, 2782 bp, Oryza sativa
ggcacgagcccgcgacggctacctctcccgctccgacttcgccgaatgcatcgggatgacggaatcgaaggagttcgcgctcgagctgttcgacacgctgagccggcgacgacagatgaaggtggacacgattaacaaggatgagctccgcgagatctggcagcagatcaccgataacagcttcgactcccgtctccaaatcttcttcgaaatggtggataagaacgcggacggccggattacggaggcggaggtgaaagagattattatgttgagcgcgtctgccaataaactgtcgaggcttaaggagcaagcagaagagtacgccgctttgatcatggaggagcttgatcctgaagggctcggctacattgagctatggcaattggagacacttctgttgcagaaagatacctatatgaactatagtcaggcccttagttacacaagccaagcactgagccaaaatcttgcagggctaaggaagaagagttcaatccgcaaaataagcacctctttaagctactatttcgaggacaactggaaacgtttatgggtgcttgcattgtggattgggataatggctggactgttcacctggaaattcatgcagtatcgtaaccgatatgtctttgatgtgatgggctactgtgtcacaacagcaaaaggagctgctgaaaccctaaagctgaatatggcaattatcctcctgccagtatgccgtaacaccattacttggttgcgaagtacaagggctgcacgggcactaccttttgatgacaacatcaacttccacaagactattgcagcagcaattgtggttggtataatcctccatgcagggaaccaccttgtatgcgattttccacggttaataaaatcatcagatgagaagtatgctcctttgggccagtattttggggaaataaagccaacatattttacattggtcaaaggagtggagggcatcactggggtaatcatggttgtatgcatgataattgcttttactctagcaacccggtggttccgccgtagcttggttaagcttccaaggccatttgacaaactgactggcttcaatgccttttggtattctcatcatctgttcatcattgtgtatatcgcgctcattgttcatggagagtgtctataccttattcatgtctggtacagaagaacgacatggatgtatctttcagtgcctgtttgcttgtatgtaggggagaggattctaaggttcttcaggtctggcagttattctgtccggctattgaaggtggccatatatccaggtaatgttttgacactgcaaatgtccaagcctcccacgttccgttacaagagtggacaatatatgtttgttcaatgtccagcagtgtctccctttgaatggcatcccttctcaattacttcagcacctggggatgactacctcagcattcatgttcgacaacttggtgattggacacgagaactcaagagagtatttgctgcagcttgtgagcccccagcgggtggtaaaagcggccttcttagggcagatgagacaactaagaaaatcttacccaagcttctgattgatggaccgtatggttctcctgctcaggattacagcaagtatgatgttttattacttgttggattaggaattggtgcgacaccctttattagcatattaaaagatcttctgaataacatcatcaaaatggaggaagaggaggatgcttctactgatctttatccaccaatgggtcggaataacccacatgttgatctgggcacacttatgacgattacctcaagaccaaagaagatcttgaagaccacaaatgcttacttttactgggtgacacgtgagcaaggctcttttgattggttcaaaggagtcatgaatgaaattgctgacttggatcaaaggaatatcattgagatgcacaactacctaacaagcgtctatgaggagggggatgccaggtcagcactcatcaccatgctccaagctctgaaccatgccaagaatggagttgatattgtctctgggacaaaagtccggacacattttgcacgaccaaattggagaaaggtcctttctaaaatttcctccaagcatccatatgccaaaataggtgtattctactgtggagctccagtcctggcacaagaactaagcaaactttgccatgaattcaacgggaaatgcacaacgaagttcgatttccataaggagcatttctgaaatcaagtaaatacttgaggggaaacaaggatagattatgttatgtgtatagcatttttgtcttcgtatattcttcattataatggacaggagatagcaaggtgaggaagcaagcatatagttagcccaacagttcttgctaccaatcaataaaaggagcaacaacaagagtgatttgggataatcatataaatttgtgcgatgtccatcatggcttttgcagcatgtcttatgcagtcatgaatgtacagagctcacttgaagaccttgagcttcttctgattttagttgagattataagtaggatggtatagcacataggaaggtcacaaggctaattaactgtatattattcatgcagctgagtgtctggctaaggccagaagcacgttttacttttgtatttatacataacagaaaacgagaaaaaaaaagtgaaaagggaaaggtatactcgaattgagtgtttgtaatctgtaatttatacagtgcattggcagttttattggctccaggttgggcgcaccgcgcaccaaccacatc

SEQ ID NO: 385474 - DNA, 1330 bp, Oryza sativa
  unsure (1)..(1330): unsure at all n locations
ggaccagcgagcaaccagccccccgcccccaatggcggcagcagcagctttgcccaccgctgccgcttttgcccacctctcctccgattaatcccctcccctcctcttcctcccacttctccgcctcctcttcctcccctcgccgaccctacctactcgcgccgccgccgtcgcattgggcggcaaacggagggggggttaaccctgatggagcagtacgagaaggaggagaagattggggagggcacgtacggggtggtgtacagggcgcgggacaaggtcaccaacgagacgatcgcgctcaagaagatccggcttgagcaggaggatgagggcgtcccctccaccgcaatccgcgagatctcgctcctcaaggagatgcatcacggcaacatcgtcaggttacacgatgttatccacagtgagaagcgcatatatcttgtctttgagtatctggatctggacctaaagaagttcatggactcttgtccagagtttgcgaaaaaccccactttaattaagtcatatctctatcagatactccgcggcgttgcttactgtcattctcatagagttcttcatcgagatttgaaacctcagaatttattgatagatcggcgtactaatgcactgaagcttgcagactttggtttagccagggcatttggaattcctgtccgcacgtttactcacgaggttgtaaccttgtggtatagagctccagagatccttcttggatcaaggcagtattctacaccagttgatatgtggtcagttggttgtatctttgcagaaatggtgaaccagaaaccactgttccctggtgattctgagattgatgaattatttaagatattcagggtactaggaactccaaatgaacaaagttggccaggagttagctcattacctgactacaagtctgctttccccaagtggcaagcacaggatcttgcaactattgtccctactcttgaccctgctggtttggaccttctctctaaaatgcttcggtacgagccaaacaaaaggatcacagctagacaggctcttgagcatgaatacttcaaggaccttgagatggtacaatgaccctgctatggctttacattggattggcatatgtatgggctgggctcctcatttcattccttctgtgaacgctgtgcccttcgtttgggcatttttgtcattcagctggatatttcaaatcttgtgtgtttgatatgtattcaggaacgctaaatagatcaccgtcttggtctctatttgttcagagtaaatatcttccaatgctgcctttcagtttcaacaaaaaaaaaaaaaaaan

SEQ ID NO: 385475 - DNA, 1349 bp, Oryza sativa
  unsure (1)..(1349): unsure at all n locations
ccacgcgtccgcccaagtccaccaccacacacacacacacacgcacaccactcctctccccacaacccatccactcccacgccgccgccgccgcccggatcgccgcgagatggagcagtacgagaaggtggagaagatcggggaggggacgtacggggtggtgtacaagggcaagcaccggcataccaacgagacgatcgcgctcaagaagatccgcctggagcaggaggacgagggcgtcccctccaccgccatccgcgagatctcgctgctcaaggagatgcagcatcgcaacatcgtcaggctgcaggacgtcgtgcacaaggagaaatgcatatacctcgtcttcgagtacctcgaccttgacctcaagaagcacatggactcatccccggatttcaagaaccaccgcatagtcaaatcgttcctctaccagattctccggggcattgcgtactgccactcgcaccgtgttctccaccgagatttgaagccccagaacctgctgatagatcggcgtaccaactcattgaagctcgcggactttgggttggccagggcatttggcattcctgtccggacatttactcacgaggtggtgacattgtggtatagagcacctgaaattcttcttggtgcaaggcattattccacccctgttgacatgtggtcagttggttgcatttttgctgaaatggtgaatcagaagccactatttcctggagattctgagattgatgaactctttaagattttcagtattatgggcactccaaatgaagaaacttggccaggtgttgcttcactacctgactacatatcaactttcccaaagtggccatctgtggatcttgcaaccgtggtcccaacacttgattcttcaggactcgatcttctctctaaaatgctccgtttagatccaagcaaaagaatcaatgcccgtgctgccctcgagcacgagtacttcaaggacctggaagtggcgtagattatgcctcatcttgtccatttgtaaattaagattgcattgtttgctcagccgagttcttttttggctttccttaatctaagttggtgtgctcctcccccaactctatttttgcccttttggttgtgtagagatgagaacagaaggtacctcctggctatccctctgtgtaattcaagccaattgaaagatccttattgcgggagctctaaattgcaattttgctctcttgcctatatccagttccaggactgctgggattttaagctgccaatgtggcatggacttctccagtcattcaaccagttaatttaaactcttttgccaacattttccaactgnnnnnnnnnnnnnnnnnnnn

SEQ ID NO: 385476 - DNA, 1311 bp, Oryza sativa
ggtcgtcgtcttggtcacttggtctccatctcctcttcttcttccacctcctcatgcccatggcggcttcccattgatcccttcaacaccgctctattttaccatccaattagcaattagcgctagttgagtatcatctccactatttattctaatccagtgtaatcatcctccttcttctcccaaaaacaataccaaagaaatccaagcaccgccgcctctctctgctctacccccatctcgccaccaagctcccccctccattttgatactaaaaattcagcaactcgccagggagagcagggtcgatccaagaatcgattgctgttcggttcttggattggagagacgggacgggagaagaagaagaagaagaaagaaaagattgcagtcttttgtgttgttgaggtagaaggagaagaggaggaggtgggggaaagatgtcgcgaggaggagggagctacggggaggtggggcagaagatcgactacgtgttcaaggtggtgctgatcggcgactccgcggtggggaagtcgcagctgctggcggggttcgcccgcaacgagttcaacctcgactccaaggccaccatcggcgtcgagttccagacgcgaaccctccacatcgacgcccgcaccgtcaaggcccagactcgggacaccgccggccaggaaaggtaccgagcagtaacaagtgcatactaccgtggtgcagtgggagctatgttagtatatgacataacaaagcgtcagtcatttgatcatgtagctaggtggctcgaggagttaagaggccatgctgacaagaacattgttattatgcttatcggtaacaaatctgatctaggcacgcttcgggttgtaccgactgaggatgcaaaggaatttgctgagcgtgagaatctcttcttcatggagacctctgctcttgagtctaccaatcttgaaaatgctttcatgaccgtacttacggagatttaccgtattgtcagcaagaaaaaccttgttgcaaatgaggaggttgattctagcggaaactcgagcttactgaaaggtacaaaaattgttgtcccaggtcaggagccagcccctccaaccaaagcatcatgttgtatgtcctaggcatagcattgtactgtgttgtttcggagtttactcctgccatatcaacactgaatagctgggattcctgtgagtaaagatgaaaaggtctacatgtggacagttaactcacatatgttgtaattttatgaatcactcttttttgtatctgattgtgtgatggtgtgtgtagtcatttagagaaaaaaaa

SEQ ID NO: 385477 - DNA, 1056 bp, Oryza sativa
gattgggtattgggccccccctcgaggtcgacccacacgtccgcatccatccgcgcgcggtgcgtagtagcgagaagagaagggggggagggcaaagcgatggctccgatgaagctgtacgggtcgacgctgtcgtggaacgtgacgaggtgcgtggcggtgctggaggaggccggcgccgagtacgagatcgtgccgctcgatttctccaaaggcgagcacaaggcccccgaccacctcgccaggaacccctttggtcaggtgccggctttgcaagatggtgacttgttcctctgggaatcacgtgcaatttgcaagtatgtatgccgcaagaacaaaccagagctgttgaaggatggcgacctcaaggagtcagcaatggtggatgtgtggcttgaagtggagtccaaccagtacactcctgcactgaaccccattctttttcagtgcctaatccgtccgatgatgtttggggcaccccccgacgagaaagttgttgaggagaaccttgagaagctgaagaaggtgttggaggtgtacgaggcgcgcctgacgaagtgcaagtacctggctggagactacatcagtgtcgcggacctaagccatgtggctggcactgtatgcttgggggctactccccacgcatccgtgttggacgcatacccgcatgtgaaggcctggtggactgacctgatggcaaggccgtcttcccagaaggtggcttcactgatgaagcctcctgcttaaggtagttgttctaggcacaggtttgtcgtccatggtccacagaataagctgaggtgtgcccagttggttgctcgtttaaggatttgtgttattatgtgtgtcctggatgttgaatgttcaagcaatcaggattgtgttgttatgctgcatatgatccaacctaagtcttgtactgctatgagcattcttgtgctctggccttcgctcttgagaaccttataataaattctgcttttagtcaaaaaaaaaaaaaaagggctgccgccaccgcggtggagctcccagcttttgttccctttagtgagggtt

SEQ ID NO: 385478 - DNA, 422 bp, Oryza sativa
  unsure (1)..(422): unsure at all n locations
cacccgcgcgaggcttccgctccgctcccctccgatccgtggcctcctcatcgcccctattaaacgggaacccagcccggcgtccccttctcggcttcctcctccaccatccatccatccgcgcgcggtgcgtagtagcgagaagagaagggggggagggcaaagcgatggctccgatgaagctgtacgggtcgacgctgtcgtggaacgtgacgaggtgcgtggcggtgctggaggaggccggcgccgagtacgagatcgtgccgctcgatttctccaaaggcgagcacaaaggcccccggaacaacttggcaaggaacccctttggtcaaggtgccgggctttgcaagatggtngacttgttcctctgggaatcacgtgcaatttncaaatatgtattccgcaagaacaaaaccagagct

SEQ ID NO: 385479 - DNA, 1600 bp, Oryza sativa
  unsure (1)..(1600): unsure at all n locations
cggacgngcncnatagtccctcgcaccaccctccttgttacagctgtgccgcctcttgcttcctcctcctcatcgtccgccatggcttctctcaccgatctcgtcaacctcaacctctccgacaccacggagaagatcatcgccgagtacatatggatcggtggatctggcatggatctcaggagcaaggctaggactctctccggccctgtgactgatcccagcaagctgcccaagtggaactacgatggctccagcaccggccaggcccccggcgaggacagtgaggtcatcctgtacccacaggctatcttcaaggacccattcaggaagggaaacaacatccttgtcatgtgcgattgctacacgccagccggagaaccgatccccaccaacaagaggcacaatgctgccaagatcttcagctcccctgaggttgcttctgaggagccctggtacggtattgagcaagagtacaccctcctccagaaggacatcaactggccccttggctggcctgttggtggcttccctggtcctcagggtccttactactgtggtatcggtgctgacaagtcttttgggcgtgatattgttgactcccactacaaggcttgcctctatgccggcatcaacatcagtggaatcaacggcgaggtcatgccaggacagtgggagttccaagttggcccgtctgtcggcatttctgccggtgatcaggtgtgggttgctcgctacattcttgagaggatcaccgagatcgccggagtcgtcgtctcatttgaccccaagcccatcccgggagactggaacggtgctggtgctcacaccaactacagcaccaagtcgatgaggaacgatggtggctacgagatcatcaagtccgccattgagaagctcaagctcaggcacaaggagcacatctccgcctacggcgagggcaacgagcgccggctcaccggcaggcacgagaccgccgacatcaacaccttcagctggggagttgccaaccgcggcgcctcggtccgcgtcggccgggagacggagcagaacggcaagggctacttcgaggatcgccggccggcgtccaacatggacccttacatcgtcacctccatgatcgccgagaccaccatcatctggaagccctgaagcggcttcttgacgccacgacatcctcgtcatcgtcctccccagctcgccgtgtcgctccggttgctccattgatcggacgatctggtgaattgcatttgtgctgggagaagtaaaaaaaaaaggaaagagaaaaaaaagaaaatcacgccaaaaaaaattctcattccatttcgatttggttgcatgctaccactactactacattgctcatctgccatttagattagctcctttttcttcgtcttttgggtgagtgcgtttgggtgctcttgtgtaatcctccaataatggccgtacctacggtacttgtcccatcctgtggatcatcgtcctcctttccacatgtggttttatcatcattgttattagtgatcacctttatataaagttcttgctgggcttccaatagccgtggcttttgcgttttccttggttngnnnnnnnn

SEQ ID NO: 385480 - DNA, 1704 bp, Oryza sativa
cggacgggtcgggggacgcttgggcttctacacctcattttccgcttgcatcttgctcattcagatctcttctgctttgagcaatggccaacctcaccgacctcgttaacctcaacctcagcgactgcagcgacaagatcatcgccgagtacatctgggttggaggatcgggcatagacctcaggagcaaagcgaggactgtgaaaggccccatcaccgatgtgagccagctgccgaagtggaactacgacggctccagcaccgggcaggctcccggcgaggacagcgaagtgatcctctaccctcaagccattttcaaggacccgttcaggaggggcgacaacatccttgtgatgtgcgactgctacacgccacaaggtgagccaatccccactaacaagaggcacagtgccgccaagatcttcagccaccctgatgttgttgctgaggtgccatggtacggtattgagcaggagtacacactccttcaaaaggatgtgaactggccccttggctggccagttggtggcttccctggcccacagggaccatactactgcgctgccggtgccgaaaaggcgttcggccgcgacatcgtggacgcccactacaaggcctgcatctacgccgggatcaacatcagtggcatcaacggggaagtcatgcccggccagtgggagttccaagttggcccgtcagttggcatcgccgctgctgaccaagtgtgggttgcccgctacatcctcgagagggtcacagaggtggccggagtcgtgctctcccttgacccgaagccgatcccgggtgactggaatggcgctggtgcccacaccaacttcagcaccaagtcgatgagggagccgggaggctacgaggtgatcaagaaggcgatcgacaagctcgcgctgaggcacaaggagcacatcgccgcctacggcgagggcaacgagcgccgcctcaccggccgccacgagaccgccgacatcaacaccttcaaatggggcgtggcgaaccgcggcgcgtccatccgcgtggggcgcgacacggagaaggagggcaaggggtacttcgaggacaggaggccggcgtccaacatggacccatacgtcgtcaccggcatgatcgccgagaccacgctgctgtggaagcagaactaagccgtccggcgggcctctcccgtgcatttctgcgcccaaaaaaaacaaaaaaaagaaacgtacgcgtgcgtgcatcagccgtgatgtgtcaacgttggatttcggtctcggtctatccttggcgtcgacaaggccctttgaattttattactagtctgtcctgttcaccgagtgtcattttgtgtactctgaataataatgctttgtaaaacggatttgctttttccgtagggacggatgttcttgattttcctatatcgtgatttatatatatggaaaaccgctgtctttttttgttcaaaaaaaaaaaaaaaaaaaaaaaaaaaaaaaatataaaaaaaataaaaaaaaattaataaaataaataaaataattaaataatatatattatttaaataaaataataaaaaataaaaggggcggccgttttaggggatccaagtttacttccgcgtgcttgcgacgttatattttttttttggggcccccaaaattaaattccttggccgtggttttacaacttcgggactggaaaacccctggggtt

SEQ ID NO: 385481 - DNA, 1350 bp, Oryza sativa
  unsure (1)..(1350): unsure at all n locations
tgtattctcttgcggacacacgagccccaggaaggaaagcagcgagacccccggatcgaaacgcacaccggcggcgatggcgatggcggcgctgcgacgggaggggaggcgcgtcctcctctcctccaccccatccccggcggccgccatggccgcgcgctcccccgccgccgcccaccaggagattgccccactaggcgcacgttctgtttcaacacaagttgtgagaacccgcatgaagagtgttaggaacatccagaagattacaaaagcaatgaagatggttgcagcatcaaagcttcgagctgttcaaataagaacagaaaattcacgtggtctatggcagccattcaccgctcttcttggggatgtccctagtgtcgatgtcaagaagaatgttattgtagccattacctctgacaagggtctttgtggtggtatcaactcaacgtcagttaaagtcagcaaagcactccacaagttgacttctggaccagagaaagaaagcaagtatgtcatattaggagaaaagggtaaagttcaactcattcgtgactccaaggataacatcgagatgacagtatctgagttgcagaagaaccctatcaactacacacagattgctgtgctggcagatgatatcttgaaaaatgttgagtatgatgctctaagggttgtttttaacaagttccactcggtcatatcattcaagcccacaatgacaaccatactttccccagaggttatggagaaagaatcggaatctggtaaggttggtgacctggattcatatgaaattgaaggaggtgaaactaaatcagaaattcttcagaatcttaccgagttccagttttcttgtgttatgtataatgctgctctagagaatgcatgcagtgagcttggagcacgtatgtctgccatggacagctccagcagaaacgctggtgaaatgcttgatcgactcaccctcacatacaacaggacacgtcaagcatctatcactacagagctcattgagattatctctggcgcttctgcccttgagggataatgatgaaacttttgcccatctttttttgttttgctgttcgaaaaaagttcacttgtcatatggagcagcctttccctcgagtggatcctcatgctaagttgcaataattagcccagttacgtgacggtgctatgcatatatcagaaatgcttgttccagtcatccttgtttatctgaatggcgacgtattttaaacaatcttttacagctgtgttcattttgcataaatgattgatcactgttctgcgttgaaaaaaaaaaaaaaaaaannnnnnnnnnnnnnnnnnnnnnnnnnnnnn

SEQ ID NO: 385482 - DNA, 668 bp, Oryza sativa
  unsure (1)..(668): unsure at all n locations
agctgtgccgcctcttgcttcctcctcctcatcgtccgccaagatcttcagctcccctgaggttgcttctgaggagccctggtacggtattgagcaagagtacaccctcctccagaaggacatcaactggccccttggctggcctgttggtggcttccctggtcctcagggtccttactactgtggtatcggtgctgacaagtcttttgggcgtgatattgttgactcccactacaaggcttgcctctatgccggcatcaacatcagtggaatcaacggcgaggtcatgccaggacagtgggagttccaagttggcccgtctgtcggcatttctgccggtgatcaggtgtgggttgctcgctacattcttgagaggatcaccgagatcgccggagtcgtcgtctcatttgaccccaagcccatcccgggagactgggaacggtggctggtgcccacaccaacttcagcaccaagtcgatgagggagccgggaggtacgaggtgatcaagaaggcgatcgacaagctcgcgctgaggcacaaggagcacatcgccgcctacggnagggcaacgagcgccgcctcacnggccgccacgagaccgccacgctgctgtggaagcagaactaagccgtccggcgggcctctctcgtgcatttctgcgcccaaa

SEQ ID NO: 385483 - DNA, 1226 bp, Oryza sativa
gggcagctcagctttgtggggggcgaaaaagaggagctttcccttctccttcttctccttctcctccctcggtgatctgcctcgctggggcatctctaaaagcatccgactccgacgccaccaccaccagttcaccacctctggaagaatcagcagcagcagcagagaccacacgaggagatgaagaagtgcccgtcggagctgaacttcgaggcgttcttccacggcgagaggggggaggacgacgccgacgccgccgccgaccagaagcccggcggcggcccgcacccgccgccgttcgccatgttctccgccgccgacctctccagcttcggcttcgcggactcggtgacgagcaccatcactggggtcattcccaatcacatatggccccagtcccagagcctcaacgcacggcatcctgcagtctacacaattgagtcgcaatcatcaatctgtgcagcagcaagtcccacgtcagctaccactctgaacatgaaggagagccaaactctgggaggcacaagtggttcagattctgacagtgagtcgctgttggatatagagggcggtccatgcgaacaaagcacaaacccactggacgttaagagaatgagaaggatggtttccaaccgggagtctgctcgtcgatcaaggaagagaaagcaagctcacttagctgatctcgagacgcaggttgaccagctccggggcgaaaacgcatcgcttttcaagcagttgacagatgccaatcagcaattcacgacggcggtcacggacaacagaatcctcaaatcagacgtggaggccctccgggtcaaggtgaagatggcggaggacatggtggcgcggggggcgctgtcgtgcggcctcggccacctgggcgggctgtcgccggcgctgaacccccggcagggggcgtgccgcgtccccgacgtgctcaccgggctggactacgccggcgacgaccccttcaccgggctgtccccgccggagcaggtgcagatgcccggcggtggcgaggtgggtgacgcctggggctgggacaaccactccaatggcgccatgtccaagtgaaaactacttcttactgctttgtcagctcagctacgtataaaaatgtgatgtcccaagtgaacggacttgagtttttcagagtcctcgtgtcgtgtcaagtgtcgtcctgtaatagaactgactagctatatatagtacacagtatttgg

SEQ ID NO: 385484 - DNA, 1207 bp, Oryza sativa
  unsure (1)..(1207): unsure at all n locations
ccgcgcgtgcgggcgctccgacgccgccgcgcgccaccacccggccgatcgccgacgccgcacccgctggaagcagcagggacgacggagagtgggagatggacatcgcggcgttcatccacggcggaagcgggggcggcgacgccgacgccgaccacccgctcggcatcttctccgccgccgacctctccggcttcggcttcgcggactcgagcaccatcacagggggcattcccaatcacatatggccccagtcccagaacctgaacgcacggcatcctgcggtctccacgacaattgagtcgcagtcatcaatctgtgcagcaagtcccacatcagctaccaatctgaacatgaaggagagccaaactctgggaggcacaagtggttcggattctgaaagtgaatcgctgttggatatagagggtggtccatgcgaacaaagcacgaacccgttggacgtgaagagagtgagaaggatggtgtccaatcgggagtctgctcggcgatcgaggaagagaaagcaagctcacttagctgatctcgagtcacaggttgaccagctccggggcgaaaacgcatcgcttttcaagcagttgacggatgccaaccagcaattcacaacttctgtcacggacaacagaatcctcaaatcagacgttgaggccctccgggtcaaggtgaagatggcggaggacatggtggcgcggggggcgctgtcgtgcgggctcggccacctgggcgggctgtcgccggcgctgaacccccggcaggcgtgccgcgtccccgacgtgctcgccggcctggactacgccggcgacgaccccttcacggccgggctgtcccagccggagcagttgcagatgcccggcggcgagttggttgacgcctggggctgggacaaccaccccaacggcggcatgtccaagtgaaactactggtcctacttctatgtcagctcagctacgtttgaaacgtgatgtgtccaagtgaacggacttgagtttttcagagtcctcgtgtcgaagtgtcatgcactcttccctattcctgtaatagaactgactagctaagagactgaaagtctgaaactacgaagtataaatgtggtggaatttggaactnnnnnnnnnnnnnnnnnnnnnnnnnnnnnnnnnnnnnnnnnnnnnnnnnnnnnnnnnnnnnnnnnnnnnnnnnnnnnnnnnnn

SEQ ID NO: 385485 - DNA, 1912 bp, Oryza sativa
  unsure (1)..(1912): unsure at all n locations
gaaaagaaaaaaaaagaggaaaagcagcgagcgagagaccgggggacggaaatggtcgttgccgtcgcctcaccttcgtcggcgccggggccgggcgccgccggccgcccccacccgacctacaaggagatgatcctgcgggcgctcaaggagcttccagatccgatcatctccagccgccgtgccatcgccaagtacatctccgacaacttctccggcctcccttctcaccacgacgcgctcctcaccgttcacctccgccgcctcaggtcacagggccttctcctcatgtctggacactcgtaccttctctccacctccgccaccgccgctcgaggacggggacgaggacgaccgcccaagaaagcttcctcctccgcgccgcctcaaaagcgcggacccggccgaccccgcaagaatacagccctgtttccggttcctgtgcttgaggcgaagcctgggcgcgggcgaccccggaagaaccctctccctgtggcttcctccacctcctctgctgctgctgctgctacggcgttgagcctgagagtgaagcggggacctgggaggccgcgcaagaatgctgctgctaccccgttgagactgggagtgaagcggggacctgggaggccgcgcaagaatgctgctgctaccccgttgagactgggagcgaagcggggacctgggagaccgcgcaagaatgccactgctaccccgttgagcctgggagttaagcggggacctgggaggccgcgcaagaatgctgctgctgctgcctctcccgttgctccgccgcctgcatctccactgaagcggggtgttggacgcccaaggaagaacgccactcctctagtcaagcctggacctgggaggccgtctggattcaaacgtggaccaggccgccctcgcaagaatgccactcctcctgtgctgtcagtgccacccactgctgctgctgtgttgggagtgaagcgtggccgtgggcgccctagaaaggataaaccattgcaatcttggtctgtgctctctggcggtgctgcaatgactaagagaggcgctgggaggccaagaaagaagaggccactggaagctggaggtgttgtggcagcacaggtagacactgcagatggaggtgaggctggagccgttcaaaatggaggtgaagttaggtgtctgctctctgatggtgcttcttcaatggggaacagagggcctgggagtcctaggaaggaggtgctattggaaaatgaacctacagtttctacattggtgggaaagagaggccgtggccgtccaaaaaaggagaaaccatcagcagcaaggcctgctgaaactggagatgctaaatcaatggggatcaagagaggtcgcggaagaccaagaaaggacagttcctttcaagctgtgtttgcagaagctgcaggtcaggtgtcaagagatgtcacagcagctcagcccgaaggagatgcagatttactggcaaggaaggaaccagagactgcagctgtagtttcggtggagaacaaagaaactaggcctgcagatgctgggggtgttgtggtttctgaagagaagacatcgattgatccggtggaggctggaagtgtaatgccatgtgttaatgcagaagttgatcgcatgaactctgacctgcgcactgctaatccatagtgtggctggcgtcagcactcagcacagaagggaggacctggatggctggcactacctgcaggtgtgaatgtgtattcacactgatttagctggagacatactgtgaaaactgttaaatgttgcaaccaaaattattactgtcatgctgttaagtagtttctcaagatcaacattggagtatgcttttaatgataccacttctcggataaatttttatnnnnnnnnnnnnnnnnnnnnnnnnnnn

SEQ ID NO: 385486 - DNA, 941 bp, Oryza sativa
tctttttctctctctctctctcccttgtttcagtggctcagaaattttcctcttttcttattattgctttcctttatttaaggaaggagttgggctctctctctttctctgagtctgaatccccacgagacgagaaacctagcaaaaatctcgtctttcgccgcgctctccctcctctgattcctgctgttcttgatcttggatctcaattcccaaccaagaacacacagacagagaaaggaaggagaagaagatgtcgaacgacaacaagaaggtgtataccctggaggaggtcgccaagcacaactccaaggacgactgctggctcatcatcggcggaaaggtatacaatgtgtcgaaattccttgaggaccatccaggaggtgatgatgtcttgctatcttcaactggcaaggacgcgactgacgattttgaggatgtcgggcacagcacgactgctcgtgcgatgatggatgagtattacgttggcgacatcgacacatccacaatacccgcgaggacgaagtacgttcccccaaagcaaccacactacaaccaggacaagaccccggagttcatcatcaagatcctccagttcttggttcccctcgccatattgggcctggctgttgcaattaggatctacaccaagtcggagtccgcttagtgctgttctcttagtgttataagagtggaaggtaccgaataagttagcaagagttttgtgtgattcataccagtgtaacatgtcatgaattcgtcgaatgttctgaagatgctgtgggttttgtggtcctgggatgtccacttcggtaaagatcgataagattcaaagtactcgttaatcgttatacattctgatggtggatctgctcattgttattaattgttagaaacctatacatacacaaggtggtgattttaaaaaaaaaaaaaaaaaa

SEQ ID NO: 385487 - DNA, 2092 bp, Oryza sativa
  unsure (1)..(2092): unsure at all n locations
tcgcacgctttcttgcataagaactcccccccctcctcgctccccgccgccgccgccgttttcttggagaggagaaatccgtaggctcagaggatttttggtagtcttgtttcgtgatattcgtgaagagggggggagctaaggggggattcgtaagatcagaattggatcacgcgggggcgcgctcgggatcgggggttccaaacacagcttcttcgttgaatttaagtggatgtactaatggagtcaaagggtggcaaaaagaagtctagcagtagtcgttccttgatgtatgaagctccccttggctacagcattgaggacgttcgacctgccggaggcgtgaagaagttccagtctgctgcttactccaactgcgcgaagaagccatcctgatagccctttcggcttctccatcctagtagtttaggatttcttgcaattccattttggcacttttcttctgacctatttctctggctgctgcttcctgataatcgaccagttctctagtcttgctccctgcactcctccctcctccatctccggcacagtgttctgaccaacctgctccaatgggtgtcttgtctgctgctgaccctcccccagtctcagcaattgggtttgagggctatgagaagcgccttgagatcactttctctgaggcacctgtctttgctgaccctgatggtcggggtttgcgcgccctctccagggcccagattgactctgttctggatcttgcacggtgcaccattgtgtccgagctgtccaacaaggactttgactcctatgtcctctctgagtccagcctgtttatctattctgataagattgtgattaagacctgtgggactacaaagctcctgctcacaattccaaggattcttgagcttgctgaagggctttctatgccacttgctgctgtgaagtactcccgcgggatgttcatcttccccagtgcacagcctgctccccacaggagcttctctgaggaagttgctgtcctcaaccgctactttggccatctgaaatctggtggtaatgcttatgtgattggagatccagcaaagcctggccagaagtggcatatctactatgctactcagcacccggagcaacctatggttacccttgaaatgtgcatgaccggactggacaaggagaaagcttcagtctttttcaagacttctgctgatggtcacacatcatgtgctaaggaaatgacaaaactctcgggcatctctgacattatcccagagatggagatctgtgactttgacttcgaaccctgcggctactccatgaatgcaatccatggctcagcgttttctaccattcatgtgacccctgaggatggcttcagctacgccagttatgaggtcgtgggcttcgacgcctctactcttgcttatggcgacctggtagaagagggtcctcaggtgctttggcccttcggagttctctgttgctgttaccatctttggtgggcatggtcatgctggaacatgggcaaaggagctcaatgctgatgcttacaaatgcaacaacatggtagagcaggagctgccctgtggtggcctcctcatctaccagagcttcgacgctactgaagacgtacctgttgctgttgggtcgcccaaatctgttctgcactgcttcgaggctgagaatatggtgaaccctgctcctgttaaggaaggtaaactgggcaatcttctcccctggggagaggatgcgttggaggagaatgatggagtgtttgatgagtaagatgggacttctggtgacgattcgctgctttgttttcattccgtggcatttttatctgttgaggttgtcgtttggttattctgtgaagcagccagccaggctattagtattttcgcttgtaagcatgtgttctgatcttgggacgtatgcttggtctaaataataatggtgaactaaaagctctaggtggtcagctgcgtctgccacaatgagcatgcgtcgggagaaatgttgtcaaaacatatgaataagtatttgcgggaaatttcctttgccttctgctaaaaaaaaaaaaaaaaaggtgcgtggnnnnnnnnnn

SEQ ID NO: 385488 - DNA, 1293 bp, Oryza sativa
gctttaatacgagacctttttctcaggaacacgctgtcaccttacctccacgctcccctcccgcggcagctgaacagagacgagctcaccccacagtcccccacttatcccactcaccaccacctccagtttttgtcctgacaccagctaacagttaaaccggttgctgttattagtacgcgccaccacgacgcccacgcacattatcccttcgtgcaaaagcctatcaacagctaagccaaacagggtcaggagccggagccgtccgggagagggaacactcgagcgatccgtccgtccgcccgcccgtcgtcgtcgcgcgccatggctgaggaggaggccaagaaggtggaggtggaggtcaccgaggcgccacccgccgctgccgctgccgcggagacggagccggctgccaaggacgtcgccgaggagaaggccgtcatccccgcccccgcgccgccggccgaggaggagaagcctcccgtcgacgactccaaggcgctggccatcgtcgagaaggttgcagatgaacctcctgccgagaaacctgctcaagggggctctaatgacagagatgttgctcttgcaagggtggaaactgagaagaggaactcattgatcaaagcatgggaggaaaatgagaagacaaaagctgagaacaaggcttcgaagaagctatctgctattctttcctgggagaacacaaagaaagcaaacatagaagctcaactgaagaagattgaggagcaactggaaaagaagaaggctgaatatgcagagaagatgaagaacaaagtcgcgatcgtccacaaggaagctgaggagaagagagcaatggtcgaggcaaagcgcggcgaggaagtcctaaaggccgaggagatggcagccaagtaccgtgccaccggccatgctcccaagaaactcatcgggtgctttggggcctaaagaaattttcgattcacaacgagcaaacgtgaaagtgttcatcagtggttgctttgcttctttcaccctcccaagtgcgtagtgtgtttgttggtgcaagaaaggtcgtgcctggtgtgtaaagtctggtgttgctgtatataacatattactcccaagacagatatgtttggtgctgtacatgtttgatgcttgacaggcaacattcttatgtgtagttaagaagccacattgttattgttattgacagtaagctgtttgttcttttactggtgtctgagtttgtcttgttttgattggccttcattggattcactagtagctgacgggatctttgtgcatgttagt

SEQ ID NO: 385489 - DNA, 594 bp, Oryza sativa
  unsure (1)..(594): unsure at all n locations
ccacgcgtccgcccacgcgtccgcccacgcgtccgcggacgcgtgggggctgccaaggacgtcgccgaggagaaggccgtcatccccgcccccgcgccgccggccgaggaggagaagcctcccgtcgacgactccaaggcgctggccatcgtcgagaaggttgcagatgaacctcctgccgagaaacctgctcaagggggctctaatgacagagatgttgctcttgcaagggtggagacctgagaagaggaactcattgatcaaagcatgggaggaaaatgagaagacggaagctgagaacaaggcttcgaagaagctatctgctattctttcctgggagaacacaaagaaagccaacattgaagctcaactgaagaagattgaggtatacagctgtttctgttatttttgttttccttctgaaagatatagtttccaattagcacactacttaaaggttaccaacattctttcttatcaatgatgatgaatggactacacgtgtacacagccttgactaattaactggtaacagttatagggaaagctgtaccttaactataggactacacatgtcatactngtatcatgtat

SEQ ID NO: 385490 - DNA, 1050 bp, Oryza sativa
ccacgcgtccgcggacgcgtgggcggacgcgtgcccgggcgcctcccctcgccgacgcctccatcgccctccgcgctccgcctccgccgccgccgccatggggagaaggcctgctaggtgctaccgccagatcaagaacaagccgtaccccaagtcaaggtactgccgtggtgtccctgaccccaagatcaggatctatgatgttggcatgaagaagaagggcgtggatgagttcccctactgtgtgcacttggtgagttgggagaaggagaatgtctccagtgaagctcttgaggctgcccgcattgcttgcaacaagtacatgaccaagaatgcaggaaaggatgccttccacctaagggtcagggtccacccgttccatgtccttcgtatcaacaagatgctctcgtgtgctggggctgataggctccaaactggaatgaggggtgcttttgggaagcctcagggtacctgtgctcgcgtggacattggtcaggttcttctttctgttcgttgcaaggagagcaatgctaaacatgctgaagaggcactccgccgtgccaagttcaagttccctggccggcaaaagatcatccacagcaggaagtggggcttcaccaagttcacccgtgaggagtacgtcaagttgaaggctgagggcagaattatgtctgatggtgtcaatgctcagctgcttggttctcatggtcgtcttgcgaagcgtgcccctgggaaggcgtttctggctgagaccattcaagcttccgcctagatgcctcttgctgaatggaacttgagagattttgctttagctagtctaattttgcatgctagaactcatgttttaagaattggttgtcttcaggatgatctatttttctgtaatagttccttctgtaggccagcttgatatggaggttttgcatatcatcagtaccttgtttgaatttttgctacatatcgttatcccaaagctatatctcagttggattgtgaagctttattaaaaaaaaaaaaaaaaaaactttacatctcataatgtagttatat

SEQ ID NO: 385491 - DNA, 430 bp, Oryza sativa
  unsure (1)..(430): unsure at all n locations
ggangngacncccgccctctccccgcccccctcccccccccgcacgccgccgccgccatggggaggagacctgcaaggtgctatcgccagatcaagaacaagccgtaccccaagtcaaggtactgccgtggtgtccctgaccccaagatcaggatctacgatgtcgggatgaagaagaagggtgtggatgagttctcccactgtgtgcatctcgtctcttgggagaaggagaatgtcacctgtgaggctcttgaggctcgcgcgtatcggttgcaacaagtacatgaccaagtctgcaggaaaggatgccttccacctcagggttcgggttcaccctttccatgtgctncgtatcaacaaggatgcttttcggtgttncccggggcaagataggggttcagacttggaattaggggttctttttgggaag

SEQ ID NO: 385492 - DNA, 1516 bp, Oryza sativa
  unsure (1)..(1516): unsure at all n locations
gccgcctcggccttgagcagctcgccgatgtcctcccacggttcgggccccggaaggaggatgaaccttttgttccttttacggatgaggatgaggatagtgttgatcatgctcttggtggccgtaacagacgtgaaaggctagtggtacatgaatcatcaaatattgtcataacaagagagaccttgcagtgcttgaacgaaacggagtgactaaatgatgaggtcataaatttgtatcttgagctgctgaaagagagggaactgagagaacctaacaagtttttgaaatgccacttcttcaatacctttttctacaaaaagctcattactggtgggtatgattataagtctgtcagaagatggacaactaaaaggaagttaggttacagcctacttgaatgtgataagatctttgttcctatacacaaggaagtgcattggtgtttagcagtcataaacataagggacaaaaagtttcaatttctggattcacttggcagcatggacatgaaggcattgagaactttagcaaggtatcttgtagatgaggtgaaagataagagtggccaacatattgatgctctttcatggaagcaggagggtgtaaaaaaccttcctttgcaagagaatgggtgggattgtggcatgttcatgctcaaatacatagatttctacagcagagatatgggccttacttttggacagaaacatatgcattactttcggaagaggactgccaaggaaattttgaatttgagagctgaataaactgtgaaggacatataaggccacttagaatgttcaccgctggttagcatatgtatttgaggaatggtggcgttgtctttcacggagtgctgaatgctgggtttccacgatttctccaataagacacttgtcacgctacctgctgaagtgatgctgaagatggcattcagaacttattacttggctgtgtccatggcggctttcattgcggtgaagtattggacaatgacatggttttatggctggctgcagactaagaccacagtgggccactgagaaaggtatggttgacttctgtttcccaggcaggcgtccacccatgagcaagtttgatgtcttcacaggacctgctttgatgcagcgagaggcgagagttttgtgtactcctcacccctttattttcaacatgtatagtgctcctacactgaaacatatttgtggaatgtctgcttagccctgtgctgcatctcccaattttctcatgatatatgtaattggttgagcatgagtctacatggaagtgtttggtggttcaagtaacgttcacattcagaatatataaatcaaatgatccctttttgtgtgttaatgtaatcaagcaacttaggagcaaagttagtgactgctgttgatgttccttggtgtcctaaacattcattatacgttggcagtgatttgcggaagttattttctatnnnnnnnnnnnnnnnnnnnnnnnnnnnnnnnnnnnnnnnnnnnnnnnnnnn

SEQ ID NO: 385493 - DNA, 1892 bp, Oryza sativa
  unsure (1)..(1892): unsure at all n locations
ccacctcctcctcctcgtcgctgcattccggttgagtgagttggtgattatctgtagggggtgaaaatggcgcaggcggtggtgccggcgatgcagtgccaggtcggggccgtgcgggcgaggccggcggcggctgcggcggcggcgggggggagggtgtggggagtcaggaggaccgggcgcggcacgtcggggttcagggtgatggccgtgagcacggagaccaccggggtggtgacgcggatggagcagctgctcaacatggacaccacccccttcaccgacaagatcatcgccgagtacatctgggttggaggaactggaattgacctcagaagcaaatcaaggacaatatcaaaaccagtggaggacccctcggagctaccaaaatggaactacgatggatcaagcacagggcaagctccaggagaagatagtgaagtcatcttatacccacaggctatattcaaggacccatttcgaggtggcaacaacatattggttatgtgtgatacctacacaccagctggggaacccatccctactaacaaacgtaacagggctgcacaagtattcagtgatccaaaggttgtcagccaagtgccatggtttggaatagaacaggagtacactttgctccagagagacgtaaactggcctcttggctggcccgttggaggctaccctgggccccagggtccatactactgcgctgtaggatcggacaaatcgtttggccgtgacatatcagatgctcactacaaggcatgtctttatgctggaattaacattagtggaacaaatggagaggtcatgcctggtcagtgggagtaccaggttggacctagtgtcggtattgaagctggagaccacatatggatttcaagatatattcttgagagaataacggagcaggctggtgtagtgcttacccttgaccccaaaccaattcagggagactggaatggagctgggtgccacacaaactacagcaccaagagtatgcgtgaagatggaggatttgaggtgatcaagaaggcaatcctaaacctatcacttcgccatgacttgcatataagtgcatatggtgaaggaaatgaaaggaggttgacaggtttacacgagacagctagcattgacaatttctcatggggtgtggcaaaccgtggatgctctattcgggtggggcgagacaccgaggcgaagggaaaaggctacttggaagaccgtcgcccggcatcaaacatggacccgtacgtcgtgacagcgctattggctgaaaccacaattctttgggagccaaccctcgaagcggaggttcttgctgctaagaagttggccctgaaggtatgaagaacttggacgatgaatcggggcaaataaatcccagcaaaatttgtttgctgcccaccagtcttgatcttgtatttcttctgtctggggattggtctgtacaaatctgcagtttctagaaaaccacgccaccttccattcgccagttaacattttggttgaacaccacacttgatctgggtctgtattttgagtccatttgtgagtgacagaacggatgatgaaacacatcagggacacttttaagtttcttcagtcctgcgtccttccctcgaaataaaaatgtttccttgttttttatcccgggctaaacctgtagttgcgatgaaaacgtcactattggagacttggagaatataatttgacagttgacactcgaccaaaaaaaaaaacaaaacaaagaaaaaaaaaaaaaaaaaaaaccaaagtactaaacctattgttccataaatcgtatattaccgaaaaaaccaaaaaggctaaaacccagtgttaaataaannnaaaaaaaaaaaaaaaaaaaaaaggggcgccctttt

SEQ ID NO: 385494 - DNA, 702 bp, Oryza sativa
  unsure (1)..(702): unsure at all n locations
ccacgcgtccgcggacgcgtgggcgtctccttcctctcgccagtgccaccacagctcaagcgtgatccagcgtcgggccgcgcgtgcgagcgagcgagcgtgcgagatgtcggccgccggggaggaggacaagaagccggcggggggagagggcggcggcgcccacatcaacctcaaggtcaagggacaggatgggaacgaggtattcttccgcatcaagagatctacgcagctgaagaagctgatgaacgcctattgtgaccgtcagtctgtggatatgaatgctattgcattcctatttgatggtcgtaggctccgtggcgagcagacccctgacgagctcgagatggaagacggggacgagatcgacgccatgctccaccagactggaggctgcctgcctgcctagaagcttaggagttcttgcagcctcgtaaaattgtgcctttagtaggctcaatatctagaagtacatgaaaaaaaagaagcctaaaagaacttgtgaggctttggtcctgtgccatagctgaaggacattagaagagctttgtttggcaaaaatattttggtacttcggctgttatgactcgtttatccataccctaatatgtccatcgttgctggtgcttggcatgttttcttttgcnnnnnnnnnnnnnnnnnnnnnnnnnnnnnnnnnnnnnnnnnnnnnnnnnnnnnnnn

SEQ ID NO: 385495 - DNA, 824 bp, Oryza sativa
  unsure (1)..(824): unsure at all n locations
acgcgtccgaaaacaccagaaggggaaaacttttgctctcccggcgatctcgagatctctcaagatggtggtgctgcaaccagatccgtttctgagcgagttgacgagcatgtacgagcggagcacggagaagggatctgtctgggtcaccatgaagcgatcatcgatgaagtgccaggcaaggttgaagaagatggcggcgaagggagaggcagtggagtaccggtgcctcgtccgtgccaccgatggcaagaagaacatctgcaccgcgctctctgcaaaggagtacctgaagttccaagcttcatatgccacagttcttaaagcccatatgcacgctttgaagaagagggagaggaaagacaagaagaaggctgcagaggttgagaagataccagagaaggcaccgaagaagcagaagaaagcaccgtcttcaaagaaatctgcagggtccaagtcgtaagttactgaaagaatttgctaagccctttttttggccacaggcctgagtaagatgggtgtagtcaagacattatcctccattttactcttattcatgtctgcgagatgaagcatgtgaatacctttatagagctgtgccgtcgacattagcaatttttgaagcagctttggttgtctagatgtaagcccgccctggaattttctatttctatcatagaaaggcatctcttaaactgtgcctgatctgatcgtcaagttagtgcaactttcaattgacagaattacgtctggaacatgaagttatgcaactaagactgcagaaggaaattgcagaactgttnnnnnnnnnnnnnnnnnnnnnn

SEQ ID NO: 385496 - DNA, 1132 bp, Oryza sativa
  unsure (1)..(1132): unsure at all n locations
ggtgtctgccatcgagatattaaacctcaaaatctactggtcaatcctcatacacatcaactgaagctttgtgattttggaagtgctaagaaattggttcctggtgaacctaacatatcatacatttgctcgcggtattatagggctcctgaactaatatttggagctacagagtataccacagcaattgatatctggtctgttggttgtgtactagctgagcttctgattggtcagcctctgttccctggagaaagtggtgttgatcaactggtggaaataataaagattttgggtacaccaactagagaagaaatcaggtgcatgaatccaaactattctgaattcaaattccctcagataaaagctcatccatggcacaagctttttggtaagcgcatgccacctgaagctgttgatctggtgtcaaggttgctgcagtactcgccaaatttgcgttgcacagctgttgatgcttgtgcccctcatccattctttgatgaactgcgggatcccaagacctgcttgtcaaatggacgatcattaccacccttgttcgacttctcagctgctgaattggaaggccttcctgttgagctagtccaccgaatcattcctgaacatatgaggaagtgaaacggaatggcaggaaaacacaatttcgctgttagaacagcggataggtgtgagtgagatggttgatgcaaacatccataacttatggatggatcaggagtagactagattcactgccttgctagatgtggaaagagggatgctatagaagttcctcatcatcacttcacataaagagcgaggcagtggctcattctgatgcaattccaagaggtaatgagcaactgagattggcacggcaactcgcacattttcatcatgtgccaccagagacgtttatctactaggctgctgttgtataatcaggtacatgctgagtttgcagttgtttgtagacacttgtttccctgaacaagcgatgagagaaatccagattccaaagtgcttgctttgctatcaaaaaaaaaaaaaaaaaaaatggcaattttggttagtgcacgcaatggcctttcctttatgtttcagaagtcagggcccngcgnacgcgtgggcgggc

SEQ ID NO: 385497 - DNA, 2756 bp, Oryza sativa
  unsure (1)..(2756): unsure at all n locations
ctgaattccgttcaccgccgtgtttttcgttcgttctgtttcttggtgttcaccattggttcctgaaattgagtcatggctgccaagctagctcgcctccacagtctccgcgaacgcctcggtgccaccttctcgtctcatcccaatgagttgattgcactcttctctaggtatgttaaccagggaaagggaatgctccagcgtcaccagctgcttgcggagttcgatgccttgatcgaagctgacaaagagaaatatgctccctttgaagacattctccgggctgctcaggaagccattgtgctgccgccctgggttgcactggccatcaggccaaggcctggtgtctgggactacattcgggtgaatgtaagtgagttggcagtggaagagctgagtgtttctgagtacttggcattcaaggaacagcttgttgatggacacaccaacagcaactttgttcttgagcttgattttgagcccttcaatgcctccttcccgcgcccgtccatgtccaagtccatcggaaatggggtgcagttccttaaccgtcacctgtcgtccaagttgttccaggacaaggagagcctctaccccttgctgaacttcctgaaagcccataaccacaagggcacgacaatgatgccgaatgacagaattcagagccttcgtgggctccaatcatcccttagaaaggcagaagaatatctgatgggcattcctcaagacacgccctactcggagttcaaccacaggttccaagagctcggtttggagaagggttggggtgactgtgcaaagcgtgtgcttgacaccatccacttgcttcttgaccttcttgaggcccctgatccggccaacttggagaagttccttggaactattccaatgatgttcaatgttgttatcctgtctccgcatggatactttgcccaatccaatgtgttgggataccctgatactggtggtcaggttgtgtacattttggaccaagtccgcgctttggagaatgagatgcttttgaggatcaagcagcaaggccttgatatcacacctaagatcctcattgtaaccaggctgttgcctgatgctgttggtactacatgcggccagcgtgtggagaaggttattggaactgagcacactgacattcttcgtgttccattcaggagtgagaatggtatcctccgcaagtggatctcccgttttgatgtctggccattcctggaaacatacactgaggatgttgcaaacgaaattatgagggaaatgcaagccaaacctgatctcatcattggcaattacagtgatggaaaccttgttgccactctgctggctcacaaattaggagttacccagtgtaccattgctcatgccttggagaaaaccaaataccccaactcagacatatacttggacaagtttgacagccagtaccacttctcatgccaattcactgctgatcttatcgccatgaatcacactgatttcatcatcaccagtacattccaagaaattgctggaagcaaggacactgtggggcagtatgaatcacacattgcattcacccttcctgggctttaccgagttgtgcatggcatagatgtttttgatcccaagttcaacattgtctctcctggagctgacatgagtgtctacttcccgtacaccgaggctgacaagaggctcactgctttccaccctgaaattgaggagcttctctacagtgaagtcgagaacgatgaacacaagtttgtattgaaggacaagaacaagccaatcatcttctccatggctcgtcttgaccgagtgaagaacatgacaggtctggttgagatgtatggtaagaatgcacatctcagggatttggcaaaccttgtgattgtttgtggtgaccacggcaatcagtccaaggacagggaggagcaggctgagttcaagaagatgtacggtctcattgaccagtacaagttgaaggggcatatccgctggatctcagctcagatgaaccgtgttcgtaacggggagttgtaccgatacatttgtgacaccaagggagtctttgtccagcctgcattctatgaagcgtttggtctgactgtcatcgaagccatgacatgtggtttgccaacaatcgcaacatgccatggtggccctgctgagattattgttgatggggtgtctggtctgcacattgatccttaccacagtgacaaggctgctgatatcttggtcaacttctttgagaagtgcaagcaggattcaacctactgggacaatatttcacagggaggtctgcagaggatttacgagaagtacacctggaagctgtactctgagaggctgatgaccttgactggtgtatacggattctggaagtacgtaagcaaccttgagaggcgcgagactcgccgttacattgagatgttctatgctctgaaataccgcagcctggccagcgccgtcccattggctgtcgatggagagagcacatccaagtaatggaggggaaaatatgcatcttcagcaggagaagccgtcagctgcattcgaatttgataattttctgtagttgtcatttggcatccatgtttgccatggatgtgtactatgtctaaggtttcagtacttttgcgagattttgggcagtgcttgcctcaaataaacgccggttcctggtgtttatcgttcagaattcaatgcaatgttttattgccgcgcttcctccacaaaaaaaaaaaaaaacaccaaaannn

SEQ ID NO: 385498 - DNA, 665 bp, Oryza sativa
ccacgcgtccgcccacgcgtccgcccacgcgtccgcccacgcgtccgcccacgcgtccggccaacaatcgcaacatgccatggtggccctgctgagattattgttgatggggtgtctggtctgcacattgatccttaccacagtgacaaggctgctgatatcttggtcaacttctttgagaagtgcaagcaggattcaacctactgggacaatatttcacagggaggtctgcagaggatttacgagaagtacacctggaagctgtactctgagaggctgatgaccttgactggtgtatacggattctggaagtacgtaagcaaccttgagaggcgcgagactcgccgttacattgggatgttctatgctctgaaataccgcagcctggccagcgccgtcccattggctgtcgatggagagagcacatccaagtaatggaggggaaaatatgcatcttcagcaggagaagccgtcagctgcattcgaatttgagtaattttctgtagttgtcatttggcatccatgtttgccatggatgtgtaatatgtctaagggttcagaacttttgcgagattttggacagtgcttgcctcaaatagaagccggctcttggtgtttatcgtattgtcattcgctatattggatgctctgtttttccacaaaaa

SEQ ID NO: 385499 - DNA, 463 bp, Oryza sativa
  unsure (1)..(463): unsure at all n locations
cggacntgngacnaactatttattggtccttctggatctcggagaaaccctccattcgtttgctcgtctctgaccaccattggttcctgaaattgaggcatggctgccaagctagctcgcctccacagtctccgcgaacgcctcggtgccaccttctcgtctcatcccaatgagttgattgcactcttctctaggtatgttaaccagggaaagggaatgctccagcgtcaccagctgcttgcggagttcgatgccttgatcgaagctgacaaagagaaatatgctccctttgaagacattctccgggctgctcaggaagccattgtgctgccgccctgggttgcactggccactcaggccaaaggcctggcgtctggcactcctttcgggtgaatgtaaatgagttgggcatgggaaagagctgaatgtttctgagttanttgggcattcaaggaacaagctt

SEQ ID NO: 385500 - DNA, 1057 bp, Oryza sativa
ccacgcgtccgcccacgcgtccggggagatgcaattgcactccagcggcaaaaggcagcttttcccccaaattttgtgcactctcttgatagttcacacatgatgatgactgctattgcatgcaaaaaggctggccttcattttgcaggggtgcatgactcgttttgggtgcatgcatgtgatgttgataaaatgaatcagatactgagaggacaatttgtggagctttacagcatgccaattcttgaaaatttgctcaaggagttccagacatcattcccaacactagaatttcctccctgtccttcacaaggggacttcgatgtgagagaagttcttgcttcgacctacttcttcaactaagcttaatggaaaagttttgcacattagcacatacgcagcaagtcagtaagttcggcagtagttgaatagccagccatattgccgataccacggcgatttggtgccaagtacgaaatgtggcataagcatcagagaagagcaacacaccgttgcaactgctgggagcctggaacagtatatgggtttttgtcattggcaaatcagttccccagattgccgattttggaggaagctacaaagttccaagaaacctgagctgaaacaaaacccagtacttcctgctgatgtttttagattcatgcaggatctactaggatttcagttcggggaattcaccatgctgacacccagccaatgaaggcgattttgcgacataacaggttatcaactacagaatactgatcgatactagtcctgctgaccaccctgaccaatttgatcataggcgacagttgaaccataatttcactgtctatacatgtaacattatcttttggcctcttagggctataattatagccgattgctgtatcggtgcggtgacctggtaataatgtgtagaataaagtgccaaagagaaatgtatactagtgtacatgattgctggatgctgttgatagcaagcaacctgaaagagagaaatgtacatgaaaacggctcgatcttgtcgattcgttcaaaaaaaaaaaaaaaa

SEQ ID NO: 385501 - DNA, 1784 bp, Oryza sativa
  unsure (1)..(1784): unsure at all n locations
cctacttagggatagctggacgcccgtgcgacacgcgtccggaaaggcgtcttcgtactcgcctctctccgcgccctcctccgccgccgctcgccgccgttcgtctccgccgccaccgccgccgccatgagggagtgcatctcgatccacatcgggcaggccggtatccaggtcgggaacgcgtgctgggagctctattgcctcgagcatggcatccagcctgatggacagatgcccggtgacaagaccgttgggggaggtgatgatgcttttaacaccttcttcagtgagactggtgctgggaagcatgtcccccgtgctgtcttcgtcgatcttgagcctaccgtgattgatgaggtgaggactggtgactaccgccagctcttccaccctgagcagctcatcagtggcaaggaggatgcagccaacaactttgcccgtggtcactacaccattggcaaggagattgttgatctgtgccttgaccgcatcaggaagcttgccgacaactgcactggtctccagggcttccttgtgttcaacgctgttggaggaggaacgggctccggtctcggttcccttctccttgagcgtctctctgtggactatggcaagaagtccaagctcgggttcaccgtgtacccgtcccctcaggtctccacctctgtggttgagccatacaacagtgtcctctccacccactccctccttgagcacaccgatgtcgctgtcctgctcgacaatgaggccatctatgacatctgccgccgctccctcgacattgagcgcccaacctacaccaacctcaacaggcttgtgtcccaggtcatctcctcactgactgcctccctgaggttcgatggtgctctgaatgtggatgtcaacgagttccaaaccaacctggtgccctacccgaggatccacttcatgctttcctcctacgccccggtgatctcggccgagaaggcctaccacgagcagctctccgtggcggagatcaccaacagcgccttcgagccgtcctccatgatggccaagtgcgacccgcgccacggcaagtacatggcgtgctgcctgatgtaccgcggcgacgtggtccccaaggacgtgaacgccgcggtggccaccatcaagacgaagcgcaccatccagttcgtggactggtgccccacggggttcaagtgcggcatcaactaccagccgcccagcgtcgtcccggggggagacctggccaaggtgcagagggccgtgtgcatgatctccaactccaccagcgtcgtcgaggtgttctcccgcatcgacatcaagttcgacctcatgtactccaagcgcgccttcgtccactggtacgtcggcgagggcatggaggagggggagttctccgaggcccgcgaggacctcgccgcgctggagaaggactacgaggaggtcggctccgagttcgacgatggtgacgagggtgatgagggtgacgagtactagagaggttcagggttcttgcctggtgccttggcaatgcttgattactgctgctatcctatgatctgtccgtgtgggcttctatctatcagtttgtgtgtctggttttgaaaaacatttgcttttcgattatgcagggtttgcttgtagctttcgctgctgtgacctgtgttgtttatgtgaaccttctttgtggcatctttaatatccaagttcgtggtttgtcgtaaaaaaaaaaaaaaattcgtaaagttgtgtctatagcattgnnnnnnnnnnnnnnnnnnnnnnnnnnnnnnnnnnnn

SEQ ID NO: 385502 - DNA, 1770 bp, Oryza sativa
  unsure (1)..(1770): unsure at all n locations
caacgcagagaaaggcgtcttcgtactcgcctctctccgcgcctccgcgcttttcctcctcctctcccctctctcccttctccgccgccgtcgcagcatcaacccaatccgccgccatgagggagtgcatctcgatccacatcggccaggccggtatccaggtcgggaacgcgtgctgggagctctactgcctcgagcatggcatccaggctgatggtcagatgcccagtgacaggactgttggtggaggtgatgatgctttcaacaccttcttcagtgagactggtgctgggaagcatgttccccgtgctgtatttgttgatcttgagcctactgtgattgatgaggtgaggactggttgctaccgccagctcttccaccctgagcagctcatcaatggcaaggaggatgcagctaacaactttgcccgtggtcactacaccattggcaaggagattgttgatctgtgccttgaccgcatcaggaagcttgctgacaactgcactggtctccaaggtttccttgtgttcaacgctgttggaggtggaacgggctctggtcttggttcccttctcctggagcgcctttctgtggactatggcaagaagtccaagcttgggttcactgtgtacccatcccctcaggtctccacctctgtggttgagccatacaacagtgtcctctctacccactccctccttgagcacactgatgttgctgttctgcttgataatgaggccatctatgacatctgccgccgctcccttgacattgagcgcccaacctacaccaacctcaacaggcttgtgtctcaggttatctcatccctgaccgcctccctgaggtttgatggtgctctgaacgtggatgtcaatgagttccagaccaaccttgtgccctacccaaggatccacttcatgctttcgtcctacgctccagtgatctctgcggagaaggcctaccatgagcaactctctgttgccgagatcaccaacagtgccttcgagccatcctccatgatggccaagtgcgaccctcgccacggcaagtacatggcctgctgcctcatgtaccgcggcgatgtcgtgcccaaggacgtgaacgccgccgtcgccaccatcaagaccaagcgcaccatccagttcgtggactggtgcccgacggggttcaagtgcggcatcaactaccagccgcccagcgtcgtccccagcggcgacctcgccaaggtgcagagggccgtgtgcatgatctccaactccaccagcgtcgtggaggtgttctcccgcatcgaccacaagttcgacctcatgtactccaagcgcgccttcgtccactggtacgtgggtgagggcatggaggagggtgagttctctgaggcccgtgaggatctcgccgcgttggagaaggactacgaggaggttggcgctgagtccgacgagaatgaggatggcgatgatggtgacgagtactagaggagtcgtcgtcgtctgggggcttgatgttctgtgtgtcaaggcctgattgataactgctgctatcccatgatctgccagtgtggagttatcctgttgccgtgtgcgtgtgtcttcgagacatttgcttgtggtgatctgatgtttggggcttaatgggcttacaaccctcgttgttgtaacctgtgtgccctgttttatgtgagaccgcttcgtcacttataatatgcgcgtttgttcaattttatgtttgtttcttgtgttaaaaaaaaaaaaaaaaaaannnnnnnnnnnnnnn

SEQ ID NO: 385503 - DNA, 1629 bp, Oryza sativa
gcgaatattccccccctctattctataaagaatacctccctcctccatcgccgcatcacatcgcaatccaaaccttcgtcttcgtcttcctctcgccgctgattcgattcgatccgatccgatccaaggggaggggaagcaatggcgacgaagaggagcgtggggacgctgggggaggcggatctgagggggaagaaggtgttcgtgcgggccgacctcaacgtgccgctcgacgacgcccagaagatcaccgacgacacccgcatccgcgcgtccgtgcccactgtcaagttcctcctcgagaagggcgccaaggtcatcctcgccagccatctgggccgtccgaagggtgtcacccccaagtacagcttgaagcctcttgttccacgcttgtctgagctacttggagtcgatgttgtgatggccaatgattgcattggtgaggaagttgagaaattggctgctgctttgccggaaggtggtgttctactcctagagaatgttagattctacaaggaggaagaaaagaatgatcctgagtttgccaagaagcttgcagctgtcgctgacctctatgtaaatgatgcttttggcactgcacacagagctcatgcttcaactgagggagtgaccaaatttttgaagcctgctgttgctggcttcctgatgcagaaggaacttgactatcttgttggagctgttgcaaacccaaagaagccatttgcggccatcgttggtggatccaaggtctcaactaagattggggtgattgagtctctgttggcaaaggttgatgtcctcatccttggtggtggtatgatcttcacattctacaaagcccagggatatgctgttggaaaatctcttgtggaggaagacaaacttgagcttgcaacttcacttattgagaaggcgaaggcgaagggtgtttctctcttacttcctaccgatgttgtagtggctgacaagtttgccgcagatgctgaaagcaagactgttgctgcctccgctatccccgatggttggatgggtcttgatgttggcccagatgccatcaagacttccagcgaagcattggacacctgcaacactatcatttggaacggacctatgggagtctttgagtttgagaagtttgcagcaggcactgatgcaattgccaagaagttggctgatcttactaccacaaagggcgccacgaccatcatcggtggtggtgactccgttgctgcggtcgagaaggctgggctggccgacaagatgagccacatctccaccggcggtggtgctagcttggagttgctggaaggcaagaccctcccaggtgttcttgcccttgatgaagcgtaagctaattcggcttgtctccatcagcagtctgcacttttgtttcagacctctcggtgtaactttgcaatgtcaatgcttgtatgaagaacttgagataggcttatcgtcaagttttgctagatgagtcgtgaataagcttttcgacttcctcgctgccgcgagtgaagtggttcgaactgacatacatactctcatggatcgatattttgatatgcggttatcacatccctatgatggcatcatctgttgatattgcccgatcctcgtgccgaagcctgc

SEQ ID NO: 385504 - DNA, 724 bp, Oryza sativa
  unsure (1)..(724): unsure at all n locations
ccatcatctccgtcgagaaggcgttccacgagcagcactccgtcccggagatcaccaactccgtcttcgagcccgccagcgtcatggccaagtgcgaccccaggcacggcaagtacatggcctgctgcctgatgtaccgcggcgacgtcgtccccaaggacgtcaacgccgccgtccactccatcaagaccaggaggactgtgcagttcgtcgactggtgtccgacagggttcaagtgcgggataaactaccagccgccgacggcgttgccgggaggggacctggcgaaggtgaggagggcggtgtgcatgatcagcaacaacacggcggtggcggaggtgttctcgcggatcgaccgcaagttcgacctcatgtacgccaagcgcgcgttcgtgcactggtacgtgggcgaagggatggaggaaggggagttctccgaggccagggaggacctcgccgcgctggagaaggactacgaggaggtcggcgccgaagtcgaggacgacgacgaggaacagggcgagtactgatcgggctagcctgctaggtgaatctagcacggtagataaaccgcaagtttgtaaggtcggtggaagggggtctctcggtttacatggactcttgtgactttgtggtgtgagagtgggttttgttgtacttgcatcacaaaaaataaaagaattcgtcagaaatcaaaatgtgaatcaaaagcaaatcacaannn

SEQ ID NO: 385505 - DNA, 688 bp, Oryza sativa
  unsure (1)..(688): unsure at all n locations
gcttctanacgggattgccaagaggaaccctcttccacatcaagaccagggacatcatttggatggcccgagggttcaaggggattaataccacccccagttctccccagggggacttgccaagggcagcggccggggcataattccaaatccaccagcttggggaggtgtttcccgcattgaccacaagtttgacttcatgtaatccaagcgcgcctttgtccactggtaacgtgggtgagggcatggaggaggtgattctctgaggcccgcgaggatctcgccgcgttggagaaggactacgaggaggttggcgctgagtccgacgagaatgaggatggcgatgatggtgacgagtactagaggagtcgtcgtcgtctgggggctcgatgttctgtgtgtcaaggcctgattgataactgctgctatcccatgatctgccagtgtggagttatcctgttgccgtgtgcgtgtgtcttcgagacatttgcttgtggtgatctgatgtttggggcttaatgggcttacaaccctcgttgttgtaacctgtgtgccttgtgtaatgtgagaccgcttcgtcacttataatatgcgcgtttgttcaaaaaaaaaaaaaaaaaactcgagggggggcccggtacccaattcgccctatagtgagtcgtattacaattccaannnncccnnc

SEQ ID NO: 385506 - DNA, 712 bp, Oryza sativa
  unsure (1)..(712): unsure at all n locations
cgccgcgttgccaccatcaagacgaaagcgcaccatccaagttcgtggactggtgccccacggggttcaagtgcggcatcaactaccagccgcccagcgtcgtcccggggggagacctgggcggcatcaactaccagccgcccagcgtcgtcccggggggagacctggccaaggtgcagagggccgtgtgcatgatctccaactccaccagcgtcgtcgaggtgttctcccgcatcgacatcaagttcgacctcatgtactccaagcgcgccttcgtccactggtacgtcggcgagggcatggaggagggggagttctccgaggcccgcgaggacctcgccgcgctggagaaggactacgaggaggtcggctccgagttcgacgaatggtgacgagggtgatgagggtgacgagtactagagaggttcagggttcttgcctggtgccttggcaatgcttgattactgctgctatcctatgatctgtccgtgtgggcttctatctatcagtttgtgtgtctggttttgaaaaacatttgcttttcgattatgcagggtttgcttgtagctttcgctgctgtgacctgtgttgtttatgtgaaccttctttgtggcatctttaatatccaagtgcgtggtttgttgtaaaaaaaaaaaaaaaaaacctcgngcngaattcggcangagtcaaaaaagggggtccctgcagcccc

SEQ ID NO: 385507 - DNA, 685 bp, Oryza sativa
  unsure (1)..(685): unsure at all n locations
attttcagactgttgctgcctccgctatccccgatggttggatgggtcttgatgttggcccagatgccatcaagacttccagcgangtntggacacctgcaacactatcatttggaacggacctatgggagtctttgagtttgagaagtttgcagcaggcactgatgttagtacaattgactcacatccgctgatctcctgcattttctttcttttttctgtcgctaaacattctcgtctttcatcaggcaattgcaagaagttggctgatcttactaccacaaagggcgccacgaccatcatcggtggtgggtgactccgttgctgcggtcgagaaggctggcgctggccgacaagatgagccacatctccaccggcggtggtgctagcttggagttgctggaaggcaagaccctcccaggtgttcttgcccttgatgaagcgtaagctaattcggcttgtctccatcagcagtctgcacttttgtttcagacctctcggtgtaactttgcaatgtcaatgcttgtatgagagaacttgagagaggcctaatgacacaaagtcttgtgacaggataggtagtgacaagccattgggatccattctgagatgtcggggaagggccttattgaaaaataagataaattggatttggataccgaaaaaagaaaaaaacccccaaaga

SEQ ID NO: 385508 - DNA, 723 bp, Oryza sativa
aataatttgaaaatatatattaattttctgagaagtgtgtggttagtactaacatagtaattgtaatggagacaatgcgtaaattcttcccagcaatcgccgtcctcctacttcttgttgttgccactgaggcgttggcgccagcgcaatcatcagtcaggccgtgcgagacgaagagcctccgattcgaggggttttgcatggtggaagataattgcgcaaacgtgtgtcggacggaggggttcgtcgacggcaggtgcagcaccttcgtgcgaaactgtatctgcatcaagccatgctaaggttgtccatcattatctcatgtggtcacttggcaactaattaattgaccatgcaaacaagggtctgcatggagctattaatttctttctttttttactttctttcttttctttttttttttgcaagcagatgtacgattctgcatgcatggcaaattcagctagaataaaacaccagcccgcttaatgcatggcgttttcttgctagctcgacttattaattgtacaacagagccaagcctgcatatgggttcctctctgttttttacttacatgtatgttgttttccattgtaaggagaagtcataaccattaattattgtcggatatgtggttgtgtaatattgggtgtgtatttgtattagtattttgttgtgaatgtttggtaattgttcaattaatatgattgattaattttcat

SEQ ID NO: 385509 - DNA, 583 bp, Oryza sativa
ccacgcgtccgttcttcttcttcttcttcaaaagcttcttcagagtggtggcgatatcgactacacactgttcttggctacatcgattgattgatcagagagagatataacgatatcgatcggatcagttaaatagagtaattgatcgatatggggaagctggtgagcaagagctggcaggagtcgaagctgctgtggcacatcgcgttcccggccatcctgacggccgtcttccagttctccatcggcttcgtcaccgtcggctccgagttcgacgatggtgacgagggtgatgagggtgacgagtactagagaggttcagggttcttgcctggtgccttggcaatgcttgattactgctgctatcctatgatctgtccgtgtgggcttctatctatcagtttgtgtgtctggttttgaaaaacatttgcttttcgattatgcagcgaaactacaagcaaaccctgcataatcgaaaagcaaatgtttttcgattatgcagggtttgcttgtagctttcgctgctggtgacctgtgttgtttatgtgaaccttctttgtggcatctttaatatccaagtccg

SEQ ID NO: 385510 - DNA, 1801 bp, Oryza sativa
  unsure (1)..(1801): unsure at all n locations
gagaaagagagagagagagaggccgcttctctagtctagaccaaaggaaggaaaccaaccgagaggcgaggcgaggagaggagaggagaggagaggagaggaggaggagggaggagaagatgagagagatcatcagcatccacatcggccaggccgggatccaggtcggcaacgcgtgctgggagctctactgcctcgagcacggcatcgagcccgatggcaccatgcccagtgatacaacggttggcgtcgcacacgatgcgttcaacactttcttcagcgagacgggcgctggcaagcatgtgcccagggccatctttgtcgacctggagcccactgtcatcgacgaggtgcgcactgggtcgtaccgtcagctcttccaccctgagcagctcatctctgggaaggaggatgccgctaacaactttgcccgtggccattacactgttggaaaggagatcgtagatctatgcctggaccgtgtgcgcaagttggcagacaactgcactgggctgcagggattcttggtgttcaatgctgttggtggtggaactggatcaggacttggttctcttctgttggagcgtctctctgttgattatggaaagaagtccaagcttggcttcacaatttacccttccccccaggtctcaacagctgttgtagaaccatacaacagtgtcctctccacccactccttgcttgagcacactgatgtggcagttctcctagacaatgaggctatctatgacatatgccggagatcccttgacatcgagaggccaacctacaccaacttgaacaggctcatctcacagatcatatcttcactcaccacctctctgaggtttgatggcgctatcaatgtggatgtcactgagttccagaccaaccttgtcccataccctcgcatccatttcatgctttcatcctatgcccctgttatctctgctgagaaggcttaccatgagcagctttctgtgcctgaaatcaccaatgctgtttttgagccctcaagcatgatggctaagtgtgaccctaggcacgggaaatacatggcttgctgcttgatgtaccgtggtgatgttgttcccaaggacgtcaatgccgcagttgcaaccatcaagacgaagagaactgtccagtttgttgactggtgccctactggattcaagtgtggcatcaactaccagccaccctctgttgtccctggtggtgacctggctaaggttcagcgtgcagtgtgcatgatcagcaacaacactgctgttgctgaggttttctcgcgcatcgaccacaagttcgacttgatgtatgctaagcgtgcgtttgtgcactggtacgttggtgagggaatggaagaaggtgaattctcagaagcccgtgaggacttggctgcccttgagaaggactatgaggaagtcggcgccgagggtgcagacgacgagaacgacgatggagaagactattagtagctggttaataagtagttctctggttaatgattggtttgtcagtatactccggttccgttgcattgcatattcctgttatgtgtgtttactttttgtactgtgctaaactgttgttagcccctcgttggccatgattgttcatatcttcccattttgctgtgcattgcttgctactcccccccaagcttggtacatatgccattctgagctgaattgcaaaactgtatgctctctatgcatggtccaatggagctatggatgctttcttctattaaaaaaaaaaaaaaannnnnnnnnnnnnnnnnnnnnnnnnnnnnnnnnnnnnn

SEQ ID NO: 385511 - DNA, 839 bp, Oryza sativa
  unsure (1)..(839): unsure at all n locations
gccgcccacgcgtccgaaattaacacaaagattagaagaaagcaagcaacaatggcgtcagctccggccgcctcttccgcagtgctcctcgtcgtggtcctggtggcgagcctcgccgccggcggcgccaacgcggcgaccttcaccatcaccaaccgttgctcgttcacggtgtggccggcggcgacgccggtgggcggcggcacgcagctgaacccggggcagacgtggaccatcaacgtgcccgccgggaccagctccggcagggtgtggggccggaccgggtgcagcttcgacggcgccggccgcggcaggtgcgccaccggcgactgcggcggcgcgctgtcgtgcaggctgtccgggcagccgccgctgacgctggcggagttcaccctggggacgcccggcggcaaccgggacttctacgacctgtcggtgatcgacggctacaacgtcgccatgagcttctcctgcagctccggcgtgacggtcacctgcagggacagccgctgccccgacgcttacctgttccccgaagacaacaccaagacacacgcctgcagcggcaacagcaactaccaagtcgtcttctgcccataatgcatcatctcatgcatgtaactaatgtagtagtatatgtatcatgggacaataatataaataaaaagttgatgaataaaacgacaccttgatcgataatcatccatggacgatatcgatgcaggtggacatataatataatatatatgcactcgaccacgtgtgcaattgtttaatcttaaacaaannananaaaaanaaaaaaaaaaaaaggcttgtacctcggccgcgaccacgct

SEQ ID NO: 385512 - DNA, 398 bp, Oryza sativa
ccacgcgtccgcggacgcgtgggtcctaagaggcagtttaagctagctagctacgacttcgagagatcgatatattcaacaatggcgtcagctccggccgcctctcccgcagtgctcgtcgtcgtggtcctggtggcgaccctcgccgccggcggcgccaacgcggcgaccttcaccatcaccaaccggtgctcgttcacggtgtggccggcggcgacgccggtgggcggcggcacgcacctgagcccggggcagacgtggaccatcaacgtgcccgccgggaccagctccggcacggtgtggggccggacaggctgcaactccgacggcgccggcaggggcggctgcgccaccggcgactgcggcggcgcgctgtcgtgcagcctctccgggcggcc

SEQ ID NO: 385513 - DNA, 398 bp, Oryza sativa
ccacgcgtccgctcgatcctaccacatcgttaagaaagtcgtatcgtcgggtaaattgttaatggcgtctccggccacctcttccgctgtcctcgtcgtcgtcctggtggcgaccctcgccgccggtggcgccaacgcggcgaccttcaccatcaccaaccggtgctcgttcacggtgtggccggcggcgacgccggtgggcggcggcgtgcagctgagcccggggcagacgtggaccatcaacgtgcccgccgggaccagctccggcagggtgtggggccgcacgggctgcagcttcgacggctccggccgcggcagctgcgccaccggcgactgcgccggcgccctgtcgtgcaccctcttcgggcagaaacccgttgacgctggcggagttcacc

SEQ ID NO: 385514 - DNA, 3172 bp, Oryza sativa
  unsure (1)..(3172): unsure at all n locations
gactagttctctctctctttctctctccttgtttctctctctagagcggcgcaaatgtggcggcggcggagggggggtggtggtggcggaggaggagggggtgtggcggtggcggtggcgctggcggtgatgctggtggtgggggcggcggcgggggacacggcggcgtcggacgcggcggcgatgcgggcggtggcgagggctctgggcgcggacaaggcgctggggtggagcaccggcgacccctgctcgtcgcccagggcgtgggccggcgtgacgtgcgactcggcggggagggtcaccgccgtgcaggtcgggaaccgcagcctgacggggaggctggcgcccgaggtccgcaacctcaccgcgctcgcccgcctcgagctcttcgacaactcgatctccggcgagctcccgtcgctcgcggggctctcgtcgctgcagtacctgctcgtccacaacaacggcttcacccgcatcccgccggacttcttcaaggggctcaccgcgctcgccgccgtctcgctcgacaacaacccgttcgacccgtggccgctccccgccgacctcgccgactgcacgtcgctcaccaacttctccgccaacaccgccaacgtcaccggcgcgctcccggatttcttcgggaccgcgctgccgtcgctgcagcggctcagcctggcgttcaacaagatgtccgggcctgtgccggcgtctctggccaccgcgccgctgcaggcgctctggctcaacaaccagattggggagaaccagttcaacgggtcgattagcttcatctccaacatgacctcgctccaagagctttggcttcactccaatgacttcactggccccttgcctgacttctcggggcttgcaagtctctccgatttggagctccgtgacaaccagctcaccggtccggtgccggacagtcttctgaagctcggatctctgaccaaggtgaccctgacgaacaatttgctgcaggggccgacgcccaaatttgccgataaggtgaaagcagatgtggtgccgactacggagcggttctgcttgagcacccctggacaaccttgtgatccccgtgtaagcctgctgctggaggtggcggctgggttccagtacccggcgaagctcgcagataattggaaagggaatgatccgtgtgatggttacattggtgttggatgcgatgcagggaacattacagtgctgaattttgccaggatggggttcagtgggagcatctccccagctatcgggaagattacaacacttcagaagcttattcttgcagacaacaatattactggcacggtgccgaaggaggttgctgctttgcctgctctgacggaggttgatctgtcgaataacaatctttatgggaaactccctacctttgcagcgaagaatgtgctggtgaaagctaatggcaacccgaacattggcaaggatgctcctgcaccgtctggatcaggtggtagtggcggcagcaatgcgccagatggtgggaatggtggtgatggaagcaatgggagtccctctccgtcttctgctggaatcattgctggctcagtggttggtgctattgctggagtaggccttcttgctgcattaggtttctattgctataaaagaaaacagaagccttttggaagggttcaaagtccacacgctatggtcgttcatcctcggcactcagggtcagatcctgatatggttaaaatcacagttgctggtggcaatgtcaatggcggtgcagctgcaagtgagacatacagtcaagcgagcagtggtccaagggatattcatgttgttgaaactggaaatatggtaatttcaattcaagtcctccgcaatgtgaccaacaacttcagtgatgagaatgtccttggccgtggtggctttggcactgtgtacaagggtgagcttcatgatggcacaaaaattgctgtgaagcgaatggaggctggtgtgatgggtaacaaggggctaaatgagtttaaatcagagattgctgtgctgaccaaggttcgccatcggaacctggtgtcactgcttggctactgtctcgatggcaatgagaggattctagtgtatgagtacatgccacaggggacactgagtcaacacctgtttgagtggaaagaacacaatctgcggccgttggaatggaagaagagacttagcattgcgcttgatgttgcaaggggtgttgagtatcttcacagccttgcacagcagaccttcatccacagagacttgaaaccatcaaacatactcctcggtgatgacatgaaggcaaaggtggcagactttggattggtccggcttgcaccggctgatgggaagtgcgtgtcagtagagacaaggcttgctggcacttttggataccttgctccggaatatgcagttactggacgagtaacaacaaaagcagatgtcttcagctttggtgtcatcttgatggagctgatcactggacgcaaggcgcttgatgagactcagcctgaagacagcatgcacctggtaacatggttccgaagaatgcaacttagcaaagacacattccagaaagcaattgacccaacaattgacctcaccgaggagacacttgcaagcgttagcactgtcgctgagcttgctggtcactgctgtgctagggaaccacaccagaggcccgatatgggtcatgctgtcaatgtgctctctactctttcggatgtttggaaaccgtctgatccagattcagatgacagctatggtatcgatctagacatgacactgccgcaagcattgaagaaatggcaggcctttgaggatagcagccattttgatggcgcgacgtcttcattccttgctagcttggataatactcagacaagcataccgacgaggcctccaggatttgcagaatcattcacctctgctgatggaagatagggtagcttgtgtgaaatctcaagcttgacggaagcagaacatccaagtgatcctttttgttcattcctttagtctcctcactcccctgctttttaatgtttcttggtttggctatgtgctgccttgtagctgtcctttgatcatgtatcttgtgatcttgactcaagaattgcctggaagtttgcaaatttgctaaaaaannnnnnnnnnnnnnnnnnnnnnnnnnnnn

SEQ ID NO: 385515 - DNA, 1250 bp, Oryza sativa
ccacgcgtccgggcacgcgggggcgcgggcgtctatttgttgttcgcgcgcgcgcgtccgcccacgcgtccggctactgctataaggagcgcgccgtgcaccgcctctcacaatgtcgaccgccgccgccgccgccgctgcccagagctggtgcttcgccactgtcaccccgcgctcccgcgccacagtcgtcgccagcctcgcctccccatcaccgtcctcctcctcctcctcctccaacagcagcaacctcccggcccccttccgcccccgcctcatccgcaacacccccgtcttcgccgcccccgtcgcccccgccgcgatggacgccgccgtcgaccgcctcaaggatgggttcgccaagttcaagaccgagttctatgacaagaagccggagctcttcgagccgctcaaggccggccaggcacccaagtacatggtgttctcgtgcgccgactctcgcgtgtgcccgtcggtgaccatgggcctggagcccggcgaggccttcaccgtccgcaacatcgccaacatggtcccagcttactgcaagatcaagcacgctggcgtcgggtcggccatcgagtacgccgtctgcgccctcaaggtcgaactcatcgtggtgattggccacagccgctgcggtggaatcaaggccctcctctcactcaaggatggagcaccagactccttccacttcgtcgaggactgggtcaggaccggtttccccgccaagaagaaggttcagaccgagcacgcctcgctgcctttcgatgaccaatgcgccatcttggagaaggaggccgtgaaccaatccctggagaacctcaagacctacccgttcgtcaaggaggggatcgccaacggcaccctcaagctcgtcggcggccactacgacttcgtctccggcaacttggacttatgggagccctaaatccgaccgtccgtccgttcagttcgtcagtttacgccaacgcttttgcataagtactacctgaggatatcgtccccgatcatcgatgtgaacgcgtggagtactactacgtacgtaccggatggttcgatatatgtgaatgctgtattaagtaataacaagaaatatatctcctctactttttcctgacgcggagttgtactgcctatgatgcataatttgatcgcagtgtgatcaaaagacatcagctataatgtcttaataatattattatgaagagtttacctttttactaaaaaaaaaaaaagtcgaggggagg

SEQ ID NO: 385516 - DNA, 728 bp, Oryza sativa
ccacgcgtccgcccacgcgtccgcccacgcgccgcccacgcgtccggcgtcgccaagttcaagaccgagttctatgacaagaagccggagctcttcgagccgctcaaggccggccaggcacccaagtacatggtgttctcgtgcgccgactctcgcgtgtgcccgtcggtgaccatgggcctggagcccggcgaggccttcaccgtccgcaacatcgccaacatggtcccagcttactgcaagatcaagcacgctggcgtcgggtcggccatcgagtacgccgtctgcgccctcaaggtcgaactcatcgtggtgattggccacagccgctgcggtggaatcaaggccctcctctcactcaaggatggagcaccagactccttccacttcgtctccggcaacttggacttatgggagccctaaatccgaccgtccgtccgttcagttcgtcagtttacgccaacgcttttgcataagtactacctgaggatatcgtccccgatcatcgatgtgaacgcgtggagtactactacgtacgtaccggatggttcgatatatgtgaatgctgtattaagtaataacaagaaatatatctcctctactttttcctgacgcggagttgtactgcctatgatgcataatttgatcgcagtgtgatcaaaagacatcagctataatgtcttaataatactattatgcagggtccccctctttactacctttaaaaa

SEQ ID NO: 385517 - DNA, 943 bp, Oryza sativa
ccacgcgtccgctgctataaggagcgcgccgtgcaccgcctctcacaatgtcgaccgccgccgccgccgccgctgcccagagctggtgcttcgccactgtcaccccgcgctcccgcgccacagtcgtcgccagcctcgcctccccatcaccgtcctcctccccctcctcctccaacagcagcaacctcccggcccccttccgcccccgcctcatccgcaacacccccgtcttcgccgcccccgtcgcccccgccgcgtgatccgggaggccgcgacgaccgccagcgaacggaagggaaaaaaaaaagtcaaaaactagagccgatcgtttgatccattcgatatagggaagatgagtggatgcctctgcctcccccgctataaaaaggccccaaacgggacgccatcgccaccaccaccagcagcagcggccgaagcggaagcagcagcagcagcagcggcgacgaagccgtccatagattcttcttcctccccgtcactcctcaccaacaaccatcccccaccctccaagatggacgccgccgtcgaccgcctcaaggatgggttcgccaagttcaagaccgagttctatgacaagaagccggagctcttcgagccgctcaaggccggccaggcacccaagtacatggtgttctcgtgcgccgactctcgcgtgtgcccgtcggtgaccatgggcctggagcccggcgaggccttcaccgtccgcaacatcgccaacatggtcccagcttactgcaagatcaagcacgctggcgtcgggtcggccatcgagtacgccgtctgcgccctcaaggtcgaactcatcgtgggtgattggccacagccgctgcggtggaatcaaggccctcctttcactcaaggatggagcaccagacctctttcacttcgtgaagcactgggtcaggaccggtttcccggccag

SEQ ID NO: 385518 - DNA, 655 bp, Oryza sativa
  unsure (1)..(655): unsure at all n locations
gcntctncgctattacgccagctggcgaaagggggatgtgctgcaaggcgattaagtttgggtaacgccagggttttcccagtcacgacgttgtaaaacgacggccagtgagcgcgcntaatacgactcactatagggcgaatttgggtaccgggccccccctcgaggtcgacccacgcgtccggtcaggacaaaagcagagatgggtgccgttggcgatcccctccttgacgaacgggtaggtcttgaggttctccaggaggggatcgccaacggcaccctcaagctcgtcggcggccactcacgacttcgtctccggcaacttggacttatgggagccctaaatccgaccgtccgtccgttcagttcgtcagtttacgccaacgcttttgcataagtactacctgaggatatcgtccccgatcatcgatgtgaacgcgtggagtactactacgtacgtaccggatggttcgaatatatgggaatgctgtattaagtaataacaagaaatatatctcctctactttttcctgacgcggagttgtactgcctatgatgcataatttgatcgcagtgtgatcaaaagacatcagctataatgtcttaataatattattatgaagagtttacctttttactaaaaaaaaaaaaaaaa

SEQ ID NO: 385519 - DNA, 440 bp, Oryza sativa
accgcgaagggcaagaaggatagcagcattcctagagttggcagcgctgcggattggtgctcgcaatactaaaaccgtataaatcgtcagaagcatatggtatgatgacctagaaacctttgctgcaattacatggagagcactaggcttccgggttgtccacggttacaagtgggcatttgccatctgaaatgttcatctggatggtcagccttgtgctgtgctgctgtctgaaatttctgtcctgtccaccattactgaagaatgagagcgtgtgggtcttgaatttccaataaaacgcaatgccttacagatgtgtaaatagatgtttttgcttactacaatattttctgaacaatcagcatatctataactgtggctagaatgaatcatctctaacgatgtgtgttctgttacttctgtatgtgaaaaaaaaaaaa

SEQ ID NO: 385520 - DNA, 4040 bp, Oryza sativa
atcttctttgttagctgcccgtcagtccaaagagtttattgacggcgtgcattatttttgagagtgaccgaagctaacaggcataagggttttatttgttgtccatgcaataagtgtaaaaatcaggaaggactattctgcacaccagactcttcccttcccattcatttgacttcggctttcatgcccacgccatacttgttgaacatcccaaccggagcccaatcttcttggactgcaggaagttaacgtggacgccgacaatcttcccggattttgttcactacgttggattttgaagcactcacacgggcgaggaggaaagggatgctgatgctaacgacgttgcggatgatcctggtcaaatgttgcaggacgccaaggagactgcgaaagtgaaaaaggggctcataaattggacaagatgttagaggaccacagaacgtcgttgtacccaggttgcgagcagggccacaaaaagttggataccactctggagttcctgcaatggaaggcaaaaaatggtgttagtgacaaggcatttggcgatttattgaaactcgtcaagaacattcttccggagggaaacaaattgcccgtgacaacgtacgaggctaaggagatagtctgccctctaggactggaagttcagaagattcacgcatgcccgaatgattgtatcctatatcgcggtgaggggtacgagaacctagaagcatgccctgtttgcaaagcactacgatacaagattagacgagacgatccatgtgaagttgacgggcagctaacaaagaagataattcctgctaagatgatgtggtatttccctataataccacggctaagacgtttgttcaggaacaaggggaatgctagaatgttgcgatggcacgctgaagagcgtcaacaggacgggatgctgagacaccccgccgatggttcgcagtggcaaaacatcgacagaaaatttaaagaatttggaatggacgcacgaaatatacggtttggtttgagtacggatggcatgaatccttttggagagatgagcagcggccatagcacttggcccgttacgatgtgtatctacaacctccccctggctatgcatgaagaggaagtacataatgatgccgattattattcaaggcccaagcaacctggtaacgacatcgatgtgtacctaagacactggttgaagatcttaaacagttgtggaagaaggaaggtgtccccgtgtgggacgaggacaaacaggaggaggtttaagctacgagcgctgctgttcgtaaccatcaacgattggcctgcacttaacaacatatccggacagtccaacaaggggtacaagacttgcactcactatatggatgaaacagaaagtacgtatcttaagcactgtaggaaggttgtaaaaatgggtcatcgtcgattccttgcagcaaaccacccggtacggaagaaaggcaagcacttcgaacataaggccgaccaccgtacggagcctaaacatcgcagcgggaaaacagtgtttgctatggttaaagatcttaaagtagtgttcggaaaggggcctggaagccagcctatagagagtgaagatggtcaccggcgatgtggaaaaagaaatcctatattttgggagttaccatattgggaattcttggacgtacgccacgcaatcgacgtgatgcacctcactaagaacctttgcgtaaaccttcttggcttcctaagtgtatacggaaagtcgaaagatacactggaagcacgtaatgatttgaagcatatggaacaatgcagcgaactacacccggaaccaaaggagaaaggaagccattacttgagtccagccagctacactcttagcaaagcagagaaggaaagtatgtttgaatgcttggagagcataaaggtaccgtctggatacttcacgaatatcaagcgaataataagcacgaaggagaagaagttcacaaacctaaagtctcatgactgtcacgtgttgatgacacaactgctaccagttgtaataagggatatctttccagacaatgtccgggcaacaataacaaagctatgtgtattcatgaacgtaatttcgcagaaggtcatcgatccggatagattagaagcccttcagaatgatgtggtgcaatgtcttgtcagttttgagttgatatttccaccttcatttttcaatataatgacgcatctactttgtcaccttatgaaagtgatcagtattctcgggcctgtgtacctacacaacacgtttcctttcgagaggtacatgggcgttcagaagaagtatgttcgtaaccatgctcgtccagaggcaagcatcgccaagggttatggaacagaggaggtcatcgaattttgcgtagaatttatcgaagatcttcgcccaatcggggtacctgaatcacgccatgaagggagactacgggaaaagggaactctcggaaggaaagcaataatgacggtagacaacgatttattccgtaaagcccatttcactattttgcaacacacttcattggtagctccttacatcgaggagcacttggctctagttcgctgccaggaacatcggtaagtccgatgcatggattgcacggcatcacattgatactttccccacatggctacgacaacatctcatgggcacgccggagatcaaccaacaacttgccttcctggcgaggggaccgtctgggtcgatcgcgacattccagggatatgaagatcaatgggtacacattctacactagagcccaggacatgaagagcacgaaccagaacagcgctgttcgtgtcgatgccttgggacacgatggaacaactgccacgtattacagtgccatcgagggatatatgggaaccttgactatggtcctctcaacgttcctctgttccgggtgccaatgggttaaggttgaccgggtgggaggcgtaatgattgatgacagtggtatgacaactgttgaccttaacaaggttggatactcggacgaaccttttgtccttgccaatgatgtaacgcaagtctttttcgtgaaggacatgtctagcaaaggaaagaagggcagagggcctgacgagcctaagcgtcaagtggttctcccaggcaaaagaaaaatcgtcggagttgaggacaagactgacgaggattacgatcagttggataggcaaccccctttcacggtgacgattgaccctagcatcctcctatcaaatgaagacaccccttactcacgcagcgatcataaggagggaacaatagtgaggagaaagtacgtgcggtcaaccgtcaccgccgatggaatgccgtaattattgtttacacgatgtaaactatttgggatgtattgattatccatacaaatcaattgatgtatggcataatttactatcattcatatgctacatttaattgactatcattcatatgctaattataattgactagagaatttttaaaagtattaaatcattcatgtggcatttacagatgttaattagagtttttcacaatttaatttactatctttcatatgctacttatatatgactattcgaatttttaaaaggtttaaatcatgcatgtggcatttacatatgttaattagagtttttaacatttaatttaatataattcctacgctaagtatatatgatgattacaatttttattaattttaaatcatgcagtatgtacatacatatcttaattagagtttttaccaatttaataatatcattcatatgctaagtatatatgattattggaatttttattaattttaagtcatatatttgcttattacgatttatccacttaatttattacagacaaaaataatttttcgaagtaattgtcattaatctttgtactttaaataatgttaatgcattaacttctattttaaaaacacatatgtaagcggaaatccatatgcagtgctataatctttagtcccggttcttaaccctaaccggggttaaaaaggatttcggaatagcggggaaaggtattt

SEQ ID NO: 385521 - DNA, 1801 bp, Oryza sativa
cgattccaaactcccaactctcgactagaaccgactccaatggcggcggcggcggctgctgctccgcccttcgccgccggcgactcgccgcccccgaccgccttgctcctcccccgcaccaccaccaccaccgccggcgccgcccccgcgccccggcgttcctccgcctcctcccgcctccacctcctcctcaccgccgcgctcgccgtcgcgacctcctacctcctcctcatcctcccccgcacgcccctctccgccgcgccggcgcctgcggccgccgcgcgggcgcaggtgaagctcgagaagccggtggtgatcctcatctcctccgacgggttccgcttcgggtaccagcacaaggccgcgaccccgcacatccaccgcctcatcggcaatggcacctccgccgccacgggcctcgtccccatcttccccacgctcacgttccccaatcactactccatcgccaccggcctctacccttcctcccacggcatcatcaacaactacttccccgacccaatctccggcgactacttcaccatgtcctcgcatgaacccaagtggtggctcggggagcccctgtgggtcaccgccgccgaccagggtatccaggccgccacctacttctggcccggctcggaggtgaagaaaggcagctgggattgtcccgacaagtattgccgccactacaatggctcggtaccattcgaggagagggtcgatgcgatccttggttactttgatctcccatctgatgaaatgccgcagttcctgacgctttattttgaagatccagatcaccaggggcatcaggtgggtcctgatgacccggccatcacggaggcggtggtgcggatcgatgagatgattgggaggctcattgctggtctggaagaaagaggagtgtttgaggatgtcaatgttatattggttggtgaccatgggatggttgggacttgcgacaagaagctggtgtttctcgacgaattggctccatggattaagttggaggaagattgggttttatcaatgaccccgttgctggccatcaggccgccagatgacatgtcgctgccagatgttgtggccaagatgaatgaagggcttgggtctgggaaggtggagaatggtgaatatctaagaatgtacttaaaggaggatttgccttctcgacttcactacgcagatagttatagaatcccaccgataattgggttgccagaggaagggtataaagtggagatgaagcgatcggacaaaaatgaatgtggaggagcacatggttatgacaatgccttcttctcaatgagaaccatatttatcgcgcatggtcctcgttttgaaggtggtagagtcgtgccatcctttgagaacgtggagatatacaacgttattgcttccattctcaatttggagccagctccaaacaatggttcatcttcttttcctgacacaattcttttgccgagtgaatgatcacatatacatgtgactgctgtggttttggatgagaaaggtcttgctgttggtatcctcctttagtcgtaattgcacttgtacacttatcatattagattcgtgtcactagtggctattcactgcctgaatgcaaatgctgctagtagagagtatctttgtccttatggacaacatttgctgttgttatcatgtcttatccttagcggttttcttatgcttaaattttcatgcaagttcaattaagctcgcattctctgcttaaaatgatgtccatcctgttgataagagattaaccagtcctagttctatatttaatttc

SEQ ID NO: 385522 - DNA, 974 bp, Oryza sativa
aatccccaaaaaaaaaaaacacaacaaaaccaaacccgacagatcttctcttcttcctcctccctttcccatcttcgacgaggcgacccggcgcgagagaagaagagatcgatcgatcgatcaaccgatctcgccggagaaggaagaggagcaaagatgtcgtcggtgttcagcggcgatgagacggcgcccttcttcggcttcctcggcgccgcctccgccctcatcttctcatgcatgggtgcggcgtacgggacggcgaagagcggcgtcggcgtggcgtccatgggcgtgatgcgcccggagctcgtgatgaagtccatcgtgcccgtggtcatggctggtgtgctcggtatctacggcctcatcatcgccgtcatcatcagtacagggatcaaccccaaggctaagccgtactacctctttgacggctacgcgcatctgtcgtccgggctcgcctgtggcctcgccggtctcgctgccggaatggccatcggcatcgtcggtgatgctggtgtcagggcaaatgcacagcaaccaaagcttttcgtgggcatgatcctcatcctcattttcgcagaagcgcttgccctgtatggtctcattgtgggcatcatcctctcatcccgtgccggccaatctcgtgcagattaggcactttgcggtaccataccgctgttattccactggctatattcttgagaaaacctgaaacttacttgggagctctagtttaatgtattaaaagatcgatttgtagcttaaggaaggtggcacttccagtcctttttgtttcttttgtggtggttcatgcaaagttttttgggttaggctggatttgctgctcctgagcaaacggatttaatctcattcgtggtgaataaaaaacacggcattgtagcaaaataaaatcattacaatatattatgtcatcccttcactctaaaacgcggccgctcaaaaaaaaaaaaaaa

SEQ ID NO: 385523 - DNA, 567 bp, Oryza sativa
  unsure (1)..(567): unsure at all n locations
acgcgtccgcggacgcgtgggcggacgcgtgggcggacgcgtgggcggacgccggcccggcgcgagagaagaagagatcgatcgatcgatcaaccgatctcgccggagaaggaagaggagcaaagatgtcgtcggtgttcagcggcgatgagacggcgcccttcttcggcttcctcggcgccgcctccgccctcatcttctcatgcatgggtgcggcgtacgggacggcgaagagcggcgtcggcgtggcgtccatgggcgtgatgcgcccggagctcgtgatgaagtccatcgtgcccgtggtcatggctggtgtgctcggtatctacggcctcatcatcgccgtcatcatcagtacagggatcaaccccaaggctaagccgtactacctctntgacggctacgcgcatctgtcgtccgggctcgcctgtggcctcgccggtctcgctgccggaatggccatcggcatcgtcgggatgctgtgtcagggcaatcacagaaccaaagtttcgtggcatgacctatctatttcgagaacctgcccgatggctatggggcatatcttat

SEQ ID NO: 385524 - DNA, 489 bp, Oryza sativa
gccaaatcgaagcactcctctcctctcctctcctcagatcggatcgcgagagccccaatcccaccaccgatcgatccattcctgctgctcgcggccaccggagaaggagagagagagagagctcgacctcgtcggcgggtgaaggatcgcagcagcagcagcggcggtagagcaggaggagaggcgaagatgtcgtcggtgttcagcggcgatgagaccgcccccttcttcggcttcctcggcgccgcctccgccctcgtcttctcatgcatgggggcggcgtacgggacggcgaagagcggcgtcggggtggcgtcgatgggggtgatgcgcccggagctcgtgatgaagtccatcgtgcccgtggtcatggctggtgtgctgggtatctacggcctcatcatcgcagtcatcatcagcacggggatcaaccccaaggccaagccctactacctcttcgacggctacgcgcacctcttatctggcctc

SEQ ID NO: 385525 - DNA, 2242 bp, Oryza sativa
  unsure (1)..(2242): unsure at all n locations
tggtcttgtgggcggacgcgtgggcaccgaaccatacccaacaagcgtcaaatcgcgtcaaagccaaaaacctcatacaagtccaggaatctgtaatatattccgagacttttacacgcattccagtcatcactagtgtagcggttgctgcttcttccccggggaggtttatcggatcttgatggagacccatatcggatccgtggacggggcggcggcggcggcggacaacggcgcggtggggtgcccggcgtcggcggtggggtgcccgatgacctcggcgcgccccgcgcccgtgttcggccggcgaggcgtcgctgggacggcacctggcgaggcggctggtgcaggtgggcgtcagcgacgtgttcgccgtgcccggggacttcaacctcacgctgctcgaccacctgatcgccgagcccgggctgcgcctcgtcggctgctgtaacgagctcaacgccgggtacgcggccgacggctacgcgcggtcgcggggcgtcggcgcctgcgccgtcacgttcaccgtcggcggactcagcgtgctcaacgccatcgccggcgcgtacagcgagaacctgccggtcatctgcatcgccggagggccgaactccaacgactacggcactaaccgcatcctccaccacaccatcggcctcccggacttctcccaggagctccgctgcttccagaccgtcacttgcacccaggcggtggtgaccaatctggaggatgcgcacgagcagatcgacaccgccatcgcgacggcgctgcgggagagcaagcctgtgtacctcagcatcagctgcaatctcccagggctgcctcaccccacgtttagccgcgaccccgtccccttcttcctcgcccccaggttgagtaacaagatgggtctggaggctgcggtggaggccactgtcgagttcctgaacaaggcggtgaagccggtgctcgttggcggccccaagctgcgtgtggcaaaggcagggaaggccttcgtcgaccttgttgatgccagtggctacgcctacgcggtgatgccgtcggccaaggggctcgtgccagagacgcacccccacttcatcggcacctactggggtgccgtcagcacggccttctgtgccgagatcgtcgagtcggccgacgcctacctcttcgcagggccaatcttcaatgactacagctctgtcggctactccttcctcctcaagaaggacaaggccataattgtgcaaccggagcgtgtcatcgtcgggaatggcccggcgtttgggtgcgtcatgatgaaggagttcttatctgagctggctaagcgcgtcaacaagaacaccactgcttatgagaactacaagaggatcttcgtgcctgagggccagccgctggagagcgagccgaatgagccgctgcgcgttaatgtgctcttcaagcacgtccagaagatgctgaacagtgacagtgctgtgattgccgagactggtgactcctggttcaattgccagaagctgaagctccctgagggctgcgggtatgaattccaaatgcagtatggttccattggatggtcagtgggtgcattgctcggatatgctcagggcgctaaggacaagcgtgtgattgcctgtattggtgatgggagtttccaggtgacggcacaggatgtgtcaacaatgattcgctgtgcacagaacagcataatcttcctgatcaacaacggcgggtacaccattgaggtggagatccatgacggtccatacaacgtcatcaagaactggaactacactggccttgtggatgccatccacaatggagagggcaaatgctggacttctaaggtgaagtgcgaggaggagctgacggaggcgatcgggatggcgctgggggagaaggactgcctgtgcttcattgaggtgatcgcgcacaaggacgacaccagcaaagagctgctggaatggggatcgagggtttctgctgccaactccaggccaccaaatcctcagtagaaacttttagtacttgttgcaagctgggctcaatcataataatgtaaacactttgcccttcagttatgttccttgtgtccattccctcgggtttctgttcttccagtttcggtagctctgtatctacttgtgaacatctgtttctccaatcaaatgctacgagggttatgagagggttttcagcttgcatcctaccaccaaatgaaaaaaaaaaaaaaaggccgaaacacannnnnnnnnnn

SEQ ID NO: 385526 - DNA, 1977 bp, Oryza sativa
  unsure (1)..(1977): unsure at all n locations
gctgcagntgctatatactcccaatagttggccactgtgcgtgcgtggctgcgtgtgcttgcgctactgcttggtctcactgtgtgaacaactgctgccgccgcctgccggcggtgtgctccggccgcgcgcggtcgtgatggctgcacggcgagcgaactgcgcgctggtgctggtgctggcgctcgcgctgttggcggcgcgggatgctggtgccgcggcggtgcccaagcccaactggctgggcgggctgagccgcgccgcgttccccaagcggttcgtgttcgggacggccacgtccgcgtaccaggtcgagggcatggcggcgtccggcggccgcgggccgtccatctgggacgccttcgcgcacaccccgggaaatgttgcaggaaatcagaatggagatgttgcgacagatcaatatcatcgctataaggaagatgttaatctcatgaaaagtttgaattttgatgcctaccggttttcaatctcatggtccaggatcttcccagatggtgagggacgagttaaccaagaaggcgtagatattacaacaatcttataaactaccttctgcagaaaggtatcactccttatgtcaatctttaccactacgatctccctcttgcgcttgagaagaagtacggaggctggttgaatgcaaaaatggcggatctattcacggagtacgcggacttctgtttcaagacctttggcaatcgtgtcaagcactggtttacatttaatgagccaaggatagtagcacttcttggttatgaccaaggaacaaatcctcctaaaaggtgcacaaaatgcgctgctggtgggaactcagcaacagaaccatacattgttgctcataattttctcttatcacatgctgcagctgttgcaagataccggactaagtatcaggcagctcagcaaggcaaagttggaatagttctggacttcaattggtatgaagctctttccaactcaactgaagaccaagcagcggctcaaagagccagggacttccacattggttggtatcttgatccattgataaatggacattacccgcagataatgcaagatcttgtgaaagataggctgcccaagttcactcctgaacaagctagattggtcaagggctcggctgactatattggcatcaaccaatacacagctagctacatgaagggccagcaattgatgcagcagacaccgacgagttactcagccgattggcaggttacctatgtttttgcgaaaaacggcaaaccaattggaccacaggcaaattctaattggctttacatcgtgccatgggggatgtacggatgtgtgaactacatcaagcagaagtacgggaatccgacagtcgtcataactgaaaacggaatggatcaacctgcgaacctcagccgcgaccagtacttgcgcgacaccacgagggttcatttctacaggagctacctcacccagctgaagaaggccatcgacgagggcgccaatgtggctggctacttcgcctggtctctcctggacaacttcgagtggctgtcaggttacacgtccaagtttggtatcgtctacgtcgacttcaacacgctcgagcgccaccccaaggcgtcggcctactggttcagggacatgctaaagcactgagaatgaaagacacgcagactgaagttgaagttgccatccattgatcatcatgttcagttctaggctgccgcttggatggcatcagagctggctatgaactatgtgatggaaataaaaggactgcaaattgattcgattatgcaattcgtgtctatgatcagaattgtggccgtctagtgaacttgtagaagtgtactcttgatgtgtgatcgatcttgagtaatcaatgtttgatcagatttcgccttataatttattagttgatgagatttggcttggtgattttataggaaaaaaaaaaaaaaaannnnnnnnnnnnnnnnn

SEQ ID NO: 385527 - DNA, 1614 bp, Oryza sativa
atttggctttattaataattaattagactttttcctcttggctttccgcccgcgcgcccttaaaccctctccacctctccatatccggcttccagacgcttctctcctcctctaatctcaagtctctgtctcgtcgtcctcgcatctccactcgccatgggcaagattaagatcggaatcaacggtttcggaaggatcgggaggctcgtggccagggtggccctccagagcgaggatgtcgagctcgtcgccgtcaacgaccccttcatcaccaccgactacatgacctacatgttcaagtacgataccgtgcacggccaatggaagcacagcgacatcaagatcaaggactccaagactctgctcttgggcgagaagccggtcaccgttttcggcatcaggaaccctgacgagattccgtgggctgaggctggtgctgagtatgtcgtggagtccaccggtgtcttcactgacaaggagaaggctgctgctcacttgaagggtggtgccaagaaggttgtcatctctgccccgagcaaagatgctccgatgtttgtctgcggtgtcaacgaggacaagtacacttcagatattgatattgtctcaaatgctagctgcaccacaaactgccttgctcctcttgccaaggtcattcatgacaactttggtattatcgagggtctgatgacaactgttcatgccatcactgccacccaaaagaccgttgatggaccgtccagcaaggactggaggggtggcagggcggccagttttaacatcattcccagcagcactggtgctgccaaagctgttggcaaggttcttcctgatttgaatggcaagcttacgggaatgtccttccgtgttcccactgtcgatgtctcagttgttgatctcacagttagaatcgagaaggctgcctcatatgatgctatcaagagtgctatcaagtctgcatcagagggaaagctcaagggaatcataggatatgttgaggaagacctggtttctactgactttgttggtgacagcaggtcgagcatcttcgacgccaaggctggaattgctcttaacgataactttgtcaagcttgtcgcctggtacgacaacgagtggggttacagcaaccgtgtcatcgacctgatccgccacatggccaagacccagtagaatccttttgcttgccatggtattccatggccgccgagccggagataccggtatgctttgtctatgctgagaataaaacgtggacggtgttcatcaggacccaccccctctgttaatgctagttgggataatgagttgcattttgttttccaatctacctacttgtaagttgtaacgatgctgatgatatggacctgagtctacttttttgcttgtgaagaatataagccgtccagtgcagttgtaattttgttatgctggttgcatatatgggctttgtgtttggttcgtgctacctcttcacttctgctggtttgtttggtcgtgtagggcaacgtctcatgatccccttagtttgctctttcgtagttgctctcaatgtttattactccagaataacgtggcctttacgattcagttgtgttggatactggttaatggtct

SEQ ID NO: 385528 - DNA, 539 bp, Oryza sativa
ccacgcgtccgcccacgcgtccgcccacatatactgcaaattaaaaagctagcttagccatggcacgtagcctctcgttgctgctactcctcgtcgcgtgcttcctcgtcgccggcgccaccgcggctcgcccggcgccgtcgacgagcggcgccgccgccatcagcagcttcgtgaggtcgtggtgcgcggggacgaagtaccccgccctgtgcgacgcgacgctggcgccgtactcggcggcggtgggggcgagccatgcagatcatggactggcaagactctgctcttgggcgagaagccggtcaccgtgttcggcatcaggaaccctgacaagattccgtgggctgaggctggtgctgagtatgtcgcggagtccaccgttgtcttcactgacagggagaatgctactgctcacttgaaaggtggtgccaagaatgttgtcatctctgccccgagcaaagatgctccgatggttgcttgcggtgtcaactaggacaagtacaccttaaatattgatattgtcttaaaagctagct

SEQ ID NO: 385529 - DNA, 1176 bp, Oryza sativa
ctcaataacattatattgcagcaatggcatcctcctcccttctactcgcctgtgttgtggtggcggctatggtgtccgccgtctcctgcgggccacccaaggtgccaccgggccccaacatcacgacaagctacggcgacaagtggctggaagcaaggccacctggtatggtgcgcccaagggtgctggccccaaggacaacggcggcgcctgcgggtacaaggatgtcgacaaggctcccttcctcggcatgaactcctgcggcaacgaccccatcttcaaggacggcaagggctgcggctcatgcttcgagatcaagtgctccaagccggaggcctgctccgacaagcccgcccttatccacgtcaccgacatgaacgacgagcccatcgctgcctaccactttgacctctccggccttgccttcggcgccatggctaaggatggcaaggacgaagagctccgtaaggccggcatcatcgacacgcagttccgccgcgtcaagtgcaagtatcctgccgacaccaagatcaccttccacatcgagaaggcctccaaccccaactaccttgcgctgctagtcaagtacgtcgctggtgatggtgacgtcgtggaggtggaaatcaaggagaagggctccgaggagtggaaggcgctcaaggagtcatggggtgccatttggaggatagacacccccaagccgctcaagggccccttctccgtccgcgtcaccaccgagggtgcgagaagatcatccgccgaggacgccatccctgatcctggaaggcgacagcgtgtacaagtcaacgtccaggccaagtgagcattttaagcaaggaagaaaccagcgtacatacgatccggcgccggctgcctatatatatatatatatatatatatatatatatatatattatatactatatatgtgttgctgcatgcttgcatgctgcacatatatatccagagaaatattttttaaacgaaataatctataaatttctgagctaggattgtggagcatatacacgccagcactataatggcgtctgctctcccatcgaactggcctgtgacaatggggtcatttgtttttgcccacaatattttctgctaaattcattctctgattttgcgtgagattatcatgagaagcagtaaccatgttgtgtatcc

SEQ ID NO: 385530 - DNA, 501 bp, Oryza sativa
gttaagcagacagtgatgacatcagtttacggtgtcacatatattggtgctcgtcaacagataacaaaaagactacaagagaaagggctcattacagatgacaaattgttgtatgaagtgtcctgctatgctaccagggtaactttggatgcattaggacaaatgttccagtctgcccgtggtataatggcatggcttggtgattgtgcaaagatgattgcttcagaaaaccaccctgtcaaatggacgagccccgttggtcttccggttgttcagccctacaagaaatataagaactacatgattcgaacttcactgcaatgtctggctttacgacgggagggagatgcaattgcactccagcggcaaaaggcagcttttcccccaaattttgtgcactctcttgatagttcacacatgatgatgactgctattgcatgcaaaaaggctggtcttcattttgcaggggtgcatgactcgttttgggtgcatgcatgtgat

SEQ ID NO: 385531 - DNA, 897 bp, Oryza sativa
  unsure (1)..(897): unsure at all n locations
ccacgcgtccgcccacgcgtccgcccacgcgagctcacaagccccaagtcgcgtcgcaccgaagcagagtagagaaggagaggagcggagcgccatcagccgtccgatcgagtgatccgatggctctcgctctctccacctctgctgctgctgccgctgccgccgcggcgcgggcgctcgcggcgagggtgacgacgacgaggggttacgccgcgtcggcggcgtcgtcggcgatgaggcgggcggcggcggcggtggaagggaagggcgctgcggggatgacgcaggcgaaggacgggtcgtcgtcgtcggcggcgagggaggtgtcgtgggtgcccgaccccgtgacgggccactaccggccctccaacttcgccggcggcgccgacgccgccgacctccgcgccgcccacctcgcccgcagctacgcccgcgcgtgatgcgcgcgacctcgccgtcgtccgaccgacgacgacgccatccatccatatatatctgctccgcgtcaactactcatcacctctcgaccgcgccgcgccgcacgccgctccgcctccgcgtgcacctgaacgacgacgacgacgcatcatcgccgggcggcggatcggccggcggcggcggcggcatccctaccgtttccttgctgcgtgtgggctggatgctctgctcgtgtgctggttcttcgtgcacctctcatgtaacagcgagcagggcctcactctactactactgtttttgttttttaactttcacggtttcaccacgtacccgagtgtgatggttttaatggaacaagtaataaatcagtttaatttcctttcaaaaaaaaaaaaaaaaaacccaaggggggccaaaaaaaannnnnnnnnnnnnnnnnnnnnnnnnnnnnnnnnnnnn

SEQ ID NO: 385532 - DNA, 1388 bp, Oryza sativa
tctctgaccttttctatggcattccctggtcccagggaacacttgggtttcttgtttccgctgagatcaaactcattcccatcaaggaatacatgaggctcacatatactccagttaaagggtcactgaaggagatagcacaaggttattgtgattcgtttgcaccacgagatggtgatcctgcaaaggtcccagacttcgttgagggaatggtgtacacagaaaatgagggtgtcatgatgactggtgtttatgcttccaaagaagaggcaaagaagaagggcaataagatcaactgtgtcgggtggtggttcaagccttggttttaccaacatgctcagacagcactcaagaagggtgagtttgtggagtacattccaacaagagagtactaccaccgtcacacccggtgtctgtactgggaggggaagctgatcttgccattcggcgaccaattctggttcaggttcctcttgggctggctgatgccaccaaaggtgtctctgctcaaggccacacagggtgaatctatcaggaattactaccatgacaaccatgtgattcaagacatgctggttcccttgtacaaagttggagatgctcttgagtttgtttcacaaggaaattggaggtttatccactgtggctgtgcccgcaccggctctacaagctccctgtgaaaaccatggtgtacccagagcctggctttgagcaccaccacaggcaaggtgacactagctatgcccagatgttcaccgatgttggtgtgtactatgctcctggtgctgtcctgaggggcgaggagttcaatggcgctctagctgtccacaggctggagcagtggctgattgagaaccacagctaccagccacagtacgctgtatctgagctcaacgagaaggacttctggaggatgtttgatgcttctcactacgagcattgccgccaaaagtatggtgccgtcggtacctttatgagcgtctactacaagtccaagaagggaaggaagactgagaaggaggtgcaggaagccgaggccgccatcctcgagccagcctacgctgatgaggcgtaatttcgttgagacctttgatggtttagtcgtccgggttttctccccattccaaatgggatttttcatctgaactatccttttgcttagaacttgatgtgcagtgtttgtagcactttgtaatcctgtcatcgtcgtccgtctgctcttggtacttctttcacccttgatcaagttgctgaacttagtcaggacttaagtggtatttaacccaagatctgaataattttgtggctactggactagttaatttcctcagctattaatttgagctgtagcatcagatgaggtgaactttagcaaaaaaaaaaaaaaa

SEQ ID NO: 385533 - DNA, 576 bp, Oryza sativa
gcagagtagagaaggagaggagcggagcgccatcagccgtccgatcgagtgatccgatggctctcgctctctccacctctgctgctgctgccgctgccgccgcggcgcgggcgctcgcggcgagggtgacgccgacctccgcgccgcccacctcgcccgcagctacgcccccgcgtgatgcgcgcggacctcgccgtcgtccgaccgacgacgacgccatccatccatatatatctgctccgcgtcaactactcatcacctctcgacccgcgccgcgccgcacgccgctccgcctccgcgtgcacctgaacgacgacgacgacgcatcatcgccgggcggcggatcggccggcggcggcggcggcatccctaccgtttccttgctgcgtgtgggctggatgctctgctcgtgtgctggttcttcgtgcacctctcatgtaacagcgagcagggcctcactctactactactgtttttgttttttaactttcacggtttcaccacgtacccgagtgtgatggttttaatggaacaagtaataaatcagtttaatttcctttcaaaaaaaaaaaaaaa

SEQ ID NO: 385534 - DNA, 596 bp, Oryza sativa
  unsure (1)..(596): unsure at all n locations
aaacgccgcgccgcgtgaaggaaggccnncgggaaaaccagggaaggaagtttttttttttcgggggggagggggtttggggcccccacccccggggagggcaataccggcccctccaaatttcccgggggcccgcagccgccggacttccgggccgcccacctttgcccggaaagaaacgcccgcgcggtgatgcgcgcagacctcgccnttgctccgaccggacgaggacgccatccatccatatatatntgntccgcgtcaantattcatcacttttcgaccgcgccgcgccgcacgccgttccgcntccgcgtgcacctgaacgacgacgacgacgcatcatcgccgggcggcggatcggccggcggcggcggcggcatccctaccgtttccttgctgcgtgtgggctggatgctctgctcgtgtgctggttcttcgtgcacctctcatgtaacagcgagcagggcctcactctactactactgtttttgttttttaactttcacggtttcaccacgtacccgagtgtgatggttttaatggaacaagtaataaatcagtttaatttcctttcaaaaaaaaaaaaaaaaaaa

SEQ ID NO: 385535 - DNA, 473 bp, Oryza sativa
  unsure (1)..(473): unsure at all n locations
agctcacaagcccaagtcgcgtcgcaccgaagcagagtagagaaggagaggagcggacnncatcagccgtccgatcgagtgatccgatagctctcgctctctccacctctgctgctgctgccgctgccgccgcggcgcgggcgctcgcggcgagggtgacgacgacgaggggttacgccgcgtcgggggcgtccgtcggcgatgaggcgggcggcggcggcggtggaagggaagggcgctgcggggatgacgcaggcgaaggacgtgtcgtcgtcgtcggcggcgagggaggtgtcgtggggtgcccgaccccgtgacgggccactaccggccccttcaactttgggcggcgggggccgacgcggcgaatcctttccgggcggccaacttgggccggaattagggcgggtggttattggggaaccttgtggttgtcgacgagacgacgaatcatcatatatattgttcggtaa

SEQ ID NO: 385536 - DNA, 2173 bp, Oryza sativa
  unsure (1)..(2173): unsure at all n locations
cggacgcgtgggtgcggattccattctcctcttggcatcacgaggcggcgccgcttggtctagctagtagccacagggagaggtggtagccgcagccgccgccgacgagacctcgccgccggggggagggcaccatgtgtggcatcctcgccgtgctcggcgtcgcagacgtctccctcgccaagcgctcccgcatcatcgagctatcccgccggttacgtcatagaggccctgattggagtggtatacactgctatcaggattgctatcttgcacaccagcggttggctattgttgatcccacatccggagaccagccgttgtacaatgaggacaaatctgttgttgtgacggtgaatggagagatctataaccatgaagaattgaaagctaacctgaaatctcataaattccaaactgctagcgattgtgaagttattgctcatctgtatgaggaatatggggaggaatttgtggatatgttggatgggatgttcgcttttgttcttcttgacacacgtgataaaagcttcattgcagcccgtgatgctattggcatttgtcctttatacatgggctggggtcttgatggttcggtttggttttcgtcagagatgaaggcattaagtgatgattgcgagcgattcatatccttcccccctgggcacttgtactccagcaaaacaggtggcctaaggagatggtacaacccaccatggttttctgaaagcattccctccaccccgtacaatcctcttcttctccgacagagctttgagaaggctattattaagaggctaatgacagatgtgccatttggtgttctcttgtctggtggactggactcttctttggttgcatctgttgtttcgcggcacttggcagaggcaaaagttgccgcacagtggggaaacaaactgcatacattttgcattggtttgaaaggttctcctgatcttagagctgctaaggaagttgcagactaccttggtactgttcatcacgaactccacttcacagtgcaggaaggcattgatgcactggaggaagtcatttaccatgttgagacatatgatgtaacgacaattagagcaagcaccccaatgttcttgatgtcacgtaaaattaaatctttgggggtgaagatggttctttcgggagaaggttctgatgaaatatttggcggttacctttattttcacaaggcaccaaacaagaaggaattccatgaggaaacatgtcggaagataaaagcccttcatttatatgattgcttgagagcgaacaaatcaacttctgcatggggtgttgaggcccgtgttccgttccttgacaaaaacttcatcaatgtagctatggacattgatcctgaatggaaaatgataaaacgtgatcttggccgtattgagaaatgggttctccggaatgcatttgatgatgaggagaagccctatttacctaagcacattctatacaggcaaaaggagcaattcagtgatggtgttgggtacagttggattgatggattgaaggatcatgcaaatgaacatgtatcagattccatgatgatgaacgctagctttgtttacccagaaaacactccagttacaaaagaagcgtactattataggacaatattcgagaaattctttcccaagaatgctgctaggttgacagtacctggaggtcctagcgtcgcgtgcagcactgctaaagctgttgaatgggacgcagcctggtccaaaaaccttgatccatctggtcgtgctgctcttggtgttcatgatgctgcatatgaagatactctacaaaaatctcctgcctctgccaatcctgtcttggataacggctttggtccagcccttggggaaagcatggtcaaaaccgttgcttcagccactgccgtttaactttctatcgtcgcataaaactccgtagtttgttgttcttggttcaatcccagcttctttcagatgtcgttagtttcttcaaacatgtaatggagatgcgtgcttttcctggcttgttagttactgtatgcttgtcatcgtgtatgttttcttttcttttccaatatgcaaactgtttggtcgtggactgatcagaacattgtaaatatgaataaccgcgactgatatcctcaagttgcttttggtttgcnnnnnnnnnnnnn

SEQ ID NO: 385537 - DNA, 958 bp, Oryza sativa
  unsure (1)..(958): unsure at all n locations
gaattcggcacgaggtgagctagccactgatcagaagaacacctcgatctctgagagtgttttttcagctttagcttaagcaggatggagcaccaggggcagcacggccacgtgaccagccgcgtcgacgagtacggcaacccggtcggcaccggcgccggacacggccagatgggcaccgccggcatggggacgcacggcaccgccggcaccggcggcggccagttccagccgatgagggaggagcacaagaccggcggcgtcctgcaacgctccggcagctccagctcaagctcgtctgaagatgatggaatgggaaggacgacgaagaaaagggatttaggagaagatttaggagaaactccccggcgggcaacaagggcgaacagcagcatgccatggggcggcaccggcaccggcaccggcaccggcaccggaaccggcggcgcctacgggcagcagggccacggcaccgggatgaccaccggcaccaccggcgcacacggcaccaccaccaccgacaccggcgagaagaagggcatcatggacaagatcaaggagaagctgcccggccagcactgagctcgacacaccaccacaccatgtgtctgcgccgccggcgacggccgccacgtcaccttcctgaataataagatgagctagccgagcgcaataaaaggaaaaaaaaatgttactgtcgtgtgatgagtgtgaatgtgtgatggcgttctccagtacggaccgtgtctgcgtgttgtttgtactgtgaaagtacgctgtgtatgtacgtcgtatgtgtacaattccgctttgttgaaatacgtataaatatatactgtgtatatcaaaaaaaaaaaaaaaaaantngtgcatatgnacacaacgttttggtgatcgttatnnnnnnnnnnnnnnnnnnnnnnnnnnnnnnnnnnnnnnnnnnnnnnnnnnnnnnnnn

SEQ ID NO: 385538 - DNA, 772 bp, Oryza sativa
  unsure (1)..(772): unsure at all n locations
tttaggaaaagtgagctagccaggcccagaagaacacctcgatctccgagagttttttttcagctttagcttaagcaggatggagcaccaggggcagcacggccacgtgaccagccgcgtcgacgagtacggcaacccggtcggcaccggcgccggacacgccagatgggcaccgccggcatggggacgcacggcaccaccggcggcatgggaacgcacggcaccaccggcggcatggggacgcacggcaccaccggcaccggcggcggccagttccagccgatgagggaggagcacaagaccggcggcgtcctgcaacgttccggcagcttcagcttcaagctcgtcttaggatgatggaattggagggaggaggaagaaggggatcaaggagaagatcaaggagaagttcccctggcggcaacaagggcgagcagcagcatgccatgggcggcaccggcggcgcctacgggcagcagggccacggcaccgggatgaccaccggcaccaccggcgcacacggcaccaccaccaccgacaccggcgagaagaagggcatcatggacaagatcaaggagaagctgcccggccagcactgagctcgacacaccaccacaccatgtgtctcgcgccgccggcggacggccgccacgtcaccttcctgaataataagatgagctagccgagcgcaatnaaanggaaaaaaaaaatgttacttgtcgtgtgatgagtgtgaatgtgtgatggcgttctccagtaacggaccgtgtct

SEQ ID NO: 385539 - DNA, 1188 bp, Oryza sativa
  unsure (1)..(1188): unsure at all n locations
taaatttccgaagccagagcgcgaggagacgcacacagagacttggcatttgtagagtttttagatttatagatagcaaagatgtcggcacaggcggagtttcccgtgaggagaatgtgtacatggccaagctcgctgagcaagccgagaggtacgaggagatggtcgaattcatggagaaggtggccaagacggttgactctgaggagctcaccgtggaggagcgcaacctcctgtctgttgcatacaagaatgtgattggagcccgccgtgcgtcatggcgcattatctcctccattgagcagaaggaggaaagccgtggtaacgaggaccgtgtcacactcatcaaggactaccgtggcaagatcgagactgagctcaccaagatttgcgacggcattctcaagctgcttgaatcccaccttgtcccctcttccactgcccctgagtccaaggtcttctacctcaaaatgaagggtgactactacaggtaccttgccgaatttaagaccggggctgagaggaaggatgctgctgagaataccatggtggcatacaaggctgctcaggacattgctttggctgagctgcctcctactcatccaattaggcttgggctagctcttaacttctcagtgttctactatgagatcctcaactcgcctgatcgtgcttgcaacctcgcaaagcaggcttttgatgaggccatctcggagctggacaccctgagcgaggagtcctacaaggacagcactttgatcatgcaactcctccgtgataacctgaccctgtggacttcagacatctcggaggacaccgcggaagagatcagggaagctccgaagcgcgactccagcgaggggcagtaaagccggctttatgtgccctagaagcttgtagctagtgctttgctactgtgtaatgacacctatgtggctgtgattgttgtcgggaaatctggggctcccccgtatgtgaggttgctagcgatggttttgcagtctcgcctttaagctactcgtagcagagcaggtgggggtctgtggagccaggcctggttgggggtgggggagcctcttgaactgcttggtggcacttcctgtttttctgtttgcctttttattggtgtttattgttatggtcaatcctgtgtctaaaaaaaaaaaaaaaaactcgagttacaaaaan

SEQ ID NO: 385540 - DNA, 1230 bp, Oryza sativa
cccacgcgtccgaaaagcattcgcatccacgagaccactcgaacccgacccgcctcgccgccgccgccaccgaagtaatcccttaattggtcaaaatgtctcgggaggagaatgtctacatggccaagctggccgagcaggctgaaaggtatgaggagatggttgagtacatggagaaggttgcaaagactgtagatgtggaagagctcactgttgaggagcgcaacctcttgtctgttgcttacaagaatgtgattggtgcccgccgtgcctcctggcgtattgtctcatccattgaacagaaggaggagggtcgtggcaatgaggaacatgttactctgatcaaggagtaccgtggcaagattgaagctgagctgagcaagatttgcgatggtatcctgaagttgcttgactcacaccttgtgccctcatctactgctgcagaatctaaggtgttttacctcaagatgaagggtgattaccacaggtaccttgcggaatttaagactggtgccgagagaaaggaagctgctgagagcacaatggtggcttacaaggctgctcaggatattgctctggcggatcttgctcccacccatcccataaggcttggactggcacttaacttctctgtgttctactacgagattctaaactctccagacaaggcttgcaaccttgctaagcaggcgtttgacgaagccatctccgagttggataccctcggggaggagtcttacaaggacagcactttgatcatgcagctcctgagggacaacttgaccctctggacctctgacctcacggaggacggtggtgatgaggtgaaagaagcctccaagggcgacgcctgcgagggccagtaaaatgggaagatcgatcgatcgatggctccgcatgttattggagaccatcgatttagatgcctcatgctgctgtcaccatgatggatggattcttctcctgttctactagaatgtttttcttcctgtccccccttcctctctcttctctggtttttactagggtggtagcggtcgaattagttcttcccattgctttgcatttggtgctagtggtccgtctgggctgattgttttcctctggatatgactctcgtgtgtgttgtctccagatagtgttttattgagcaatatttaaagttgtcgtccacctcctcgatgttgtttgtctgcccttgtgcgttgttgaaaaaaaaaaaaaaaaaaa

SEQ ID NO: 385541 - DNA, 1325 bp, Oryza sativa
  unsure (1)..(1325): unsure at all n locations
cactttagttaagctggccgcccgcctgacggtcccgaattacttgctggactccacccacgcgtccggtcttgctggccgagcaggctgaaaggtatgaggagatggttgagtacatggagaaggttgcaaagactgtagatgtggaagagctcactgttgaggagcgcaacctcttgtctgttgcttacaagaatgtgattggtgcccgccgtgcctcctggcgtattgtctcatccattgaacagaaggaggagggtcgtggcaatgaggaacatgttactctgatcaaggagtaccgtggcaagattgaagctgagctgagcaagatttgcgatggtatcctgaagttgcttgactcacaccttgtgccctcatctactgctgcagaatctaaggtgttttacctcaagatgaagggcgactaccacaggtacctcgcggagtttaaagactggtgccgagagaaaggatgctgctgagagcaccatggtggcttacaaggccgctcaggatattcccctggcggagcttgcccccacctcatcccatcaggcttgggctggccctcaacttctcggtgttttattacgagatcctcaactctcctgaccgtgcttgcaatcttgcaaagcaggctttcgatgaggctatctcagagctggacactctgagtgaggaatcctacaaggacagcactttgatcatgcagcttctgcgtgataacctgacgctgtggacttccgatatctcggaggatgctgctgaggaaatcaaggaggcccccaagggcgaatcaggagatggacagtgaacatgatcgaatgcgtgcgcccacaaactagaatagtgacgctgcaaatgtgctgtgggttatcgtttcattttatagattgtaatgtctcgtgatttgtcggaaacaggaggcgctccccatttatgttgtgctaggaaaccttgcagctgactcgctgcttggctggtggattctcgagctgcactttctttggggggagcctcagggtggaaccttcatgtcacttattggatcgattgttttcggtatgtcagttgtgagccttatctccagagtccacagtcctgccaagtgccctgcttgagtgtttttggtttcttcgatgtaaatcccgttgtgtgcacgatggttcttgattcaccacacattgttgtctacattgccaaaacgtatgcttcaagtgcccaaaaggccgaagcggtccgaaaaacattattctgtcaggtatgtgtgataagcggtttcatatgcnnnnnnnnnnnnnnnnnnnnnnnnnnnnnnnnnnnnn

SEQ ID NO: 385542 - DNA, 545 bp, Oryza sativa
aatttgaactccacctgagcacaggagaagccgcagccactgagatttgaccttctgtttctaccagaaaaacacaaacagtgaagatgtcgcagcctgctgagctttcccgtgaggagaatgtgtacatggctaagcttgcagagcaggccgagaggtatgaggagatggttgagttcatggagaaggttgctaagacagttgactctgaggagctcactgttgaggagcgcaaccttctatcagttgcttacaagaatgttattggtgctcgccgtgcgtcatggcgcatcatatcatccattgaacagaaggaagagagccgtggtaatgaggatcgttgcacgctcatcaaggaatacaggggaaagattgaaactgagctctccaagatctgtgatggcatcctcaagcttcttgactcccaccttgtgccttcatccactgctccagagtccaaggtcttctacctcaagatgaaaggcgactactacaggtacctcgcagagtatatgactgtagctgataggaaggatgcttgtgag

SEQ ID NO: 385543 - DNA, 1338 bp, Oryza sativa
  unsure (1)..(1338): unsure at all n locations
ttaatccccacctccccctccccaccaaagccgcgttcgcatccgccgccgcagccgcagccgccgccgccgacgccgacgaggagaggaggagagggaaggcgagagggaggtaggtgaattcggcacgaggccatgtcgccggcggagccgacgagggaggagagcgtgtacaaggcgaagctggcggagcaggcggagcggtacgaggagatggtggagtacatggagcgcgtggcgcgcgcggcggggggcgcctccggcggggaggagctcacggtggaggagcggaacctgctgtccgtggcgtacaagaacgtcatcggcgcccgccgcgcgtcgtggcggatcatctcgtcgatcgagcagaaggaggagggccgcgggaacgacgcccacgccgccaccatccgctcctacaggggcaagatcgaggccgagctcgcccgcatctgcgacggcatcctggccctgctcgactcccacctcgtcccctccgccggcgccgccgagtccaaggtcttctacctcaagatgaagggcgactaccacaggtaccttgcggagtttaagtctggcgacgagaggaagcaggctgcggagagcaccatgaatgcatacaaggctgctcaggacattgctctcgcagatttggctccgacccaccccataaggcttgggcttgcactcaacttttcagtgttctactatgagatcttgaactcccctgaccgtgcctgcaacctcgcgaagcaggcgtttgatgaggccatatcagaactggacagccttggtgaagaatcctacaaggacagcactttgatcatgcagctcctgcgtgacaacttgactctgtggacttcagatgccaatgatgatggtggtgacgaaatcaaggaagccgcagctccaaaagagcctggggatcagtgagatgaattcggacgccagtctgatgcaccatctgttgttgttggggcaatggacattgatgtcttcggctttcagtagctatcttctagtacacgaactgtcgtcgcaccatcgcggaggagacgatgatgttcttaaattacttaagttagttctgggttcacgcttttgttcagtttattaaatgatggctggatcctggttttcttgttccacgatgccagccacaggaaaaaccctactattctgcactgttagaatgctgttatattaaccatgtttgacaagacattttcagtatgtttgtatgtccgtcttggaagtgtttggttgaacctgtctcagggtctttggtccaagacattattcnnnnnnnnnnnnnnnnnnnnnnnnnnnnnnnnnnnn

SEQ ID NO: 385544 - DNA, 525 bp, Oryza sativa
gcgatattgagctacctatgattttttaaaccatttttgcacctgttttctttatattatttgaaataccgggatataacacttgactagcaattctagttttgcttgaaatccggcaaaaagttgattggtttctagatgagtttattctacatttaaggctttacgggtcaaaacatatgttttctgtttccagttttgttcctgctatgataatctgtatttccctctgttccagcttcgctacaacctaccacggacatacaagtttcacaaacaaaacgaggttgatatcgccgtcgatttttggcggttcgtgccacgagcccgagacgaaggtagcactgcatgctctgttaccaaccttaaacagagaagaatgcacagatgatcctaaaacattttcgaggcggttttttagcggttcagccgtgttgtgtcatctctcgcgcagttggccatgtgatgaacttggatcttttgattgcgaatttgtgattgcaacgaaggtatatgtgttcgtcc

SEQ ID NO: 385545 - DNA, 594 bp, Oryza sativa
gggagcccctaccaaagccaaagctaaagcctgaccctaatcctttccttagccctaagccggcaccggaggctggtccaattaagggaggtctcatgaatccccttaaagcccttcacccgcttcctggttctagttagccatggagtgcccaatccccccggagcattttttggttatcttttagaactgttattgcatcccctgttttttttagcttggcaaaatagttttgcgattccccaagcaaccccatcctgaggcttcaaagtttgtccaatccagatgttctcctaggaggatatcttctgcaatgaatattgcaccttatttgatgtactattaggaggatttcttctgcgatgaatattgcaacttatttgatcaagaaacctacttcaccaaccgggagctggaggcagtccagctcccggtgggcgatgctgcgcgcgctcagctgcgtcttcccggagcttcttgcccggaacggcgtcaagttctgcgaggccgtgtggactatggcggcctcgcagatcttcaacgagggcgggctcgactaccttggtaacccgagcctgatccacgcgcagagca

SEQ ID NO: 385546 - DNA, 869 bp, Oryza sativa
  unsure (1)..(869): unsure at all n locations
tcccgcatccgcggaaaccctagcctcctctctctctctcctcgttcactcgttcctcgcgccgccgccgcgacccgcgagcgggaggaggagccatggcgccgaccaagggggaggggccagcgatcggcatcgacctcgggacgacctactcgtgcgtgggggtgtggcagcacgaccgcgtcgagatcatcgccaacgaccaggggaaccgcaccaccccctcctacgtcgggttcacggacaccgagcgcctcatcggggatgccgccaagaaccaggtcgccatgaaccccatcaacaccgtcttcgatgccaagcgtcttatcggcagacggttttctgatgcctctgtccagagcgatatcaagatgtggccttacaaggttattcctggcccaggggataagcctatgattgtagtgcagtacaagggtgaggagaagcaattctctgccgaagaaatttcatccatggttcttatcaagatgcgtgagatcgctgaagcttacctagggtgcaactgtgaagaatgctgttgtcactgttcctgcatacttcaatgattcccagaggcaggcaactaaagatgcaggtgttattgcgggtctttaatgttatgcgtatcatcaatgagccaacagctgctgcaaattgcttatggtcttgacaagaaggcgactagtgttggtgagaagaacgtgctcatttttgaccttggtggtggtacttntgatgtctccctccttaccattgaggagggtatttttgaggtgaaagcaacagctggtgacactcaccttggtgggggggactttgacaaccgcctggtgaaccactttgtccaagagttcaagagaaagcattag

SEQ ID NO: 385547 - DNA, 699 bp, Oryza sativa
  unsure (1)..(699): unsure at all n locations
atcgaagcgaaaaaaaacagagcaaaatcgtcccagcgcgagcgaatcagaagagcaacaacacaactcgatcgttcatcagcggagagcttgatttgatttgatcggaagagaagaaagatggcgggcaacaagggagagggccctgcgatcggcatcgacctcggcacgacctactcgtgcgtcggcgtgtggcagcatgacagggtggagatcatcgccaacgaccagggcaaccgcaccacgccgtcgtacgtggccttcaccgacaccgagaggctcatcggcgacgccgccaagaaccaggtcgccatgaaccccaccaacaccgtctttgatgcaaagcggctgatcgggccggcgctttttcggaccccgtcggtgcaagcggacatgaaagatgtggccgttcaaggtggtgccttggcccagccgacaagccgatgatcgtggtgacgtacaagggcgaggagaagaagttctcggcggaggagatctcgtccatggtgctcaccaagatgaaggagatcgccgaggccttcctcagcaccaccatcaagaacgccgtcatcaccgtcccggcctacttcaacgactcccaacgccaggccaccaaggacgccggcgtcatctccggactcaacgtcatgcgcatcatcaacgagcccaccgccggccgccatcgcntacggcttcgaa

SEQ ID NO: 385548 - DNA, 974 bp, Oryza sativa
cgtcagtgcccatggtgacaccaaggagcttctgcaacttctacttccagttctgaaggtcaatggcatcgacttctacatcaatgggcacgaccactgcctggaacacattagcagcagagacagtcctatccaatacttcacaagtggaggtggttcaaaagcatggagaggagtcttgcagccaaattctgataagctcccagttcttttacgatggacaagggttcatgtccctccagataaaccaggaccaagctgacttcatattttatgatgtttctgggaacatcttgtacaagtggagcaagagcaaagcaaactacctccagccctccacctatatcactgaagcatgaggcagatgcaaaacccacaaaacggagaattagcttggctaagatatttgtatcaaatttgaatgcattattgtggcacgcaagggaagaggaccggaaaggaaataggaaagtatttaagcatggcatgtgattgatctactaaagaaatttgagacaaggccgagaccatcctactagactaggaaaagagatgttcagtatggtatccattagatctgattcatacaacttcttgccagaggaccatcgattatgccatgtataatttacaaagaaggcttaaaactctaaaagctagtagtgacctttgcatatcggcatcagggttcttcagtattggccaagcattcacatataacctttggagagagagagagagagagagagactttgggggtttcttaagctggtattttcatttaaaagagacaatgaaaagaaaatttgatctatgataatcaagcatgtgtcggtgaagacggctattagttactgcttctggaaaaaggttgtaattcagtacagagttgtgtacgtgtccatttgaataaaaattgcatataacagaataaaattataatgagaattctggcaagcaagttatgaacaaaa

SEQ ID NO: 385549 - DNA, 579 bp, Oryza sativa
cccacgcgtccggaaatcagaaagagagagaaattcccacgcagcagcaagcaatccaatccgagagcgcgcgtttgcgattattcgctttcgattccgcgaggtttttggagagggaggagaaggaggaggagatgtcgaagggggaagggccggcgatcgggatcgacctggggacgacctactcgtgcgtgggcgtgtggcagcacgaccgcgtggagatcatcgccaacgaccaggggaaccggaccacgccgtcgtacgtcgccttcaccgacaccgagcggctcatcggcgacgccgccaagaaccaggtcgccatgaacccaaccaacaccgtctttcgatgcgaaggggtttgatttggtaggaggttctccgacccgtccgtgcagagtgacatgaagctatggccgttcaaggtggtgcctggccccggcgacaagccgatgatcgtcgtccagtacaagggcgaggagaagcagttcgccgcggaggagatctcgtccatggtgctgatcaagatgagggagatcgcggaggcctacctcggctcgtccatcaagaacgccgtggtca

SEQ ID NO: 385550 - DNA, 746 bp, Oryza sativa
  unsure (1)..(746): unsure at all n locations
aaagaattccgagctcgcaaggcgaagaaatctcgcaacaatctcatcagatctcgagatctcatcaggtttggtttgttcccgtcggatttttcttttccactgttcgatcttcctgttcgtgcgagatggcgaagggagagggcccggcgatcggcatcgacctcggcaccacctactcgtgcgtcggcgtgtggcagcacgaccgggtggagatcatcgccaacgaccaggggaaaccgcaaccacgccgtcgtatgtcgcgttcaacgactccgagcggctcatcggcgacgccgccaaagaaccaggtcggccatgaaccccaatcaacaaccgtctttcgatgccaagcgactgattaggtagggcggttctccgacccgtccgtgacagagtgacatgaaagctgtggccgttcaaaggtcatccctggccccggcgataagcctatggattgtggtgcagtacaaggggcgaggagaagcaattctccgccgaggagatctccctccatgggtgctcatcaagatgagggagatcgctgaagcctacctcggctccaacatcaagaacgccgtggtgactgtgccggcctacttcaacgactcgcagaggcaaggccaccaaggacgccggtgtcattgccggctcaacgtgatgcgcatcatcaacgagcccaccgcgcggccatcgctacggtcttnaaagaaggcaccagtccgggagaagacgtgctcatcttc

SEQ ID NO: 385551 - DNA, 1155 bp, Oryza sativa
tcgctcctgccatcttcagatcgcatcgattttctccttttcgagtttttttccccttcgcttgagagctttcgacgagagcgagggagagggagatcatggccggcaagggagacgggccggcgatcggcatcgacctcgggacgacctactcgtgcgtcggcgtgtggcagcacgaccgcgtcgagatcatcgccaacgaccaggggaaccgcaccacgccgtcgtatgtcgcgttcaccgactccgagaggctcatcggcgacgccgccaagaaccaggtcgccatgaaccccatcaacaacgtctttcgattcgagggtcttaatcgggcggcgtttctcttgacacgtcggtgcaagagcgacgcgaagttgttggccgttcaaggtgctaacccggccccggcgacaagccgattgatccggcgttgcagtacaaagggagaggagaagcaagtctccgccgaggagatctcgtccatggtgctcaacaagatgaaggagacggccgaggcctatctcggaagcacccgtcaagaacgccgtcgtcaccgtcccggcctacttcaacgactcccagcgccaggccaccaaggacgccggcgtcatctccggcctcaacgtcatgcgcatcatcaacgagcccaccgtcgtcgccatcgcctacggcctcgacaagaagtcgagcagcgtcggcgagaagaacgtgctcatctttgacctcggcgggggcacattcgatgtctccctcctcaccatcgaggagggcatcttcgaggtgaaggccaccgccggtgacacccaccttggaggcgaggacttcgacaaccggatggtgaaccacttcgtgcaggaattcaagaggaagaacaagaaggacatcacgggcaacccgagggcgctcaggcgtcctgaggacggcgtgcgagagggcgaagaggacgctgtcctccaccgcccagaccaccatcgagatcgactccctctacgagggcatcgacttgtacaccaccatcacccgcgccaggttcgaggagctcaacatggacctgtttcgcatgtgcatggagcccgtggagaagtgcctccgcgacgccaagatggacaagagcaccgtccacgacgtcgtgctcgtcggaggctccacccgtat

SEQ ID NO: 385552 - DNA, 975 bp, Oryza sativa
  unsure (1)..(975): unsure at all n locations
gcgcccacgcgtccgcccacgcgtccgcccacgcgtccgcttcctcctccccaaaccctagccgccgccgccggcgtactcgagagagacatcagcatccatggcgggcaagggcgagggtccggccatcggcatcgaccttggcacgacctactcgtgcgtgggcgtttggcagcacgaccgcgtggagatcatcgccaacgaccagggcaaccgcaccaccccctcctacgtcggcttcaccgactccgagaggctcatcggagactgctgccacgagccacgtctgcttgaacccacatcaacaccgtatgcgatgccaagcgtttcattggcaggagggtttagcgatgcttcttgttcagagtgacattaagctctgggcccttcaagggtgatttcttggacctggtgacaagcctatggattgttgtccagttacaagggtgaggagaaagcagttttgctgcagaagagatctcctccatggtcctcatcaagatgcgtgagattgctgaggcctaccttggcaccaccatcaagaatgccgttgtcactgttcctgcctacttcaatgactcccagaggcaggccaccaaggatgctggagtgattggctggtctcaatgtcaatgcgtatcatcaacgagccgactggttgaaggtattgcctatggtcttgataagaaggccaccagcgtttggtgagaagaatgtcctcatctttgaccttggaggtggtaccttttgatgtctccctccttaccatttgagggagggtatcttttganggtcaaggccacagcttggtggacaaccatctttggtggtgaagattttgacaatcgtatggtcaaccactttgtgcaagaattcaagaggaagaacaagaaggatatcactggcaaccccagggctctcaagaggttgaggacagcttgtgagagggcaaagaggaccctgtcttcactgcca

SEQ ID NO: 385553 - DNA, 1164 bp, Oryza sativa
ccacgcgtccgcccacgcgtccgcccacgcgtccgctcacgagctcaaaagacacacattcgcaacacgcatctcgggccatctactcctagtcctaggctcgcgtggaatggcggcgtccaccgatggcgcgtctcctcccctgccgccctcgccggcaaggggttcgccaatgccaaggtgttcggcgagggccgcgtcaacgatgcgcaagtcggcggccaagcccaagccccgacgcggcgtcggggagcccgtggtacggcgccgaccgcgtgctcttacctcggcccgctcttcggcgagccgccgttcctaccttcaacggcgagttcccccggcgactacggcttgggacaacgccgggctgttgggccgacccgggagacgttcgccaaaggaaccgggagcttggaggtgattcaattgccggtggggccatgattgggcgcgttcggttgcgttttcccggagctctctcgcccgcaaacggcgtgaagttcggcgaggcccgtgtggttcaaaggcggggtcccaagatcttcagcgaagggggggctcgactacctcggcaaccccaagcctgatcccacgcgcagagcatcctggcgatctggggttgccaggtcgtgctcatgggcgccgtcgaggggtaaccgcgttcgccggcgggcccgctcggcgaggtcgtcgacccgctctaccccggcggcagcttcgacccgcttggccctcgccgacgaccccgaaggcgttcgcccgagctccaaggtgaaggagatccaagaacggccgcctcgcccatgttctcccatgttcgggttcttcgtccaggccatcgtcaccggcaaggggccactgaaaaaacctgaccggccacctcgccgaccccgtcaacaacaacgcatggccatctgagacggccagttacgctccccggcaagtgagtgtggaaatttccggcgagcaacggcggtgaggtccacttgctttcatgaaggctgcggtgagacgcgcgacgttctcctcaatccagcgtacccgaatatttgcttcggtcggtcaaaattgggaaaaacaatgttatcttggttggttgatgaaaagaagtacaatggaccttgattgggtaaaaatatttttaatctggattggttccggggg

SEQ ID NO: 385554 - DNA, 1199 bp, Oryza sativa
ccacgcgtccgcccagcagcagcagcagcagcagctgagcttgaagcagcagagcgaggtagacatggccgccgccaccatggccctctcgtccccggcgctggccggcaaggccgccgcgaaggtgttcggcgaggggcgcatcaccatgcgcaagtcggcggcgaagcccaagcccgccgcgtcggggagcccgtggtacggcgccgaccgcgtgctctacctcggcccgctctccggcgagccgccgagctacctgaccggcgagtggccccggcgactacgggtgggacaccgcggggctctccgccgacccggagacgttcgccaagaaccgggagctggaggtgatccactctcaggtgggcgatgctcggcgcgctgggctgcgtgttcccggagctcctcgcccgcaacggcgtcaagttcggcgaggcgggtgtggttcagggcggggtcgcagatcttcagcgagggccgggcttcgactacctcggcaacccgagcctgatcccacgccgcagagcatccttcgccatctgggcggttccaggtggtgcttcatgggcgccgtcgaggggtaccgcatcgccggcgggccgctcgggcgaggtcgtcgacccgctctaccccggcggccagctttcgacccgctcggccgtggccgaacgaaccccggaggcccttcgcggaagcttcaaggtgaaggagatcaaagaacgggccgcctcgccaatgttctccatgttcggctttcttcgtccaggcccatcgtcacccggcaagggccccctcgagaacctcgccgaccacctcgcccgaccccgtcaaacaacaacgcctggggcctacgccaccaacttcgtcccccggcaagtgagcaccacctccgcccgtgctgccatggggacgcatcgccttccagctaagctagctaggttgacgacgatgcggcgtctctggcaggagagtgtgcgtgtggtgttacagcggtcgcagtagaatgttacgttacggtgtaaccggtatagaatgtacgtattcgttgtggaacaagcgtggatggatgtacgagtattggaagagaaggtgagatcctgtaccggtaagtgtgtactctctgtgcaggttctgaacctgatcaatgaaaatatggtcgctgccaattaattataaaattagcttgtttaaaaaaaaaa

SEQ ID NO: 385555 - DNA, 1287 bp, Oryza sativa
cccacgcgtccggctcgctcatcgccatctctctctcagctctcacaggtgactgcatcaatggccgcgggccaccatggcgctctcctccccggtgatggcgccgcgcggcgccgtcgacctcctccgcgctcttcggcgaggcgcggatcaccatgcgcaagaccgccgcgaagcccaagccggcggcgtcgtcggggagcccgtggtacggcgccgaccgcgtcctctacctcggcccgctctccggcgagccgccgaggctacctcaccggcgagttcccgggcgactacgggtgggaccaccgcggggctctccgccgacccggagacgttcgccaagaaccgggagctggagggtgatccactcccggtgggcgatgctggggcgcgctcggctgcgtcttcccggagctcctcgcccgggaacggcgttcaagttcggcggaggccgttgtggctcaaggcgggcttcgaaagatcttcaaccgaaggccgggctcgactaccttcggcaaccccgaagcctgatccaacgcgcagagcatcctcgccatcttgggcggtgcaggtggtgctcatgggcgccgtcgaaggggtaccgcattcgccggcgggcccgctcggtaaaggttgtcaaccctgctctacccccggcgggcgcctttcgacccgctcggcctcgccgatgacccccgaggccgttcgcggagctcaaaggtgaaaggagattcaagaaacggccgccttcgcccatgtttctcccatgttcgggcttcttcgtcccaggccatcgtccaccggcaagggccccctcgagaagcctcgtccgaccacctcgccgaccccgtcaacaacaacgcctgggcgtacgccaccaacttcgtccccggacaagtgaagtgggggtaccgtagctgtaggcagtgggggttaattggtgggttggaatggatttgtgtgccagcaagattcggttgtctttgggttggggaagaatgggtttagtgcgacgagagtgatgatcgagtttggtgttgtgtacactaaggaagatgaagaagcccgatgcatgtttttgccccaatcatgattttattcgtttcccaactaatggtctaggtacttatccgtggtgttattctgattagcggatttctcatctctattagatcggaaacaaatactccctcgatcccaaaatataaccatttctggctatgtatagtgtaaatatgtagtctaaattgtttatattgtggcatggaaggattaattagtgcttta

SEQ ID NO: 385556 - DNA, 1305 bp, Oryza sativa
ccacgcgtccgcccacgcgtccgcccacgcgtccgcccacgcgtccgcccacgccgtcgcgcaaaaaaccaacccaaccagccgctcgctatggacctcgttagaacgatggccgggtcggcgctgcaccaggaccaccaggttaactcgagtaacgcctcctcgtcggagatgagctcgtccgccggcgtcggcgacttccggtggccgcatcaccatgcgccgcaccgttcaagagcgcgccccagagcatctggtatggacctgaccgtcccaagtacctggggcccgttctcggagcagacgcccatcgtaccttgaccggaggagtttcccgggagacttacgggttggggacacggcggggttattcgggccggacccggaggacgtttcgcgaaggaacaagggaagcttggagggtgatccactttgcggttggggcgattgttgggggccgcttgggttgcggtcttcccgggagatccttgttccaagaaacggggttgaagtttcggggaagggccgtgtggttcaaagggccggcgcgcaagatctttctccgaagggggggctcgactaccctggggaaccccaaacctggtgcaccacacatccatggctcgccatctgggcgggccaggtggtgctcatgggattcgtcgaggggctaccgcgtcggcggcggcccgcttcgggcgaagggccttcgaacaagggtgtaccccaggcgggcgccctttcgacccgctcgggcctcgccgaacgaccctgacaccttcgccgagctcaaggtgaaaggagctcaagaacggccggcctcgcccatgttctcccatgttcggcttcttcggccaagcccatcgtcaccggcaagttctcccatcgagagacctctttagaccacggtcgccgaccccgtctgccatacaacgcctgggcatacgccaccaacttcggtccccggcaaaaagtgaggcacaacggacaccgatctgagagtgggtgccaaaccaacggtaccatgtgtacactttgtagtagccaacgcaccgaccctgcagttgcagtttgcagcagttcatgtatgtatgtaccttaattgtgtgtgtgtgtgtgtgatcgatcgaggagatttctagcttcacttaacttctgtctgtcatcatctttgcttctttggatcgagactttaatgctgcagccgcaggccgcatccaagggatgatcgaattaacgatgccatcgttattataggatctacaacgaagccagctaaaacgatgccaatttgtgcgtcgaccc

SEQ ID NO: 385557 - DNA, 1123 bp, Oryza sativa
  unsure (1)..(1123): unsure at all n locations
ccacgcgtccgcccacgcgtccgcagcagttgagctctttttccactacgcactagtagtagcactctggtattctcccatggcgactgcgaccgaggaggttgccgctgcggctgctgccgccggcgaggcgccgccgccgccgccgccagcggtggtagaggaggcgaaggaggctttggaggcaccgaagccggaggaggcgccgaaggctgaggagggggaggagaagaaggcggagggtgagaaggagaaggagaaggcgaagaaggagaggaaaccgagggcgaggaagccccgatcggcggggccacaccacccgccctacttcgagatgatcaaggaggcgatcatggcgctggacgggaacggcaaggcgggatcgagcccgtacgcgatcgccaagtacatgggggagcagcacatgggggttctcccggcgaactaccggaaggtgctcgccgtgcagctgcggaacttcgccgccaagggccggctcgtgaaggtgaaggcctcgttcaagctgtcggctgccgaggagaagaaggcgacggcggcgaaggcggccaggtccaaggcggccaagggcgtcgtcggcggcgccaagaggaagaggaccccgcgcccctccgccgccgccgccaagaagcccgcgtcgtcggcggaggcgaagaaggcggttccccccgcccgcccagcccgcgccaagagggcgaggaaggccgcccccgcgaagccgatgcagccgcccaaatccatccgctccgccatctccaagaaggccaacaaggccagcgcctgatcatcgccgccgtctcgccgcccgtcgccgccgcgcgctgtatccctgtatagcctaggtgttgtcgcttacctagtagtagttcgccatcgtcgtctcgtctgcttcgatcgatcgagcgctctgtgtccggtgtgtgtgttgcgttgtagataaggtttgggtttctttttgcaagggaggaagaagctactgtagcatatcgccaagaagctgtagtaataagatgatctggcgctcgcagctttgccttatgatcaaaaaactgttcatattaaaaaaaaaaaaaaaannnnnnnnnnnnnnnnnnnnnnnnnnnnn

SEQ ID NO: 385558 - DNA, 1011 bp, Oryza sativa
  unsure (1)..(1011): unsure at all n locations
cggacgtgntntncacactacgcactagtagtagcactctggtattctcccatggcgactgcgaccgaggaggttgccgctgcggctgctgccgcgggcgaggcgccgccgccgccgccgccagcggtggtagaggaggcgaaggaggctttggaggcaccgaagccggaggaggcgccgaagtgaaggagggggaggagaagaaggcggagggtgagaaggagaaggagaaggcgaagaaggagaggaaaccgagggcgaggaagccccgatcggcggggccacaccacccgccctacttcgagatgatcaaggaggcgatcatggcgctggacgggaacggcaaggcgggatcgagcccgtacgcgatcgccaagtacatgggggagcagcacatgggggttctcccggcgaactaccggaaggtgctcgccgtgcagttgcggaacttcgccgccgccaagaagcccgcgtcgtcggcggagncgaagaaggcggttccccccgcccgcccagcccgcgccaagagggcgaggaaggccgcccccgcgaagccgatgcagccgcccaaatccatccgtccgccatctccaagaaggccaacaaggccagcgcctgatcatcgccgccgtctcgccgcccgtcgccgccgcgcgctgtatccctgtatagcctaggtgttgtcgcttacctagtagtagttcgccatcgtcgtctcgtctgcttcgatcgatcgagcgctctgtgtccggtgtgtgtgttgcgttgtagataaggtttgggtttctttttgcaagggaggaagaagcttctgtagcatatcgccaagaagctgtagtaataagatgatctggcgctcgcagctttgccttatgatcaacaaactgttcatattcttcttcttgttctttttttcagttagtttctgttttgaattctgatcgagttaaattcttgttaaaaaaaaaaagaatcatcaagttcattccccgaccccgagaagaatactaa

SEQ ID NO: 385559 - DNA, 457 bp, Oryza sativa
gttgttctctttttccactacgcactagtagtaggactctggtattctcccatggcgactgcgaccgcggaggttgccgctgcggctgctgccgccggcgaggcgccgccgccgccgccgccagcggtggtagaggaggcgaaggaggctctggaggcaccgaagccggaggaggcgccgaaggctgacggagggggaggagaagaaggcggagggtgagaaggagaaggagaaggcgaagaaggagaggaaaccgagggcgaggaagccccgatcggcggggccacaccacccgccctacttcgaggtgaggggaaaatcaattgatcgatcgatgcagtgatcatgtattgggctgattcgagtttgtgagaattttgtgtggttttgagccagatgatcaaggaggcgatcatggcgctggacgggaacggcaaggcgggatcgagcccgtacg

SEQ ID NO: 385560 - DNA, 342 bp, Oryza sativa
  unsure (1)..(342): unsure at all n locations
cgaatttccgggttgagaccaagccgtcgcgatttctcaaaaggagaggaaaccgagggcgaggaagccccgatcggcggggccacaccacccgccctacttcgagatgatcaaggaggcgatcatggcgctggacgggaacggcatggcgggatcgagcccgtacgcgatcgccaagtacatgggggagcagcacatgggggttctcccggcgaactaccggaaggtgctcgccgtgcagctgcggaacttcgccgccaagggccggctcgtgaaggtgaaggccccgttcaagctgtcggccgccaagaagcccgcttcgtcggcggaggcgaagaagnc

SEQ ID NO: 385561 - DNA, 2566 bp, Oryza sativa
  unsure (1)..(2566): unsure at all n locations
gaattcagtgtgaaggaatagattctcttcaaaacaatttaatcattcatctgatctgctcaaagctctgtgcatctccgggtgcaacggccaggatatttattgtgcagtaaaaaaatgtcatatcccctagccacccaagaaactgctccttaagtccttataagcacatatggcattgtaatatatatgtttgagttttagcgacaatttttttaaaaacttttggtcctttttatgaacgttttaagtttcactgtctttttttttcgaattttaaatgtagcttcaaattctaatccccaatccaaattgtaataaacttcaattctcctaattaacatcttaattcatttatttgaaaaccagttcaaattctttttaggctcaccaaaccttaaacaattcaattcagtgcagagatcttccacagcaacagctagacaaccaccatgtcggctctcaccacgtcccagctcgccacctcggccaccggcttcggcatcgccgacaggtcggcgccgtcgtcgctgctccgccacgggttccagggcctcaagccccgcagccccgccggcggcgacgcgacgtcgctcagcgtgacgaccagcgcgcgcgcgacgcccaagcagcagcggtcggtgcagcgtggcagccggaggttcccctccgtcgtcgtgtacgccaccggcgccggcatgaacgtcgtgttcgtcggcgccgagatggccccctggagcaagaccggcggcctcggtgacgtcctcggtggcctcccccctgccatggctgcgaatggccacagggtcatggtgatctctcctcggtacgaccagtacaaggacgcttgggataccagcgttgtggctgagatcaaggttgcagacaggtacgagagggtgaggtttttccattgctacaagcgtggagtcgaccgtgtgttcatcgaccatccgtcattcctggagaaggtttggggaaagaccggtgagaagatctacggacctgacactggagttgattacaaagacaaccagatgcgtttcagccttctttgccaggcagcactcgaggctcctaggatcctaaacctcaacaacaacccatacttcaaaggaacttatggtgaggatgttgtgttcgtctgcaacgactggcacactggcccactggcgagctacctgaagaacaactaccagcccaatggcatctacaggaatgcaaaggttgctttctgcatccacaacatctcctaccagggccgtttcgctttcgaggattaccctgagctgaacctctccgagaggttcaggtcatccttcgatttcatcgacgggtatgacacgccggtggagggcaggaagatcaactggatgaaggccggaatcctggaagccgacagggtgctcaccgtgagcccgtactacgccgaggagctcatctccggcatcgccaggggatgcgagctcgacaacatcatgcggctcaccggcatcaccggcatcgtcaacggcatggacgtcagcgagtgggatcctagcaaggacaagtacatcaccgccaagtacgacgcaaccacggcaatcgaggcgaaggcgctgaacaaggaggcgttgcaggcggaggcgggtcttccggtcgacaggaaaatcccactgatcgcgttcatcggcaggctggaggaacagaagggccctgacgtcatggccgccgccatcccggagctcatgcaggaggacgtccagatcgttcttctgggtactggaaagaagaagttcgagaagctgctcaagagcatggaggagaagtatccgggcaaggtgagggccgtggtgaagttcaacgcgccgcttgctcatctcatcatggccggagccgacgtgctcgccgtccccagccgcttcgagccctgtggactcatccagctgcaggggatgagatacggaacgccctgtgcttgcgcgtccaccggtgggctcgtggacacggtcatcgaaggcaagactggtttccacatgggccgtctcagcgtcgactgcaaggtggtggagccaagcgacgtgaagaaggtggcggccaccctgaagcgcgccatcaaggtcgtcggcacgccggcgtacgaggagatggtcaggaactgcatgaaccaggacctctcctggaaggggcctgcgaagaactgggagaatgtgctcctgggcctgggcgtcgccggcagcgcgccggggatcgaaggcgacgagatcgcgccgctcgccaaggagaacgtggctgctccttgaagagcctgagatctacatatggagtgattaattaatatagcagtatatggatgagagacgaatgaaccagtggtttgtttgttgtagtgaatttgtagctatagccaattatataggctaataagtttgatgttgtactcttctgggtgtgcttaagtatcttatcggaccctgaatttatgtgtgtggcttattgccaataatattaagtaataaagggtttattatattattatatatgttatattatactaaaaaaannnnnnnnnnnnnnnnnnnnnnnn

SEQ ID NO: 385562 - DNA, 659 bp, Oryza sativa
  unsure (1)..(659): unsure at all n locations
gcattcagggaggaacgaccccttgttggctccaccgtggtttgggcccgtcttgaagcaagattgtttccactggccttttcagcttcgatgcaagtggtggaccaagggagtgagaaagtgcggccaccctgaagcgcaccatcttaggttgtcgccacgccggcgtacgaggagatggtcaggaactgcatgaaccaggacttttcttggaaggggcctgcgaagaactgggagaatgtgctcctgggcctgggcgtcgccggcagcgcgccggggatcgaaggcgacgagatcgcgccgctcgccaaggagaacgtggctgctccttgaagagcctgagatctacatatggagtgattaattaatatagcagtatatggatgagagacgaatgaaccagtggtttgtttgttgtagtgaatttgtagctatagccaatcatataggctaataagtttgatgttgtactcttctgggtgtgcttaagtatcttatcggaccctgaatttatgtgtgtggcttattgccaataatattaagtaataaagggtttattatattattataaaataaaaaaaaaaaaaaactcgagggggggcccggtacccaattcgccctatagtgagtcgtattacaattncatcnnnntnnnnnnn

SEQ ID NO: 385563 - DNA, 448 bp, Oryza sativa
gttactccagctttcggagggctaaagagttggttgttggggtttgtgggctcgagcccatggcaaatcgccggggtcgaggtcgccgaaacgaaactctccctccctaaatcggacgcgcgccggcgtgccctggaaggggggaagtcgccaggccgccgccgtctgatagttgcatgggaagaaaaggcgtgggggcgctcgcgctcttgttggaccgaggtcgcctgcggtgttgcaggccggtcgggggaaaagaggcccataagagaaaatgggtactcactcactggtgggggcgcgggccaagagagaaggccccccgcgagagaaatttaccagcccaatggcatctacaggaatgcaaaggttgctttctgcatccacaacatcttctaccagggcccggttcgctttcgaggattaccctgagctgaacctcttcgag

SEQ ID NO: 385564 - DNA, 616 bp, Oryza sativa
caagagctaaaatttcagtcagtgatgatgaggaagcaaagccgctctccttgttcatcttcttcttctgctgctgttgtgtccctctgcaaggtgctcctgttggtcctggctctcatctgcaccctggaaactgtctcagtagaaggagggagagtggcagcagcagcattagttggtgggggcgtaccactgaatccacggtacccggcgattcctgaagaaccttacataggccggagaggcgatccgtacacaggtcggggaggcgaaccttacacacgcccgggacggggatgcaccgttgcatacggatgctattgggggtcctccagctgccaaaccatgacgatcgacatactactctgctactgctactgcatgctcgcttgttatttcgatcgatcaatctcatggcctgcgtagctcaccacataaacaaataaaaactatgcatctaataattaacccctgatctatcgatcgatcagtagacgggtatgcatcaatcggcatcagcagctatagcgatgtgaattgtgatgtatgcatggtgtatttttgtggtaaataaagtgaagcagatatctatctagtaaaaaaaaaaaaaaaaaaa

SEQ ID NO: 385565 - DNA, 1097 bp, Oryza sativa
  unsure (1)..(1097): unsure at all n locations
atccccttcctccaggtggcttgtttcttgcagtggtggtggtggtggtggtgagatctagcttggttggttggttgcagctggagatcgatcgggatggggaggggtcgggtggagctgaagaggatcgagaacaagatcaaccggcaggtgacgttcgccaagcgcaggaatggcctgctcaagaaggcgtacgagctctccgtcctctgcgacgccgaggtcgccctcatcatcttctccaaccgcggcaagctctacgagttctgcagcacccagagcatgactaaaacgcttgagaagtatcagaaatgcagttacgcaggacccgaaacagctgtccaaaatagagaaagtgagcaattgaaagctagccgcaatgaatacctcaaactgaaggcaagggttgaaaatttacaacggactcaaagaaatttgctgggtgaagatcttgattcattaggcataaaagagctcgagagcctagagaagcagcttgattcatccctgaagcacgtcagaactacaaggacaaaacatctggttgaccaactgacggagcttcagagaaaggaacaaatggtttctgaagcaaatagatgccttaggagaaaactggaggaaagcaaccatgttcgcgggcagcaagtgtgggagcagggctgcaacttaattggctatgaacgtcagcctgaagtgcagcagcctcttcacggcggcaatgggttcttccatccacttgatgctgctggtgaacccacccttcagattgggtaccctgcagagcatcatgaggcgatgaacagtgcgtgcatgaacacctacatgcccccatggctaccatgatgatgacggggccaatgaattacgaaataacaaggatatgtggcatatatgtggtgccgcatacatgcatgtatcatggctagctacttaattggagtgatggatttgaactagtttcgtatgtagcctgtttgtgtgtaacttgtgtgagatactaccttaaaaactatcggtgtctgttgaacatattctgcgatcaactttaagcgtattattatcattttcattccnnnnnnnnnnnnnnnnnnnnn

SEQ ID NO: 385566 - DNA, 1230 bp, Oryza sativa
gctttcccctctcttccgcttcgcgagattggttgattcatctcgcgattgatcgagctcgagcggcggtgaggtgaggtggaggaggaggaggaggaggagatcgggatggggagagggagggtggagctgaagaggatcgagaacaagatcaacaggcaggtgacgttcgcgaagcggaggaatgggctgctcaagaaggcgtacgagctctccgtgctctgcgacgccgaggtcgccctcatcatcttctccaaccgcggcaagctctacgagttctgcagcggccaaagcatgaccagaactttggaaagataccaaaaattcagttatggtgggccagatactgcaatacagaacaaggaaaatgagttagtgcaaagcagccgcaatgagtacctcaaactgaaggcacgggtggaaaatttacagaggacccaaaggaatcttcttggtgaagatcttgggacacttggcataaaagagctagagcagcttgagaaacaacttgattcatccttgaggcacattagatccacaaggacacagcatatgcttgatcagctcactgatctccagaggagggaacaaatgttgtgtgaagcaaataagtgcctcagaagaaaactggaggagagcaaccagttgcatggacaagtgtgggagcacggcgccaccctactcggctacgagcggcagtcgcctcatgccgtccagcaggtgccaccgcacggtggcaacggattcttccattccctggaagctgccgccgagcccaccttgcagatcgggtttactccagagcagatgaacaactcatgcgtgactgccttcatgccgacatggctaccctgaactcctgaaggccgatgcgacaaccaataaaaacggatgtgacgacacagatcaagtcgcaccattagattgatcttctcctacaagagtgagactagtaattccgtgtttgtgtgctagcgtgttgaaacttttctgatgtgatgcacgcacttttaattattattaagcgttcaaggactagtatgtggtataaaaggccgtacgtgacagcctatggttatatgctgcacaaaaactacgtatggtacagtgcagtgcctgtacatttcataatttgcggtaaagtttattgactatatatccagtgtgtcaaatataataaaatgtcgaggtttaattgccgtataaaaccaaaaaattcaaaaaacaaaa

SEQ ID NO: 385567 - DNA, 1242 bp, Oryza sativa
  unsure (1)..(1242): unsure at all n locations
ccacgcgtccgaggacgcgtgtgggcggcggcgcggcgcggagcagaggaggacgaagcagcaggcggcggcggcagagcacggcgacctagcccgacctcgcaaccatggcaaggggtttgaagaagcatctgaagaggctcaatgcgcccaagcattggatgctcgacaagcttggtggagcttttgcccccaagccatcttctggtcctcacaagtccagggagtgcctgcctctgatcctcattatcaggaacaggctcaagtatgctctgacataccgtgaggttatttctatcctcatgcagcgccatgtcttggttgatggcaaggtcaggactgacaagacctacccagctggtttcatggatgtcatttccatccccaagactggtgagaactacaggcttctgtacgacaccaagggacgtttccgccttcagtctgtcaaggatgaggatgctaagttcaagctttgcaaggttcggtctgtgcagtttggccagaagggaatcccctacctgaacacctatgttgtgcctactgacacctatatggcgaccatcgctacccgaccgacatcaggcaaacgacacaatcaagatcgatctggagaccaacaagattgtcgacttcatcaagtttgatgttggcaatgttgtcatggtgactggaggaaggaacacaggccgtgttggtgtgatcaagaacagggagaagcataaaggcagcttcgagaccatccacgttgaggatgccctgggccaccaattcgccacccgtctgggcaatgtgttcaccattggcaagggcaacaagccttgggtgagcctgcccaagggcaagggcatcaagctcagcatcatcgaggagcaaaggaagcgggatgctgccgcccaggctgctgccaacgcttaaaatctgctgctgcgtctgcctggagttttgctatagcgagttgtttgcaaggatatagaactatctgccccagactatccttttttgagctcttttgcctaatgttatgttgatcaattcgcgaactcatgtttgctgctagctgtaatgcgactgtttaccttatttaaggcgccttttaagaacctccaaaccaaattgtctttgcctgttgctgagatggtatggttttgagcattcagcctatggcctttttgttccaaaannnnnnnnnnnnnnnnnnnnnnnnnnnnnnnnnnnnnnnnnnnnnnnnnnnnnnnnnnn

SEQ ID NO: 385568 - DNA, 926 bp, Oryza sativa
  unsure (1)..(926): unsure at all n locations
cccacgcgtccgggcggcggcgcggcgcggagcagaggaggacgaagcagcaggcggcggcggcagagcacggcgacctagcccgacctcgcaaccatggcaaggggtttgaagaagcatctgaagaggctcaatgcgcccaagcattggatgctcgacaagcttggtggagcttttgcccccaagccatcttctggtcctcacaagtccagggagtgcctgcctctgatcctcattatcaggaacaggctcaagtatgctctgacataccgtgaggttatttctatcctcatgcagcgccatgtcttggttgatggcaaggtcaggactgacaagacctacccagctggtttcatggatgtcatttccatccccaagactggtgagaactacaggcttctgtacgacaccaagggacgtttccgccttcagtctgtcaaggatgaggatgctaagttcaagctttgcaaggttcggtctgtgcagtttggccagaagggaatcccctacctgaacacctatgatggtcgcaccatccgctaccctgacccgatcatcaaggcaaacgacacaatcaagatcgatctggagaccaacaagattgtcgacttcatcaagtttgatgttggcaatgttgtcatggtgactggagggaggaacacaggccgtgttggtgtgatcaagaacagggagaagcataaaggcagcttcgagaccatccacgttgaggatgccctgggccaccaattcggcacccgtctgggcaatgtgtttaccatttggaaaggcaacaagctttgggtgagcttnccangggnaagggataagttaagatattgngggganggagnnggttgttcgccaggtgtgcaaggtaaattgtgtggtttctgggttgtntggggttttgaggttnggttttncag

SEQ ID NO: 385569 - DNA, 1170 bp, Oryza sativa
  unsure (1)..(1170): unsure at all n locations
ccacgcgtccgcggacgcgtgggcggacgcgtgggcggacgcgtgggcggacgcgtgggcggcgacctagcccgacctcgcaaccatggcaaggggtttgaagaagcatctgaagaggctcaatgcgcccaagcattggatgctcgacaagcttggtggagcttttgcccccaagccatcttctggtcctcacaagtccagggagtgcctgcctctgatcctcattatcaggaacaggctcaagtatgctctgacataccgtgaggttatttctatcctcatgcagcgccatgtcttggttgatggcaaggtcaggactgacaagacctacccagctggtttcatggatgtcatttccatccccaagactggtgagaactacaggcttctgtacgacaccaagggacgtttccgccttcagtctgtcaaggatgaggatgctaagttcaagcttttgcaaggttcggtctgtgcagtttggccagaagggaatcccctacctgaacacctatgatggtcgcaccatccgctaccctgacccgatcatcaaggcaaacgacacaatcaagatcgatctggagaccaacaagattgtcgacttcatcaagtttgatgttggcaatgttgtcatggtgactggaggaaggaacacaggccgtgttggtgtgatcaagaacagggagaagcataaaggcagcttcgagaccatccacgttgaggatgccctgggccaccaattcgccacccgtctgggcaatgtgttcaccattggcaagggcaacaagccttgggtgagcctgcccaagggcaagggcatcaagctcagcatcatcgaggagcaaaggaagcgggatgctgccgcccaggctgctgccaacgcttaaaatctgctgctgcgtctgcctggagttttgctatagcgagttgtttgcaaggatatagaactatctgccccagactatccttttttgagctcttttgcctaatgttatgttgatcaattcgcgaactcatgtttgctgctagctgtaatgcgactgtttaccttatttaaggcgccttttaagaacctccaaacccaaaaaaaaaattgtctttgcctgttgctgagatggtatggttttgnnnnttcnggntnnnnnnnnnnnnnnnnnnnnnnnnnnnnnnnnn

SEQ ID NO: 385570 - DNA, 524 bp, Oryza sativa
gcgcccacgcgtccgcggcggaagagagcgacgcagacggacggcgtggtggtctccccctccggcgacgtagctcgagctcgcaaccatggcgaggggattgaagaagcatctcaagaggctcaatgcgcccaagcactggatgctcgacaagctcggcggagcttttgcccccaagccatcgtctggacctcacaagtccagggaatgcctgcccctgatcctcatcatcaggaacaggttgaagtatgcgcttgacatacccgtgaggttatctctatcctgatgcaagcggcatgtcttggttgatgggaaggtcaggactgacaagacctacccttgcttggtttcatggatgtgatttccattccaaagactcggtgagaactacaggcttctctatgacaccaagggtcgcttccgccttcagtccgtcaaggatgaggatgccaagttcaagctttgcaaagttcggtctgtccagtttggacagaaggggcatccctatctgaacacctatgatg

SEQ ID NO: 385571 - DNA, 1015 bp, Oryza sativa
tttgtttctgaagaggctcaccgctcccacacatgggatgctaaacaagcttgctggagctttagcccgcaagccatgttttgtggctcacaagatcagtgcgtgactgcctctgatcctgattattaggaacaggctcaggtctgctctgacatacctggaggagatcaatattctcatgcatagccatgctttggatgaaggcaaggtcaagactgactagagcttctcgggtgaatagatggatgcaagtggcataccgaatgactgcggagaactacaggctgctgcacgacaccaagggacgtttccgccttcagattgacaaggatgaggatgctaagttcaagctttgcacggttcgggttgtgcagcatggccagaagggaatttcctacctgaacacctatgatggtcgcaccatccggtaccctgacccgatcattaaggtaaacgacacatttcaagatcgtttttgagaccaacaagattgttgacttcatcaagtttgatgtgggcaatgtcgttatggtcacaggagggaggaacactggtcgtgttggagtaattaagaacagggagaagcacaagggcagttttgagaccatccatgtggaggacgcattgggccatgccttcgccacccgtctgggcaatgtgttcaccatcggcaagggcaacaagccatgggtgtctctccctaagggcaagggtatcaagctcagcatcatcgaggaacagaggaagcgagatgctgctgctcaggctgctgcaaatgcttaaatacatttctatcttcaaaatttgagttttgtttggggttgacagaattttcccatcctagttgaaatgtagttcacagtaatactgttaagttgcagagatgcatccttttctactgttatttcatgttatcgagccattttattgtgttcatcttttggccttgaagctaccaaaatggctgagaccgttatcatcatgcagtcattataatgaacagtagcaattagcc

SEQ ID NO: 385572 - DNA, 1380 bp, Oryza sativa
  unsure (1)..(1380): unsure at all n locations
gcgccaccaaaccaaaccaactcttcgtcgtcgcgccgcttccgttcttccggcggccatggaggacgcagcagcagcagcaaggcggatggagaggcttgcctcccacctccgcccgcccgcttctcagatggaggaatcacccctcctgaggggctccaattgccgggcaaaaggtgccgctccgggtttcaaggtcgccatcttgggagcgtctggtgggattggccagcctcttgcattgctcatgaagatgaaccctcttgtttctgtgctccatctgtacgatgttgtcaacactcccggtgtcacagctgacattagccacatgaacactggtgctgtggtgcgtggtttcttgggccagccacagttggaaaatgcccttactggaatggatcttgtgatcattcctgctggtgttcctcgtaagcctgggatgacaagggatgatttgttcaacatcaatgccggaatcgtccggactctttgtgaaggaatcgcaaaatgctgccccaatgcaattgtgaatgtgatcagcaaccctgtcaattctactgttccgattgctgctgaggtttttaagaaagctgggacatatgaccctaagcgccttttgggggtgacgacacttgatgtagtgagagccaatacttttgtggcagaagttcttgggcttgaccccagagatgtaaatgtccctgtcattggtgggcatgcaggagtaacaatattaccactcctttcacaggtgaatcctccctgctcattcacctcagaagaaattagttatcttaccactcgcatacagaatggtgggacagaagtagtcgaggctaaagctggagcggggtctgcaaccctttcaatggcgtatgcagcttctaaatttgcagatgcttgcttgagaggattgcgtggcgacgctgggatagtggagtgctcttttgtagcttctcaggtgacagagctgcctttctttgcatccaaagtgcggttaggtcgctgtggcatcgaggagatcttatcacttggtccattgaatgaattcgaaagagctggactggagaaggctaagaaggagctggccgagagtatccaaaagggggtcgctttcatcaacaagtgaggccatcttggaatgccccaatttagttcaacatggaaatacacaggctgtgtctttgcttcctggggagtgggaagaacacttgtatcatcttgtctcaaatgtaaaagctgcctacacgatgtttatacagctgtagcagatgcaaaaacacaagtctgctaataaaagttgcttctgaataaaaaggaaccctgctctgatctctgccttgttnnnnnnnnnnnnnnnnnnnnnnnnnnnnnnnnnnn

SEQ ID NO: 385573 - DNA, 933 bp, Oryza sativa
  unsure (1)..(933): unsure at all n locations
cccacgcgtccgcccacgcgtccgcggacgcgtgggccgcgccgctactcccccctcgccgagagagctctagggtttccgctgccgaattttttttttaattcggggggagagatttgaagaggcggcaccatgttggtctaccaggatctgcttaccggtgacgagctcctgtcggattcgttcccctacagagagatcgagaacggcatcctctgggaagtcgatggcaagtgggtcgttcaaggagctattgatgtggacattggtgccaacccatctgctgagggtggtggtgatgatgagggtgttgatgaccaagctgtgaaggtggtcgacattgtggacaccttccgtcttcaggagcaacctccttttgacaagaagcagtttgtgaccttcatgaagcgctacatcaagaacctctccgccaagctggatgcggaaaagcaagaggaattcaagaagaacattgagggtgccaccaagtacttgcttggaaagctcaaggaccttcagttctttgttggtgagagcatgcatgatgatggcggcttggtgtttgcctactacaaggacggagccaccgacccaaccttcctttacttctctcatgggctgaaggaggtcaagtgctgagcggttccttctgctcgacactgatgttttatctatgcagtccgccgtatttttggtctagtctatggttgtcagttgactcgatatggtctaatgttggtgtcggaaacaactatcgtttgcttgttatggatgttgagatgagtccttttaaaaaaacctccggattattggattcatgagctccttaaatgtttggaacgatattaatttgctttgtgatggctggagaaagataatgatgaaattgttgtgctagctatgttaaaaaaaaaannnnnnnnnnnnnnnnnn

SEQ ID NO: 385574 - DNA, 888 bp, Oryza sativa
  unsure (1)..(888): unsure at all n locations
cccacgcgtccgcccacgcgtccgccggatcgcgtctctcccatcctctcgcgcatcctcctccgactacctcggttgggttttgggggcggctggagatgtcggactccgaggagcaccacttcgagtcgaaggccgacgccggcgcgtccaagacctacccgcagcaggctggtactattcgcaagaacggtcatattgtcatcaagaaccgcccatgcaaggttgttgaggtctccacctccaagactgggaagcatggacatgcaaaatgccactttgtggccattgacatcttcaatgggaagaagcttgaagatattgtgccctcctcccacaactgtgacgtcccccacgtgaaccgtactgattatcagctgattgacatttctgaagatggatttgtcagcctcctgactgaaagtggaggcactaaggatgacctgaggctccctagtgatgaggctctgcttactcagatcaaggatggattcgccgaggggaaggatctgattgttaccgtgatgtctgccatgggtgaggagcagatctgcgctctgaaggatattggccccaagaactagaataccttgttaccgtgtttggctacctgtctggtcgctttaagtttggagctggtcttgagattatatataaacttttgatttgagcgtaagttaagaagacatatgggccgttgttccatcttgcggtttataccgaatgatttggatgtacctttgctatatgtaatgctattttgaaccagtagttttacagtctttatggttatttatatacaatgttctttgggttatatgcaaaatttcttgtaatccgaaacnnnnnnnnnnnnnnnnnnnnnnnnnnnnnnnnnnnnnnnnnnnn

SEQ ID NO: 385575 - DNA, 993 bp, Oryza sativa
ccacgcgtccgccctcctcccccctcgccgtcgccgccgccgccgccgccgacgccgccgcgaccacctctcgcaaggggattttgtaggggtttctgatccgaggagcgggcgatgtcggactccgaggagcaccacttcgagtcgaaggccgacgccggcgcctccaagacctacccgcagcaggctgggaccatccgcaaaaatggctacatagtcatcaagaaccgcccctgcaaggttgttgaggtttcaacctctaaaactgggaagcacggtcacgccaagtgccactttgttgcaattgacatctttactgccaagaagctcgaagatattgtgccatcttctcacaactgtgatgtcccgcatgtgaaccgtacggagtaccagctcattgatatatctgaggatggatttgtgagtctgttaactgaaaatggcaacaccaaggatgacctcaggctccctactgatgataacctgcttagtcagatcaaggatggatttggagaagggaaggacctggtggtgactgttatgtctgccatgggagaggagcagatctgcgcgctgaaggacatcggcccgaagtaaacctcacctgttccatgtgattactactgaactttcagttatgatcggtttgggtatgtaggaacaaggattctcttaaaacatacagagtcacaaccattaaggaattgtatcacaaaactcgtccccgccagtcaggctcttatttatctgggtctcgtcgtcgattcactgtcctaaatttcctgagttcctgtacccctaaaccaccatccctagacgttttgttaaccctttgggtatttggtagcaactttcattgtggagttggattgtgtgcttaaggtgaaaatatcatttgtgataaaccatgagactttgttgtgctgtcaccatgaccactgctattagcatctgcagatgcaacttttgacagttaaaaacaaactttttgaa

SEQ ID NO: 385576 - DNA, 1042 bp, Oryza sativa
  unsure (1)..(1042): unsure at all n locations
cctactctaccccccctttccccccctcccctgctcgtgctccgctttctccccccaaattcctcgccgccctcggtcgtcgccgccgcctccgccgcctcgcctcccggagattcgccgccttcgccgccgccgccatgaatcccgagtatgactacctcttcaagcttctgctcatcggagactcgggcgtcgggaagtcttgcctgcttctgaggtttgcggacgattcatatctggagagctatatcagtaccatcggtgttgattttaaaatccgcactgttgagcaagatgggaagacaataaagctgcaaatttgggatactgctggccaagagcgatttaggaccattacaagcagctactaccgtggtgcccacgggatcattgttgtttatgatgtgactgatcaggagagcttcaacaatgtcaagcagtggctgaatgaaattgataggtatgctagtgaaaatgtgaacaagctcttggtggggaacaagtgtgatctagctgagaacagagtggtttcttatgaggctggcaaggcccttgctgatgagattggaataccattcctggagaccagtgcgaaggatgcaacaaatgtggagaaggcattcatgaccatggcaggagagataaagaacaggatggcaagccaaccggctacaaatgcaagcaagcctgcaaccgtgcaaatgcgaggccaacctgttgcccagcaaagcagctgctgctcttgattatcaatctagatcacaatagtgtgcttgtttgtgcaccaagcaacacttaattggttgctctatccctgtaaattaagtctattagtactatcaaaaagcttgatgtgttctgtgtcggatattattggaaaaagtctgtcccctaactgtaacgaagcggcagatgctgtgggcctgttttaactgcctgttcatatttctatgtttcaagtggcatcgatgttcgactttattcgattaatggttccacttgcaaactgtgctacgaaaaaaaaaaaaaaannnnnnnnnnn

SEQ ID NO: 385577 - DNA, 746 bp, Oryza sativa
  unsure (1)..(746): unsure at all n locations
actagttctagatcgcgagcggccgccgccgcttgtcaccccttccgtttccaagatgtcgaagcgagggcgtggaggtagtgctggtaacaagttccggatgtcactgggtctgccagtggcagccactgtgaactgtgctgacaacactggagcaaagaacctttacatcatttctgtgaagggaatcaagggacgccttaacaggcttccttctgcttgtgttggggacatggttatggctactgtgaaaaaagggaagcctgacctgaggaagaaggtcatgccagctgtcatcgtgaggcagcgcaagccgtggcgccgaaaggatggtgtctacatgtactttgaagacaatgctggagtcattgtgaaccccaagggagagatgaaaggttctgccatcactggacctatcggaaaggagtgcgctgatctctggcccaggattgcaagtgcagcaaatgcgatcgtctaatcgaagcagccattgaaagttccattagcgttttctcttcttgaaagagttaaaagagctgctagttttgtatcgaccttaaaaatagtttcccaggattatgtttgtgccgctggattatgccccgttagcttctttaaacacatttgagcaatatgatatggcactgatgcctagcctgacatttggtcctagtttaaaacttaaagctgtcttggaatttcgatgnnnnnnnnnnnnnnnnnnnnnnnnnnnnnnnnnnnnnnnn

SEQ ID NO: 385578 - DNA, 729 bp, Oryza sativa
ccacgcgtccgccacgcgtccgccacgcgccccgccgagagagcggagcgtgtccagatcgcgtgactcccccacactccgctccgctccccccgcggccacgcgctcctcgtcggcttccgcttcctcccaccacctcgcagcgttgcagggcgtgggcgtgggcggcggacatggccggcgagaagaaggtgttcgggttcgaggaggtggccggccacaacgtcaccaaggattgctggctcatcatcgccgggaaggtatatgatgttacttcttttatggatgagcaccctggtggcgatgaagtgttgctagcagtaactggcaaagacgcaaccaatgattttgaagacattggccacagtgaatcagcaagggagatgatggagaagtatctcattggggagattgatgcttcaaccatcccagtaaagcgtactcatgtcactccccagcaagcgcccggcaacccagacaagggcgatgacatgctcattaagatcttgcagtttcttgtccccatcttgatcttggggcttgcatttgctatccggcagtacaccaaatctgagtagatctgttattacaatgttgataatcaatatggtccatgaagctatattaggtgaaatgattttggatcaaaaggactaaataatggtatttggttgagggggacggtatgttcgtattggtatattatggggtattatgttcccgacatcg

SEQ ID NO: 385579 - DNA, 1885 bp, Oryza sativa
  unsure (1)..(1885): unsure at all n locations
ccaaatggcacagcaaaaaaggccgcccctttcttctctcctcgtccttatcaccaccaatccgatcctcttctcttctcttctcttcttccccacatccagttcgattctcatctctcccacaacaaatcacgccatggatccctacaagcatcggccgtccagcgggagcaattccaccttctggaccaccaactccggcgcccccgtctggaacaacaactccgccctcaccgtcggagagcgaggccctatcctccttgaggactatcatctgattgaaaagcttgcacagtttgacagggagcgtatccctgaacgtgtcgttcatgcaaggggagccagtgccaagggattttttgaggttactcatgatatttctcacctcacatgtgctgattttctccgtgctcctggtgttcagaccccagttattgttcggttctccacagtcgtgcatgagcgtggaagccctgagacattgagggatccacgtggttttgctgtcaagttttacactagagagggtaattttgatcttgttgggaacaatatgcctgtcttttttatccgagatgggatgaaattccctgacatggtccatgctttcaagccaagtccaaagaccaatatgcaggagaactggagaatagttgatttcttttcacaccacccagagagcctgcacatgttctccttcctctttgacgatgtaggcatcccactcaactacaggcacatggagggttttggtgtcaacacctacaccctaatcaataaggatggaaagcctcaccttgtcaaattccactggaagcctacctgtggtgtcaaatgcctgttggatgatgaagctgtgactgttggcggcacctgccacagccatgccacgaaggacttgactgattctattgcagcagggaattacccagagtggaagctttacatccagactattgatcctgatcatgaggacagatttgacttcgatcctcttgatgtcaccaagacatggccagaggatatcatccccctgcagccagttggacggatggtcctgaacaaaaacattgataacttctttgcagaaaatgaacagcttgctttctgcccagcgataattgtccctggaatccattactctgatgataagctgctccagacaagaattttctcctatgctgatacccaaaggcaccgtcttggcccaaactatttgatgcttcctgtgaatgcaccaaaatgtgcataccacaacaaccaccacgatggctccatgaatttcatgcacagggatgaagaggttaactacttcccttcaaggtttgatgctgcacgtcatgctgagaaggtccctattcctcctcgtgttctaacaggctgtcgggaaaagtgtgtcattgacaaggagaacaatttccaacaggctggtgagagataccggtcatttgaccctgccaggcaagatcgttttctccagcggtgggttgatgctctctcagatcctcgtattacacatgaactccgtggcatctggatctcctactggtcgcagtgtgatgcgtcccttgggcagaagctggcttcacgtctcaacctgaaaccaaacatgtagatcggccaggaggaatccagtggtggtgctatgttggacagtcaaacatgaactgtaatgtgtcgaccagccgtagtcgtgaataaaatgtgatacggtgatatgtatactggtgacgcaagttgtgaaactgtatctggaatcctgaaaatatgccttgctgtgtcttgggaaagagataataaagactgatacagtgggtgctatatgtttgaaaaaaaacatacatctgccatctcttgtttgcctttgtgttaaannnnnnnnnnn

SEQ ID NO: 385580 - DNA, 582 bp, Oryza sativa
  unsure (1)..(582): unsure at all n locations
ttaaccctcactcaaagggagagaattcgagctcggtcgattctcatctctcccacaacaaatcacgccatggatccctacaagcatcggccgtccagcgggagcaattccaccttctggaccaccaactccggcgcccccgtctggaacaacaactccgccctcaccgtcggagagcgaggccctatcctccttgaggactatcatctgattgaaaagcttgcacagtttgacagggagcgtatccctgaacgtgtcgttcatgcaaggggagccagtgccaagggattttttgaggttactcatgatatttctcaccncaaatgtgctggattttttccgtggttcctggnggttnagaccccnagttatttgtttngggnttttcaaaagtnggngnnattagggtgggaagcccctngngaantttgggggttcncgggggtttttgtngnaaantttnanaatgggtggggttnnttttnntntntttgggggaaaaannngccntttttttttnngngggggggtnnattccnnnaanggnncntnttnaagnattnccngggccnttngggggnn

SEQ ID NO: 385581 - DNA, 508 bp, Oryza sativa
ccacgcgtccggccgccgccgctcccagctcgcgctcccctcgccgccgcagccgccgccgcctcgcctcctcggagatcttcgctgcccttccgtcaacatggggaagacacgtggtatgggagctgggcgcaagctcaagacccaccgcaggaaccagagatgggcagacaaggcctacaagaagagccacttgggtaatgagtggaagaaaccctttgctgggtcatctcatgccaagggcatcgttctggagaagattggtattgaggccaagcagcccaactctgccatccgtaagtgtgctcgtgtgcagcttgtgaagaatgggaagaagattgctgcctttgtgcccaatgacggttgcctgaacttcattgaggaaaatgacgaggtgttgattgctggatttggtcgtaagggccatgctgtgggagatattcctaggggtccggttcaacgggtcgccaaggtctctggtgtgcctctgcttgctctcttcaaggag

SEQ ID NO: 385582 - DNA, 982 bp, Oryza sativa
  unsure (1)..(982): unsure at all n locations
gcgcttcttgaaaaattaccgggaattgaagcacataagcgtgggtgcatgatttcactaattactctctaggatgaaaaccaactccaacttataggtctatcatcgatctccggcttggcccaaaacccctatataaaccctctccctacccctccctcactcacccacaccacactccactccagcatagtactgcgcttagctaattaagcagcaacttaacttgatcttcgtgtgaccgatcgatggctcgcgcggcgaataataagtatgtggcggcggtgatggtggtggcgctgctgttggcggcgccggcgggagcgcggtgacatgcgggcaggtggtgagcatgctggcgccgtgcatcatgtacgcgacggggagggtgtccgcccccaccggcggctgctgcgacggggtcaggaccctcaactccgccgccgccaccaccgccgaccgccagaccacctgcgcctgcctcaagcagcagaccagcgccatgggcggcctgaggcccgacctcgtcgccggcatcccctccaagtgcggcgtcaacatcccctacgctatcagcccttccaccgactgctccagggtgcactgagtggatcaacgtcaagtgatgccacaataataatggagagatggatccatcgatctgcggctctcattttgcggttgctatctgcaatattcgtcgtcgtcagagagatcgagctagaaatgcatgttactcctccgttctgttactatctgcttacctgttgcttcgtcgcggtttgatagtcgtcgttatagctagtgtaagagtgtgagggttgattttgatctgtctcctttacgggacgaggggcagacgaatcatgcatgaatcttagaggacctgcttgcattgtaccttactgcatgcatgcatgcttcaatatatatccatcaaatgaagagtcttttaataaaaaaaaaaaaaaaaannnnnnnn

SEQ ID NO: 385583 - DNA, 461 bp, Oryza sativa
  unsure (1)..(461): unsure at all n locations
cctcaagcagcagaccagcgccatngggcncntggagncgnacctcgtcgccggcatcccctccaagtgcgacgtcaacatccacctacgccatcaagcccttccaccgactgctccagggtgcactgatgagcggatcaacgtcgacaagtgatgcgacaataataaaggagagatcgatccatcgatctccagctctcatttcgcggttgctatgtgcatgcgccgtcgtcaatgatcgagctagaaatatatatgcatgttgctccttcgttgtgttacttcctgcttacctgctgcggtttgatagttagctagtgtgagagactgtgagggttgattttggggcagacgaatcatgaatctcagaggaccttgtaccactgcacgcttcaatatatatccatcaaatgcagggtcttttaataaaaaaaaaaannnnnnnnnnnnnnnnnnnnnnn

SEQ ID NO: 385584 - DNA, 812 bp, Oryza sativa
  unsure (1)..(812): unsure at all n locations
aagttggaaataaacntcattaaggggaacaaaaggggggtccacngggggggggccgttttagaattagtgaatcccctgggtgcgaggaaatttaagcgaccacgaagagtatgacgctggtgaagattggtccgtggggcggaaatggagggtcagctcaggacatcagtgtgccacccaagaagctgttaggcgtgacaatctacagctcagatgcaatcagatccattgccttcaactacatcggtgtggatggacaggaatatgccattggtccatggggtgggggcgaaggcacctctacagagattaaactgggctcctctgagcagatcaaggagatttctggaacccatggcccagtctatgatctggctgacattgtcacctatcttaagattgtgacaagtgctaataatacatacgaggctggagtcccaaatggaaaggaattcagcattccactgcaagactctggccatgtcgttggattctttggaaggtctggaacgcttatcgacgcaattggcatctacgtccacccttgattcccagtggtcaaagaattactacctactaccatatctacgaaataatgttccatggtgttgttgtacttcatgcaatccccccattgtctgtgtacgtgttgcaccgatccgtagtacaataaagttggcgatatatatgttgtcccagtcgactctttaatatttactacaacaagttggggtcatttgtacatgttcagcacctggtccgctcactttatgtgtttctcatattggtatcactaaaaaaaaaaaaaa

SEQ ID NO: 385585 - DNA, 2257 bp, Oryza sativa
ccacgcgtccgaccatatcacgtactaccgggcgtcctcacttttttcagcccacagagacgaaagacacggggaaataaacaaacaaaccaaaaaaaataaaatcgagaaaaaagtggagatataaattcaatcgcaggaagcgaagcgcggatccgcttcctcacccaccgatcgccccctccttcatcctccggtagcagtcatggcgtcgtcggcgctaatctgcgacaccgagcagtggaagggcctccaggcgcacgtcggggcgattcagaagacgcacctgcgcgatctgatggatgatgccgagcgctgcaaggcaatgacagctgagtatgaaggcatatttctggattactcgaggcagcgtgcaactggcgagaccatggagaagctgtttaaattggcagaggcggcaaagctcaaggagaagattgagaagatgtttagtggtgacaagataaatagcacagagaacagatctgtgcttcatgtagctctaagggctccaagagacgaagtaataaaaagtgatggggtcaatgtggttcccgaagtttggggtgtaaaagataaaatcaagcagttttcagaaacttttaggagtggatcatgggttggggcaactggtaaagcattgacaaatgttgtgtcagtaggaataggtggtagctttcttggtcctctgtttgtgcatgctgccctccagacagatccagaagctgcagaatctgccaaagggcggcaattaagatttcttgcaaatgtcgaccctgttgatgttgcacgaagcatcaaagatttagatcctgaaacaacacttgttgtggtagtctcgaagaccttcacaacagctgaaacaatgttaaatgctcgaactcttaaggagtggattgtctcttctcttggacctgatgctgttgcaaaacatatgattgctgtcagtaccaatcttgagcttgtggagaagtttggaattgacccgaaaaatgcttttgcattttgggactgggttggtggccgctatagtgtttgcagtgctgttggtgtcctgcccttatctcttcagtatggctttccgattgttcagaaatttttggagggtgcagccagcatcgacaaacactttcgttcatcttcatttgagaaaaatattcctgtactccttggtttgctgagtgtgtggaatgtttcatttctcggatatccagctagagcaatattgccctattcccaggcacttgagaaatttgcaccacatattcagcagcttagcatggagagtaatggaaagggtgtctctattgatggcgttcaattgtcctttgagactggtgaaattgattttggtgaacctggaaccaatgggcaacacagcttctatcaattaatccatcagggaagagttattccttgtgattttatcggtgtcgtaaaaagccagcaacccgtttacttgaaaggggaaattgtgagcaatcatgacgaattgatgtccaatttctttgctcagcctgatgcactttgcttatggaaagacccctgaacaactgcacagcgagaaagtacctgaacatcttatccctcataagacttttcagggcaaccgaccatcgcttagtttattgctgccctcattatctgcttatgagattggacagcttttagccatctacgagcaccggattgcagtccagggtttcctatggggaataaactcatttgaccagtggggagtggaactgggcaagtctcttgcctctcaagtgagaaaatctctacatgcatcccgcgttgaaggaaagcctgtcctggggtttaacagcagtactacaagtttgctgacacgatatcttgctgttgagccatccactccttacaacactaccacactgccgaaagtttgacacgacacgtttggcacgctattgtcttgagttaaacaagattactagagtcttcatatcttgtaataagtttaagttcgttttggagttgttacaggcttacagccagttctacagtactgtagtttcgttgttttcctttactccgacctccaggaaacgaaatggaaaagaaaaaaaaaggaaactgttgttgaataaataaatcaagtcgtgtcagcatgaggaagctgtcattaaataaattaggtgaaaccccgcgcattgctgcgagaatttagtatgaagatatacattaaaacattatgtaaattatgttggatgataatttaatatgtttgtgtttg

SEQ ID NO: 385586 - DNA, 2196 bp, Oryza sativa
  unsure (1)..(2196): unsure at all n locations
ctcccaaatggcatatgccgagctccacgttaacatcataatgacctaaatactgagtgacggaagacacgggaagaaatcggaaaaaggaaaaaaaaatctgagatataaaaattagtaattcgcaggaagcgaagcgcggatccgcttcctcatccaccgatcgccccctccttcatcctccggtagcagtcatggcgtcgtcggcgctaatctgcgacaccgagcagtggaagggcctccaggcgcacgtcggggcgattcagaagacgcacctgcgcgatctgatggatgatgccgagcgctgcaaggcaatgacagctgagtatgaaggcatatttctggattactcgaggcagcgtgcaactggcgagaccatggagaagctgtttaaattggcagaggcggcaaagctcaaggagaagattgagaagatgtttagtggtgacaagataaatagcacagagaacagatctgtgcttcatgtagctctaagggctccaagagacgaagtaataaaaagtgatggggtcaatgtggttcccgaagtttggggtgtaaaagataaaatcaagcagttttcagaaacttttaggagtggatcatgggttggggcaactggtaaagcattgacaaatgttgtgtcagttggaataggtggtagctttcttggtcctctgttcgtgcatgctgccctccagacagatccagaagctgcagaatctgccaaagggcgacagttaagattccttgcaaatgttgaccctgttgatgttgcacgaagcatcaaagatttagatcctgaaacaacacttgttgtggttgtctcaaagaccttcacaacagctgaaacaatgttaaatgctcgaactctacaatggagtggattgtctcttctgcttggacctgatgctgttgcgaaacatatgattgctgtcagtaccaatcttgagcttgtggagaagtttggaattgaccctaaaaatgcttttgcattttgggactgggttggtggtcgctatagtgtttgcagtgctgttggtgtcctgcccttatctcttcaatatggttttccgattgttcagaaatttttggagggtgcagccagcatcgacaaacacttccgttcatcttcatttgagaaaaacatacctgtactccttggtttgctgagtgtgtggaatgtttcctttcttggatatccagctagagcaatactgccctattcccaagcacttgagaaatttgcaccgcatattcagcagcttagcatggagagtaatggaaagggtgtctccattgatggtgttcaactgccctttgagagtggtgaaattgattttggtgaacctggaaccaatgggcaacacagcttctatcaattaatccatcagggaagagttattccttgtgattttatcggcgtcgtgaaaagccagcaacccgtttacttgaaaggggaaattgtgagcaatcatgacgaattgatgtccaatttctttgctcagcctgatgcacttgcttatggaaagacccctgaacaactgcacagcgagaaagtacctgaacatcttatctctcataagacttttcagggcaaccgaccatcacttagtttattgctgccctcattatctgcttatgagattggacagcttttatccatctacgagcaccggattgcagttcagggtttcctatggggaataaactcatttgaccagtggggagtggaactgggaaagtctctggcttctcaagtgagaaaatctctgcatgcatcccgcatggaaggaaagcctgtccaggggttcaacagcagcactgcaagtttgctgacacgatatctcgctgttgagccatccactccttacaacactacaacaatgccgaaagtttaatatgatgtgtttggcacgctattttctttgagttaaacaaggttgagccggcatattctgtaataagtttatttatgttccttttgaagttgttacaggcttacagcccgttttacagtaccatagttttgttgtttttttctttttatttactccgacttccaggagaacaaaatggaaaagaaaaaggaaaggaaactattttgcaataaataaattaattcgtgtcagcatgaggaaactatcactaaattaataggagtatgtggtttgnnnnnnnnnnnnnnnnnnnnnn

SEQ ID NO: 385587 - DNA, 773 bp, Oryza sativa
  unsure (1)..(773): unsure at all n locations
atttttggagggtgcagcagcatcgacaaacactttcgttcatcttcatttgagaaaaatattcctgtaagtggcttttctattgtgnttactnttgccaaccacccttataacaggctcttatcatttatgggtaggtactccttggtttgctgagtgtgtggaatgtttcatttctcggatatccagctagagcaatactgccctattcccaagcacttgagaaatttgcaccggatattcagcagcttagcatggagagtaatggaaagggtgtctccattgatggtgttcaactgccctttgagagtggtgaaattgattttggtgaacctggaaccaatgggcaacacagcttctatcaattaatccatcagggaagagttattccttgtgatttttatcggtgtccgtaaaaagccagcaacctgtttacttgaaaggggaaattttgagcaatcattgncgganttgaatgtcccattttcttttgctcagcctgatggngtttgcttatgggaaagcntcctgaccaanggcttggcgggnaaggtnccgnaccanttatcccnctnaggcntttnagggnancgnccntnggttnggttnttgttgccnantanctgntgtgnggtngacantttggccttnggggaccggttnnggccagggttccgtgggnaaannntttgcctggggggggntggaattnttncnnaggggaatttntgtncnggtaggagcttctgggtnngtggctanngttttngngn

SEQ ID NO: 385588 - DNA, 642 bp, Oryza sativa
gtcgaccagacaaggcagcgctccgaaaccctattttttttttttcccctccgcggccgccaaaatggtgaacgttcccaagaccaagaagacctactgcaagaacaaggagtgcaggaagcacacccttcacaaggtcactcagtacaagaagggtaaggacagcctgtctgcccagggaaagcgccgttatgaccgtaagcagtcaggatatggtggtcagaccaagcctgttttccacaagaaggcaaaaaccaccaagaagattgtgctgaagctgcaatgccaaagctgcaagcattactcccagcaccccatcaagaggtgcaagcatttcgagattggtggagacaagaagggcaagggaacatctcttttctaaactacctactggatactgaagttgtgggtctattgtgcttcatacttcaatgttattaggaacttaatttaagcagaccatatcatgtattcaagtatcatcgtctgacatttactctagcaaggattggctttctgctgaatcaagttttcttgcttaatgctcgtcgaatccaatgtgatgcatgtctttagatggcactgcaattgtgacttttgtcttatggcagttttatctctttaaaaaaaaaaaaaaaaaaa

SEQ ID NO: 385589 - DNA, 875 bp, Oryza sativa
ctgcgcctcctggtgccgctccggaattattgcgcccaaaggtccattatgtcgcgactgggccagaaatctgggaggattctaaagggaaggtggatgtattcattggtggaattggaacaggtggaacaatatctggtgctggccgtttcctgaaagagaaaaatcctggaattaaggttattggtattgagccttctgagagtaacatactctctggtggaaaacctggcccacataagattcaaggcattggggcaggatttgttccaaggaacttggatagtgaagttctcgatgaagtgattgagatatctagtgatgaggctgttgagacagcaaagcaattggctcttcaggaaggattactggttggaatttcatctggggcagcagcagcagctgccattaaagttgcaaaaagaccagaaaatgctggaaagttggtagtggttgtgtttccaagctttggtgagaggtacctttcatctatcctttttcagtcgataagagaagaatgtgagaagttgcaacctgaaccatgagcctaacttcagtgttcacaacatcataattgtttctgagatttctggccattagttttttttttctgagaagtatcataccactccatagctgtttgttcgataaataaaacagttacctttgcacttataatgaggcttgtgagggtactgtgaaatttctctgaacatcttctactcttctcttttatccttaaatcaatctgggagcagtttgtaatacatacgtaaatttaaagctgggtgtttggtaattgtaaacaaatgtttcgaagagccgtgaaacattatcaattagcatcaagccctttaaaagtgctttccggatgc

SEQ ID NO: 385590 - DNA, 732 bp, Oryza sativa
  unsure (1)..(732): unsure at all n locations
atggagccctgttgcagtgtcaaggacaggataggatacagtatgatttctgatgcggaagagaaaggcttgataactcctggaaagagtgttttggtggaaccaacaagtggaaatacaggcattggtcttgccttcattgctgcttccagaggatataaattaatattgaccatgcctgcatcaatgagcatggagagaagagttctactcaaagcttttggcgctgaacttgtccttactgatgccgcattaagggatgaagggggctgtagataaggctacagagattttaaataagacacctgatgcctatatgctgcagcagtttgacaaccctgccaacccaaaggtacattatgagactactgggccagaaatctgggaggattctaaagggaaggtggatgtattcattggtggaattggaacaggtggaacaatatctggtgctggccgtttcctgaaagagaaaaatcctggaattaaggttattggtattgagccttctgagagtaacatactctctggtggaaaacctggcccacataagattcaaggcattggggcagggtttgttccaaggaaccttggttaggtgaagcttctcggtgaagtgattgagatatctagtgatgaggctgtttgagacagcaaagcaattggctcttccagggagggtttactggttnggatttcatctgggggcagcagcagcagctgccattaaaa

SEQ ID NO: 385591 - DNA, 736 bp, Oryza sativa
  unsure (1)..(736): unsure at all n locations
gcgattaagttggtacnccaggttttcccagtcacggcgtntaaaacgccggcaagtgaccgcgcnaatacgactcactataggcgaattggttaccggccccccccctcgaggtcgaccccacgcggtccggcgaaaaccaaggttctgactgtcttgcaaccgaagatggttctactgctccaaaagagaaaagaaagaagcaagaggagaaagcagcggagaaaaaacgacgagctgaagaggcgcaacaatctggtcctaatgctgctgcccaaagcaatgggactggttatcaagcctcacgcctgggcaagacttcgcaagagccacctggcacctccaaacaatatccttttcatccagaacttaccagctgagactacaagcatgatgctccagatcctgttccagcagtaccctggtttcagggaagtccggatgatcgaagccaagccaggcattgcttttgtggaatacgaggacgacagccagtctatggttgcaatgcaagctctgcagggtttcaagatcaccccatacaacccaatggctatatcctacgcaaagaagtgaatgatccatgggatcccacaatctggcaagaaaacctctgtacttgtaagactttccgcccttagctttcaaactgctgtatcagttttctaacactgtatttttggaaagcaattgcttagtttagaagtctttgctgctaaaaaaacaaacaaaaaaa

SEQ ID NO: 385592 - DNA, 927 bp, Oryza sativa
  unsure (1)..(927): unsure at all n locations
ctcctgctcgtctcgtctcccttcctcctcgtcttcggcggcggcgcggcggagatgttgtccggcgacatacccccgaaccagacggtctacctcaggaacctcaacgagaaggtcaagaaagaagaattaaagagatcactctatgcgttgtgctcccaatatgggaggatactggatgtggtggccttaaaaacacctaaactgagggggcaggcatgggtggtcttcagcgaaattaccgccgccacaaatgctttccgtggactgcaggaattcgatttttatggcaaaagaatgcgagtacaatatgcgaaaacaagatctgactgtcttgcaaccgaagatggttctactgctccaaaagagaaaagaaagaagcaagaggagaaagcagcggagaaaaaacgacgagctgaagaggcgcaacaatctggtcctaatgctgctgcccaaagcaatggggctggttatcaagcctcacgcctgggcaaggctttcgcaaggagccaccttggaacttccaaacaatattcctttttagtccaggacttaccagctgagactacaagcatgctccagatcctgttccagcagtaccctggtttcagggaagtccggatgatcgaagccaagccaggcattgcttttgtggaatacgaggacgacagccagtctatggttgcaatgcaagctctgcagggtttcaagatcaccccatacaacccaatggctatatcctacgcaaagaagtgaatgatccatgggatcccacaatctggcaagaaaacctctgtacttgtaagactttccgcccttagctttcaaactgctgtatcagttttctaacactgtatttttggaaagcaattgcttagtttagaagtctttgttgcttnnnnnnnnnnnnnnnnnnnnnnnnnnnnn

SEQ ID NO: 385593 - DNA, 856 bp, Oryza sativa
  unsure (1)..(856): unsure at all n locations
ccacgcgtccgcccacgcgtccgcccacgcgtccgcccacgccgccccccgcgccaagccaagaagagggagagcaccaaggacacgcgactagcagaagccgagcgaccgcctcctcgatccatatcttccggtcgagttcttggtcgatctcttccctcctccacctcctcctcacaggttcttggtgtagcttgccactttcaccagcaaagtttcatgtctgatctcgacattcagatcccaactgccttcgatccctttgctgaggccaatgctggagactctggtgcggctgcaggatcaaaggactacgttcatgtacgcatccagcagcgtaatggccgtaagagcctgaccactgtccagggattgaagaaggaattcagctacaacaagatcctcaaagatctcaagaaagagttttgctgcaatggtactgttgtccaggacccagagcttggccaggtcattcaacttcagggtgatcagaggaaaaacgtatcaaattttcttgttcaggccggcattgtgaagaaggaacacatcaagattcatggtttctgagcaactgccaaaaccattgcaaagactatagtttggggtggagtatacttggttgtgtacatgcctgcgtgttccattgtacacacaaaacctagccacctcttgactcttgagtgtatgcttgttacccgtgtgttgaagtttgtaagaggcaccatcactatagatgatggcttgtgtccctctttcatcaagattgaataatatatgctactttgagagcgctaaaaaaaaaaaaaaaaaannnnnnnnnnnnnnnnnnnnnnnnnnnnnnnnnnnnnnnnnnnnn

SEQ ID NO: 385594 - DNA, 914 bp, Oryza sativa
  unsure (1)..(914): unsure at all n locations
ttgaggaaggaggaagaggtggtggtggaggagaagagccatcagcagcagcagcagcaaggggaggaggagctcgtcggcctctcgctcgccggcggcaggcccaaagtatttccaatgtcgagccctccacctaatccttcgcaacttacaattttctatggtggatcagtatgtgtttatgactcagtgccgccagagaaggctcaagcaatcatgcttattgccgcagcagctgctgcagcggcgtctgccaccaaaagcaatgctgccattgctgttaagccccctgtgatgcctgcagccaatgctacccaagcagcagtctctcctgtgctcacaagatcgctctcattgcagagcacttctgtagcaactggacaacctcaagttgccgctgaccctagctcaatttgcaagctccaggctgatctccccattgccaggaggcactcccttcagcgcttcctagagaaacgccgtgacaggttggtgagcaaagctccatatcccacaaaatcctccgagggcatggaagcatcagggatggaagtaactgctgagggcaaggcccagtaactgtcaacttcgaatggtggaggctgacgtttggagggggaaggaaggaaaggcgtcgcgttcattgtttagatggtgtcgcaccctagaaccttactaataatcgaacctatgcccttattatcgttgtactgttccttatgtgctagtctattctgtcatgaatttgtttactcgaacagcaaactgctatgatagtagtatatcattgtacatcatgcatatcattgcctgacaatgttatcgtgttcgtctagtaatgatatcatccaggttaattgttactagtaaaaaaaaaaaaaaaannnnnnnnnnnnnnnnnnnnnnnnnnnnnn

SEQ ID NO: 385595 - DNA, 672 bp, Oryza sativa
atccaagccaagaagagggagagcaccaaggacacgcgactagcagaagccgagcgaccgcctcctcgatccatatcttccggtcgagttcttggtcgatctcttccctcctccacctcctcctcacaggttcttggtgtagcttgccactttcaccagcaaagtttcatgtctgatctcgacattcagatcccaactgccttcggtatgcatgttgttctcttccctctttgtgatggtctgagtgcctggaatatttgtgctcatcatgttttcctgaacatgtacagatccctttgctgaggccaatgctggagactctggtgcggctgcaggatcaaaggactacgttcatgtacgcatccagcagcgtaatggccgtaagagcctgaccactgtccagggattgaagaaggaattcagctacaacaagatcctcaaagatctcaagaaagagttttgctgcaatggtactgttgtccaggacccagagcttggccaggtgtgtgtaataacccaaatttgtggtgcctgatctgtacgtttttctatctttctgagctagtttttctgatcaatgcttcactctgtaggtcattcaacttcagggtgatcagaggaaagaacgtatcaaatttcttggtcaggtagggatcattctcttgtgcatgc

SEQ ID NO: 385596 - DNA, 1740 bp, Oryza sativa
aaaatattaaaaaaaaatctgctcttaacaactccctataaagctaccactacgcccccctaccgcggagaagcaaccaatccaattccgaacaagcaaggcaccaaatccccccaccatggatcaccgcctcctcctcctcggcctcctcctcctctccccggcggtggccgccgcctcagtccccggcgaggaggagccgctgatccggcaggtggtcggcggcggcgacgacaacgagctggagctgaacgcggagcgccacttcgccagcttcgtccagaggttcgggaagtcctaccgtgacgccgacgagcacgcgtaccggctctccgtgttcaaggccaacctccgccgcgcgcgccgccaccagctgctcgacccctccgcggagcacggcgtcaccaagttctccgacctcaccccggccgagttccgccgggcctacctcggcctccgcacgtcgcgccgcgccttcctgcgggggctcggcgggtccgcccacgaggcgcccgtcctccccaccgacggcctccccgacgacttcgactggagagaccacggcgccgtcggccccgtcaagaaccagggatcgtgcgggtcgtgctggtcgttcagcgcgtcgggggcgctagagggagcgaactacctggcgacgggcaagatggacgtgctctccgagcagcagatggtcgattgcgaccatgagtgtgattcatcagaacctgattcatgtgatgctggatgcaatggtggattgatgactaacgccttcagctatcttttgaaatccggtggccttgagagtgagaaggattacccctacactgggagggatggcacctgcaaatttgacaagtcgaagattgttacttcagttcagaacttcagtgttgtctctgtcgatgaggatcagattgctgccaaccttgtcaaacatgggccacttgcaattggcatcaatgctgcgtacatgcaaacatacattggtggtgtttcgtgcccgtacatctgtggcaggcaccttgatcacggtgttcttctcgttggctacggcgcatctggttttgctccaatccgcctaaaggataaggcctactggatcatcaagaactcctggggcgagaactggggagagcatgggtactacaagatctgcaggggctccaacgtccgcaacaaatgtggcgtggattctatggtctccaccgtgtctgccatccacacctcaaaggagtagattctgatcagtagtcccccgaccatcctgtggatggttcacagttggtgattctgatattatatataagctagaactacgaaatatacttagtttatgctccatctgcgctgttattgcagttatgataagcagcgatgatgtgaagctgcaactgaatgtttgtcctaagttatatgcttggtttgctacgcaatgctacacgctatttggaggtagctttaagtattatcgccattcacgaacttgtatttttactattaccaatcttttgaatggtctgtattatatgcatgtggtctgtttacatggaataactctgtctattgctacgaaaaataataattttccacgatagattttaggaaatctgaaagcatgtactataatgtctagcgcgcgaccgcccacgacctttcggttaatgagctacaactgccaatttctcaggggcggcgctttataaggttcccaatttttttctcgcttctttgcaactt

SEQ ID NO: 385597 - DNA, 1463 bp, Oryza sativa
ctcacccaaaaaaaaaaaaaccaaccaatcaaaaaccaaaccatggcgcgccaccgccaccgcctcgccgccgccgcggcgcttcctcctcctcctcctctcctccgccgccgcgctgtcgtcatcggcggcggagggggaggaggacccgctcatcgagcaggtggtcggcggcggggaggaggaggacgcgcagctggacgcggaggcgcacttcgcgagcttcgagcggcggttcgggcggacgtaccgggacgccggcgagcgcgcgtaccggatgtccgtgttcgccgccaacctccgccgcgcgcggcggcaccagcggctggaccccaccgcgacgcacggcgtcaccaagttctccgacctcaccccgggcgagttccgcgaccgcttcctcggcctccgccgcccatccctggagggcctcgtcggcggggagccgcacgaggcccccatcctccccaccgacggcctccccgacgacttcgactggcgcgagcacggcgccgtcggccccgtcaaggaccagggttcgtgcggatcgtgctggtcgttcagcacgtcgggggcgctggagggggcgcacttcctcgccacggggaagctggaggtgctcagcgagcagcagatggtcgactgcgaccaccagtgtgatgcatcagaatcgcgcgcatgccactcaggttgcaacgggggcttgatgaccacagccttcagctacctcatgaaatccggtggcctacagagcgagaaagattacccgtacgctggacggagaaaaccccttgcaagttcgacaaagtccaaaatcgttgcccaagtaaagaacttcagtgtgatctccgtcaacgaagatcaaattgctgccaacctcgtcaaacatggccctcttgcaattgcaatcaatgcggcctacatgcagacatacatcggcggcgtgtcgtgccccttcatctgtgggaggcaccttgaccatggtgtcctccttgttggctacggatcggcaggatacgcaccgatccgcttcaaggagaagccgtactggatcatcaagaactcgtggggcgagaactggggggagaaggggtactacaagatctgcaggggacctcatgacaagaacaagtgcggtgttgattccatggtctcctcagtgactgccatccatacctccaaaaaggaggagtaggataggattagtctcctctttgtctttgcataccacacactttgtaatttgctcttttgtggttgaaactgttagtggttaggaccattctgtggtgttgctcgattgctatttatgatcagcaaaaactgtgaaaacttcctttacttgatgtaatagtacatatttgttcggatcattacatagtgtttggacacatggaaatggctgtaactgtgacaatgcatattagtatatataatctggtgaagcattcaaaaaaaaaaaaaaa

SEQ ID NO: 385598 - DNA, 481 bp, Oryza sativa
ccacgcgtccgcccacgcgtccgcccacgcgtccgcccacgcgtccgcacggcgtcaccaagttctccgacctcaccccggccgagttccgccgggcggacctcggcctccgcacgtcgcgccgcgccttcctgcgggggctcggcgggtccgcccacgaggcgcccgtcctccccaccgacggcctccccgacgacttcgactggagagaccacggcgccgtcggccccgtcaagaaccagggggcgtgcgggtcgtgctggtcggtcagcgcgtcgggggcgctagagggagcgaactacctggcgacgggcaagatggacgcgctctccgagcagcagatggccgatctgcgaccatgagcgtgattcatcagaaccctgattcatgtgacgctggatgcaattgtggtctgatgactaactctttttgtttttcttcgtaattctctttgcttcttttatgtgaatagtatttctcc

SEQ ID NO: 385599 - DNA, 674 bp, Oryza sativa
tccccctcctccatccgcgagcgaaaccctagccgaggacctcctccccttccgcgccaccagtggcgcccgccgacgtgggtacggcgccgatgaagtccggcaagatcggcttcgagagctcgcaggaggtgcagcacaggatccgcatcaccctctcctccaagagcgtcaagaacctcgagaaagtctgcggtgatctggtgaagggagccaaggacaagagcttgaaggtgaagggccccgtgcggatgcccaccaaggtgctccacatcaccaccaggaagtctccttgtggagaaggtaccaacacctgggatcggtttgagatgcgggtgcacaaaagggtgattgatcttgtcagctctgcagatgttgtcaagcagatcacctcaatcaccattgagccaggtgtggaggttgaagtgaccatcagcgaccagtaaaatgctgctatccaacaggtggagaaattcggtgaacagggtagggtatttcagaaagtttttagcatgagaacactggtggaacagagtttttgttcatctataggctctcggcggttaattccgaccatctgttatctaagctatcataaatcttgtgactcatgtctgttccaacatatgctataaatgaatgactcgctaaagatctaaaaaaaaaaaaaaaaa

SEQ ID NO: 385600 - DNA, 565 bp, Oryza sativa
gctcttggctgcggagccgttgagaacagcccactcgcggccgccgccgccgccgctctcttcggtctcgcttcccttctccgggagattcagtcgctgttgtggtgtttgcttcatccaccgccaccatgcagaacgaggagggtcagatggtggacctctacgtccccaggaagtgctcggccacgaacaggatcatcaccgccaaggaccacgcctcggtccagatcaacattgggcatgtggatgagaatgggctgtacgatggccgcttcaccacctttgctctctctgggttcatccgtgctcagggagatgctgacagtgctctggataggctgtggcagaagaggaaggctgaggtcaagcagcagtagatcttgctactagttttacctggaagaactcgtttcaatttcatgtctctctagctacttcatgcaatgcctgtgttatcagttcgtactccgaaaaaattcgtgtgacttgatcggtttatcctgataatgttttatccatgttgaagctttattacatctgtttcttgatgcatcctgtggctgac

SEQ ID NO: 385601 - DNA, 559 bp, Oryza sativa
ccacgcgtccgcaaatcccaaatccgccgcggagcgaaagggtgggagatcggaggagaagaaggaagatggtgaaggtggcgacctacttcgccatgaccttcggcgcgttcctcttctggcagtccatggacagggtccacgtctggatcgccctccaccaggacgagaagaaagagaggatggaaggggaacaggagataaagagaatgcaagctgagctaatggcccaagcaaaggagagtgaatcatgattatcatttggcaatggttttagtagttgctttgtcaaatttcttccttggaatgtactttccaagtgataatgcttggctgatgtattctccacagctccaataaacaagagatcttataactttttgtcaaatgcaagcggctaagctcatgatgagttatttgcagtttgtattatccaaaaaaaaaaaaaaaaaagttcgtactccgaaaaaattcgtgtgacttgatcggtttatcctgataatgttttatccatgttgaagctttattacatctgtttcttgatgcatcgtgtggctga

SEQ ID NO: 385602 - DNA, 1170 bp, Oryza sativa
  unsure (1)..(1170): unsure at all n locations
gtcgcgtcgcggctgaacaggggagggccgggcggcgatctccatctggcgagcagcggaggggagggatcctgatcctggattttgggcaaaggtgggggtgaatttgcacgagggttttggttgatggcgaacattcgggctcttctcatcgggttggtacgtgccaggggttccttggtggacattgggcgatgcgtttcttcttcaaggccttcatatctagcgtcactgggcagacattacaaggttcccatggaaattcgttggttatcctcaacagggtttcctcctcatctggtggttgggatgcctgcattatcccctactatgaatcaaggtaacattgcaaaatggagaaaacaagaaggtgaaaagatagaagttggtgatgtgatctgtgagatagaaactgacaaagctacgcttgagtttgagagccttgaagaggggtatctggccaagatcttagcacctgaaggttcaaaagatgttcaggttggacagcccattgctgtcacggttgaagatcttgaggatattaaaaatatacctgctgatgcttcctttggaggtgaacagaaagagcagtcaattgcaagtgaagcacaaaaggttgaaacggatgctgcaaaagagagctcgataataacccgtataagcccggcagcaaaattgcttatcaaggagcatcgtctagatcagtctgtactgaatgcatcgggtccccgtgggcactcttctgaaaggggacggtcttgctgcattgaagttgggtgcctcctcaagttcaaccaagcaaaagaatgctccagcggcgggatcatctcaggcgggtggtgatttccaagctcaatcantcaccattccacaacaaaatgatgcatacgaagatatccccaacagtcagatgcgcaaggtgattgcaaaaagggtgcttgaatcaaagcagaccactccacatttatatttatcacaagatgttatactggatcccttgctcgctttcaggaatgaactgaaagagcaacatggggttaaaggttcagtaaatgacattgtcataaaggctggtgcacttgccttacggaatgtaccanaagcaaatgcatactggaacaatgacaaggaacaagcccagaagtgtggttcaggtgatatatctatcgc

SEQ ID NO: 385603 - DNA, 479 bp, Oryza sativa
  unsure (1)..(479): unsure at all n locations
gaacattcgggctcttctcatcgggttggtacgtgccaggggttccttggtggacattgggcgatgcgtttcttcttcaaggccttcatatctagcgtcactgggcagacattacaaggttcccatggaaattcgttggttatcctcaacagggtttcctcctcatctggtggttgggatgcctgcantatcccctactatgaatcaaggtaacattgcaaaatggagaaaacaagaaggtgaaaagatagaagttggtgatgtgatctgtgagatagaaacttgacaaagctacgcttgaagtttgagagccttgaagaggggggtatctggcccaagatctttaggcacctggaaggttttccaaaaagatgttcagggtttggncaagcccattgnctggtcacgggttttaaggtcctttgggggttttnaaaaatnnnnncccnccngnngntttccnctngggggggggnaca

SEQ ID NO: 385604 - DNA, 727 bp, Oryza sativa
  unsure (1)..(727): unsure at all n locations
ggccggccgtcgccggcggtgttcgtggacaagagcacccgcgtgatctgccagggcatcaccgggaagaacggcaccttccacaccgagcaggccatcgagtacggcaccaccatggtaggtggggttacccctaagaaaggtggaaccgagcacctaggccttccggtgttcaactctgtggcagaagctaaggctgagacaaaggcgaatgcatctgttatatatgttccaccaccatttgctgctgctgcaataatggaagcgatggaggccgaacttgaccttgttgtctgcattaccgaaggattacctcagcatgacatggtgaaagtgaaggctgctctgaacaagcaatcaaaaactcggttgattggaccaaattgccctggtatcattaagccgggtagaatgtaaaattggaataatgccaggttaatccacaagccaggtcgtttgggatagtatctcgctctggtaccttgacatagaaggcggtgttttcaaacaacagccgtaggtgggggcagtcaacgtgtgtttcgctttggtggtggatcccttcaatggcacgaattttgtttgattgccttgaaaagtttgttgatgatcctcagaccagaaaggtattgttctcatcggagaaattggaagtactgctgaaggagnatgctgcagnctttcatttcaaggagagcaaaacaccaaaagncctgttgtttgcatt

SEQ ID NO: 385605 - DNA, 1108 bp, Oryza sativa
gcatcgcctccataattttctttcccctcctctcctcacctcgatctcctcctcctcctcctccgccgcaccgagggtttcgcctccgccttccaccgctgccgcagaggggacgaaccgaggggcaggaatggcggcgcggcacctcagatccggcctccccctcctccgcgcccacctctcccaggagggctcaaggggcttcgcgtcgcaggtggcaaagccgaccgggaaggatatcaaggttccagaagctctgtatggtggcaccggcaactatgctagtgctctgttccttacagcggccaaagctaacttgctggacaaagttgaaactgagattcgcgatgttgtagaggcatccaagaagagtccattgttttctcaattcattaaggacttgtcagtgcccaaagagaccagggtgaaggcaataactgaaattttcgctgaagctggtttttcagatgtcacaaagaatttcttggctgtgctcgccgacaatggcagactgaagcacattgatcgcattgctgagagatttgttgatttgaccatggcacataagggggaggtgaaggtccttgtcaggacagttattccactccccgaaaaagaggagaaggaacttaaggagaccttgcaagatattcttgggaagaacaaaactatcttgattgaacagaagattgactacagcatcatgggagggctagttattcaatttgggcagaaggtgtttgatatgtcgatcaagactagggcgaagcaaatggagatgttcttgaggcaaccccttgatatctaactgccttttggatcgaaagatgcagttgttttgctgctgaaggcatcctcatgtctgttactttgatatggtcttgaaataaatcttcgtttacaagagaacaacactctgttttatcttgttttgtgtgccagaagcctgctgaacaattttatgtcaatttctttgctactaagaaagttatgcaccaaaatgaagggaaattctgtgaagtttgtaattttcaagtgattggcattattctgtttagttcgtgcagtgccatgttccttatataatcacagaacatgtaaaaggccg

SEQ ID NO: 385606 - DNA, 754 bp, Oryza sativa
cctcatccaagcagctcgcgcctccgacccctcgcctcgagctccagctctcccctaccccttcaacaatggcggatgtcgaagtcgagacggaggtcgccgccgccgcagcgccaaagaagaggacgttccgcaagtacagctaccgcggcgtcgacctcgacgcgctcctcgacatgtccaccgatgacctcgtccagctcttccccgcgcgcgcccgcagaaggttccagaggggtctgaagaggaagcccatggcgctcatcaagaagctgcgcaaggcgaaaaaggatgcccctgctggcgagaagccagagccagtgaggacccacctccgcaacatgatcattgtccctgagatgatcggaagcatcgtcggtgtctacaatggcaagaccttcaaccaggttgagattaagcctgagatgattggtcactaccttgcggagttctccatctcctacaagccggttaagcacggtaggcccggtattggtgccacccactcctctcggttcatccctctcaaatgagtcatgcagcttctagccatccagaatcagaattcagtgttaagcgcccatggcttgtccttccagtatcacttgttttttgagcaagttatatacctaaggcattttgttctgtttagctaagcagcactgtgcacaatgatctgttttgccaagtttatgtcagaatcttgttaacgttgtcgtgatcgtattgttgattcttaattcttaaaaaaaaa

SEQ ID NO: 385607 - DNA, 451 bp, Oryza sativa
cacgcgtgcggcctccgcctccgcctccgccgccgccgccgagctcctcccgcgcgctccgagcccatcatggcggacgtcgaagtcgagacggaggtcgccgccgggcacagccaaagaagaggacgttccgcaagtacagctaccgcggcgtcgacctcgacgcgctcctcgacatgtccaccgatgacctcgtccagctcttccccgcgcgcgcccgcagaaggttccagaggggtctgaagaggaagcccatggcgctcatcaagaagctgcgcaaggcgaaaaaggatgcccctgctggcgagaagcagagccagttaggacccacctccgcaacatgatcattgtccctgagatgatcggaagcatcttccgtgtctacaatggcaagaccttcaaccaagttgagattaagcctgagatgattggtcactaccttgcggagttc

SEQ ID NO: 385608 - DNA, 1733 bp, Oryza sativa
  unsure (1)..(1733): unsure at all n locations
atcatccatcatctacaagagatcgatcagtagtggttagcagcaactcactatcgaacacggtttcagcttacacagatatgaagaacaccagcagcttgtgtttgctgctcctcgtggtgctctgcagcttgacctgtaactcgggtcaagcacaggtcctcttccagggtttcaactgggagtcgtggaagcagcagggtggctggtacaacatgttgaaaggccaagtcgacgacatcgccaaggccggggtcacccacgtctggctgccgccgccgtcgcactccgtggcgccgcagggtacatgccggggcgtctctacgacctggacgcgtccaagtacggcacggcggcggagctcaagtcgctgatcgcggcgttccacgggaagggcgtccagtgcgtcgccgacgtcgtgatcaaccaccggtgcgccgagaagaaggacgcccgcggcgtgtactgcgtgttcgagggcgggacgcgcgaccgcctcgactggggccccggcatgatctgcagcgacgacacgcagtactccgacggcacgggccaccgcgacaccggcgaggggttcggcgcggcgcccgacatcgaccacctcaacccgcgcgtccagcgggagctcaccgactggctcaactggctcaagtccgacgtcggcttcgacggctggcgcctcgacttcgccaagggatactccacggacatcgctaagatgtacgtcgagagctgcaagccgggcttcgtcgtcgccgagatatggaactcgctgagctacaacggcgacggcaagccggcggccaaccaggaccagggccggcaggagctggtgaactgggtgaacgccgtcggcgggccggcgatgacgttcgacttcaccaccaagggcctcctgcaggcgggcgtccagggcgagctgtggcggctgcgcgacggcaacggcaaggcgcccggcatgatcgggtggctgccagagaaggccgtcacgttcgtcgacaaccacgacaccggctcgacgcagaagctttggccgttcccctccgacaaggtcatgcagggctacgcctacatcctcacccaccccggagtcccctgcatcttctacgaccacatgttcgactggaacctgaagcaggagataaccgcgctggcggcgatcagggagaggaacggcatcaacgccgggagcaagctccggatcgtcgtcgccgacgccgacgcatacgtcgccgtcgtcgacgagaaggtcatggtgaagatcgggacgaggtacgacgtgggcaacgcggtgccgtcggatttccatcagacggtgcacggcaaggactacagcgtctgggagaaggggtccctccgcgtcccggcggggcggcacctatagcgggctcaagccctaaactgaacgggatagtcatgctcaaaccagtttctacacggcaagaatttactgattcttatacttttgcagtcaattaaattatggtttttatatatgtaattttgtatccgattgtagcgttcgaataagtaggcaggctctctagcctctaggttaattgcggggcatatgtagcttgccagttaattgtgtttgtatcacgcagtttgtaaccgttggtgcaatatataatgtcaggttcaggatgcagtaaaaaatcatactgcaccgatcagtgagtttttataaaaaaaaaaaaaaaaaaannnnnnnnnnnnnnnnnnnnnnn

SEQ ID NO: 385609 - DNA, 763 bp, Oryza sativa
  unsure (1)..(763): unsure at all n locations
cacgacggcaacggcaaaggcgccccggcctcatgggtggatgcccgancaggcccgtaaacttcgtcgacaaccacgacaccggctcgacccagtcgctctggccgttcccttccgacaaggtcatgcaggtacgcctacatcctcactcaccctggcatccccatgcatcttctacgaccatgtgttcgactggaacctgcagcacgagatcgcgacgctggctgaaatccggtcaaggaacgggatccatgcggagagcacgctggacatcctcaaggccgagggggacatctacgtcgccatgatcgacggcaaggtgatcaccaagctcgggccgaggtacgacgccggcgggatcatcccctccgacttccatgtcgtggcgcacggcaacgactactgcgtctgggagaaggaaggcctcagggttcctgccggtagaaagcactattagctttagctatagcgatcgagttgcatggtgctttgcaaccctagataatatatatacgtacgtggctctagctatgaatcatgcaattttgctgcgagatgtgtacgagcgagcttcgatcgatgtacgcttcgttataactagcgttcttcggaaataagtaagcggaatgtaccctgttaatcctgcagaaatgtaggatgaatggaattaactagctactgttcgtttcgatcctcaaaaaaaaaaaaaaaaaaannnnnnnnnnnnnnnnnnnnnnnnnnnnnnnnnnnnnnnnnnnnnnnn

SEQ ID NO: 385610 - DNA, 551 bp, Oryza sativa
  unsure (1)..(551): unsure at all n locations
ccctcttcaccggtcttggactccaccgcgtggcggccgctctaaactactggatcccccgggctgcacgaattcggcacgagcagctcttcttctctttgcgaaggttggctacttggccagccattaggaaacaagttagtttggagaagaagcagagttgagactgcatttgcattgctctgtagccatgggcaagcaccatgtcaccctgtgttgtgtcgtttttgctgtgctctgcctggcgtccagcttagcacaagcccaagttctcttccaggggtttaactgggagtcgtggaggaagcaaggcgggtggtacaactttctgcacgagaaggtggaggagatcgccagcacgggcgccacccacgtctggctcccgccgccgtcgcactctgtctcgccgcagggttacatgccggggcggctcttacgacctggacgcgtccaagtacggcacggaggcggagctcaagtcgctgatcgaggcattccacgacaagaacgtcgagtgcctcgccgacatcgtcatcaaccaccgtgcgncg

SEQ ID NO: 385611 - DNA, 1553 bp, Oryza sativa
atcaatcatccatctccgaagtgtgtctgcagcatgcaggtgctgaacaccatggtgaacaaacacttcttgtccctttcggtcctcatcgtcctccttggcctctcctccaacttgacagccgggcaagtcctgtttcagggattcaactgggagtcgtggaaggagaatggcgggtggtacaacttcctgatgggcaaggtggacgacatcgccgcagccggcatcacccacgtctggctccctccgccgtctcactctgtcggcgagcaaggctacatgcctgggcggctgtacgatctggacgcgtctaagtacggcaacgaggcgcagctcaagtcgctgatcgaggcgttccatggcaagggcgtccaggtgatcgccgacatcgtcatcaaccaccgcacggcggagcacaaggacggccgcggcatctactgcctcttcgagggcgggacgcccgactcccgcctcgactggggcccgcacatgatctgccgcgacgacccctacggcgatggcaccggcaacccggacaccggcgccgacttcgccgccgcgccggacatcgaccacctcaacaagcgcgtccagcgggagctcattggctggctcgactggctcaagatggacatcggcttcgacgcgtggcgcctcgacttcgccaagggctactccgccgacatggcaaagatctacatcgacgccaccgagccgagcttcgccgtggccgagatatggacgtccatggcgaacggcggggacggcaagccgaactacgaccagaacgcgcaccggcaggagctggtcaactgggtcgatcgtgtcggcggcgccaacagcaacggcacggcgttcgacttcaccaccaagggcatcctcaacgtcgccgtggagggcgagctgtggcgcctccgcggcgaggacggcaaggcgcccggcatgatcgggtggtggccggccaaggcgacgaccttcgtcgacaaccacgacaccggctcgacgcagcacctgtggccgttcccctccgacaaggtcatgcagggctacgcatacatcctcacccaccccggcaacccatgcatcttctacgaccatttcttcgattggggtctcaaggaggagatcgagcgcctggtgtcaatcagaaaccggcaggggatccacccggcgagcgagctgcgcatcatggaagctgacagcgatctctacctcgcggagatcgatggcaaggtgatcacaaagattggaccaagatacgacgtcgaacacctcatccccgaaggcttccaggtcgtcgcgcacggtgatggctacgcaatctgggagaaaatctgagcgcacgatgacgagactctcagtttagcagatttaacctgcgatttttaccctgaccggtatacgtatatacgtgccggcaacgagctgtatccgatccgaattacggatgcaattgtccacgaagtacttcctccgtaaataaagtaggatcagggacatacatttgtatggttttacgaataatgctatgcaataaaatttgcactgcttaa

SEQ ID NO: 385612 - DNA, 1101 bp, Oryza sativa
ccgctccaacggccgcggccaccgcgacaccggcgccgggttcggcgcgcgcccgacatcgaccacctcaacccgcgtgtccagcgggagctcacccgactggctcaactggctcaggaccgacctcggcttcgacggctggcgcctcgacttcgccaagggctactccgcgccgctggcgaggatctacgtcgacaacaccaacccgacgttcgtcgtcggcgagatctggagctcgctcatctacaacggcgacggcaagccgtcgaccaaccaggacgcggacaggcaggagctggtgaactgggtggagggcgtcggcaaaagccggcgacggcgtctcgacttcaccaccaagggcatcctccaggccgccgtgcagggcgagctgtggaggctccacgacggcaacggcaaggcgcccggcctcatggggtggatgcccgatcacgccgtaaccttcgtcgacaaccacgacaccggctcgacccactcgctctcggccgttcccctccggccaaggtcatgcagggctacgcctacatcctcacccaccccggcaacccatgcatcttctacgaccatttcttcgactggggccacaaggaggagatcgagcgcctgggatcgatcagaaaccggcaggggatccacccggcgagcgagctgcgtatcatggaggctgacagcgatctctacctcgccgagatcgacggaaaggtcatcacgaaggtcggaccaagatacgacgtcgagcacctcatccccgaaggcttccaggtcgtcgcgcacggtgacggctacgcagtctgggagaaaatctgagcggtggagaggcacaattagcagattttatttacctgcaattttttccaccctcgacgtataacatatacatgtgatggcaacgagttgtatgctgtatctgatctgaactatgtacgcgattgtccacaaagtactacctccgtaaataaagtgaggatatggaacatgcgtttgcatgcatggttttacaaataatggtatgcaataaaattttcactgcttatgcatttttaaaaaaaaaaaaaaaaaaggcgggcggtctaaaggaccaaa

SEQ ID NO: 385613 - DNA, 1553 bp, Oryza sativa
tttccagcaaccaccaccagcacctcctcctccgccgccgacgccgactcctccctccaagctttccccaccatggcgtcgtcgtccgtcttcgctggcctcgcgcaggcgccggaggaccccatcctcggggtgacggtcgcgtacaacaaggatcccagccccgtgaaggtcaatctcggcgtcggcgcctaccggaccgaggaagggaagcccctggtgctgaatgtggtcaggcgcgctgagcagatgctgatcaacaacccgtcacgtgttaaggagtatttgccgatcactggactggccgatttcaataagctgagtgctaagcttatttttggtgctgacagtcctgccattcaagagaatagggtggctacagttcagtgcttgtcaggaactggttctttaagggtgggaggtgaatttcttgcaaggcattatcatgaacgcactatatacatcccacagccaacctgggggaatcaccccaaagtgttcactttagctggcctgactgttaggagttaccgctactatgatcctgcaacccgtggactggatttccaagggctgttagaagatctcggttcagctccttcaggtgcaattgtactgcttcatgcttgtgcccacaaccctactggagtagacccaactttggaccagtgggaacagatcaggcagttgatgagatcaaaagcattgctgccattctttgatagcgcttatcagggatttgcaagtggaagtcttgaccaagatgctcaatcagtgcgcatgtttgttgctgatggtggtgaattgctcatggctcagagctacgctaagaacatgggattgtatggagagcgtgtcggtgctttaagcatagtttgtggaagtgctgatgtagctgtcagggttgaaagtcaacttaagcttgtaattaggcctatgtattcaaaccctcctattcatggtgcatctatcgtggctaccatacttaaggacagtgcaatgttcaatgaatggactgtggagctgaagggcatggctgataggattattagcatgaggcaacagctttttgatgctctgaaaacgagagaaactcctggagactggagtcacatcattaagcagatcggaatgttcactttcactgggctcaacagtgatcaagtggctttcatgaggcaggaataccacatttacatgacatctgatgggaggatcagtatggctggtttgagcgggaggaccattccgcatcttgcagatgcaatccatgccgcagtcacaaaactgaagtgaatgatggtagcatagcagctccctccaagaataacatcttaaaaccatccgcagcagtgttctgaggattcagacagtgatgtttgctggctgagcacatcctggaagtttccttgtaatagactcgtgtgacttgcttttgggagcagttttgtaccagtggattcagaaaaagtggtgatttcgaatcacctaataagctccatcggtgatgcttttaccaaatgcagcgttatataatcttagaattctaggcc

SEQ ID NO: 385614 - DNA, 512 bp, Oryza sativa
cgctagcttttcctcttcgattcccgatcccccacccagcgactcgccggaaccctagccctagatcccgcgcggcttgccgccgtgctagccatggcgtccctcaaggagctcctcccgacgcccaaggcggcggcgtcgacgttctacgaccacagcagcgacccgtggttcaaggagcggtatggcggggagtcggcgcaatccgacgcggcggcggcggcggcgaagccttcgggccccgccaagcccgtgccgccgtacgggaagcgtggcgggttcgtgccgcggcggccggaggacttcggggacggcggcgccttcccggagatccacgtcgcgcagtacccgctcggcatgggccggcgcgacgagaagggcggctcgaagatcctcgcgctcaccgtcgacgccaagggcagcgtcgccttcgacgccgtcgtgaagcagggtgagaacgcctctaagatcgtttactcaaagcacagcgacctcgtgcccaagattgccac

SEQ ID NO: 385615 - DNA, 395 bp, Oryza sativa
atcggtaatggcctcacggatccagcaatccagtacaaagcttacaccgagtatgcagggccatggagccgtagtacgtattcgctggcctcgcgcaggcgccggaggaccccatcctcggggtgacggtcgcgtacaacaaggattccagccctgtgaaggccaatctcgcccttggttcatggagcgccatggcagggagtcggcgcaatccgacccggcggaggcggcggcgaagccttcgggccccgccaagcccgtgccgccgtacgggaagcgtggcgggttcgtgccccggcggtcggaggacttcggggacggcggcgccttcccggagatccacgtcgcgcagtacccgcttcggtatgggccggtccgaccagaagggcggctcg

SEQ ID NO: 385616 - DNA, 1210 bp, Oryza sativa
cttcagtcctcttctcttcttcctccctcccttggcccactgaatcgccaaaaaaattcccctcctccactccatctctataaaaatcctcccccaaatctcgcctcgtttagccagcacaactcacacaactctctctctctctctctctctctctctctcgtcgtctgcaagcttccgcctcccggatcgcggcgaccaccggaggaggagggagcagccatggcgaacatcgacatggggaagatcctggcggggctggagaacgacgacgcgcgggtgcccaagaccaagctggtctgcacgctcggcccggcctcccgctccgtccccatgctcgagaagctgctccgcgccgggatgaacgtcgcgcgcttcaacttctcccacggcacccacgagtaccaccaggagaccctcgacaacctccgccaggccatgcacaacaccggcgtcctctgcgccgtcatgctcgataccaagggtcctgagattcgtactggatttttgaaggatggcaagccaatcaagctaacaaagggtcaagaactcactgttaccaccgattatgagatcaagggtgatgagaacatgattaccatgagttacaagaaactgccagttgatgtgaagcctggaaatgtcattctctgcgccgatggtacaatctctttgactgttttgtcctgtgatccaaaggctggaactgtgaggtgtaggtgtgagaacacagcaatgcttggcgagagaaagaattgcaatctgccaggaattgttgtggaccttcctacactgactgagaaggataaagaagacattttgggatggggtgtgccaaatgacatagacatgattgctctgtcgtttgtccgtaaaggatcagatttggttaccgtcagacaacttcttggacagcatgcaaagcgcatcaagctgatgtcaaaggttgaaaaccaagagggtgttgtaaacttcgatgagatcttgagggaaacggatgcatttatggttgctagaggtgatcttggaatggagattccagttgagaagatattcctcgcacagaagatgatgatttacaagtgcaaccttgctggaaagcctgttgtgactgctactcagatgcttgagtcgatgatcaaatcaccacgtccaactcgtgctgaggcaacttgacgttgcaaatgcagttcttgatgggaactgactg

SEQ ID NO: 385617 - DNA, 1386 bp, Oryza sativa
  unsure (1)..(1386): unsure at all n locations
gtaccggaccggagtttcggcctcaggcgtacgacgcgtcccagctttgcgtttgcccctcctctcgatctccattcgtttttgagttcctcgtttgctccgcctctctttcactcatgggcaagattaagatcggaatcaatgggttcggccgcatcggcaggctggtggccagggtggcgctgcagagcgaggatgtcgagctcgttgccgtcaacgatcccttcatcaccaccgagtacatgacatacatgttcaagtatgacaccgtccacggccagtggaagcatcatgaggtcaaggtcaaggactccaagaccctcatctttggcacgaaagaggttgcggtgttcggctgcaggaaccctgaggagatcccatgggctgcggctggtgctgaatacgttgttgagtctactggtgttttcaccgacaaggacaaggcagcagctcacttgaagggtggtgccaagaaggtcgtcatttctgctcccagcaaagacgcccccatgttcgttgttggtgtcaacgagaaggagtacaagtctgacgttaacattgtctccaacgctagttgcaccaccaactgcctggctccacttgccaaggttatcaatgacaggtttggtattgttgagggtttgatgaccactgtccatgcaatcactgcaactcagaagaccgttgatggaccctcgagcaaggactggaggggtggaagggctgccagtttcaacatcatccctagcagcactggagctgcaaaggctgtcggcaaggtgcttcctgctctcaatggaaagttgactggtatggctttccgtgttccaaccgtggatgtctctgtcgttgatttgactgtcaggcttgagaagccagcatcctatgatcagattaaggcagctatcaaggaggagtctgaggggaaactcaagggtattctgggttacgttgaggaggaccttgtttccacagacttccagggtgacaacaggtcaagcatctttgatgcaaaggccggtattgctctcaatgacaactttgttaagcttgtgtcttggtatgacaacgaatggggatacagctctcgcgttgttgacctgatccgtcacatgtacaacacccagtagaagatggtcactctttcggaagaaatggagtagagtgctactgaaaataagtcggaccttttgcgagctactccagtagagcttcattagctgtatgctgccttttgtttttgctggcttttcgcatgatgttttattaaaactcgatgtaatgttaatttgtgtacttcatctccggcactttataaatcgtggtttttgaatttgaaagttcaagtggcaatagacgaataaaaaaaaaaaaaannnnnnnnnn

SEQ ID NO: 385618 - DNA, 778 bp, Oryza sativa
  unsure (1)..(778): unsure at all n locations
tccatgccatcactgctaccccagaagactgttgatggcccctcgatgaaggactggagaggtggaagggctgctagcttcaacatcattcctaccagcactggagctgccaaggctgtcggcaaggtgcttcctgccctcaatggaaagctgactggaatggctttccgtgttcccacagtcgatgtttccgttgttgatctgactgttaggcttgagaagcccgccagctatgaccagatcaaggctgcaatcaaggaggaggctgagggcaagctcaagggcatccttggatacgttgaggaggaccttgtttccactgacttccagggtgacagcaggtccagcatctttgatgccaaggctggcattgctttgagcgacacgttcgtgaagcttgtgtcctggtacgacaacgaatggggatacagcacccgtgtgatcgacctgatccgtcacatgcacagcaccaactagacgagccctcctcatggaggcctgcagatacaggggagttgtgttttgccccagagaagagtagatgaagcctcttccgagaataaattttaaattctgtatggttttatgtccgtcgaaacctaaaactatacttggttgtatcatggtggttggttgggcctggtcatggctcatattttgtgtctaattttcttgcgcttaatctaaatcgaagtgtttcttcgcagatgcacaaaaaaaaaactcgacggggggcccggtacccaattcgccctatagtgagtcgtattacaattnc

SEQ ID NO: 385619 - DNA, 758 bp, Oryza sativa
  unsure (1)..(758): unsure at all n locations
aaccacnttaatttttgttgtgttttgttaaaactacatgaccnttctgtatcggncaccattaaccttgtttatcgtgtactcaattagttttactcaatttctcataggctgtcggcaaggtgcttcctgccctcaatggaaagctgactggaatggctttccgtgttcccacagtcgatgtttccgttgttgatctgactgtttggcggggggggcccgccagctcatgaccagatcaaggctgcaatcaaggggggggcggagggcaagctcaagggcatccttggatacgtgggggaggaccttgtttccactggacttccagggctgacagcaggtccagcatctttgatgccaaggctggcattgctttgagcgacacgttcgtgaagcttgtgtcctggtacgacaacgaatggggatacagcacccgtgtgatcgacctgatccgtcacatgcacagcaccaactagacgagccctcctcatggaggcctgcagatacaggggagttgtgttttgccccagagaagagtagatgaagcctcttccgagaataaattttaaattctgtatggttttatgtcagtcgaaacctaaaactatacttggttgtatcatggtggttggttgggcctggtcatggctcatattttgtgtctaattttctcgcgcttaatctaaatcgaagtgttgcttcgcagatgcatatttgctctgttttctggttgcttcttaaaaaaaaaaaaaaaaaaa

SEQ ID NO: 385620 - DNA, 749 bp, Oryza sativa
  unsure (1)..(749): unsure at all n locations
aacccccccccccgtttttttnaagggttcccccccntttntnaaggncgtttnnaattcccggttttnaaatttccnnaatccccccttannccacttngaaggcacgtgncttctttncccntnccaaggnttnctcaagcntaagtggntacccaggtttcccagtcacgacttntaaacgacgccagtgaatgtaatncggctcactatagggcaaatggntaccggncccccctcgagtcgacggtatcgataagcttgatatcgaaatcggccacgaggnaaactcaagggtattctgggttacgttngaggaggaccttgtttcccacagacttcccagggtgacaacaggtccaagcatctttgatgcaaaggccggtattgctctcaatgaacaactttgttaagcttgtgtcttggtatgacaacgaatggggatacagctctcgcgttgttgacctgatccgtcacatgtacaacacccagtagaagatggtcactctttcggaagaaatggagtagagtgctactgaaaataagtcggaccttttgcgagctactccagctagagcttcattagctgtatgctcccttttgtttttgctggcttttcgcatgatgttttattaaaactcgcatgtaatgttaatttgtgtacttcatctccggcactttataaatcgtggtttttgaatttgaaaaaaaaaattaaatatttaatattatatatattatattttttt

SEQ ID NO: 385621 - DNA, 670 bp, Oryza sativa
ccacgcgtccgtccacgcgttcgcccacgcgtccgcccacgcgtccgcccacgcgtccgcccacgcgtccggtcgcatcgcacttgtagctctcgacccccgcatctcatccctcctctcgcttagttcagatcgaaatcgcaaatggcgaagattaagatcgggatcaatgggttcgggaggatcgggaggctcgtggccagggtggccctgcagagcgacgacgtcgagctcgtcgccgtcaacgaccccttcatcaccaccgactacatgacatacatgttcaagtatgacactgtgcacggccagtggaagcatcatgaggttaaggtgaaggactccaagacccttctcttcggtgagaaggaggtcaccgtgttcggctgcaggaaccctgaggagatcccatggggtgagactggcgctgagtttgttgtggagtccactggtgttttcactgacaaggacaaggccgctgctcacctgaagggtggtgctaagaaggtcgtcatctctgctcccagcaaggatgcccccatgtttgttgttggtgtcaatgagaaggagtacaagcctgacatcgacattgtgtccaatgctagctgctcctttaattgcttggcttcttttgtcatggtctttaatgtcagtttttgtttctttgatgtgt

SEQ ID NO: 385622 - DNA, 501 bp, Oryza sativa
ccacgcgtccgcggacgcgtgggcggacgcgtgggctttgcgtttgcactcctctcgattctccattcgtgggggagttcctcgttggcgccgcctctgtctttcactcatgggcaagattaagatcggaatcaatgggttcggccgcatcggcaggctggtggccagggtggcgctgcagagcgaggatgtcgagctcgttgccgtcaacgatcccttcatcaccaccgagtacatgacatacatgttcaaggatgacacccatccacggcacagtcggaagcatcacgaggcctaggccacggactccacagaccctcatctttggcacgacagaggttgcggtgttcggctgcaggaaccctgaggagattcccatggagctgcgcctcgtgctgagtccgtcgtggaggctactgcagttcactccgttcttggcggggagaagaaccactggaatgctaacttggcttctgtggtcacttgtattgctaggagaga

SEQ ID NO: 385623 - DNA, 900 bp, Oryza sativa
  unsure (1)..(900): unsure at all n locations
aagccgaggtcaaggtccaccatgccactccaggctctcgttaaggaagcccaagccgagaaagaccccgaacaaccccgaagagcccaccgagcgcgttctccgtgttcatggaccagttcaggaaggactacaaggagaagcaccccaacgtcaagcaggtctcggtgattggcaaggctggtggtgacaagtggaagtccatgactgatgctgacaaggctcctttcgtgaccaaggctgagaagctcaaggctgagtacaccaagaagattgacgcctacaacaacaagcaggcaggaggcccggctacctcaggcgactctgacaagtccaagtccgaggtgaacgacgaggacgagggcagcggtgacgagtgatcgatggagggctgcaggtagtagggaaagttctcgagtcggcctaaccaaagtggacgttgctggttgctgctccttgctagtgttcggatgttgctgcctttagcttttagtcttagaggtctcctcctgtagcttagctctcatgtggtgtcctcgctctcttcggcacttgaccaccatcttgtcgtctgttttgtctcactgtctgtaatctaagtgagtactcgtatctgttgctgttttaaatctcagatctcagtagatggtgccatctgtgttagttgctgaagaggaaaaggaaaaaaatataacaagtctcttgcatcctgtttaatgatgcatccggatctgtcagttcgtttaaaaaaaaaaaaaaaaaaaaaaaaaaaaaaaaaaaaaaaaaaaaaaaaaaaaaaaaaaaaaaaaaaaaaaaaaaaaccccgggggggggcccggtncccaatncccccnanantgattcntnttacaatncccgggccgncttttttnttttntt

SEQ ID NO: 385624 - DNA, 1952 bp, Oryza sativa
  unsure (1)..(1952): unsure at all n locations
nnnnnnnnnnnnnnnnnnnnnnnnnnnnnnnnnnnnnagagggagcagccacctctgctgctctaaggaaacggcatttattaaaccactatttttattcatgccaaacaccagcactagtccagtgacaaccaaacgacaatcctacactccaaaagtttacatttaggttctcaaatagtgatacatagctttgagagttgaaaccgtcagatactgacatagtttatgaggtgcccctggagttggcaaaaacttcacgaagattgtcgcagctctggacgcacaaagtctgcatcagcaggcactgaaatgtcaacggtgggcctcaactgagcacagacttcaatggcactatggacgggatcggagaagaaattgctgatgaggtcttgattaactggagcattcttgtcaacagtcacaaaagcttgttgggtcaagatgtagtcgaagcgtggcgcccatttccttgatcccaaccgggctgttgtggagcagttatcaaccatgaaggccaccccacgagcgtgcatgaatgggttcagggaatccacagactcgatcaaactctcgttgatgatctccgagtaagagtggcccttctttctaaggacttcaatctgtgccatcataagtgcaacatacactccagcagtgaaaggatgtaatgggccaagatcacctgctggccgtgttgaccgcaccctttcacccaccttccacatacgtgtttgatcaatgttgcccatcgggaaagcaggaagtccttccttttcataaaatctccttccagccaaaacaacacttctaatttcacttccagaagaaacatcttcatagcattcatatagtatatccatgcatggataatatgctgcactgtaagcctcgataaattgcttctttccttcttctgtcaatgaattgtacacttcaagcatcccctttttcgaaatagttttagagatgattccagtgatgcactcaacagtgttcttgtatgctgagtcctcatccaacccatgctctgtgtatctcctgaaaagagcctccacaataccatgtacagccccaagcaaaatacctcgctcgccaaaaatatcgcttcggtactcctgctctagagtagtagcaaatgtgaaaggagaacctagagcaactgaccatccaagagcgacatctgttgctcttccatcaacatcctggtgtacagcaaagctggagttgataccagcaccgtttacttcttttccctgaacataaagccttctaactgatgggcccattcccttgggacacacagcaacaacactgatgtttttagggaaatcaaggccaacagattgcaaatgtccaaggagaaatccatgtgacaatccaagaatactgttgggtttcatgtgtgagaaaatttcctcatagttatccgcctgagcagcatctgatatcaacaacaacaaaagatcgctacttgagatagtctcccatatatctccaagtgtcccactctcttcagtaaatccagctgcgcgtgcttcttcaaaagatttagaacctttccggagaccaatcttaacaacgatgtctgattttgcctcagcaagtgagtccctcaggttctgagcttgtgcaggaccctgagaaccccatccgattacgccgatctgcttgatccccttgaacgcctccggcagcagcgggaacagattcctcccgcccctcacaatatactcgtcatggccagctagagacaccttctccttcttgaagacggatgtctcgaagtccagcgacggcatggtggccccgatcacctgcggcgacgagaccttggcggccacggcgccgcggcggcggcggcggggtttagggttttggggtgggcgagcgcggtggaggaagtggaggtggccgccgccattttgggatgcgaggaggggcttagggtg

SEQ ID NO: 385625 - DNA, 1300 bp, Oryza sativa
  unsure (1)..(1300): unsure at all n locations
catcaatggcgacaccttcgacgagaagagccgcgtgccggacccgcagcggatgatccgcgcgtacgagntcggtggcaacgctcaacctgctccgcgccttcgccacgggagggtacgccgccatgcagcgcgtcacgcaggganacctcgatttcatggatcacagcgaacaaggagacaggtaccgtgaattggcacaccgggtggatgaggcacttggcttcatgactgcagcagggctaacagtcgaccatccgataatgacaacaactgacttctggacatcccatgagtgcctcctcttaccatatgagcagtctcttacacgtgaggattccaccagtggcctcttctatgactgctcagcccacatgctatgggttggtgagcgcactcgccagctcgatggagctcatgttgaatttctccgtggtgttgccaaccctcttggcataaaggtgagtgacaaaatgaacccccgtgacttggtgaagctcattgagattttgaacccatcaaacaagcctggaaggataaccataattacaagaatgggggcagagaacatgagggtgaaattgcctcatcttatccgtgctgtccgcaactctggacagattgtcacatggattactgatcccatgcatggaaacaccatcaaggctccatgtggtctgaagactcgtccatccgattccattctggctgaagtacgtgcgttcttcgatgtccatgatcaagaaggtagccacccaggaggtatccacctggaaatgactgggcagaacgtgactgaatgcatcggtggatcaaggaccgtcaccttcgatgacctgagcgaccgctaccacacccactgtgacccaaggctgaacgcgtcgcaatccctggagctcgccttcatcatcgccgagagactgaggcggaggaggatgcggtccggggtcaacagcaacctgccattgcccccattggctttctaaactgctgaaacgggggaagggaaaagaaactgggaggagggggtagaatagtttcaactcgccggcggtgatatctgcatgtgttctgtcaaatgtttgtatggtggttgttgagtgttcttggcactataggcagttgtcgaggatatggtagcatatatactcgccgtgttgtaataagttttttgatggatgtgttctgatgaatttttaagggggcctcagctctgtgctgtttggccttggggacaggagaaaataaagctagatggtttgcttggttaaaaaaaaaaaaaaaaaannnnnnnnnnnnn

SEQ ID NO: 385626 - DNA, 1392 bp, Oryza sativa
  unsure (1)..(1392): unsure at all n locations
ttctgatgnaggagactttgaagcagagttccggttctttatagagtttattttacttataatctggaccagattgtctttatctggtatcggagggatgctgggcagtttaccaacattactgccttgcaagcgtgcaataaccgtgatcagatttacaatatcctgtgtcctatttgctgcattttcctggtttccaggtagcagcagctgcgaacgaacatctgttggctgggtttttcttcgccgcctgttgtgaccggcgagcctacgtctgcagctcctcttaccctcatcaaactcagagagcgggtgaaatctactgcactgctgacagaagcgctgcatctggttgccaaccagcgccttcgtggtcttgccgtggatctcgcagactttgtgtctccggtgataatccttggcgttggtcagatccgccctgcagtcatccacctggcacatcgggtagcttccgccactaccgcctgagtttccaccgcctccgcctcccccatcctccagtgctacggtgtcacgcagccatggcgctccgcacgctggcctcgaggaaaaccctagccgccgcggcgctgccgctggctgcggcggcggcggcgaggggtgtgacgaccgtcgcgctcccggacctcccctacgactacggcgcgctggagccggccatctccggggagatcatgcgcctgcaccaccagaagcaccacgccacctacgtcgccaactacaacaaggccctcgagcagctcgacgccgccgtcgccaagggcgacgcccccgccatcgtgcacctccagagcgccatcaagttcaacggcggaggccatgtcaatcattcgatcttctggaataacctcaagcctatcagcgagggtggtggtgagccaccacatgcaaaacttggctgggccattgatgaggattttggttcatttgaggcacttgtaaagaagatgagtgcagaaggtgctgctttacaaggatccggatgggtgtggctagctttggataaagaggcaaagaagctttcagtggaaacaactgctaaccaggaccctctggtaacgaagggggccaacttggttcctttgttgggaattgatgtctgggagcatgcgtactacctgcagtacaagaatgtcaggccagactacctgagcaacatctggaaggtgatgaactggaaatacgcaggggaggtgtacgaaaatgcgactgcttgatgttgtctgaaggcaacgctcatggttttttttcacctagtactgccatggatctttgtatgcaataaaaatgggcctattgcacttctggaccttgtgtacattgcgtagaggtggactaatgcataacataatatgcctgagattttcttct

SEQ ID NO: 385627 - DNA, 1771 bp, Oryza sativa
  unsure (1)..(1771): unsure at all n locations
ccacgcgtccgcccacgcgtccgcccacgcgtccgccacgtattacgtgcgaaaaaaaaaatcatcagcacaagatcgaggaggctttatctgaacaagggagatggcggactacgtgtatgggccggggcggaaccacctgttcgtgcctgggccggtgaacatcccggaccaggtgatccgcgccatgagccgtcagaacgaggactaccgctcgccggcggtgcccgccctcaccaagaccctcctcgaggacgtcaagcagatcttcaagaccaccaccggcacccccttcctcttccccaccaccgggacgggggcgtgggagagcgcgctgacgaacacgctgtcgccgggggacaagatcgtgtcgttcctgatcgggcagttcagcctgctgtggatcgaccagcagcaacgcctcaacttcaacgtggacgtggtggagagcgactggggctacggcgccgacctcgccgccctcgactacaagctccgccaggacccctcccactccatcaaggccatctgcatcgtccacaacgagaccgccactggagtcaccaacgacctttccgccgtccgcaaaatcctcgacaagcacaggcacccggcgctactacttgtngacgggggtgtcatcgatatgtgcgttggacttccgcatggatgagtggggagtggacgtggcgctgacgggttcgcagaaaggcgctctcgctgccgacgggtcgggcatctgtgtgcgcgagccccaaggcgctggagggcagcaagacggccaagtcggtgcggtcttcttcgactggaaggactacctcgggttctacaagatgggcacctactggccctacaccccatccatccagctcctctacggcctccccactcctcctcctcccccatcctccagtgctacggtgtcacgcagccatggcgctccgcacgctggcctcgaggaaaaccctagccgccgcggcgctgccgctggctgcggcggcggcggcgaggggtgtgacgaccgtcgcgctcccggacctcccctacgactacggcgcgctggagccggccatctccggggagatcatgcgcctgcaccaccagaagcaccacgccacctacgtcgccaactacaacaaggccctcgagcagctcgacgccgccgtcgccaagggcgacgcccccgccatcgtgcacctccagagcgccatcaagttcaacggcggaggccatgtcaatcattcgatcttctggaataacctcaagcctatcagcgagggtggtggtgatccaccacatgcaaaacttggctgggccattgatgaggattttggttcatttgaggcacttgtaaagaagatgagtgcagaaggtgctgctttacaaggatctggatgggtgtggctagctttggataaagaggcaaagaagctttcagtggaaacaactgctaaccaggaccctctggtaacgaagggggccaacttggttcctttgttgggaattgatgtctgggagcatgcgtactacctgcagtacaagaatgtcaggccagactacctgagcaacatctggaaggtgatgaactggaaatacgcaggggaggtgatcgaaaatgcgactgcttgatgttgtctgaaggcaacgctcatggttttttttcacctagtactgccatggatctttgtatgcaataaaaatgggcctattgcacttctggaccttgtgtacattgcgtagaggtggactaatgcataacataatatgcctg

SEQ ID NO: 385628 - DNA, 1120 bp, Oryza sativa
ccacgcgtccgcccacgcgtccgatcgtccacaacgagaccgccactggagtcaccaacgacctttccgccgtccgcaaaatcctcgacaagcacaggcacccggcgctactactggtggacggggtgtcatcgatatgtgcgttggacttccgcatggatgagtggggagtggacgtggcgctgacgggttcgcagaaggcgctctcgctgccgacgggtctgggcatcgtgtgcgcgagccccaaggcgctggaggcgagcaagacggccaagtcggtgcgggtcttcttcgactggaaggactacctcaagttctacaagatgggcacctactggccctacaccccatccatccagctcctctacggcctccgcaccgccctcgacctcatcttcgaggaaggcctcgagaacgtcatcaagaggcacaaccgcctcggcaccgccaccaggctggccgtggaggcgtgggggctcaagaactgcacgcagaaggaggagtggttcagcgacaccgtcaccgccgtcgtcgtgccgccgtacatcgacagcgccgagatcgtgaagcacgcctggaagcggtacaacctcagcctcggcctcggcctcaacaaggtcgccggcaaggtgttcaggatcggccacctcggccacctcaacgagctgcaattgatgggtgccctgagtggagtggagatggtgctcaaggacatcggctacccggtgaagctcggctccggcgtggcggcggcggcggcgtacctgtcgaattcgacgccgctcatcccgtccaggatctgaagcacaacgaacgaaggaaggaaagcaattctcagcagcgatggttctgcctgcagtttggcagaacggaacagcggcaaattaatcctattgcatataatttggtctctgtatgtaaagttaaatttttatacgctccatcgatcagctctatgctaaggagtaaggagtataattttgtgaaggtactgcagcttttacttaattaatcttgaacctcgatgtatacaacagtgaacagttaaattaatcatcattccctaatgcctcttaattttaactatatatagatcgatcgactgatctgtttctttctt

SEQ ID NO: 385629 - DNA, 413 bp, Oryza sativa
  unsure (1)..(413): unsure at all n locations
ggacggccngggnacggctgggnctcctcctcttcttcttcttccgctctctagctttgctttgcttgcttcatcaaaccccacacacgcacacaacaacaacaagagtaatcaaagtagaagaagatggtttcggccttgttgcggacgatcctggtgacgggcggcgccggctacatcggcagccacaccgtcctccagcttctccaactcggcttccgcgttgtcgtcctcgacaacctcgacaacgcctccgagctcgccatcctccgcgtcagggaactcgccggacacaacgccaacaacctcgacttccgcaaggttgacctccgcgacaagcaagcgttgggccaaatcttctcctctcaaaggtttnaggctgtcatccatttttgccgggnttgaaagctgtt

SEQ ID NO: 385630 - DNA, 652 bp, Oryza sativa
  unsure (1)..(652): unsure at all n locations
ttttccccantcacgacgttttaaaacgacggccagtgaccgcgcgtaatacgactcactatagggcgaattgggtacccgggcccccctttcgaggtcgacccagcntccgcggacgcgtgggcgcgcggacaacaccggggccaagaacctctcacatcatctccgtgaagggcatcaagggccgcctcaaccgcctcccgtccgcctggcgtcggcgacatggtcatggccaccgtcaagaagggcaagcccgatctccgtaagaaggtcatgcccgccgtcatcgtccgccagcgcaagccgtggcgccgcaaggacggtgtctacatgtacttcgaagataatgctggagtgattgtgaatcctaagggtgagatgaaaggttctgctatcactggacccatcgggaaggagtgtgctgacctttggcctaggatagctagtgcagcaaatgctattgtctgagcttgtttgaatgaattgtaagacagctatatgacctcaggatcgtctgcaaatggtttactaggacaactgtggaactttgtgatgctatcgtttgtttgcccgttgcagttttgtagtgaacagaagttgccatccatatgatattttatttgccatctaaaaaaaaaaaaaaaaaannnnn

SEQ ID NO: 385631 - DNA, 763 bp, Oryza sativa
gaatgaccgtgatacccttaccccgcagcccgcactgcagtgccctagcttgtacaggggcattttagtcttttcgggtgccccaaaaccctaatcctcggatctataagtagcgactcaagccaagccctagcaatcggatcccaccccagccgccaccatgtcgaagcgagggaggggagggtcggcggggaacaagttccggatgtcgctgggtctgcctgtggcggcgacggtgaactgcgcggacaacaccggggccaagaacctctacatcatctccgtgaagggcatcaagggccgcctcaaccgcctcccgtccgcctgcgtcggcgacatggtcatggccaccgtcaagaagggcaagcccgatctccgtaagaaggtcatgcccgccgtcatcgtccgccagcgcaagccgtggcgccgcaaggacggtgtctacatgtacttcgaagataatgctggagtgattgtgaatcctaagggtgagatgaaaggttctgctatcactggacccatcgggaaggagtgtgctgacctttggcctaggatagctagtgcagcaaatgctattgtctgagcttgtttgaatgaattgtaagacagctatatgacctcaggatcgtctgcaaatggtttactaggacaactgtggaactttgtgatgctatcgtttgtttgcccgttgcagttttgtagtgaacagaagttgccatccatatgatattttatttgccatctaaaaaaaaaaaaaaaaaaa

SEQ ID NO: 385632 - DNA, 713 bp, Oryza sativa
  unsure (1)..(713): unsure at all n locations
ccacgcgtccgcggacgcgtgcgcggccccgccgggtcgaagcgagggaggggtgggtcggcggggaacaagtgccggatgtcgctgggtctgccggtggcggcgacggtgaactgcgccgacaacaccggcgccaagaacctctacatcatctccgtgaagggcatcaaggggaggctcaaccggctgccgtcggcctgcggcgacattcatggccaccgtcaagaaggggaagcccgacctccggaagaaggtcatgcccgccgtcatcgtccgccagcgcaagccgtggcgccgcaaggacggcgtctacatgtacttcgaagacaatgctggggtgattgtgaatcccaagggtgagatgaaaggttctgctatcactggacccattggtaaggagtgcgccgacctctggccaaggattctagcgcagcaaatgccattgtctagagcttgtttggagtagtagttttcagttctgtgccggatgtgataatgtgctccagttcttttttgtttccaaccaagtttaacctgaacttgaagcaaaccttcagttaaattttcagtgcggattgtgtccttgatgaatggaaaatggcatgtttgcttgtttaccttgatccttttaaaaaaaaaaaaaaaaaaanaaaaaaaaaaaaaaagaaaaaantggagggggggcccggtacccaattcgccntatantgagt

SEQ ID NO: 385633 - DNA, 1731 bp, Oryza sativa
  unsure (1)..(1731): unsure at all n locations
cggaactgacagtcccgacccaccccaccgtttcgaccttggtggtggtactttgaatgtctccctccttaccattgaggagggtatctttgaggtcaaggccacagctggtgacacccatcttggtggtgaagattttgacaatcgtatggtcaaccactttgtgcaagaattcaagaggaagaacaagaaggatatcactggcaaccccagggctctcaggaggttgaggacagcttgtgagagggcaaagaggaccctgtcctccactgcccagaccaccattgagatcgattccctgtatgagggcatcgacttctactcaaccatcacccgtgccaggtttgaggagctcaacatggatctcttcaggaagtgtatggagcctgtggagaagtgcctcagggatgctaagatggacaagagctctgttcatgatgttgtccttgttggtggctccactaggatcccgagggtgcagcagctcctgcaggatttcttcaacggcaaggagctttgcaagaacatcaacccagatgaagctgttgcttatggtgctgctgtccaggctgccatcttgagtggtgagggcaacgagaaggtccaggacctcctcctgttggatgttacccctctctctctcggtttggagactgctggtggtgtcatgaccgttttgatcccaaggaacaccaccattcccaccaagaaggagcaggtcttctccacctactccgacaaccagcctggtgtgctcatccaggtttatgagggtgagaggaccaggacacgtgacaacaacctgctggggaagtttgagctctctggaatccctcctgctcccaggggtgttccacagatcactgtttgcttcgacattgatgccaatggtatcctgaacgtgtctgctgaggacaagaccaccgggcagaagaacaagatcaccattaccaacgacaagggcaggctgagcaaggaggagatcgagaagatggtgcaggaggccgagaagtacaagtcagaggatgaggagcacaagaagaaggtggacgccaagaacgcgctggagaactacgcctacaacatgcgcaacaccatcaaggatgagaagatcgcctcgaagctcccggcagcggacaagaagaagatcgaggatgccatcgaccaggccatccagtggctggacggcaaccagctcgccgaggctgatgagttcgatgacaagatgaaggagctggagggcatctgcaaccccatcatcgccaagatgtaccagggcgctggcgcggacatggccggcggcatggacgaggacgatgctcccccggctggcggcagcggtgctggccccaagatcgaggaggtcgactaagcgcgaaatttgctagtgatccgcgcttcaagttatcttattgcattattagtgtctcttttatgttgcgtgttaaaaaactttgctgctatgacttatgatgatacccttggtctgtttgggcagtccttttgaattgaagaactgcgttgggagctctatgagaactatgaattgcgtgagaaatttaattattgtggtgcttgcagcgcctattatttggtctctgtcccacgtttattatttgcatgtgcgcattgtttgctagcaattgctgttgtncccctcagccaacatgtaaactgtttggattgtttctgatttttggatgcattttttnnnnnnnnnnnnnnnnnnnn

SEQ ID NO: 385634 - DNA, 1346 bp, Oryza sativa
  unsure (1)..(1346): unsure at all n locations
caacatggacctgttccgcaagtgcatggagccggtggagaagtgcctgcgcgacgncaagatggacaagagcagcgtgcacgacgtcgtgtcgtcggaggctccacccgtatcccccgcgtgcagcagctgctccaggacttcttcaacgggaaggagctctgcaagagcatcaaccccgacgaggccgtcgcgtacggcgccgccgtgcaggccgccatcctcaccggcgagggcaacgagaaggtccaggacctgctcctcctcgacgtcacgccgctgtctctgggcctcgagacggccggaggtgtcatgaccgtgctgatccccaggaacaccaccatccccaccaagaaggagcaggtcttctccacctactccgacaaccagcccggcgtgctcatccaggtgtacgagggtgagaggacgcggaccaaggacaacaacctgctcggcaagttcgagctctccggcattccgccggcgcccaggggtgtcccccagatcaccgtctgctttgacattgacgccaacggcatcctgaacgtctcggccgaggacaagaccactggccagaagaacaagatcaccatcaccaacgacaagggcaggctgagcaaagaggagatagagaagatggttcaggacgccgagaagtacaagtccgaggatgaagagcacaaaaagaaagttgacgccaagaattccctggagaactatgcttacaacatgaggaacactatccaagacgagaagattgcttccaagctgccagctgacgacaagaaaaagattgaggacgcggtcgagcaggcgatccagtggctggacaacaaccagctcgctgaggttgaagagttcgaagacaagatgaaggagctggagggcctgtgcaacccaattattgccaagatgtaccagggtgctggtgccgacatgggtggtggaatggacgatgatgctccggctgctggtgggagtggtgctggccctaagattgaggaggtcgactaaatcaatacaccttcgtatatgtgatgagaaaaatattgatcatacaccttttgttttcaaatcccagttggcaatcataccacttgggctactcgtactttctgttaactaaagacttattatcacctgatgcttgagtttggacttctagtctcagattcgaacagacattcagtaatgtgatgatgtttcagtttttaccaggtggccgcggcagaattaccccttttgttttactgctgtattacaattgcaattgattatgctaggtgggtttggcccccggttacttaaatatgttttacatgttcaatatgctttaaatgttttaa

SEQ ID NO: 385635 - DNA, 678 bp, Oryza sativa
  unsure (1)..(678): unsure at all n locations
acaagaccaccggccagaagaacaagatcaccgtcacaaacgacaagggcgaggctgagcaaggaggagatcgagaagatggtgcaggaggcggagaagtacaaggcggaggacgaggagcacaagaagaaggtggacgccaagaacgcgctcgagaactacgcctacaacatgaggaacaccatcaaggacgacaagatcgcctccaagctctcggcggacgacaagaagaagatcgaggacgccatcgacggcgccatcaactggctcgacagcaaccagctcgcggaggcggacgagttcgaggacaagatgaaggagctggagagcatctgcaaccccatcatcgcgaagatgtaccagggcgccggcgcggacatgggcggcgccgctggcatggacgaggacgcgccggcgggtggcagcggtgcaggccccaagatcgaggaggtcgattaagctggtggtggtcctacgtgattccggctggaagggagtctgaaccgtgtgatgtggctggcgtcgtgtgatcccctgtgttttttagccgtcgagagtttcgtgcgatgaagcttttgtaagtgtgtatcgccgtatggttttacctgaacttgctctgaaatagtttaagctttgacctaaaaaaaaaaaaaaaaaaannnnnnnnnnnnnnnnnnn

SEQ ID NO: 385636 - DNA, 499 bp, Oryza sativa
  unsure (1)..(499): unsure at all n locations
acaagaagaagatcgaggacgccatcgaggatgccatcaagtggctcgacggcaaccagctcgccgaggccgacgagttcgaggacaagatgaaggagctcgagagcctctgcaatccgatcatctcaaagatgtaccagggcggcgcggtggtccggggggcatggacgaagacgcccccaacggcagtgccggcaccggcggtggcagcggcgctggccccaagatcgaggaagtggactaagcgagtggactgagtatatgacatgttgagcgggacgaagaaggagcgatgcattctgggacgtcatcatcatctttagagtttcatgcggtcaagccgaataatgtcacttgagttgttactggttgtgacagttatatcttgttaaggttctatgatccgatgtaggttgagagagatatatatatatatattattactactacggagtnataggttagcgnnnnnnnnnnnnnnnnnnnnnnnnnnnnnnnn

SEQ ID NO: 385637 - DNA, 483 bp, Oryza sativa
acaacatgcggaacaccatcaaggacgacaagatcgcgtccaagctgccggaggccgacaagaagaagatcgaggacgccatcgacggtgccatcagctggctcgacagcaaccagctcgccgaggccgaggagttcgaggacaagatgaaggagctggagggcgtctgcaaccccatcatcgccaagatgtaccagggcgccggagctgacatggccggaggcatggacgaggatgctccggcggccgccggcggaagcagcggaccagggcccaagatcgaggaagtcgactaaatgatcgatcttttatcgcttttagttatacctgcaataatttgtcgttcgttttacaccgaattcttgagtgctcctgcaacttttttggtacgggctttcattatggccccggttttgctttacttgttaaagtttggattattatggttttattaatatagtattgagtagcaatttataccaa

SEQ ID NO: 385638 - DNA, 812 bp, Oryza sativa
  unsure (1)..(812): unsure at all n locations
cagaagaacaagntcaccatcaccaacgacaaggggccggctgagcaaggaggagntcgagaagatgntgcaggagccggagaattacaaggcccgaggacgaggagcacaagaagaaggtggacgccaagaacgccctcgagaatacgcctacaacatgcgcaacaccatcaaggacgagaagatcgcctcccaagctcgccgccgacgaacaagaagaggaatcgaggacgccatcgatggcgccatcagctggctcgacaccaaccagctcgccgaggccgacgaagttcgaaggacaagatgaaggagctggagggcatctgcaacccgatcatcgccaagatgtaccagggccccggcgccgacatggccggaggcatggacgaggacgcgccggcgggcggcagcggcgcaggccccaagatcgaggaggtcgactaaactgctccatggttgccgctcacgatgttctttctgccatcgtctcttttggctgtggcttgatctgtcgtatcgtcgttgcttctggtagaaattaagtgagagttgtgggggaggaacgctgtggtttacctgtggtttggaactttcatctgaacagcttttggatatggcgatgcattcttagttaattattgtgagtaactctgttttgctccgttctttctttttttatctgtgcaatgctcgactctgggccaaacgggtctctccttcgacagctttgatctcgctataagagcaatcagatattttatgttgccccgtcgttcgtaagttttgcaaatgttaatttacttaaaacaaaa

SEQ ID NO: 385639 - DNA, 1309 bp, Oryza sativa
gagacggcggagggggggaaggccgtgcaggcgctcaagtcggtgtacgcgcactgggtgcccgaggacaggatcatcaccaccaacctctggtccgccgagctctccaagctcgccgcgaacgcgttcctggcgcagaggatctcgtcggtgaacgccatctcggcgctctgcgaggccaccggcgcgaacgtcaccgaggtggcgtacgccgtcggcaaggactcgaggattggccccaaattcctcaacgccagcgttggattcggcggctcctgcttccagaaggacatcctgaatctggtgtacatctgcgaatgcaatggcctccccgaggttgccgaactactggaagcaggtgatcaagatcaacgactaccagaagagccggttcgtcaaccgcgtggtgtcctccatgttcaacacggtgtcgggcaagaagatcgccgtgctggggttcgcgttcaagaaggacaccggcgacacgagggagacgccggcgatcgacgtgtgccacggcctgctcggcgacaaggcgcagatcagcatctacgacccgcaggtgacggaggaccagatccagcgggacctcgccatgggcaagttcgactgggaccacccgatgcacctgcagccgacgagccccacggcgttcaagcaggtgagcgtggtgtgggacgcgtacgaggccaccaagaacgcccatggcctctgcatcctcaccgagtgggacgagttcaagacgctcgactaccagaagatctacgacaacatgcagaagccggcgttcgtcttcgacggccgcaacgtcgtcgacccggagaagctcagggagatcggcttcatcgtctactccatcggcaagccgctcgacgcctggctcaaggacatgcccgccgtggcatgataagattcatgtgaattttaatcgatcgattcgattctcaacctcgattcgagctgcaggaattcgacttggaagaagagcaatgcaagatgggttggccacttaaaattctttatagttcgtttttttttttgcaggagacgacactaccattttctcaggcataaaaaagttgggtgttcttgttagtaaaatcatcgtcatcgctgttgaagttttttttttcatcgtttgcactgttctagatcactataatccccaccccactccccctccccctccccctccccctgtcatcatggctctttctgtttgagggccatctgaacgaaaatttacctgtattattcagtcaacttgttatagcagattggttattccattgtactattctcaaaaaaa

SEQ ID NO: 385640 - DNA, 817 bp, Oryza sativa
ccacgcgtccgcgtccttggctttgcgttcaagaaggacaccggtgacaccagggagacaccagccattgatgtgtgccacggtctgttgggtgacaaggctcagatcagcatctacgatccacaggtcaccgaggaccagatccagcgggacctcgccatgagcaagttcgactgggaccacccgatgcacctgcagccgaccagccccactgcattcaagcaggtgagcgtggtgtgggatgcatatgaggccaccaagggggcccatggtgtctgcatcctcaccgagtgggacgagttcaagaccttggactaccagaagatctttgacaacatgcagaagcctgcattcgtctttgatgggcgcaatgtggtcgatgccgagaagctcagggagattgggttcatcgtctactccatcggcaagccgcttgatgcctggctcaaggacatgcccgcggttgcataataattttccatattccacacctgaacctcatagctctctacactctgctggtgctgaagagagtctgcgtcgaagaggaatttggttgaccatcattttttatagctcgttgttcgtctttacatacaggagaggctaccattttgtcaaacagaaagttgatttctgttagtatctttgttcaagtttttcttgtgttgcaccattgtagatctgaaatcttcaggcctctaccgtttgagtgccaccctcaatcttgtatgatgacatgaattcttatagccgatttattcttcaaatgtattcttgtgtcgctaaagattaatgatgcaattttttcttggcc

SEQ ID NO: 385641 - DNA, 2262 bp, Oryza sativa
ctttccgatcgataaatactactcccgcttccggtagctactagcacggcggtggcagtggcagtggcagtggcagtgggagttccagggacgtagagcagcgcggtgcggattgtgcggggaggcgcgggaggaggaggaggaggaggggaagatggagagcaccatgaaggggatccgcggggacaacgcgccgtgcgtgctggacctggacgacgcggcgacggtggggggcggcgtcggggacacctacggcgaggactgcgccaccgaggagcagctcgtcacgccgtggaccgtctccgtcgccagtggttacaatttgctgagggatcctcgctacaacaaggggcttgccttcaacgaaagggagcgcgaaacgcactacctccgtgggcttctgccaccagcaatcgtatcccaggagctccaggaaaggaaaatcatgcataacatccgacaataccagctgcctctgcagaaatacatggctatgatggacctccaggaggggaatgagaggcttttctacaagctcctcattgacaatgttgaggagctacttcctgtcgtttacactccaacagttggtgaggcctgccaaaagtatggatccatatttagccgtcctcatggtctttatatcagcttgaaggagaagggaaagatccttgaggtgctaaaaaactggccagagaggagcattcaggttatcgttgttactgatggtgagcgaattttggggcttggagatcttggctgccagggaatggggatccctgttgggaagcttgccctttacactgctctaggaggagtgcgtccatctgcttgtttgccaatcacattggatgttggtacaaataacgaggcgctgctgaatgatgagttctacattggcttaagacaaaagagggccactgctcaggagtatgctgattttcttcatgaattcatgactgccgtgaaacaaaactatggggagaaagtactcattcagtttgaggattttgcaaaccataatgcatttgaactccttgcaaaatatggaacaactcaccttgtattcaatgatgatattcagggaacagcttccgtggtcctttctgggcttgttgcagcactaaaattagttggtggttcattgtcggagcacagttacctgttcctgggagctggagaggctgggacaggcattgcagaacttatagctctcgagatatcaagacagaccaaagcaccaattgaggagtgccgcaagaaaatatggcttgttgattcaaagggcttgattgtcagttcacgaaaggagacccttcaacacttcaagaaaccatgggcccatgagcatgaacctgttggaaatctcttagatgcagtcaaaactatcaaaccaacagtattgattggcacatctggaaaggggcaaactttcactcaggaggttgttgaagccatttcctcatttaatgagaggcctgtcatttttgccttgtccaacccaacatctcagtctgagtgcaccgctgaacaagcgtacacatggagcaagggccgcgcggtgtttgcaagtggaagtccatttgatccggtggagtatgatggcaaaatatacgtgcctggccaggcaaacaacgcctacatcttcccagggtttggccttggtgtggtgatgtctggtgcaatccgtgttcatgatgacatgcttcttgcagcttcggaagcactggctcagcaggtcacacaagagaatttcgacaagggccttacttatcctcccttctcaaacatcagaaagatctctgcccacattgcagccaacgttgcagcaaaggcatatgaacttggtttggcaagcaggcgccctcggccaaaggacctggttaagtatgcagagagctgcatgtacagcccactttaccgcaactaccggtgaatctggtcatccggtatccggatctattccagtcatgtatatctatgaactgtttcctgcaaaatcttactacttgttcagtactgcacgctgtaattctgatgagtctaccggagttacttcaagcctttttttccccgtgtcgttcatgcctgtattgtaatatttccttttcgacgtgatgtgaagttccttgtatccagttaccttaagcatgggcatatgtattttcatcacaagaatgttaccgtcctagggatgggtaataaatgataaatctggaataaagtttctacagttcctttctcggtactgtttctatgttc

SEQ ID NO: 385642 - DNA, 279 bp, Oryza sativa
cgcgcacttataacattggcgagggggttggatttggtgatggctttgtggaggtgctggcagctacccagacaacaggggaatcaggaaagcgatggttccagggaacagccgatgctgtcaggcagttcctgtggctatttgaggatgcaaggctcaaacgcatagagaacatactaattctatctgggtgatcatctgtataggatggcttatatggactttgtcagaagcatgttgacaaaggtgctgatatttcagtcgcttgtgttcctgtgg

SEQ ID NO: 385643 - DNA, 1282 bp, Oryza sativa
  unsure (1)..(1282): unsure at all n locations
ccacgcgtgccgccatctccagctctcttcccccccctctcttcccccccgcgtccagttccatctaatcagcttctcgtcgagatgggccgcaagttcttcgttggtggcaactggaaatgcaacgggaccactgatcaggtggacaaaattgtgaaaattctgaatgagggacagattgcttctacagatgttgttgaggtggttgtcagcccaccttatgtgttccttcccgtggtcaagagtcagctgcgcccggagatccaagttgctgctcagaattgttgggtgaagaagggcggggctttcaccggtgaggtcagcgctgagatgcttgtcaaccttagtattccctgggttattcttggacactctgaaaggaggagtttgttgggtgaatcaaatgagtttgttggagacaaagtggcatatgcgctctctcagggcttgaaggtcattgcatgtgttggtgagactctcgagcagcgggaatctggttcgaccatggatgttgttgctgcacaaacaaaagcaatttctgaaaggatcaaggattggactaatgtggttgttgcctatgaacctgtgtgggccattggaactggtaaagttgctacaccagatcaagcacaagaagtgcatgatggcctgaggaagtggctcgctgctaatgtcagtgcagaggttgctgaatcaacaaggatcatctatggaggttccgtaactggtgcgaactgcaaggagctggcagcaaagcctgatgttgatggttttctcgtcggtggtgcttcattgaagcctgaattcatcgacatcatcaactccgccaccgtgaagtccgcctaagatcttcaccccattcaccttcggcgtgggaagatgtctgaagaggatcatacctttttctgtgcttatgtaatgctagtagttttgtgctggagcagctactctttttcctccccttcacttccctgaagctacctgcagcttgagcaatgctaataatgcacaccactgaacatactaccataccaataatgtttagctccttttgtcgtgagttattatcatgtgagtttcagatcagatttcactggtgcattcacctattcttgctggcatatcagtctgatgaatcaggcatcaattctggtttctctgtgttatggtctgcaatgtctagtgaggtttaaggtttttgcatcttttggtccccatgattgattccaagtaacaggctaactgccatagtacctcaaattttggaaaanaaaaaaaaaaa

SEQ ID NO: 385644 - DNA, 2340 bp, Oryza sativa
  unsure (1)..(2340): unsure at all n locations
ggattaggcctgtccttactgtgaacaagatggacaggtgcttccttgagcttcaagtcgaaggtnaggaggcgtatcagaccttttcccgtgtcattgagaatgccaatgtcattatggcaacatatgaagacacgctccttggtgatgtccaagtttaccctgagaagggaactgttgcttgctctgctggtctgcatggctgggctttcacactctcgagctttgctaagatgtatgcttccaagtttggagttgatgaatttaagatgatggagaggctttggggtgagaacttctttgacccagccacaaagaaatggaccaacaagaacactggctcagctacctgcaaaagaggtttcgttcagttctgttatgagccgatcaagcaaatcatcaacacttgcatgaatgatcagaaggataagttgtggcctatgttgcagaagcttggtgtggtcatgaaggctgatgagaaggagcttatgggcaaggctctcatgaagcgtgttatgcaaacatggctgccagccagtaatgctcttcttgagatgatgatataccaccttccatctccgtccaaggcccagaggtaccgtgtggagaatttgtatgagggtcctcttgatgatgtctacgcaactgctatcagaaactgtgatccagaaggtcctcttatgctgtatgtttccaagatgattcccgcatcagacaaaggtaggttctttgcctttggtcgtgtcttctctgggagggttgcaactggcatgaaggtgcgtatcatgggtcccaactatgtccctggccagaagaaggatctgtatgtgaagagtgtccagcgtactgtcatctggatgggaaagaaacaagagtctgttgaggatgttccctgtggtaacactgttgctatggttggtttggatcagttcatcaccaagaatgccaccctgactaatgagaaggagtcagatgcctgcccaatcagagcaatgaagttctcagtgtcccctgttgtgcgtgttgctgttcagtgcaaggttgcctctgatctgcccaagcttgttgagggtttgaagcgtctggcgaagtctgatcctatggtgctctgtactattgaggagtctggtgagcatatcattgctggtgctggagagcttcaccttgaaatttgcttgaaggatctgcaggaagatttcatgggtggtgctgaaatcattgtttccccacctgttgtttctttccgtgagactgtccttgagaagtcgtgccgtactgttatgagcaagtccccgaacaagcacaaccgtctctacatggaagctcgccccttggaggagggattggctgaggccattgatgacggtcgtattggcccacgtgatgatcccaaggtgcgctccaagatcctgtctgaggagttcggctgggacaaggatcttgcaaagaagatttggtgttttggacctgagacaactggccccaacatggtggttgatatgtgtaagggagttcagtatctgaatgaaatcaaggattccgttgtggctggtttccagtgggcatcaaaggagggtgctctggctgaggagaacatgcgtggtatctgctttgaggtgtgcgatgttgttctccatgctgatgctattcacagaggtggtggccaggtcattcccacggccaggagggtcatctatgcttctcagctcacagcaaagcccaggcttcttgagcccgtctacctggtggagatccaggcccctgagaatgcccttggtggtatctatggtgttctgaaccagaagagaggacatgtgttcgaggagatgcagaggcctggtacccctctgtacaacatcaaggcttacctccctgtcatcgagtcctttgggttctcaagccagcttagggctgcgacatctggccaggccttcccccagtgtgtgttcgaccattgggacatgatgacctctgatcctcttgaagctggctcgcaggcttcaaccctggtgcaggatatccgcaagaggaagggtctcaaggagcagatgactcccctctccgatttcgaggacaagctctaaatttttggccgccgcatgtgttgtgccgttacccttacatgttctagttggtctactgctaagagaactgctttcgttgtcgtatttcatttcccttttgtcgaatgcatgtgtttcacatcaacaatcctatgttcgcgtgctactgagaaactatttttactctgtcgtgatgtaacggatgtggaacctggatcatctttttgctgtctaagttatagtgttcacattctaaaaaaaaaaannnnnnnnnnnn

SEQ ID NO: 385645 - DNA, 552 bp, Oryza sativa
gtgcatccgctgcgctgtgctgccatttctcttcagcttaaaaagcgagccctaccatttcctctctctcttcttgtcatcctcctcatctcttcttcctccctcgtctcaccaacagcgaggtgactgagagaagctagcttgggagaataatccatggcaggcaagatgtctacaattgtgatgatggtggatcttgaatgtgacagatgctacaggaagatcagaagggtcctctgcaagctccaagataaggcgagcatcaaggccatctcgtacgacgagaagaacaacacggtgacggtggcggggccgttcgacgccgacgaggtctcggacaggctctgctccagcgccggcaaggtcatcaccgacattcgcgtcgtcggtggtgccaaacccatgccaggcggcggcggcggtggcgccaaggcgcacgccaacaagccggccgggaaggaccgcagcgcaggcggcggcggctgcggcggcggaggaaagccggagatgatcaagaagcacgtcaagttcgagatggcggacgacatggac

SEQ ID NO: 385646 - DNA, 907 bp, Oryza sativa
  unsure (1)..(907): unsure at all n locations
cccacgcgtccgcccacgcgtccggctttggacctgagaccactggccccaacatggtggtcgacatgtgtaagggagttcagtatcttaatgaaatcaaggactctgttgtggctgggttccagtgggcatcaaaagaaggtgcattggctgaggagaacatgcgcggcatctgcttcgaggtatgtgatgtggttctccacgctgatgctattcacaggggcggtggccaggtcattccgacagcgaggagggtcatctatgcttctcagctcaccccgaatcctaggctgctggagccagtctacctggtggagatccagncccctgagaatgcccttgccggtatctatggcgttctgaaccagaagagaggccatgtgttcgaggagatgcagaggcccggtaccccgctgtacaacatcaaggcttacctccccgtcatcgagtcgtttgggttctcgagccagctccgtgccgcaacatcgggccaggccttccctcagtgtgtctttgatcactgggacatgatgacttctgatcctctggaggtgagctcgcaggcgaaccagctggtgctggacatccgcaagaggaagggtctcaaggagcagatgacccctctctcggatttcgaggacaagctctaagaaaaaacccttttggtctcgcatatgtttttgccattaatttacctgttctaatagctgttctactattgttaaagagttataagacaagtcagaaatatgatgtgtttgttacacatcaagtatcggtgttggtagtgttgtgctgtggaactatatattttgctgtctggtgatatgcaacagatatggaactttgataatgtatctgttgatagtttttacggttttctgaatcagtttcagtttgatatatc

SEQ ID NO: 385647 - DNA, 706 bp, Oryza sativa
  unsure (1)..(706): unsure at all n locations
ctctcatcaaagttgataggtggcgagaaagaattttttgcatctatggttgtggatgctgttcttgccattagcaatgatgacagacttaaccttcttggaataaaaaaggttcctggaggcaccatgagagattccttccttgttaacggtgttgccttcaagaagacattttcctatgctggatttgagcaacagccaaagaagttcttgagtccaaagattcttttgctgaacatagaactagaattgaaatctgagaaagaaaatgcagaaatcagattgtctgaccctttacaataccaatcaatcgtcgatgctgaatggaatatcatttatgacaagttggataaatgtgtcaaaagtggggcaaagatagtcctttctcggttggcaattggtgatcttgcaacacagtattttgcagaccgggacattttctgtgctggccgtgttgcagaagaggatttacaacgtgttgcagcagcaacaggtggtaccgttcagacatcagtgaataatgtcattgatgaggtacttggtacttgcgaagttttcgaggaaaggcaagtnggcaatgaacggttcaatatatttagtggttgcccttctggtcaaacagcaaccatagtccttcgtggtggtgcagatcagttcatcgagggaagcagcaaggagcctccacggtgccatcatgattttagag

SEQ ID NO: 385648 - DNA, 1795 bp, Oryza sativa
  unsure (1)..(1795): unsure at all n locations
gccctaaatgtctcgcatccatcgaaaccccactttattagcaccaaccccgtctccttcctccattcctccgctgctagaaccttctagaagctctcctcctcctcccatggcggcgacgatcgtgtccgtcaaggcgcgccagatcttcgacagcaggggcaaccccaccgtcgaggtcgatgtgtgctgctcagatggaacctttgcaagggctgcagttcccagtggtgcatcaactggtgtctatgaagctctcgaattgagggacggtggatctgattacttgggaaagggtgtttccaaggctgtcgacaatgtgaactcggttattgccccagctctgattggcaaggaccctacgtcacaggctgagcttgataacttcatggttcagcagcttgatggaaccaaaaatgagtgggggtggtgcaagcagaagcttggtgctaatgcaatcctggctgtgtcactggccatttgcaaagctggagctatcatcaagaagattcctctgtaccagcacattgccaaccttgctggaaacaagcaactggttttgcccgtacctgcattcaacgtcattaacggtggatcacatgctggaaacaagcttgccatgcaggagttcatgatccttcctactggggccgcttcattcaaggaggccatgaagatgggtgttgaagtgtaccacaacctgaagtctgttatcaagaagaagtatggtcaggatgccaccaatgttggtgatgaaggtggttttgctcctaacattcaggaaaacaaggagggtcttgagctcttgaagactgcaattgaaaaggctggatacactggcaaggttgtcattggaatggatgttgctgcttcggaattctacaatgacaaggacaaaacctatgaccttaacttcaaggaggagaacaatgatggttcacaaaagatatctggtgatagcctgaagaatgtatacaagtcatttgtcagtgaataccccattgtctcgattgaggatccgtttgaccaggatgactgggaacactatgctaagatgaccgctgaaattggagagcaagtgcagattgtcggtgatgacctccttgtcaccaacccaacaagggtggcaaaggcaatccaggagaagtcatgcaatgctcttctgctgaaggttaaccaaattggatctgtcactgagagtattgaggccgtgaagatgtcaaagcgtgctggctggggtgtgatgaccagccacaggagtggtgagactgaggataccttcattgctgatttggctgttggtttggccacgggtcagatcaagactggagcaccctgccgatcagagcgccttgccaaatacaaccagcttcttaggattgaggaggagcttggtgcggctgctgtctacgctggtgccaagttccgcgcacccgtggagccctactaaacttgatggtgaatatcatgcggttcatgcccactgttgtgtgcatgggttttgtgaagacaggatgctcatttctatccgtaattgacttcccggtcgaactctagttaaaaagctcgtagaatcgagaaataaatcctccactgtatgagcggatatgtacccccaaacttgctccaattttggtgatgtgtagttctgagcttgcgtgttctctgaacctgttggatctttaatacagagagtatggcttttgttattatggcaaaaaaaaaaaaaactcgagggggggcccggtacccaattcgccctatagtgagtcgtattacaattcnnntttttntn

SEQ ID NO: 385649 - DNA, 1186 bp, Oryza sativa
  unsure (1)..(1186): unsure at all n locations
ccacgcgtccgcccacgcgtccgcccacgcgtccgcccacgcgtccgctggaaacaagcttgccatgcaggagttcatgatccttcctactggggccgcttcattcaaggaggccatgaagatgggtgttgaagtgtaccacaacctgaagtctgttatcaagaagaagtatggtcaggatgccaccaatgttggtgatgaaggtggttttgctcctaacattcaggaaaacaaggagggtcttgagctcttgaagactgcaattgaaaaggctggatacactggcaaggttgtcattggaatggatgatgctgcttcggaattctacaatgacaaggccaaaccctatggccttaaactttcaaggaggaggaacaatgattggttccacaaaagaatttctgggtgataccctgaagaatgtatacaagtcatttgtcagtgaataccccattgtctcgattgaggatcccgttttgaccaggatgactgggaaaccactatgctaagatgaccgctgaaattggagaagccaagtgcagatgtcggtgatgacctccttgtcaccaaccccaacaagggtggcaaaggcaatccaggagaagtcatgcaatgctcttctgctgaaggttaaccaaattggatctgtcactgagagtattgaggccgtgaagatgtcaaagcgtgctggctggggtgtgatgaccagccacaggagtggtgagactgaggataccttcattgctgatttggctgttggtttggccacgggtcagatcaagactggagcaccctgccgatcagagcgccttgccaaatacaaccagcttcttaggattgaggaggagcttggtgcggctgctgtctacgctggtgccaagttccgcgcacccgtggagccctactaaacttgatggtgaagacaggatgctcatttctatccgtaattgacttcccggtcgaactctagttaaaaagctcgtagaatcgagaaataaatcctccactgtatgagcggatatgtacccccaaacttgctccaattttggtgatgtgtagttctgagcttgcgtgttctctgaacctgttggatctttaatacagagagtatggcttttgttattatggctgtgattaagtccctttaaatttttaaacttttctggcacattaaannnnnnnnnnn

SEQ ID NO: 385650 - DNA, 738 bp, Oryza sativa
  unsure (1)..(738): unsure at all n locations
gatggttcccagaagatatctggagatagcctgaagaatgtgtacaagtcatttgttagtgaatacccaattgtctcgatcgaagacccatttgatcaggatgactgggttcactatgctaagatgaccgaagaaattggagatcaagtgcagattgttggagatgatctccttgtcaccaacccaactagggtagccaaggcaattaaggacaaggcctgcaatgctcttctccttaaggttaaccaaattggatctgttactgagagcattgaggctgtcaagatgtcaaaacgtgctggctggggtgtgatgaccagtcacaggagtggtgaaactgaggatacattcattgctgatctggcagttggtttatccacgggccagatcaagactggagctccttgcagatctgagcgccttgccaagtacaaccagcttcttaggatcgaggaggagcttggtgctgctgccgtctatgccggagccaaattccgtgcaccagtggagccctactagatgggaatagaaccacttcgtttccgtaaattttgtgaagattgtgatgttgtagggtttgagcaataattccccacggtcagatgtgggtggacatgctcccacaaaacgcttaattttgatgttgcgtggcgcaagcgtgatttgaaggaacacaaatgattatattaaacgttataagcaaagttcaacaccaacaagtttggcnnnnnnnnnnnn

SEQ ID NO: 385651 - DNA, 677 bp, Oryza sativa
  unsure (1)..(677): unsure at all n locations
ngnaggggattgggaaactctttccaaccaaagggggcaagcatcggggattagcagtttttggggaggtaccaaattgatttttatggggtatgagccgggagatttcaagggtgttggtgggggtgagaccacccacaggggtgggagatgaggggaccttcattggtgattggctgttggtttggccacgggtcagatcaagactggagcaccctgccgatcagagcgccttgccaaataccaaccagcttcttaggattgaggaggagcttggtgcggctgctgtctacgctggtgccaagttccgcgcacccgtggagccctactaaacttgatggtgaatatcatgcggttcatgcccactgttgtgtgcatgggttttgtgaagacaggatgctcatttctatccgtaattgacttcccggtcgaactctagttaaaaagctcgtagaatcgagaaataaatcctccactgtatgagcggatatgtacccccaaacttgctccaattttggtgatgtgtagttctgagcttgcgtgttctctgaacctgttggatctttaatacagagagtatggcttttgttattaaaaaaaaaaaaaaaaaaaaactcgagggggggcccggtacccaattcgccctatagtgagtcgtattacaatttcnnnnnnnc

SEQ ID NO: 385652 - DNA, 824 bp, Oryza sativa
  unsure (1)..(824): unsure at all n locations
gcnaccntccnnncnaagngaaanatntncnncnaanananngganccnannntgtaanagnatttaaggnaacccntttctccatgngancntttnccangnnnngggnaaacttngctnaagtnncccnttaaantgtanannannttnaattgcggnnaaataaccccttnctnccnancntaacangggngcaaaagnnaacccngnanngtcancnaatnccctcattnctnaaggttaaccnaaatgggaacttnncactgangantattgagcccnttaaaantgtcaaaacngtgctggctgggttntgatgacccnaccnacaggaantggtgaaactgaggaataccttncaatggctgatttgggcngttggttttggccacgggtcnagatcaaagactggagcacccctgccgatnagancgccttgccaaatacaacccagctccttaggattgaggaggagcttggngcggctgctgtctacgctggtgccaagttccgcgcacccgtggagccctactaaacttgatggtgaagacaggggtgcctcattcctatccgtaattgacttcccggtcgatctctagttaaaaagctcgtagattcgcgaagtaaatcctcccctgtatgaccggctatgtgcccccaaacttgctccaattttggtgaggtgtagttctgagcttgcgtgttctctgaacctgttggatctttaatacagagagtatggcttttgttattatggctgtgcctgtgattatttcacgtatccatggtgaaaataaaatcaattgcaacagtttgcaagcct

SEQ ID NO: 385653 - DNA, 599 bp, Oryza sativa
  unsure (1)..(599): unsure at all n locations
aancnagttgaattacctcanaaagganaaaggggggtccncgcggggcggccgtttnaaattatgatccccgggctgcaggattnggcacgaggctgattggctgttggttggccacggtcagatcaagantggagcaccctgccgatcagagcgccttgccaaanacaaccagnttcttaggattgaggaggagcttggtgcggctgctgtctacgctggtgccaagttccgcgcacccgtggagccctactaaacttgatggtgaatatcatgcggttcatgcccactgttgtgtgcatgggttttgtgaagacaggaatgctcatttctatccgtaattgacttcccggtcgaactctagttaaaaagctcgtagaatcgagaaataaatcctcccctgtatgagcggatatgtacccccaaacttgccccaattttggtgatgtgtagttctgagcttgcgtgttctctgaacctgttggatctttaatacagagagtatggcttttgttattatggctgtgattatttgacgtatgcatggtgaaaataaaatcaattgcccnnnnnnnnnnnnnnnnnnnnnnnnnnnnnnn

SEQ ID NO: 385654 - DNA, 510 bp, Oryza sativa
  unsure (1)..(510): unsure at all n locations
caactatcctcagtntgccacggcgccaaacaggactagagatggcgctcactcatcacctcctccgcgttctcttagccaccgcattaccgttgctctttctctcccatgcagatgcgggcgagttgggcgtgtgctacgggagggacgcggacaatctgatggacccgcaatccgtggtgagccttctcagggcgaacggcatcacgatggtgaggatcttcgacgccgacccggggttgctgagggcgctggcgaacaccggcatcaaggtgatggtggcgctacccaacaccgatctgggctccgccggctgggatccgagctacgnacagaggtgggtggagagcagcgtggtgccctactaccnggccacgctgatcaacggcgtggccttggggaacgagnttttncgatcangnggcttaacctnacccatcagnttgttccggccatgnggaacgtgaacntgncgtttcganngttngnctcnggaatgcataagggttt

SEQ ID NO: 385655 - DNA, 646 bp, Oryza sativa
  unsure (1)..(646): unsure at all n locations
aagacccncccnccccgggaatgcccnccggggtttcaaaaaccaggagaaaagngttttaancgggaancccntccaggggttcgcggacgattgcacaggacttcaagaccgatctgcgtttccagagccatgctgtccttgccctccaggaggctgcggaggcataccttgttggtctcttcgaggacaccaacctgtgcgccattcatgccaagcgtgtgaccatcatgcctaaggacattcagctggctaggaggattcgtggtgagagggcttaaattcccctcggcgattcctttgacaaatgaagcatgcgtcgtagtgttagtagtgggttttaatcttttgcttataagaacaatctgagtagggtgtattttgtggaacaatatgtttctcatgatggtgctgtattcgtcttattggtggatctgtcaaaaatactcagcatattgtcagtgtgtctggtgactcttattttgttagtctgattcgtttgcgtcttattctagcggtgctgcctctttggcactgtgcatggctagatacaattacattgtaattcacctgtctctaatccgtgttaatgtaagtgttccgttgctgtccgtgtaaaaaaaaaaaaaaaannnnnnnnnnnnnn

SEQ ID NO: 385656 - DNA, 866 bp, Oryza sativa
ccacgcgtccggtctccggaagtcagaaagggggggaaaaaggaactcgaagtcgccgccggatttgggatttggagagcgcgcgaggtaaaccaaagttctttttccgatggctcgtactaagcaaactgctcgcaagtcaactggaggaaaggctcccaggaagcaacttgccaccaaggctgctcgtaagtctgctcccacaactggaggagtgaagaagcctcaccgttaccgccctggaactgttgctcttcgtgaaatccgcaagtaccagaagagcactgagctgctcataaggaagcttccattccagaggcttgttagggagattgcccaggattttaagactgatcttcgtttccagagccatgcggtgcttgcccttcaggaagctgccgaggcgtacctggtgggtctcttcgaggacaccaacctgtgcgccatccatgccaagcgtgtgaccatcatgcccaaggacattcagctggctaggaggatccgtggtgagagggcttaggctttctcatctctgggaggggctctggtgtttcatctgtgactacttcctgcttttgctgctgaactcttatttggtgtcgtgaatggtgctaatactactcacatgtagtagtagattgttagtgaagtactctgtttctgtgttctagaactggatattttgctagtaagttgtctcgactgttgatttcatccatccatctgatggatgtgtatctagtagtttctcatctgaagtcctgaaatctgaaccttgaatttacctgtggaatggaacttagaaaaactgtgttaaatgttcaaaaaaaaaggcatgaatgccttgtttcttttttaaacaaaaa

SEQ ID NO: 385657 - DNA, 1150 bp, Oryza sativa
cccacggtcaacaaaacctccccgacgcctccccttacccctaatcccactccacccaacgaggagatagcgcaagagaggagagggtttctgcggcggcgatggcggcggcggcgaacctggaggacgtcccgtccatggatctgatgaacgagctgctacgccgcatgaagtgcagctccaagcccgacaagcgcctcatcctcgtaggtccacctggctctggaaagggaacacaatcgcccattattaaggatgagtactgcttatgccatttagctacaggtgatatgttgagagctgctgttgctgctaagactcctttaggagtcaaggcgaaagaagcaatggacaagggagagcttgtttctgatgacttggttgttggaattattgatgaagccatgaagaaaccttcatgtcaaaagggtttcattcttgatgggttcccacggacagttgttcaggcacagaagcttgatgaaatgctggaaaagaaaggtacaaaggtcgataaggttcttaactttgccattgatgattcaattttggaagaaagaattactggccggtggatccatccctccagtggcaggagttatcacactaagtttgcacctccaaaggttcctggagttgatgatgtcactggagaaccactaattcaaaggaaagacgacacagctgaggttttgaagtctagacttgaagccttccacaaacaaactgaaccagtgattgactactactccaagaaggccttggtggccaatcttcatgccgagaagccaccgaaagaagtaactgctgaagtccagaaagttctttcgtaaatgtaccaccattttgagacgaaaattcgacagattacccagacacactgggtccggcttttagatgttcaaattgacgctgacatgcaaggtgtagactgctctctttttgtattgggtactcttatcagatttgatgagcacagtgctttgcgttgttttagttctaataatctctatggcattgatggaaggaacatttttttgtaccaatatcacagggttctttcacccttgagagttcccaaaaaagctttgcttcttatgattatgtgctgttagtgtgttcctatagtacacatgcgtacgctagagat

SEQ ID NO: 385658 - DNA, 1154 bp, Oryza sativa
cagaaacgaaacaaaaagccccaccacctaaacctcctcgatccgaccgagactcctccatttcagcggcgcacgcggagagcacgcgacgagttcgtcgacgaacaaggctagtgcagtagttgttgctgcggagatggcggcgaacctggaggacgtgccgtcgatggagctgatgacggagctgctccgccgcatgaagtgcagctccaagcccgacaagcgcgtcatcctcgtcggtccacctggctgcggaaagggaacacagtcaccgctgattaaggatgaattttgcttgtgccatttagccactggtgatatgttgagggctgcagtggctgctaaaactccacttgggattaaggctaaagaagctatggacaagggagagcttgtttctgatgacttggttgttgggattattgatgaagccatgaagaaaacttcatgccagaaaggttttatccttgatggtttccctagaactgttgttcaagcacagaagcttgatgaaatgttggccaaacaaggtactaagattgacaaggttctaaattttgcaattgatgatgcaatactggaagaacgaattaccggtcgttggatccacccatcaagtggtagatcttatcatacaaaatttgctcctcctaagactcctggacttgatgatgttactggagaacccttaattcaaaggaaagatgacacagctgcagtattgaagtcaaggcttgaagccttccacgtacaaactaagcctgtgattgactactacaccaagaagggcatagtcgcaaatctgcatgccgaaaaaccaccaaaggaagtgactgttgaggtccagaaagccctatcataaactgccagttcttcagcctataaacatgacatgtgccgaaaaccccttacactgggttttctagatgtttaaactgctgccaacaccatgtggttttcattttgatttgctgtatggcgcaattgctccattttatcacagttttcgcttcacagtctgaaatttgtcaaaataatttgttggaatgaggaaagaagttttgtataccaacaccgatataattacatcaagtcaatcttgacagggtattccttctgttcatcttaattttgaaattgatgcctttgtggtg

SEQ ID NO: 385659 - DNA, 586 bp, Oryza sativa
  unsure (1)..(586): unsure at all n locations
cctagttatatcgttctgaccgtacggttcccatttgacatcttctggattcttttctcatgtgttctatgattgcatatcctttgatagccaagacttcgggagggtttcatcttgttctctaaaatattgctgcttgtgaagattcagtattttttacttcaatgttgatttgctcccaccaggtgattgactactactccaagaaggccttggtggccaatcttcatgccgagaagccaccgaaagaagtaactgctgaagtccagaaagttctttcgtaaatgtaccaccattttgagacgaaaattcgacagattacccagacacactgggtccggcttttagatgttcaaattgacgctgacatgcaaggtgtagactgctctctttttgtattgggtactcttatcagatttgatgagcacagtgctttgcgttgttttagttctaataatctctatggcattgatggaaggaacatttttttgtaccaatatcacagggttctttcacccttgagagttcccaaaaaagctttgcttnnnnnnnnnnnnnnnnnnnnnnnnnnnnnnnnnnnnnnnnn

SEQ ID NO: 385660 - DNA, 1724 bp, Oryza sativa
gttgcccattcatctgggttttcttctgcttctttttttttcctagagagtacggttttctttgtaattctttaatttgttgcaaccatgaatgtgttggcatctaagatcttcccttcccgctccaatgttgttagcgagcaacaacaatcgaagcgcgagaaagcaactattgatgacgctaagaactcgtccaagaacaaaaatcttgaccgcagtgtcgatgagagtgtgcttggaatcattcttggaggtggtgcagggactagattgtatcccctcaccaagaagcgtgccaagcctgccgtgcctctgggtgccaactacaggcttattgatatccctgtcagcaactgtttgaacagcaacatatccaagatctatgtgctgacacaattcaactctgcctctctgaaccgtcacctgtcaagagcctatgggaacaacattggcgggtacaagaatgaagggttcgttgaagtcctcgctgcacagcagagcccagataatcctaactggtttcagggtactgcagatgctgtaagacagtacttatggctatttgaggagcataatgttatggagtttctaattctggctggagatcacctttaccgcatggactatgaaaagttcattcaggcacacagagaaacagattctgatattactgttgctgccctgccaatggatgagaaacgtgcaactgcattcggcctcatgaaaattgacgaggaagggagaatagttgaatttgcagagaaaccaaaaggagaacaattgaaagcaatgatggttgacactaccatactcggccttgacgacgtgagggcaaaggaaatgccttatattgctagcatgggtatctatgtgattagtaaaaatgtaatgcttcagctcctccgtgaacaatttcctggagctaatgactttggaagtgaagtcattccaggtgcaacaaacatcggaatgagggtacaagcttacttgtatgatggttactgggaagacattggtaccattgaggcattctataatgcaaatctgggaataacgaaaaagcctgtaccagatttcagtttctatgaccggtctgctccaatttatacacaacctcgacacttgcctccttcgaaggttcttgatgctgatgtgacagacagtgtcattggtgaagggtgtgttattaaaaactgtaagatacaccattcagtagttggactccggtcctgcatttctgaaggcgcaataatagaggactcattactcatgggagctgactactacgagactgaagcagacaagaaactccttggtgaaaaaggtggcattcccattggtattgggaagaattgccacattagaagggcaatcatcgacaagaatgctcgtattggagataatgtgaagataatcaatgttgacaatgtccaagaagctgcaagagagactgatggatacttcatcaaaagtggcattgttaccgtgatcaaggatgctttgctcctagcggaacagttatatgaagtagctgcgtaatatatgatggggcatcggcgacgagcaccaggcgggcattataagaagaataaaagcagttcaaggctctttattccctttttttttcttctgttcttcctctattgttttaggataaatgtaatggtagaagcaactgcttttcagatgttttgggagtgaatgataccgtgcttgaattttcc

SEQ ID NO: 385661 - DNA, 1237 bp, Oryza sativa
tactatagggaatgctgctccgcctgctggtgctgcggcggaattggggcgtcccacgcgtccggtgattcctgtggtgagcagcttggacggggtactaagatcaccctctacctcaaggatgatcagctggaataccttgaggaacgtcgcctcaaggatctggtgaagaagcattctgagttcatcagctaccctatctccttatggactgagaagacaaccgagaaggagatttctgatgatgaagacgaggaagagaagaaggatgctgaggagggaaaggttgaggatgttgatgaggagaaggaagagaaagagaagaaaaagaagaagatcaaggaagtctctcacgagtggaacgtgatgaacaagcagaaacccatttggttgaggaagccagaggagatcaccaaggaagagtacgctgctttctacaagagcttgacaaacgactgggaggaacatctggctgtcaagcacttctctgtggagggtcagcttgaattcaaggccatcctgtttgtaccaaagagagcgccatttgacctctttgacaccaggaagaagcaaaacaacatcaagctgtacgtacgccgggtgtttatcatggacaactgtgaggagttgatcccagagtggctcagctttgtcaagggcattgttgattctgaagaccttcccctcaacatctcacgtgagatgctccagcagaacaagatcctgaaggtgatccgcaagaaccttgtgaagaagtgcgtggagctcttctttgagatcgctgagaacaaggaagactacaacaagttctacgaggctttctccaagaatctcaagcttggcatccatgaggattccaccaacaggaccaagattgctgagctcctgaggtatcactccaccaagagtggtgatgagttgaccagcctcaaggactacgtaacccggatgaaggagggccagagtgagatctattacatcactggtgagagcaagaaggctgttgagaactcccccttccttgagaagctgaagaagaagggatatgaggtcctgtacatggttgatgccattgatgagtacgctgttggtcagcttaaggagtttgagggcaagaagctcgtctcttgccaccaaggaaggtcttaagctttgatgagagttaggacggagaagaagcggcaggaggactcaaggagaagttccagggtctttttcaaagtgatcaagaggttct

SEQ ID NO: 385662 - DNA, 915 bp, Oryza sativa
cccacgcgtgcgcccacgcgtgcggccacgcgtgcggcaaaccctctcaagccgcctctcgtttcttctcgtcctctccacgcccccgagatctcaggagcacaggaggaggaagccatggcgtcggagaccgagacgttcgccttccaggccgagatcaaccagctgctgtccctcatcatcaacaccttctactccaacaaggagatcttcctccgcgagctcatctccaactcctccgatgcattggataagattaggttcgagagcctcacggacaagagcaagctcgatgcgcagccggagctgttcatccacattgtccccgacaaggctagcaacaccctgtcgatcatcgacagtggtgtcggcatgaccaagtcggacctcgtcaacaacctcggtaccatcgccaggtcggggaccaaggagttcatggaggcgctcgctgctggtgctgatgtgtccatgattgggcagtttggtgtcgggttctactccgcctaccttgttgctgagagggttgttgtgaccaccaagcacaacgacgacgagcagtatgtgtgggagtcacaggccggtgggtccttcactgttacacgtgatacctctggtgagcagcttggacggggtactaagatcaccctctacctcaaggatgatcagctggaataccttgaggagcgtcgcctcaaggatctggtgaagaagcattctgagttcatcagctaccctatctccctatggactgagaagacaaccgagaaggagatttctgatgatgaagacgaggaagagaagaaggatgctgaggagggaaaggttgaggatgttgatgaggagaaggaagagaaagagaagaaaaagaagaagatcaaggaagtctctcacgagtggaacgtgatgaacaagcag

SEQ ID NO: 385663 - DNA, 483 bp, Oryza sativa
  unsure (1)..(483): unsure at all n locations
cccacgcgtccgctgcacagctgcacttgcatttcagccagcgacaagaaagcaccaaatctctttgcattcaagcagcaggcaacattgttgaggagggatcaccgatcggttcggagcagtgaactgaaatggcggcggcgggggacgtgcagatggcggagaaggagacgttcgcgttccaggcagagatcaaccagctgctctccctcatcatcaacaccttctactccaacaaggagatcttcctccgcgagctcatctccaactcttctgatgcgcttgacaagatccgcttcgagagcctcaccgacaagagcaagcttggacgcccagccggagctcttcatccgcctcgtcccctacaagcccttccaagactcttttcatcatcgacagcggggtcgggattaccaagtccgacctcgtgaaaattttggggaccattgggggttngggaccaaggggtttttnggggggttt

SEQ ID NO: 385664 - DNA, 467 bp, Oryza sativa
aaaaccctctcctaaccctagccgccgccgcagccgcagccgcagccgcgcgtcgtctcctccgcccgcgagctcctcttcccgccggcgagagatcaggagcacgcaaggcgcgcggccatggcgtcggagaccgagacgttcgccttccaggccgagatcaaccagctgctgtccctcatcatcaacaccttctactccaacaaggagatcttcctccgcgagctcatctccaactcctccgatgcattggataagattaggttcgagagcctcacggacaagagcaagctcgatgcgcagcgggagctgttcatccacattgtccccgacaaggctagcaacaccctgtcgatcatcgacagtgggtgtcgggcatgaccaagtcggaccttgtcaacaacctcggtaccatcgcaggtcggggaccaaggggttcatgggtgcgctcgctgctggtgctgatg

SEQ ID NO: 385665 - DNA, 459 bp, Oryza sativa
  unsure (1)..(459): unsure at all n locations
gcacacggagactccctctcctaaagccctaaccctagcctccaagtcgtcgtcctccggaagcttccggcctccgccgccgccgcagcgccatggcctcggagacggagacgttcgccttccaggcggagatcaaccagctgctgtcgctcatcatcaacacgttctactccaacaaggagatcttcctccgcgagctcatctccaactcctccgatgcgttggacaagatcaggttcgagagcttgacggacaagagcaagctggatgctcagccagagctgttcatccatattgttcctgacaaggcctccaacacactgtcgatcatttgacagtggtatttggtatcgaccaagtcagatctttgttgaacaacctggggtaccatttgccaaggtcaagggactaaggagtttatnggaggcactngctgcttggtgttgatgtgtccatgat

SEQ ID NO: 385666 - DNA, 162 bp, Oryza sativa
ctcaccgaggtccgcaagaacagcacctacacctggctcaggccgacagcaagacccaggttaccgttgagtacctcaacgacaccggcgccatggtgcccattcgcgtccacaccgtcctcatttcacccagcacgacgcagacgtcaccaacctagggat

SEQ ID NO: 385667 - DNA, 1719 bp, Oryza sativa
cccacgcgtccgatcttcctttcccacatcctcctccgccgccggctgcttcccaccggctcccgatctccgaggcaagcagcgccgcacccggccgctgccgccgccgccatggcgttcgagaagatcaaggtcgccaaccccatcgtcgagatggacggtgatgagatgaccaggatattctggcagtctatcaaggacaagcttatctttccatttttggatctggacattaagtactatgacttgggagttctccaccgtgatgcaactgatgacaaggtcaccgtggaggctgcagaggctactctcaagtacaatgtggctattaagtgtgcgacgattactccagatgaggctcgggttaaggagttcaacctaaagcaaatgtggaagagccccaatggcacaattaggaatattatcaatggcactgtattcagagagccaattatatgcaaaaatgtcccaaggcttgttccaggatggactaagcccatttgcattggaaggcatgcttttggtgatcagtaccgagcaactgatgcagttctgaaggggcctggcaagctcaagctggtttttgagggaaaggatgagcagattgatctggaggtgttcaacttcactggtgctggaggagttgctttgtctatgtacaacactgatgagtcaatccgagcttttgctgaagcttctatgacaactgcttatgagaagaaatggccgctttatcttagcaccaaaaacacaatcctgaagaaatatgatggaaggttcaaggatattttccaggaggtctatgaagctgggtggaaatccaagtttgaggctgccggaatatggtatgagcatcgtctcatcgatgacatggttgcttatgcacttaagagtgaagggggctatgtgtgggcttgcaagaattacgatggagatgtgcagagtgatttcttagctcaaggctttggttcattgggtttgatgacatcagtattggtgtgccctgatggaaaaacaattgaagctgaagctgcccatggcacggttacccgtcatttccgtgttcaccagaagggaggtgaaaccagcacaaacagcattgcttcaatctttgcttggaccagaggacttgcacacagggcaaagcttgacgacaatgctagacttcttgactttgcactaaaacttgaagctgcttgcgttggaaccgtggaatctgggaagatgaccaaagaccttgctcttcttattcacgggtcttcaaacgtcacaagaagccattacctgaacactgaagagttcattgatgcggttgctgcggagctccggtcaagactggcagccaactgagctttttacaagatactcttgccaacttcagtgcttcatttcccttcttttaaagtcattttggctgtatcaccattaccattcgagttctcattctggactgaatgaacatttacagcatcggtacaaattgttgtcgatccaagcagtccatagatgctgatatcacgtagacgggacctcccaaataaaggatatatagaacaatctgtcattgctgatagttgttttatccctatcagttagcgtccgactggaaaattatctatgttcctcatttggatggtttgataatttcttgattgataattcgtaccttggaatatgggctgaaggaagcacggtgctcaataaaaagcctaccaaaaa

SEQ ID NO: 385668 - DNA, 2127 bp, Oryza sativa
cggcatattctcttccacccccgaaaccactccaaaaccaaaccaaatctcgcggcgcatggcggcggcggcggtggcggcgaacggcggcggcgacggcgcgcaggcgtccaacgcgcccgcccccaccaggctcgcgtcggtctacagcgaggtgcagaccagccgcctcaagcacgcgctccccctcccctccgtcctccgctcccccttcgccctcgccgacggccccgccagctccgccgccggcaaccccggtgagatcgcgaagctgttccccaacctgttcggccagccgtccgtgtcgctggtgccgtcgccggagccggcgtccaccaggccgctcaaggtcggcgtcgtgctctccggcggtcaggcgcccggcggccacaatgtcatctgcggcatcttcgattacctgcaggaatatgcaaaaggatccgtcatgtatggattcaagggaggtccagctggagtcatgaagtgcaagtacgttgagctcactgcggattatgtgtacccctacagaaaccagggtggatttgatatgatctgcagtggtagggacaagattgaaacaccagagcagttcaagcaagctgaagacactgtaaacaaacttgatttggatgggcttgttgtcattggtggtgatgattcaaacacaaacgcatgccttcttgctgagtacttcagggggaagaacatgaaaactcgtgtcattggttgcccaaagactattgatggagatctgaaatgcaaggaggttccaacaagctttgggtttgacactgcttgcaagatatactctgaaatgattggtaatgttatgactgatgcacgctcaaccgggaagtactaccactttgtgaggcttatgggacgtgctgcttctcacattacattggagtgtgctctgcaaacacatcctaatgttgcactcattggagaagaggttgctgcaaagaaggaaactcttaaaagtgtcaccgactacattaccgacattgtctgcaagcgtgcagaacttggttacaactatggtgtgatccttatcccagagggtctgattgatttcatcccagaggttcaaaaactcattgcagaattgaatgaaattttggcgcatgatgttgttgatgaggcaggggcttggaaaagcaagcttcaaccagaatccaggcaactgtttgacttcctgcccaaaaccatccaggagcaacttttgcttgaaagagatcctcatggaaatgttcaggttgcaaaaattgaaacagagaaaatgcttattgccatggttgagactgaattggagaagagaaaagctgaggggaagtaccccgcacatttcagaggccaatctcacttctttggatatgaaggaagatgtggccttcctactatttttgattctaactattgctatgcgttaggctacggttctggggcacttctccaatgtgggaagacaggactgattacgtcggttggcaacctcgctgctcctgtggaagaatggaccgttggtggaactgcattgacatcgttgatggatgttgagaggaggcacggaaagtacaagccagtgatcaagaaggctatggtggaacttgacggggcaccgtttaagaagtttgcttcattgcgagatgagtggtccctcaagaaccattacatcagccctggtcccatccagttcagtggccctggaagcaacgatgcgaaccacaccttgatgttggaactcggcgccgaggcatagagagacacgacgataccgacgtgtaccttttaaattttttgttcttacagttttgaaaagttgagatggaacctcgcagagtgacctgcaggctccatatttgtggagtgctcaataagaggttccattgggagtttctgtggagtagagatatgtgtaccaataataactgatgttagctttgcatgatccattgctccatttttacacagaagttaacttggttttattggtagctctgggttttgttcaactggatgcgacgctataattatgggttttgttcaactggatgcgacgctataattatgaacataaataatccaggttgaggggcggttttggtttaaaaaaaaaaaaaaaaa

SEQ ID NO: 385669 - DNA, 3089 bp, Oryza sativa
tgggtttttggcgtcactcgcttctctctctcccctacgcgccgccggcgagatgcggagcctcgccgtcgcgagccccctcccgcccgccgccgcggttcgccgccggccacgcgcatccgcctccggaagggaagtgatttcacaatgttggaagtgtgagataaatcaggaccaacctttggggaactccctaaggataggtcactcacaaggtagtttgcaaagacatggttccaggaatttgctcgcagctgctgcggctatttcaattgaacaagctgaagtcagtacttatcttccaaaaggtgacatgtggtctgtgcacaagtttggtggcacctgtatgggaacaccccagagaattcagaatgttgctgatattgttcttggtgactcttctgagaggaagctgatcattgtttctgcaatgtccaaagtcactgacatgatgttcaaccttgtgcataaagctcagtcaagggataattcttatgtgactgcactggatgaagtttttaataagcatatggctgcagcaaaggaacttcttgatggagaagacctagcaagattcttggctcagttgcattctgacatcagtaacctgagagcgatgcttcgtgctatttttatagctggacatgcaacagaatcgttctctgatttcgttgttgggcatggagagttgtggtcagctcaaatgttgtcgtatgctataaaaaagtctggggtgccttgcagttggatggatacaagagaagttctagtagtgaaacctagtggttctaatcaggtcgatcctgactatttggaatctgagaagcgactccagaaatggttttcacgacaaccagcagagataataatcgctactgggtttattgccagtacagccgaaaacattcctactacgcttaaaagggatggaagcgacttctcagcatcaataattggatcccttgttagggcatgtcaggtcactatctggactgatgttgatggggtatttagtgcagatcctagaaaagttagtgaggctgtgatcttaagcacattatcttatcaggaggcctgggaaatgtcatattttggtgcaaatgttttgcatccccgcaccattatacctgtgatgaaagacaatattcctattgtcattaggaatatgttcaatctatctgcccctggaacaacaatttgcaagcagcctgctaatgaaaatgctgatttagatgcttgtgtcaaatcatttgctactatagacaaattggcccttgttaatgtggaaggaactggaatggctggtgttccaggtacagcaagtgccatatttagtgctgccaaggatgttggagctaatggtatcatgatatctcaggctagcagcgaacactcggtatgctttgctgttccagaaaaggaagttgcagcagtctcgacagccttgcatgttaggtttcgtgaggcattagcagctggaaggctatctaaggtcgaagtcattcgtgggtgcagcattcttgctgctgttggcttgaggatggccagtactcctggagtcagtgcaatcctttttgatgcattagcaaaggcaaatattaatgtacgagcaatagcccaaggttgcagtgaatacaatattactgttgtgttgaagcaagaagattgtgtgagggctttgagagctgttcattcaaggttcttcctctccaaaaccactcttgccgttgggatcattggaccaggtttaattggtggaacacttcttgaccagctgaaagatcaggctgctgttctcaaggaaaatatgaatattgatctacgtgttattggaatatctggctcaagaacgatgcatttgagtgacataggggtagacttaaaccagtggaaagaccttctacgaaaagaagcagaaccagcagatcttgatagttttgttcgccatttgtctgaaaatcatgtatttccaaacaaagttttggtggactgcacagcagatacatacgtagcatgccactattatgattggttgaagaagggtatccatgtcatcacgccaaataagaaagcaaattctggtccgcttgatcggtatctgaaattaaggactctgcagcgtgcatcgtatactcattacttttatgaagcaactgttggtgctggccttccaatcattagcaccctacgaggtcttctagagacaggtgacaagatattgcgtattgagggcattttcagtgggactttgagttatattttcaacaattttgaaggtacacgaacttttagtaatgttgttgctgaagcaaaagaagctggatatacagagccagatccaagagatgatctatcaggaactgatgttgccagaaaggttattatccttgcaagggagtctggtctgaggctcgagctttccgatattcccgtaaagagcctgttgccagaggcactgaggtcatgttcgtcagcagatgaattcatgcagaagctaccgtcctttgatcaggactgggacaggcaacgcgatgaagctgaagctgcaggagaagtgctgcggtatgtgggcgtggtggacgtggcgaacaggaagggccgggtagagctgcagaggtacaagagagaccaccccttcgcgcagctctccggctccgacaacatcatcgccttcaccacgtcgaggtacaaggagcagccgctgatcgtgcgaggccccggcgccggcgcggaggtcaccgccggtggcgtcttctgcgacatcctgcggctggcgtcctacctgggagcaccctcctaggctttaaccttgagcgtcctgccttcctcgacaaaaattgtctggaggaagatgagccgtattgattgtgcccgactggttattacatcatatatgggactggtagtatgcagtatgtatgttgtttctgaataagtgcgaggaaataaggtcttagaggtgctagatggtccttggatcaggtgttgtttttgccacacaatccagagccgcttgctatcgaactgccacattgtattggtgatttggagtgatctaataataatggcttaaatttctttttgctgag

SEQ ID NO: 385670 - DNA, 859 bp, Oryza sativa
ctgtcgcgtgggctccaattaaccaaagctaattaagctagctcaagctctaatccacatttagctagaatggcgccgtccaagtccacagccgccgccgggtcctcctcgtcctgctcgtcgcggcggcgggcggcggcgcagaggcggcggcgacgacgtgcgtggcgtcgctgctggagctgagcccgtgcctgccgttcttcaaggacaaggcggcgacggcggcgcggaggggtgctgcgcggggctgtcgtccatcgtgaagggggaggcggtgtgcctgtgccacatcgtgaaccacaccctggagcgcgccatcgggtccgacatccccgtcgaccgcggcttcgccctcctccgcgacgtctgccgcctctcgccgccggggtacatcatctcacctgcgccaacgagaaaggtggtgtgccgcctctctactcttgcccggctccatctgcctgagtatatatgagaaaagaataaatgttaccaaaggagggatttcaacatatctaaaagtcaagatggagtaactttggtatacaagacccacatatatatcacgttgttaaaggacaagtagatatttggattattggcatatactgatattatccatgcttaatattagtatatgtatattctgcaacatgcatggtcatacacattgttcaaatgaatgctaagtaacacggaacgtgtactagctcgtgctactgccgtcctatcccttgccaatggaaataaaatattttacattgtggtattaagcattaaagccatattgtattctaatattatcgggcggagattgcggattattcctaccacacttttaaataattacaatttctct

SEQ ID NO: 385671 - DNA, 1315 bp, Oryza sativa
  unsure (1)..(1315): unsure at all n locations
cccacgcgtccgcccacgcgtccgatctcctctccctctccgcccatttctcctctccacctgcgatccatccgcgcccgcgaggaggagggagccggacgccgccgcggggagagcaggggagagaaggagaggaggagatcgccgtcgccgtcgccgtcgccgtcgccgatctcgagcgggagcggagatggggctcacgttcacgaagctgttcagccgcctcttcgccaagaaggagatgaggatcctcatggtcggtctcgatgcggccggtaaaaccaccatcctctacaagctcaagctcggcgagatcgtcaccactatccccaccatcggttttaatgtcgaaactgttgagtacaagaacattagcttcaccgtttgggatgttggtggtcaggacaagatcaggcccctgtggaggcactatttccagaacacccagggcctcatttttgttgtggacagcaatgacagagagcgtgttgttgaggccagggatgagctccaccgtatgctgaatgaggatgagctacgtgatgctgtgctgctggtgtttgcaaacaaacaagatcttcctaatgccatgaacgctgctgagatcaccgacaagcttggtctgcactccttgcgccagcggcactggtacatccagagcacatgtgctacctctggtgaggggttgtatgaggggcttgactggctttccaacaacattgccaacaaggcttgaagcatcttggccgggcttaaatgaaaggaagacatggcggatatccctgagtgaacgctgcctttttacgtatcgaaactatatagtcatgacagataatgatgtggatgttttgggaagataaagctctttaggttccaccaccaaaggagctagctatcagattgtttttcgtggggtgttaaaaaatcgtgcgtgtttcagtttggtttttaatcgaaaggcttacggtgcctgacttttgtacctctgtactcgccacagatgttgtagtattgacttgtcttgggcatagcgtattgttacgtaatcctgttctgtgcagccaacccccaatatccttaccagtttatcccccgttgccttcctggccagcattctgctgcctttcttcttggatggcacttcattccttttcagtagctttccgtatgtttatattgaagtaagcgcgttgtaacgtcagcctgaaaattgcaaaccgatcatttcctgtgggctgtaagggtttcttggaacataagaattttacaggaatgggttttgatctnnnnnnnnnnnnnnnnnnnnnnnnnnnnn

SEQ ID NO: 385672 - DNA, 890 bp, Oryza sativa
  unsure (1)..(890): unsure at all n locations
ctcccccccaaatccatccgcttccaccccccagcccccgaattccatcgcagatcagatcaggtgaaaaaagaggagagaggaggggggaagatggggttggcgttcgggaagctgttcagccggctgttcgcgaagaaggagatgcggatcctgatggtggggctcgacgccgccggaaagaccaccatcctctacaagctcaagctcggcgagatcgtcaccaccatccccaccattgggttcaatgttgaaactgttgagtacaagaacattagcttcactgtctgggatgtggggggtcaagacaagatcagacctctttggaggcattacttccagaacacacagggtcttatctttgttgtggatagcaatgatcgcgaccgtgttgtggaagctagagatgagctgcacaggatgctgaatgaggatgagttgcgtgatgctgtgttgcttgtgtttgccaacaagcaagatcttccaaacgctatgaatgctgctgagattactgataagcttggattacattcccttcgtcagcgtcactggtacatccagagcacttgtgccacaactggcgagggtttgtatgagggcctggattggctgtccagcaacattgctagcaaggcttgatgcttgatacgtggacctttaagacatggagctgactaggagctatggcatgtatctcattcatatgtaggacgaagcactgtttcaatctgtttttgtaaggcatgtggcttcggcgagtccaatatttttgtaatgatacctcacttgaatgttccgtacttttggatattatttgtacctgttcattttgcacaaggatttacagcatgatggatgtttccgcgaaaaaaaaaaaaaaaaaaannnnn

SEQ ID NO: 385673 - DNA, 956 bp, Oryza sativa
tcgttcgcataaataaaagctcgcaccaccgccacaatccctgctcccgcccgcgccatcgcttcccccctccacccgtctcctccgtctccggcgccggcgccggcgagctcgccccccgcgattcgtgccctccgatcagaggcgaggcgggagaagagatggggctcacgttcaccaagctgttcagccggctcttcgccaagaaggagatgcggatcctgatggtgggtcttgacgcggccggaaagaccacaatcctctacaagctcaagctcggcgagatcgtcaccaccatccccaccatcggattcaatgttgaaaccgtggagtacaagaacatcagcttcaccgtctgggatgtggggggtcaggacaagatcaggcctctgtggaggcattatttccagaacacccagggtctcatctttgttgtggacagcaatgatagggaccgtgttgtcgaagccagggatgagctccacaggatgctgaacgaggatgagctacgtgatgctgtgctgcttgtctttgctaacaagcaagatctgccaaacgctatgaatgctgctgagatcactgataagcttggactgcactcccttcgccagcgacactggtatatccagagcacttgtgctacaacaggtgagggattgtacgagggcctggactggctgtccagcaacattgccagcaaggcctaaattttaacaagatttgcataagctaggggagctttggatggatcgatgggtatttagggctgtggttgctatcccaatatgtaaggtgtaattccggagctcaatagttattgagctttggttatgatttcacagttaaatggtttactgtactttgagccttaacatgtttctgaattaaacagctattacattgagttccgtcgaattattctgctttgggtggtcaaaaaaaaaaaaaaaaaaaaa

SEQ ID NO: 385674 - DNA, 1130 bp, Oryza sativa
  unsure (1)..(1130): unsure at all n locations
ccacgcgtccgcgcaagcgcaagcccagccgcctcgtcgtgttcgcgttcgtcgcgcggctccgacctccaaagccgccgctacccttcccgtcttcgtcgtcgccgcgcacgcagatcgcgaaccagcccgcgcgccgcgcagcagcgccgcggagaggaaaggagagctccgccgcgcaccccccgccaccatcttgtagggagagatggggctcacgttcacgaagctgttcagccgcctcttcgcgaagaaagagatgaggattctcatggtcgggctcgatgcagccggtaagaccaccatcctctacaagctcaagcttggcgagatcgtcacgaccatccccaccatcggatttaatgttgaaaccgtggaatacaagaacatcagcttcactgtttgggatgtcggtggccaggacaagatcaggcccctgtggaggcactatttccagaacacacagggactcatctttgttgtggacagcaatgatagggagcgtgttgttgaggccagagacgagcttcacaggatgctgaacgaggatgagctgcgtgatgctgtgctgcttgtatttgcaaacaaacaagatcttcctaatgccatgaatgcagctgaaatcactgacaagcttggtttgcattccctgcgccagaggcactggtacattcagagcacttgtgctacatctggtgaagggttgtatgagggtcttgactggctttccaacaacattgccagcaaggcttgagcgttttggcagctggatatctgaacaattcactagtgccggtttacatattatataacatatacaccctaccacacatagtgtgggtgcctgtgaaggaaaaaactcctttgtggaggctagtaccagattgttccttttcgtgggcactataagtgcttatattttgtttggttttacaacatttactgtgctgtccatatgtacccgtttgttctgagatggtctagtaaattgatatgctttgtcacggacttggtgtgagcattgtattttagtttttctatgatctagtgccagtgtagatattattttcctcagcttcaaacttccgtttttggttgtngnnnnnnnnnnnnnnnnnnnnnnnnnnnnn

SEQ ID NO: 385675 - DNA, 988 bp, Oryza sativa
cgccacgcgtccgattttccatcggaaatcccaccccgcctctccctccctctcccgcagatcagatcagatcagatccgatcaggtgaaaaagaggaggggggaaagatggggttggcgttcgggaagctgttcagccggctgttcgcgaagaaggagatgcggatcctgatggtcggtctcgacgccgccggaaagaccaccatcctctacaagctcaagctcggcgagatcgtcaccaccatccccaccattgggttcaacgttgaaactgttgagtacaagaacattagcttcactgtttgggatgtcgggggtcaggacaagatcagacctctttggaggcattacttccagaacacacagggtcttatctttgttgttgatagcaatgatcgggaccgtgttgtggaagctagagatgagctccacaggatgctgaatgaggatgagttgcgtgatgctgttttgcttgtgtttgccaacaagcaagatcttccaaatgctatgaatgctgctgagatcactgataagcttggactgcactcccttcgccagcgacactggtacatccagagcacttgtgccacaactggtgagggtctgtacgagggcctggattggctgtccagcaacattgctagcaaggcttgaggcttggaactccgaccgtaaaacttcgagctgactaggagctatgcatgtatctcattcatacgtaggacgaacactgtttcaatcttgttaggtgtcttcggcaagcccaatatttttgtaatgatacctcactccatcgttatcttctccgtattatttgtacctaccccaacctgtggtcgttttgcacaaggatttgcagtatgatgttcccgtgggcatgttgtgatgaacctgtccaataccttactacacattctaccagctttttgctccaaaacatatattgctgcccataggatttgatgaatgcctcatgtttagcagttcc

SEQ ID NO: 385676 - DNA, 1017 bp, Oryza sativa
  unsure (1)..(1017): unsure at all n locations
gtttgttgtgaaggcagcggacgcggcggaagagggggcttttgtaagagaagctcgtgacccaactcttcgccaagaaggagatgcggattcttatggtcggtctcgacgccgccggtaaaaccaccattctctacaagctgaagctcggcgagatcgacacaaccatccccaccatcggtttgaatgttgaaactgttgagtacaagaacattagcttcacggtctgggatgacgggggtcaggacaagatcagacctctctggaggcattacttccagaacacacagggtcttatcttcgctgtggatagcaatgaccgggcccgtgctcgcgaagcccagggatgagctccacaggatgctgaaccaggatgagctacccgatgctgtgctgcttgtctttgctaacaagcaagatctgccaaacgctatgaatgctgctgagatcactgataagcttggactgcactcccttcgccagcgacactggtatatccagagcacttgtgctacaacaggtgagggattgtncgagggcctggactggctgtccagcaacattgccagcaaggcctaaattttaacaagatttgcataagctaggggagctttggatggatcgatgggtatttagggctgtggttgctatcccaatatgtaaggtgtaattccggagctcaatagttattgagctttggttatgatttcacagttaaatggtttactgtactttgagccttaacatgtttctgaattaaacagctattacattgagttccgtcgaattattctgctttgggtggtcctccgtctctctcatctgccgtatcagactatgtatatgtgtactgcaaagtacgcggtacggctaattgtttctgtactcttcgttacggctagatggttgtctcgaggtattactctcgtagtaagggaagtaagggaaaagataataataggcaataaaacttgtttgtatgcttnnnnnnnnnnnnnnnnnnnnnnnnnnnnnnnn

SEQ ID NO: 385677 - DNA, 236 bp, Oryza sativa
gcgcccacgcgttcgaccacgcgtccgcccacgcgttcgaccacacatagtgtgggtgcctgtgaaggaaaaaactcctttgtggaggctagtaccagattgttccttttcgtgggcactataagtgcttatattttgcttggttttacaacatttactgtgctgtccatatgtacccgtttgttctgagagggtctagtaaattgatatgctttgtcaacaaaaaatattaagaa

SEQ ID NO: 385678 - DNA, 1643 bp, Oryza sativa
  unsure (1)..(1643): unsure at all n locations
cgcaccgctccaagaaaccctcgcccccacgacgctcgctctctcctctctctccctcttccgccgccgcgcttggggaaggaaggagaaagcaagccatcggcccccgcctccgcctccgaagggacattgttgctagttggtgatggctgagcaggctaatcaaccgactgtccttcagaagttcggtggccagttccaccttggctccagcttttctgaaggtgtacgggctcgcaacatctgcccatctgtctcatcctatgacaggcgctttaccacaaggagctacatgacccagggccttgtcaatggtggcatcaacgtcccaatgatgtcgtcctctccaatttttgctaatgctccagctgagaaaggtggcaaaaacttcatgattgatttcctcatgggtggagtgtcagccgcagtttcaaagactgctgctgctccgattgagcgtgtgaagctgcttatccagaaccaggatgaaatgatcaaggctggtaggctctcagagccatacaagggtattggggactgcttcggacgcactatcaaggatgagggttttgcttcattgtggagaggaaacactgccaatgtgatccgttacttccccacccaggctttgaactttgctttcaaggattacttcaagaggctgttcaacttcaagaaagacaaggatggttactggaagtggtttggtggcaaccttgcctctggtggtgctgctggtgcttcatctctgttttttgtgtactcccttgactatgctaggacaaggttggccaatgatgcgaaggctgccaagggaggaggtgaaaggcagttcaatggccttgtggatgtttaccgcaagactctcaagtcagatggcattgctgggttgtaccgtggatttaacatctcatgtgttggaatcattgtctaccgtggtctgtactttggaatgtatgattctctgaagccagttgtactcactgggtctctccaggacaatttctttgcaagctttgcccttgggtggctgatcaccaacggtgcaggtcttgcctcttaccccattgataccgtccgcagaaggatgatgatgacctctggagaggctgtcaagtacaagagctccatggatgctttctcccagatcctgaagaacgagggtgccaagtcactgttcaagggtgctggtgccaacatcctacgtgccattgctggtgctggtgtgctctcaggctatgaccagctgcagatcctcttctttggaaagaagtacggctcgggcggtgcctaaactggcagaaaatgatgacgaacaagtgtttattcctggtcctgcactaacgggatctggtgaattttgcctttttaacattgaaaacaataataattcttgtaggggagaacactccccgacattcgttttttggtggaagcgtttatctccaaacattgtcataggcggaggcgttaatcgcaaacagtttaccatcatagggttgagtttgagttgagtctggccggctctgttatgtctggcgattttcctaccatacattaccctcggtgaaatatcgaaagattattgagttgctgtctaaagttggtgttactattttgcgatgcttcattatttctactnn

SEQ ID NO: 385679 - DNA, 541 bp, Oryza sativa
cttgtttcttccaagtagacttgttacgcctgttggtgttcgagtggtaggagcccttgggcttttccaggttcagatcgacgcctccttcctctggacattgttgctagttggtgatggctgagcaggctaatcaaccgactgtccttcagaagttcggtggccagttccaccttggctccagcttttctgaaggtgtacgggctcgcaacatctgcccatctgtctcatcctatgacaggcgctttaccacaaggagctacatgacccagggccttgtcaatggtggcatcaacgtcccaatgatgtcgtcctctccaatttttgctaatgctccagctgagaaaggtggcaaaaacttcatgattgatttcctcatgggtggagtgtcagccgcagtttcaaagactgctgctgctccgattgagcgtgtgaagctgcttatccagaaccaggatgaaatgatcaaggctggtaggctctcagagccatacaagggtattggggactgctttcgacgcactatcaaggatgaggtttt

SEQ ID NO: 385680 - DNA, 674 bp, Oryza sativa
atttgcttcttcttcttcttcctcctctttgtttcacacttgtggtttgtggttgccaactttgtgagcgaccatggagatgaggagggtggcggtgctggggttggtgtggctggcggcggcggcgacggtggccatggcggatccgctgccgtcgtactacaacgcgatattcagcttcggcgactccttctccgacacgggcaacttcgtcatcatcaactccggcaagctccccaacatgcccaagttccctccgccgtacgcccgctgctccaacggccgcctcgtcatcgacttcctcgctgaggcgttcgggctgccgctgctgccgccgtcgggaaacaagggcaccaacttcagccagggcgccaacttcgccgtcatgggcgccaacggccctcggacctcaaatacttcaaggacaacaatggctggagcatccctcctttcaacacctccatgaacgtccagctccagtggttcgacgaggtcaagcaaaccatctgctactgccctcaagagtgcagggagttcttctccaaggcgctgctcgtgttcggcgagttcggaggcaacgactacagcttctcgtggaaggcggagtggagcctggagaaggtgaagaccatagtgcccagcgtggtggcctacatggcggggggcatcgagcg

SEQ ID NO: 385681 - DNA, 2796 bp, Oryza sativa
gtcgacccacgcgcctccacggccaccgacatccgccgcaatgctgtgtctcacctcctcttcctcctccgcgcccgctccgctccttccctctctcgctgatcgaccgagcccgggaatcgcgggcgggggtggcaatgttcgcctgagcgtggtttcttcgccgcgccggtcgtggcctggaaaggtcaagaccaatttctcagttcctgcgactgcgcgaaaaaacaaaaccatggtgactgttgtggaggaggtcgaccaccttcctatatatgatctggaccctaagttggaggaattcaaggatcacttcaactataggataaaaagatacctcgaccagaaatgcctgattgaaaaacatgaggggggccttgaagaattttctaaaggctatttgaagtttgggattaatacagttgatggtgccacaatatatcgtgaatgggcgcctgctgcacaagaagcacagctcattggtgagttcaataactggaatggtgcaaaacacaagatggagaaggataaatttggcatttggtcaatcaagatttcacatgtcaatgggaagcctgccatccctcacaattccaaggttaaatttcgctttaggcatgggggtggagcatgggttgatcgtattcccgcatggattcgttatgcaacttttgatgcctctaaatttggagctccatatgatggtgtacactgggatcctccagcctgtgaaaggtacgtgtttaagcatcctcgacctccaaaacctgatgctccacgcatctatgaggctcatgtggggatgagtggtgaagagccagaagtaagcacatacagagaatttgcagacaatgtgttaccacgcatacgggcaaataactacaacacagttcagttaatggcaatcatggaacattcctactatgcttcttttgggtatcacgtgacaaattttttcgcagtcagcagcagatcaggaacaccagaggatctgaaatatcttgttgacaaggcacatagtttaggattacgagttctgatggatgttgtccatagccatgcgagtaataatgtgaccgatggtctaaatggctatgacgttggacaaaacactcatgagtcttattttcatacaggagataggggctaccataaactctgggatagtcgtctgttcaactatgccaattgggaggtcttaagatttcttctttctaatttgagatattggatggacgaattcatgtttgatggcttccgatttgatggggttacatcaatgctataccatcaccatggtatcaataagggatttactggaaactacaaggagtatttcagtttggataccgatgtggatgcaattgtttacatgatgctcgcaaaccatttaatgcataaactcttgccggaagcaactattgttgctgaagatgtttcgggcatgccagtgctttgtcggccagttgatgaaggtggagtagggtttgacttccgcctggcaatggccattcctgatagatggattgactacctgaagaacaaagaggaccgcaaatggtcaatgagtgaaatagtgcaaactttgactaacaggagatatacagaaaaatgcattgcctatgccgagagccatgatcagtccattgttggtgacaagactatagcatttctcttgatggacaaggaaatgtacactggcatgtcagacttgcagcctgcttcacctaccatcaaccgtggcattgcactccaaaagatgattcacttcattacgatggcccttggaggtgatggctacttaaattttatgggcaatgagtttggccatccagaatggattgactttccaagagaaggcaacaactggagctatgataaatgcagacgtcagtggagccttgtcgacactgatcaccttcgatacaagtatatgaatgcatttgatcaagcaatgaatgcactcgaggaggaattttccttcctgtcatcatcaaagcagattgttagcgacatgaacgagaaagataaggttattgtctttgaacgtggagatttggtttttgttttcaattttcatcccaacaaaacttacaagggttacaaagtcggatgtgacttgcccgggaagtacagagtagctctggactctgatgctttggtctttggtggccatggaagagttggccatgatgtggatcacttcacgtctcccgagggaatgccaggagtaccagaaacaaatttcaacaaccgccctaactcattcaaagtcctttccccgccccgtacctgtgtggcttactatcgcgttgatgaagatcgtgaagagctcaggaggggtggagcagttgcttctggaaagattgttacagagtatatcgatgttgaagcaacaagtggggagactatctctggtggctggaagggctccgagaaggacgattgtggcaagaaagggatgaagtttgtgtttcggtcttctgacgaagactgcaaatgaagcatcagatttcttgatcaggagcaactgttggtgcccttgtaatctggagatcctggcttgccttggacttggttgtggttctttagcagttgctatgtacctatctatgatatgaactttatgtatagttcgccttaaagaaagaataagcagtgatgatgtggccttaaacctgagctgcacaagcctaatgtaaaaataaagtttcaggctttcatccagaataaaacagctgttcatttaccaaaaaaaaaaaaaaaaacccgcgcggcccgtacccaattcgccct

SEQ ID NO: 385682 - DNA, 1713 bp, Oryza sativa
caaaaaattagcagcacgcagccgcttcccaatcctctcctcttctccaagcggcaattcgcgcgaggttttctccgatcaaaccctcgaatccccccctcgcgaatccatcggagggtagccccgcgatccgcgtcggcgagagcggattccgattccgcgatggagcgggtgttctccgtggaggagatctccgacccattctgggtcccgcctccgccgccgcagtcggcggcggcggcccagcagcagggcggcggcggcgtggcttcgggaggtggtggtggtgtagcggggggcggcggcggcggaaacgcgatgaaccggtgcccgtcggagtggtacttccagaagtttctggaggaggcggtgctcgatagccccgtcccgaaccctagcccgagggccgaagcgggagggatcaggggcgcaggaggggtggtgccggtcgatgttaagcagccgcagctctcggcggcggcggcggcggcggcgacgacgagcgcggtggtggaccccgtggagtacaacgcgatgctgaagcagaagctggagaaggacctcgccgcggtcgccatgtggagggcctctggcacagttccacctgagcgtcctggagctggttcatccttgctgaatgcagatgtttcacacataggcgctcctatttccatcggaggcaatgctactccagttcaaaacatgctaagtggcccaagtgggggatcgggctcacagttggtacagaatgttgatgtccttgtaaagcaggccaccagctcttcatcaagggagcagtcagatgatgatgacatggagggagaagctgagaccactggaactgcaagacctgctgatcaaagattacaacgaaggaagcaatccaatcgggagtcagccaggcgctcaagaagcagaaaggcagctcacttgaatgagctggaggcacaggtatcgcaattaagagtcgagaactcctcgctgttaaggcgtcttgctgatgttaaccagaagtacaatgatgctgctgttgacaatagagtgctaaaagcagatgttgagaccttgagagcaaaggtgaagatggcagaggactcggtgaagcgggtgacaggcatgaacgcgttgtttcccgccgcttctgatatgtcatccctcagcatgccattcaacagctccccatctgaagcaacgtcagacgctgctgttcccatccaagatgacccgaacaattacttcgctactaacaacgacatcggaggtaacaacaactacatgcccgacataccttcttcggctcaggaggacgaggacttcgtcaatggcgctctggctgccggcaagattggccggacagcctcgctgcagcgggtggcgagcctggagcatctccagaagaggatgtgcggtgggccggcttcgtctgggtcgacgtcctgagaccgaaacccagagctgcttcggttctgaaagacactgcgagcaggaaatgatgattggacaggcgtagacattgctaatgctgtgaggttgatgattgttggtcgtcgtcgtcgtcattgtgcattctttgtaagggacacctcttagtaccctcttcttctaagggacttagtaccccttgtggatctcatcgtcctctcgtgccgctcgtgccgctcgtgccgaattcggcacgagctcgtgccgaattccagctgagcgccgtcgcta

SEQ ID NO: 385683 - DNA, 1989 bp, Oryza sativa
tcgttgggccccacccgcgcggcggaaggctctaggctctcctgcgaaggttctggaaggctcgagaggaggtgggagatgattctgttcgtgctcgcgactccggcggcgatcaacctcggggctctcgctgctgctcgtagccccttcatcctcttccgaccgcctcggacctaccctttctcgccctgcatctccccctctcccgcgccgtcggcctcatccgcgccctcaacctccacccgcgcgacgcctccccctccccctccagccgcggtgatggcgacgtccccgccggaaccctagtcgagaggcccatccacctcgcctccatggccaccgggaagagcggcggctcgtcggctgaagacctcggccaccacgccgggtactaccgcctccccaacacccacgacgcaaggctgttctacttcttcttcgagtcgagggggagcaagggggaggacgaccccgtggtgatctggctgacggggggccccggctgcagcagcgagctcgcgctcttctacgagaacgggccgttccacatcgccgacaacatgtctctcgtctggaacgactttggctgggatcaggagtcgaatctgatatatgttgatcagcccacgggtactgggttcagctacagctccaatccgcgcgacacccgtcacgatgaagctggtgttagcaacgacctgtatgcctttcttcaggccttcttcactgagcacccgaattttgctaaaaatgatttctatattactggggaatcgtatgctggacactatattcctgcctttgcaagtcgagtgtacaaggggaacaagaacagtgagggcattcacatcaatttgaagggttttgctattggcaatgggttaacggatccagcaatacaatacaaggcatacactgattactcattggatatggggttaattacaaaatcacagtttaacaggattaacaaaattgttccaacttgtgaacttgctatcaagctctgtggtacctctggcactatatcttgccttggcgcatatgttgtctgcaatctaatatgctcttccatcgagacaataattgggaagaaaaattattatgacatcaggaagccatgtgtggggagcctatgctatgacctctctaatatggagaagtttctccaattgaaatcagtcagagagagcctaggtgttggagacatacagtttgtatcatgcagcccaactgtatatcaggccatgctgctagattggatgaggaaccttgaagttggaatccctgaactccttgagaatgacatcaaagtgttgatttatgctggagagtatgatctcatatgcaactggttaggaaactcaagatgggtgaattctatggaatggtctggaaaggaggcttttgtgtcctcatctgaggaacctttcacagttgatggaaaagaagccggtattctgaaaagctatggacctttgagtttcttgaaggtccacgatgctggccacatggtaccaatggatcaaccgaaggtcgctctggagatgctgatgaggtggacctcaggaaacctttccaacgcatcctcgagcttccagaggctcgattttaccatgtgatatacacactctgtcctcttgtgacacgatcagaggaacatggtttccccataaattagtataaagtgcttagtaggcacgtcagaatgattttaggtgatgacaagctcactgctaccgtacagatgttatttcccttgtacggtgcttgagtcactgaagtatcggtgacgccactcgattgttagcatgtaataaagcttagaattgttatggacagaagccaatctctttgttatgagggctgtttatgtccaggtcttgtatgctattataatacttatggcttgtgctatggatggtataatctgtgctccaaactatacagtaaatatttttgcgggaattgggcgttccaaaaaaaaaa

SEQ ID NO: 385684 - DNA, 2492 bp, Oryza sativa
tttttcctcaaatcagaatcttatatacttttgtggaaaaaactgtcctttacaactgataatgcaagcatgaattagttaacctgccatgcttcacaatttgatgcatgcatgcctgcaatgtttatcatcaagaccctagcatctgaaatgtcagttgaacaacctggagataatgtcatctgctagctcaatctgcagcattgcagtgtcctcacaaagagatcctaggtttcaacctaattcgagtctctgtcatctgtttgcgtggtagtaagcatttagcctccaaggaagatccagaccaagaaattcatgtttcagagcattaatccttactccctagtaatccatctgtgccctcggatttcatacccacctaatccttgatcactgctctctcctccactctctgcgctcccgtacccagatttcctgcgatgcttccgtgatttcttctgaccactattatcacttaagctcccattcaggagaggatcgtcaataccgctgattaccctgctcaaggattgttgtcaggatatacatttttgtgggaatggggaattcttgccaaaatggaacctatgggaacaattaccagaacagcaaccggtttcagaatgaccgttttgcttctcggtacgttgatgggaatgatactgaggattgctactcgggctcgtcaagggccagcttagcgggtgctctgcggcaagggctgaacctaaagtcccctgtccttggatacaagactccaaatgtaagggagctctatactcttggccgggagcttggacagggacagttcgggaaaacatacctctgcactgagattagcacagggtgtcaatatgcatgcaagactatcttaaagagtaatctccgatgtgtgtcagatatcgaggacgtgcgccgtgaaatccagataatgcaccatctttcgggccagaagaatatagtgacaatcaaggacacatatgaggatgagcaggccgtgcacatcgtcatggagctctgtgcaggtggtgagctcttcagcaagattcagaagcgaggtcattacagtgaacggaaggctgcagagcttataaaaattatagttggcatcatagaaacatgccattcacatggagtgatgcaccgggatctcaagccagaaaatttcctcttactggacgcagacgatgaattctcggttaaagcaattgactttggtctatctgtgttcttcagaccaggtcaggttttcagagaggtagtgggaagtccatattatattgctccagaggtattggagaagcgttatggaccagaggctgatatatggactgctggagtgattctctatgtattgctgactggtgttcctccattttgggcagatacacaaagcgggatatatgaaaaagtactggatggacgtattgattttaaatcaaaccggtggcccaggatatctgacagtgcaaaggatcttataaaaaagatgctctgcccttatccattagagcgtttgaaagcccatgaagtgctaaagcatccatggatatgtgataatggagtggctactaatcgagctctggatccaagtgtacttcctcgtctcaagcaattttctgcaatgaataggttaaagaaattgtctctccagattattgctgagcgtctttcagaagaggagattgttgggttaagagaaatgttcaaggctatggacaccaaaaacagaagtgtggttacatttggtgagcttaagggactgaaaagatacagctcagtgttcaaggatactgaaattaacgacttaatggaagcagctgatgacaccacctccaccatcaactgggaagagtttattgctgcagcagtgtctcttaataaaatagaacgtgagaaacacttgatggcagcctttacatactttgacaaagatggaagtggttttatcacagttgacaagcttcaaaaggcttgcatggaacgtaacatggaagatactttccttgaagagatgattctggaggttgatcaaaacaatgatggtcaaatcgattatgctgaatttgtcacaatgatgcaaagcaacaactttggacttgggtggcaaacggtggaaagcagcctgaatgtagccctgagggaggcaccccaagtatactgaactcctgtcgcctggcacccccaagaattcagtttgttctcctgagcctttcatctgtttatcacaacacatagttgtggatttgagagaagagagccaagactagatggtttatcagtaatcaccctatagcagtggtggaagaagactctcttagtacctaatagcatataaatgtgtggtctaaagacatcgtatatgtatgaacctcataagttcgttcgttcgttcgtttggttggttggtttgctaccctgctatctaataataatatcaataatacccgaagaacccctcttggttctgcataaaaaaaaaaaaaaaaaaa

SEQ ID NO: 385685 - DNA, 500 bp, Oryza sativa
cggacctggccgggacgcgtgggcatttttttcctcctatcgattttgcaatttagcccctagggaggcagggaatccggctccggtccctgtgccgctccccccggctctccttgcctcccttgctcctccgatcgaggctgaagcggcttcaggatatacatttttgtgggaatggggaattcttgccaaaatggaacctatgggaacaattaccagaacagcaaccggtttcagaatgaccgttttgcttctcggtacgttgatgggaatgatactgaggattgctactcgggctcgtcaagggccagcttagcgggtgctctgcggcaagggctgaacctaaagtcccctgtccttggatacaagactccaaatgtaagggagctctatactcttggccgggagcttggacagggacagttcgggaaaacatacctctgcactgagattagcacagggtgtcaatatgcatgcaagactatcttaaagagtaatct

SEQ ID NO: 385686 - DNA, 1031 bp, Oryza sativa
ccacgcgtccgcggacgcgtgggcggacgcgtgggcaaacgtgtcgcccattctacaccgtctccatccatctcatctcgtcgtcttcccccccgcgagtccgcgaccccccgcgctataaaatccaaggccgcgatcgagatgcggaaatatcgagtcgccggattggtagccgccctgctcgtgctgcattcgctagccacgccgtccgctcaggccgaggcgcatcgcgcagggggagaaggggaggagaagatgtcgagcgacggagggccggtgcttggcggcgtcgagccggtggggaacgagaacgacctccacctcgtcgacctcgcccgcttcgccgtcaccgagcacaacaagaaggccaattctctgctggagttcgagaagcttgtgagtgtgaagcagcaagttgtcgctggcactttgtactatttcacaattgaggtgaaggaaggggatgccaagaagctctatgaagctaaggtctgggagaaaccatggatggacttcaaggagctccaggagttcaagcctgtcgatgccagtgcaaatgcctaaggcccatctcgtatcctatgtgtatcaagttatcaagaagatggggaataatatggtgtggatatagctattggacatgttaattatccacatgataatatggcttggatataaggatctcacacgataatatggcttggatatatagctattaaagattttacctatggcatatttcaatgtgtattagtactaagtaagaatgattgcaaggtgtattaactacaaatattgcaataaaagtccctgttactacaacttacaagtattttaagttagtcctctgactggatagaactctgtaatcattgttcacgttgccttgttttgaactggatagttttgaaatttgataacaggacgttatcatttgttcatgctacctcgttttaaattggctattattattttacctaaacgtgctgcaacattcaatggagtattcagaagttgtactttaaaggata

SEQ ID NO: 385687 - DNA, 501 bp, Oryza sativa
gtcgccggattggtagccgccctgctcgtcctgcattcgctagccacgccgtccgctcaggccgaggcgcatcgcgcagggggagaaggggaggagaagatgtcgagcgacggagggccggtgcttggcggcgtcgagccggtggggaacgagaacgacctccacctcgtcgacctcgcccgcttcgccgtcaccgagcacaacaagaaggccaattctctgctggagttcgagaagcttgtgagtgtgaagcagcaagttgtcgctggcactttgtactatttcacaattgaggtgaaggaaggggatgccaagaagctctatgaagctaaggtctggggagaaaccatggatggacttcaaggagctccaggagttcaagcctgtcgatgccagtgcaaaatgcctaaggtctagacatgtttgggtttgagaccccccaaacaaaattttcacctgttccatgcattaccatgtataatatatatatatatatatata

SEQ ID NO: 385688 - DNA, 625 bp, Oryza sativa
ccacgcgtccgcccacgcgtccgcccacgcgtccggccgccgacgcgccgatctcctccttccagttccaggctaagccatggcgagcaagaaccccaaggtgttcttcgacatcctcatcggcaaggccagggccggccgcgtcgtcatggagctcttcgccgacaccgtccccaagacggccgagaactttcgctgcctctgcaccggcgagaagggcctcggcgcctccggcaagccgctgcattacaagggttctgccttccaccgtatcatacccaacttcatgtgccagggcggcgacttcacccgcggcaacggcaccggcggcgagtccatctacggcgacaggtttgccgacgagaacttcaaagctgcgccacaaccggcccaggcgtgctctccatggccaacgcagggccaaacaccaacggctcccaattcttcatctgcaccacgcgtaccacctggctcgacggcaagcacgtcgttttcggcaaggtcgtcgacggatacaccgtcgtcgagaagatggagcaagtcggctccggctctggcggcacggccgagcgcgtcctcatcgaggactgcggccagctcgccgacgaccacgccaactgattat

SEQ ID NO: 385689 - DNA, 981 bp, Oryza sativa
  unsure (1)..(981): unsure at all n locations
ccacgcgtccgcggacgcgtccgcccacgcgtccggcctgaagtgaaacagcaaaaaaaatcaaacaaaaagaaaaaatattccccatctgtgaaattcgcaaaaccctagcgcggcggcgatgtcgaacacgagggtgttcttcgacatgaccgtcggcggagctccggcggggcggatcgtgatggagctgtacgcgaaggacgtgccgcggacggcggagaacttccgcgcgctctgcaccggcgagaagggcgtgggcaagagcggcaagccgctgcactacaaggggagcaccttccaccgcgtgatcccggagttcatgtgccagggcggcgacttcacccgcggcaacggcacgggaggggagtcgatctacggcgagaagttcgccgacgaggtgttcaagttcaagcacgacagccccggcatcctgtccatggcgaacgccgggcccaacactaacgggtcccagttcttcatctgcaccgtgccctgcagctggctggacgggaagcacgtcgtgttcggccgcgtcgtcgagggcatggacgtcgtcaaggccatcgagaaggtgggatcccgcggcgggagcaccgccaagccggtcgtcatcgccgactgcggccagctctcctagatctgtgctgttccccttcgcctttcgccagtatcagtcgtcttgagtcgtcgagtccctaaataaggaggaggtggtggtggtgttagtctttttatgagttcgtgtcgtgttggtgagatgagatcgcccatggtttggttggattaggcggagttcttggatcgattcggtggagttggatctgcgatccttcttggggttggttttaaatcttaattcgtgtcgctgcttctatgatatcgctatcaatcaatgagaacatttgggatccgtggattttctgtgatcttaaaaaaaaaaaaaaannnnnnnnnnnnnnnnnnnnnnnnnnnnnnnnn

SEQ ID NO: 385690 - DNA, 665 bp, Oryza sativa
  unsure (1)..(665): unsure at all n locations
tttcgatttacgtgtccgaaaatanattactaaccgaaaaaanannccccaacggggaaggtttcattaccctagcgcgtcgtttatgtccaacacgagggtgttcttcgacatgaccgtcggcggagctccggcggggcggatcgtgatggagctgtacgcgaaggacgtgccgcggacggcggagaacttccgcgcgctctgcaccggcgagaagggcgtgggcaagagcggcaagccgctgcactacaaggggagcaccttccaccgcgtgatcccggagttcatgtgccagggcggcgacttcacccgcggcaacggcacgggaggggagtcgatctacggcgagaagttcgccgacgaggtgttcaagggcaagcacgacagccccggcatcctgtccatggcgaacgccgggcccaacactaacgggtcccagttcttcatctgcaccgtgccctgcagctggctggacgggaagcacgtcgtgttcggccgcgtcgtcgagggcatggacgtcgtcaaggccatcgagaaggtgggatcccgcggcgggagcaccgtctagccgtgttgtcatcgtcgactgccgccagctttcttagacctgtgtctgtttccccctcattattccccattctattttcgccctttagtccttctcc

SEQ ID NO: 385691 - DNA, 806 bp, Oryza sativa
  unsure (1)..(806): unsure at all n locations
ttcatcggcctctttcccttcccttcccctccgagcgaatcccctcttctcctcctcgcggcgctcgctgagcatggcggcggagggggaggccaagaaggacagcgccagcaaccctcccgggggaggaggcggcggaggtggaggggaggaggaggactttcccagccctgctgtccaaccaggccctgtcttttatcggcgagaagggcgtgggcaagaccggtatgcccttgaattacaaggggagcaccttccaccgcgtgatcccggagttcatgtgccagggcggcgacttcacccgcggcaacggcacgggaggggagttgatctacggcgagaagttcgccgacgaggtgttcaagttcaagcacgacagccccggcattctgtccatggcgaacgccgggcccaacactaacgggtcccagatcttcatctgcaccgtgccctgcagctggctggaccggaagcacgtcgtgttcggccccgtcctcgagggcatggccgtcgtcaaggccatcgagaagggtgggatcccgcggcgggagcaccgccaagccggtcgtcatcgccgactgcggccagctttcctagatctgtgctgttccccttcgcctttcccagtatcagtcgtcttgagtcgtcgagtccctaaataaggaggaggtggnggntggtgttttttttttttttcgttctattattctacctattttatcataactttctactcttttttttttcattatcacctactcttttttattctctcttctttacattatttttttaatatttttttt

SEQ ID NO: 385692 - DNA, 1090 bp, Oryza sativa
cgacgcgtacgcccacgcgtgcggggattttagccgccgccgccgccgccgccgctcacccgcgccttcgacgagctccagcccgtagacctcgccggatctccccgatggccgtgaccttcaccgacctccacaccgccgacgggctcaaagccctcgagcagcacctctccggcaagacctacgtctccggaaacgcgatcagcaaggacgacatcaaggtgttcgccgccgtgccatcaaagcctggagctgagttcccgaacgctgctcgctggtatgataccgtcgctgcggccctcgcttcaaggttccctggcaaggcagttggagtgaatctgcctggaggaggtgcggcatcgtctgctgcagcggctgcgccagctgctaaggatgctgatgaagatgatgatgacctggatctttttggtgatgagaccgaggaagacaagaaagcagcagatgagcgtgcagcttccaaggcctcttcaaagaagaaagaaagcggaaaatcatctgtcctgttggatgtcaaaccatgggacgacgagactgatatgaagaagttggaggaggctgtccgcagtgtgcagatggagggtctcacctggggagcatcaaagcttgtgcctgtgggttacgggatcaagaagttgcagatcatgttgaccattgttgatgacttggtgtctgtggatagccttatcgaagaacatctgactgaagagccgatcaacgaatttgtccagagctgcgacatcgttgcgttcaacaagatttaaaatatcaaaaggggatgttgctacttatccaaaaactgggactgggactggttgttctggaagcatttttcatcccatcttattatccttcacagaaatgctagtttgagtttatttttgagtgatgcctgtcattagtgcctcttatctttaagtagttgaactgcagagcggcttgtaatggcgaaacatatgctatgtcaaagtacatccgtccatttttactgtgcaagttttgatgagtatgcgtttcgttgagtaaaaaaaaaaaaaggacgggcggccaaataaaaaggcataccaagacg

SEQ ID NO: 385693 - DNA, 1742 bp, Oryza sativa
ctctcctgctccccccccaacgccgccgccaccgccgccgccgccgccgccgaatccgagacccccatctcggattcacctctcccgcctccggcctccgtcaccgtctccccacgcgcgtcagtcatggcgggaatggcaccagagggatcccagtttgatgctaagcactatgattctaaaatgcaggagcttctgaaccaaggtgaaaccgaggagttcttcacatcttatgatgaagttcatgagagttttgatgacatgggtctccaagagaaccttctcagaggcatctatgcctatggtttcgagaagccttcagccattcagcaaaggggtattgtccctttctgcaagggtcttgatgtgattcagcaagctcagtcaggaacaggaaagactgccaccttctgttctggaattttgcagcaacttgactatgctgtggttgagtgccaggccttggtccttgctcctactcgtgagcttgcacagcaaattgagaaagtcatgcgcgcacttggtgactatctgggtgtgaaggttcatgcttgtgttggaggtacttctgttcgtgaggaccaaaggattcttgcaagtggagtgcatgttgttgttggaacacctggtcgtgtgtttgacatgctgcgtaggcagtccctccgtcctgattacatcaagatgtttgtccttgatgaagctgatgaaatgctttctcgtggtttcaaggatcagatttatgatatcttccagctcctcccgtcaaagatccaagttggtgtgttctctgctacaatgccccctgaggcccttgagatcacccgtaaattcatgaacaagcctgtgcggatccttgtgaagagggatgagctcactcttgagggtatcaaacagttttatgtcaatgtggagaaggaagaatggaagcttgacacactctgtgacctgtatgagacactggccatcacgcagagtgtcatctttgtgaacacccgccgcaaggtggactggctcactgataagatgaggggcagggatcacacagtttctgctacccatggtgacatggaccagaacactagggacatcatcatgagggagttccgatctggttcttcccgtgtgctcattaccacggaccttcttgcccgtggtattgatgtccagcaggtgtcccttgtcatcaactatgatctgccgacccaacctgagaactacctgcatcgcattggtcgtagtggtcgttttggtaggaaaggtgttgccattaactttgtgacccgtgacgatgagaggatgctgtttgacatccagaggttctacaatgtggtgattgaggagctgccggccaacgtcgctgaccttctgtgatcaagttcagaagagttatgttaaggggcctgataaggattgtttttgtctgaagtatcactgtcttatctggggggggggggagtgataaaggtgggggttctgttttaaaagtcactgtggtcgtagacaatttccaaatttttatgccatgttatgggaatttttgtagttgctaggctgtgctatgtgctggtgaggagggaggagtcttttacttttattatatctattgttaaaactatgtatgaccgaatgatgttatttatttgtgtcatggttgactatttgccatatgtaataaaccaccggtcctgctactgccactggtatctcgagtgaaaactgtttgctcctcggtgcaataagcc

SEQ ID NO: 385694 - DNA, 655 bp, Oryza sativa
tccgctggctcaccgacaagatgaggagcagggaccacactgtctctgccacacatggagacatggaccagaacactagggacatcatcatgagggagttccgatctggttcttcccgtgtgcttatcaccactgatctgcttgctcgtggtatcgatgtccagcaagtctcccttgtcatcaactacgacctgcccacccagcctgagaactacctccatcgcattggtcgtagtggtcggtttggcaggaagggagttgccattaactttgtcacccgcgatgatgagaggatgctgttcgacatccagaggttctacaatgtgaccatcgaggagctgccggccaacgtcgctgaccttctctagattatgtcttaggaagtaaggttctggataaaagtttgtttttgtttttgttttaatatgaccaactttctcgtttgggaggagtggtaaggacggggtctatttgaattgtggttaaggacggcttccatgtttttctcttttccgtatgcaactatgtttggaaatttttgtagctgttaggctgtgctgcttcctgggctagctgggagagggagacactactggaatatttactttctttattaagctatgcttgccttgtgttattattccaaaaaaaacca

SEQ ID NO: 385695 - DNA, 1357 bp, Oryza sativa
  unsure (1)..(1357): unsure at all n locations
nnnnnnnnnnnnnnnnnnnnnnnnnnnnnnnnnnnnnnntttttttttttttaattaaaccatctttttttccctcttattattactgtacatctgccgaaagaaatcctttcttgcagacgacgaatcaacaaattttacagcggaggagaggagatcgtatcatctcgctgccaccagcggcagcgagggtgttttgttgctgggcatgtccatgtcgagctccaggccgaagagcacgccttggtaggcctcgacgccatgcttgaggaagtagagctcccgcatccgccggaagacgtcccaggtgagcaagctgtcggaggcggcctggtggcaccgccccgccgcgcgcttcacctgcagcgccgccgccacgcgctccagcccgccgtacagctcgccgccgcagtgccgcatcatgtgcttcacgtcgtacacctcgtcgccgaagaagacgcgcaccaggttcaggaactcggccatggacctcggcagcttccgccccatgaggagcttgaccaggtaggcgaagtcgtaggcggagtggaaggtgacccacttgacggcgccgtgggagcagacgaggcccgacgacatgagcagcggcgccagcgcgctcgccctgacgccgtgctgcggtgcgcggcgaggtccacgccgtgctccgccagcagctggacggactcggcggcgtggcggtggacgcgctggtcgaagtcggagaggttgatctcgaaggcgaggccgggcgccgcggtgggggacgcggcgagggtgatgcccacctggatgaggtggagcgcgtccacgttgcggcggaggaggtcgtaccggtcgccggcggtgagcagggcggggtgcttggtcgggcggtggatcacgccgggaaacttccgtgtccatggacacgtacgggaagtgatcgatcgcgttgcggatgatccggaattcctcctccacgttgtgcgcccacacccggcgtatctccaccggcggcgcaggctgcctcttcctgccaacgccggcgggcgaactccgacggcacgaacgccatgccaggcggcggcggctgctgcttcttccgaccggcggccgcttcacccgcaacctgctgccgtgcagagcagacccggcgtgcaggccggttgttgtattagtttcagtcattgtgttgtacccgacatggtaagtagctattgtatttagcaggcaggcaggctaactgctgtggtcgtagtgtgatgtgaacctctatgagagagttggatactctcggtgttcagtagtgattaagttatgggttagtgtgtatgattctatgataactgcctcccctttcatgaggtttctaccc

SEQ ID NO: 385696 - DNA, 481 bp, Oryza sativa
agggtgatgcccacctggatgaggtggagcgcgtcccacgttgccggcggaaggaggtcgttaccggtcgcccggcggtgaagcaagggcggggtgcttggtcgggcggtggatcacgccgggaaactcccgtgtccatggacacgtacgggaagtgatcgatcgcgttgcggatgatccggaattcctcctccacgttgtgcgcccacacccggcgtatctccaccggcggcgcaggctgcctcttcctgccaaacccggcggcggcgaactccgacggcacgaacgccatgccaggcggcggcggctgctgcttcttccgaccggcggcgaacaacaactccggcggcggcttcttcctggcggcgacgaactctgacggcatgtcttaactcaaagattggatggatctcggcaacgaattcgaagcgcgatgagcaattggaatttggaaaaattcggaccgaattggagatgaaag

SEQ ID NO: 385697 - DNA, 502 bp, Oryza sativa
tagttctggatctgctgcgacgtctgcgagaagtggttccatggcaagtgcgtgcggatcaacccctgcgaaggcagagcacatcaaccagttcaagtgccctggctgcagcagcaagaggagccgagaatgtccacggaggggctcccggttgacatgttttagaatcgttaggaattggtgaagaggcggagaaccgcttcacccgcaacctgctgccgtgcagcagcagacccggcgtgcaggccggttgttgtattagtttcagtcattgtgttgtacccgacatggtaagtagctattgtatttagcaggcaggcaggctaactgctgtggtcgtagtgtgatgtgaacctctatgagagagttggatactctcggtgttcagtagtgattaagttatgggttagtgtgtatgattctatgataactgccgcccctttcatatggtttctagccaaaactccccttaatataatatataaaaaaaaaaaaacaaaaa

SEQ ID NO: 385698 - DNA, 1011 bp, Oryza sativa
ccacgcgtccgcccacgcgtccggccagccgccacaccgagctccgccgccgccaaccccaccgcggcgagctccgccttccgccggccgcgatggctcccaaggccgctgtaaagaaggctgatggaaagactcaacaagccttgaaggttgccaaggcagtgaagtctgggtcaatcaagagaaagtcaaagaagatccgcacttcggtgacatttcacagaccaaagaccctgaagaaggcgagagaccctaagtacccaagagtcagtgcacctggcaggaacaagcttgatcagtaccagatccttaagtatccccttaccactgaatccgcaatgaagaagatcgaagacaacaacactctggtcttcattgttgaccttaaggctgacaagaagaagatcaaggctgctgtcaagaagatgtacgacatccaggcaaagaaagtgaacactctgatcaggcctgatgggaagaagaaggcttacgtgaagctgacaccagactacgatgctctcgacgtggccaacaagattggcatcatctaagttagggtgctgcagtagtcttttgtgtcctggtctctatgtgattggagttttgtagctattacttagcgaatgcctcagtggctaagttatcactattttgctgcacacttccatgaatttgatataatgcaagtgacttatcgtgagctattatatgctttgcagttgatcacttgattgtaccgttgattgctttacgagccagctagtattttctttgcatgcccaaaattttgctttactatcccagtttttcaagttagtactataatgatctgatcaagcattcttacattatgatctggtaccttagcttggtttccatgttgctgtttgtgttaagagatcaattgttgacctcactatgtaactgacatgattcttgatttgttggtgaagctagaactacatctgtcaaggctttataatacagccacctgaaaaaaaaaaaaaaaaa

SEQ ID NO: 385699 - DNA, 771 bp, Oryza sativa
  unsure (1)..(771): unsure at all n locations
tatccacgcntccgcccacgcttccgggagggtgcccaccctcctcgcttcgcgtccgccgccgccgtcccggagaggtaagttcaagaggcagccctgtgaagctccaatggctcctaaagctgctcctgccaagaagggtgatgccaaggcccaagccttgaaggcagccaaggctgttaagtctgggacagccaagaagacgaccaagaagatccgcacatccgtgacatttcaccgccccaagaccttgaagaagtctagggaccccaagtacccaagagtcagtacccctgggaggaacaagcttgatcagtaccagatccttaagtatccccttaccactgaatccgcaatgaagaagatcgaagacaacaacactctggtcttcattgttgaccttaaggctgacaagaagaagatcaaggctgctgtcaagaagatgtacgacatccaggcaaagaaagtgaacactctgatcaggcctgacggcaagaagaaggcttacgtgaagctcactccagactatgatgctcttgatgtggccaacaaaattggcatcatttaagttagggcgctttttttcatcatgttgaacgtaagattttggttggctagttcttaatgttgaacagaaccttataacttgcaaaagaacatcttgagttttgttgagcgaatatcatctgtgtgancgcacatttactgaatcagtatatcaatgtcagttgtgcatcttcttccnnnnnnnnnnnnnnnnnnnnnnnnnnn

SEQ ID NO: 385700 - DNA, 589 bp, Oryza sativa
  unsure (1)..(589): unsure at all n locations
ccacgcgtccgcggacgcgtgggcggacgcgtgggcggttagaaatataaccccccaaaaaaagtagtattgaaaataaaaaaccaggttcttctttctgggaagacaacatttctttcatcctttttcattgtaagaacaaattgaaatcaaaataatatgattcaacctcagacccttttaaatgtagcagataacagtggagctcgaaaattgatgtgtattcgagtcataggagctgctagtaatcagcgatatgctcgtattggtgatgttattgttgctgtaatcaaagacgcagtgccccaaatgcctctagaaagatccgaagtaattcgagctgtaattgtacgtacatgtaaagagttcaaatgcgaagacggtataataatacgctatgacgacaatggcagcggttatcattgatcaaaaaggaaatccaaaaggaactcgcgtttttggcgcgatcgccgaggaattgagagaattgaattttactaaaatagtttcattagctcctgaagtattataaatactagtagacaagatatagttcaannnaaaaattagtagaatgtggtcacgtata

SEQ ID NO: 385701 - DNA, 721 bp, Oryza sativa
gccgccgccgcccgagcagagaagccgccttcgccgccgccgccgcactccaccgcgcgctctccgtctccggccgccgccagacaagatggtgagagtcagtgtcctcaatgacgctctgaaaaccatgtacaatgctgagaagcgtggtaagcgccaagttcttatccggccctcgtcaaaggtgatcatcaagttcctcatcgtcatgcagaagcatggttacattggtgagtttgagtttgttgatgaccaccggtctggcaagatcgtggttgagctgaatggacgccttaacaagtgtggtgtcatcagcccacgctttgatgttggtgtcaaggaaatcgagtcctggactgctaggctgcttccctcccgtcagtttgggtacattgtccttaccacctctgccggaatcatggaccacgaagaagcgaggcggaagaacgtcggaggcaaggtgctcggctttttctactagagatattcatctcacatggaagattttctcaggtgttagcaagaagagctttgttagtagtgggagtctgagaacttgttaagattattgtctcctatgtctgaattaccccccaatctgtttttattttgcttggcgactgagtgagctgctgtacttttctccatcgtatgatggctcagaatcttgcatgatgcgtgcctgcctttttgatactcctaatcttttacaagttactat

SEQ ID NO: 385702 - DNA, 637 bp, Oryza sativa
ccacgcgtccggtaaaaacaaaacccttgacgctcttcagatttttaagtatcatgatggtgtcgttgaagatgttggctggcatttgaggcatgaatacttgtttggctcagttggtgatgatcacaatttgctaatttgggatttacgttctcctgtgtctactaagcctgtacagtctgtggcggcacaccagggcgaggtgaattgtctggctttcaaccccttcaatgaatgggttgttgcaactggttcaactgacaagaccgtgaaactatttgatcttccgaagattgatacttccctacacacctttgattgccacaaggaggaagtatttcaagttggatggagcccaaagaatgagactatacttgcatcttgttgtcttggcagaaggttaatggtctgggatttaagcaaggtttgtcccaggaacagacaccggaggatgcggaagatggtcctccggagctcctgtccattcatggaggccatacaagcaagatctccgacttctcctggaacccgtgcgaggccttgttgattgctagcttcgctgaggacaacatccttcagatatggcaattggcaagagaacatttcccatgttgtaggttgatgtgccgactgattt

SEQ ID NO: 385703 - DNA, 443 bp, Oryza sativa
  unsure (1)..(443): unsure at all n locations
ccacgcgtccgcgtgaaaccctagcgactcttgtcccggcggcggcggcggcggcagcaaaggcgaagatgatctacgacgtgaactcccctctcttccgctccttcctcagccagaagggcggcgcctcctccgacaagaggaaaatggaagagcaaaagccaaaggagcagaggcccaaggccagtgagaacaagcctgtgatgaatgaatgaaggctttctgatgtgtttggtccttacaaggaataggcttcaatcatgtgattcctagtatgtttctgtactggttctgtttaagtgagtttgatgtgaaccatgtctggaacatctgagaacttcccagctatcaatctttaattttacatctgagaacttcccagctatcaatctttaatttagcttgataaaaaaaaaaaaaaaaannnnnnnnnnnnnnnnnnn

SEQ ID NO: 385704 - DNA, 1101 bp, Oryza sativa
  unsure (1)..(1101): unsure at all n locations
ccacgcgtccgcggacgcgtgggcggacgcgtgggcggacgcgtgggctcgatctcgtcttctctctctcgcaggactcgatcgcgatggcggcggaggtggcgaaggcggcggtggtgccggagtcggtgctgaagaagcggaagcgggaggagcagtgggcggcggacaggaaggagaaggcgctcgccgagaagaagaaggccgtcgagagccgcaagctcatcttcgcccgcgccaagcagtacgcccaggagtacgacgcgcaggagaaggagcttgtgcagctcaagcgtgaggctcggatgaagggtgggttctacgtcagccctgaggccaaacttctgtttgtggtccgcatccgtggtatcaatgccatgcaccccaagaccaggaagatcttgcagcttctgcggttgaggcagatcttcaatggtgtcttcctcaaggttaacaaggcaaccattaacatgctgcgcagggttgagccatatgttgcatatgggtacccaaacctgaagagtgtcagggaattgatctacaagaggggttacggaaagctcaacaagcagaggattcctcttcagaacaacaaagtcattgaggagggcttggggaagcatgacatcatctgcattgaggatcttgtccacgagatcatgactgtcggtccacacttcaaggaggccaacaacttcctgtggcccttcaagttgaaggcaccactcggtggcctcaagaagaagaggaaccactatgtcgagggtggtgatgccggcaaccgtgaggactacatcaacgagctcatccggaggatgaactaggcttttcttctgttactggggagaatgtctccttatctatgtatgcaacatggttatttttatctttaggctgtcttgagctggatactggatatgcaattttggcgttccaacaggaggtagacttggcctgtgtttacagtgagacttccggtgggaaatctgtacccgttggccctggggtttgttcctgtctggatgcttttgtttcttgatatgttcgctagttgtgcttgctttattgcnttnnnnnnnnnnnnnnnnnnnnnnnnnnnnn

SEQ ID NO: 385705 - DNA, 1441 bp, Oryza sativa
cccacgcgtacgcccacgcttccgcccacgcgtccgccaaaagagcagcgtcgcctctcctcctcctccctaacccctacgcttccagaaccttctcgaagctcccgctccccccccccttccgctccaatggcgaaggaaccgatgcgcgtgctcgtcaccggcgccgcaggacaaattggatatgctcttgtccccatgattgctaggggtgtgatgttgggtgctgaccagcctgttattctacacatgcttgacattccaccagctactgaatctcttaatggccttaagatggagctggttgatgctgcatttcctcttttgaagggaattgtcgcaacaactgatgttgtggaggcctgcactggtgtgaatgttgcggttatggttggtgggttccccaggaaggagggaatggaaaggaaggatgttatgtcaaaaaatgtctccatctacaaatcccaagcttctgctcttgaggctcatgcagcccctaactgcaaggttctggtagttgccaatccagcaaacaccaacgctctcatcttaaaagaattcgctccatccatccctgagaagaacattacttgcctcacccgtcttgaccacaacagggcacttggccagatctctgaaaaacttaatgtccaagttactgatgtgaagaatgcgatcatctggggcaaccactcatccacccagtaccctgatgttaaccacgccactgtgaagactcccagtggagagaagcctgtcagggaactcgttgctgatgatgagtggttaaatacggaattcatctctaccgtccagcagcgtggtgccgccatcatcaaggcgaggaagcaatccagtgccctatctgctgccagctctgcatgcgatcacattcgtgactgggttcttggcactcctgagggaacatttgtctccatgggtgtgtactctgatggttcgtatggtgtgcctgctggtctgatctactcgttcccagtaacatgcagtggtggcgaatggacgattgttcagggtctcccgatcgacgagttctcaaggaagaagatggacgcgactgcccaggagctgtcggaggagaagacgctcgcttactcatgcctcaactaaaactaagcaatacccagagggacagatagtgagcgattgcccgctcccgtgtttttgaataaaagagacttttaagttccatcacatagaaactgtttatctcagaccgctgcacatcgcgagatgtggagcgcagatgccgttgctggttttactccagtgtgtattgaggctttgtactagctcccttttttttgcctggtgattcgcaggacatttgctgaaaacattgaacccatttgacatctgatggaatcatggaccagtagcaagtacattttgcgaaagcataatctgcatcgggcttgggctg

SEQ ID NO: 385706 - DNA, 883 bp, Oryza sativa
  unsure (1)..(883): unsure at all n locations
tgataccatttgtcaagaaggcacctaaggtatcatttaagaagcctatcgggagtgtgagcgtttccgggcacaagtttgtaggatgtcccatgccatgtggtgtccagataacaagactggagcacataaatcgtctttctagcaatgttgaatatctggcatcaagagatgcgacgatcatgggaagtaggaacggccatgctccgatcttcctctggtacaccctgaacaggaaaggctacaggggcttccagaaggaggtccagaagtgcctgaggaacgctcactacctgaaggaccgcctcaaggaagctggaatcggcgccatgctcaacgagctgagcagcaccgtggtgttcgaaaggcccaaggacgaggagttcgtccggaggtggcagctcgcctgcgagggcaacatcgctcatgtcgtggtgatgcccagtgtgaccatcgacaagctggactacttcctgaacgagctgacggagaagcgggcgacctggtaccaggacggatcatgccagcctccctgcctcgccaaagacgtaggcgaggagaactgcctctgcagcatccacaagaagtgaagaggagcttatatattataacaaggagccatgttgcagtgtagctttgtgttgttgtcgtggcctgaagttagtactcctaatgcgttgtgttgtaccccgatgccttctgtatgtaataatgcgttatgcagtcagtgcagcttataatgttgttatcgtcaggatattacagttaagttaaaattgatgggatgaaaattgcatcatctttacctcttntgttntcnnnnnnnnnnnnnnnnnnnnnnnnnnnnnnnnnnnnnnnnnnnnnnnnnnnnnnnnnnnnnnnn

SEQ ID NO: 385707 - DNA, 403 bp, Oryza sativa
ccacgcgtccggtcaaacttcaaactgcctactgatcctactgtgcctattataaggataggtcctggaactggtcttgcaccttttaggggcgccttacaggaaagaattagcctctaaaaagtgtctggtgttggaactaggccatgccgtcctattctttgggtgcagaaaccgaaagatggactccatacacgaggatgagcgcaacaagttggttgagaccggtgcgctgtctgatttgatttgtagccttttcctcgtgagggtccttcataggatgtatgttcagcacaaaatggcagagaaggctcccgagatttggagcatcatttcttaagggggttatatttaatgtctgtggtgatgcaaaaggcattgccaagagatgtacacccgacac

SEQ ID NO: 385708 - DNA, 831 bp, Oryza sativa
  unsure (1)..(831): unsure at all n locations
ctcttcttctccttcgactttgttcgactcccctccttcccggcagaggagaggagaggagaggagaggactcatccatcatcatcaatcaacgccatgacgagctcctcatctccttcccgaaaggcgctgagcaagatcgcttgcaatcggctgcagaaggagctcgccgagtggcaggtcagccctccctccgggttcaagtacagggtctccgataacctccaaaggtgggtaatcgaggtcaccggagcggcgggcacgctctacgccggcgagacataccagctgcaggtcgacttccctgagcattatcccatggaggcgcctcaggtcatttttctcaacccggcgccgatgcatccacacatttacagcaacgggcacatctgtttagatatactgtatgattcttggtcacctgcaatgactgtcagttcggtctgcatcagcattttgtcaatgttgtcaagttcaccagcaaagcaacgccctcaagacaatgaccgctatgttaggaattgccgcaatgggaggtcgcccgaggagacaagatggtggttccatgatgacaaagtgtaagaggaactagttggcacttttgccattcagtaatcgtaataccttgaaatctcttgcaaggggaaaatgagatgaatgtaggcttactgttaagcatcactctattggaccaccaagcttaactgctgggttggtttgtacatgagctgcctgcacacatgtcaagtcatgaatataatattaccataaatgattatacagaataagcaagtgtaccatgcttgattctnctgaaaaaaaaanaaaaaa

SEQ ID NO: 385709 - DNA, 863 bp, Oryza sativa
  unsure (1)..(863): unsure at all n locations
gnacgcggctnncgnctncgctaccgccgccgccgccgccgcctcctcctcctcggcgcctctccgccgccgcctcagccatggtgaagtactcgagggaggcgaacaaccccaccaagtcctccaaggccatgggccgggacttgcgtgtgcacttcaagaacacccgtgagacagcttttgctatcaggaagttgcctctgggcaaggccaagaggtaccttgaggatgtgattgcccacaagcaagctatccccttccgtaggtactgcggtggtgttggccgcactgctcaagctaagtcacgccattcaaacggtcagggacgctggcctgccaagtctgctagattcattctggatcttcttaagaatgcagagagcaatgctgaggtgaaaggtctggatgttgatactctttatgtgtcccacattcaagttaaccaggcccagaagcagaggcgccgtacctaccgtgctcatggacgcatcaacccttacatgtcctccccgtgccacattgagcttatcctgtcagagaaggaagaaccagtgaagaaagagcctgagtctcagatcgcagccaggaaggcctagagaaggaagctttgccccccttctgcctgtttgttagatcagattattatatagcctgtggcttttggctgagtgaaaattttggctggttgtccgcttgtttggcctatcggaaattcggaatactactagctcatactttcgtcaaaaccgttatctctgtgtactgaatctattactatgttctcaaaacgcaaatcttggaggtgtttggattttctttaacctgattcggtcgtgaaaaaaataaaaaaaaaaaaaaaaaaa

SEQ ID NO: 385710 - DNA, 711 bp, Oryza sativa
  unsure (1)..(711): unsure at all n locations
acgccgaaaggggggatgtgctgcaaggcgattaagttgggtaaccgccagggttttcccagtcacgacgttgtaaaacgacggccagtgagcgcgcgtaatacgactcactatagggcgaattgggtaccggnctttttttttngaggtcgacccacgcgtccggttcccaacattcaagttaaccaggcccagaagcagaggcgccgtacctaccgtgctcatggacgcatcaacccttacatgtcctccccgtgccacatggagcttatcccttgtcagagaaggaagaaaccagtgaagaaagagccctgagtctcagatcgcagccaggaaggcctagagaaggaagctttgccccccttctgcctgtttgttagatcagattattatatagcctgtggcttttggctgagtgaaaattttggctggttgtccgcttgtttggcctatcggaaattcggaatactactagctcatacttcgtcaaaaccgttatctctgtgtactgaatctattactatgttctcaaaacgcaaatcttggaggtgtttggattttctttaacctgattcggtcgtgaactgatggtttttcttgtcgtaagtatgctgttgcacctggtgttgaacaactaaaaaaaaaaaaaaaaaaaaaactcgagggggggcccggtacccaattcgccctatagtgagtcgtattacaatt

SEQ ID NO: 385711 - DNA, 763 bp, Oryza sativa
  unsure (1)..(763): unsure at all n locations
aagactacagtaactggtgttgagatgttcaaaaagatactggttcatggagaggctggtgacaatgttggcctttcttcttcgtgggtcttaatgcttggtgatgtacagctttggccaggtggtgtcaaacctggtaccgttaagacgtaccaaaagtttgaggcggaaatttacgtccttacaaaggttgaaggtggtcgccacacagccttcttgtcaaattacagtccacagtcctactttaggactgccgatgtcactggaaaagttgtgttacctgatggcgtggaaatggttatgcctggtgataatgtaactgcaggatttgagttgatatcacctgttccccttgagccaggccagagatttgcgctgagggaaggagggaggacagttggtgccggagttgtttccaaagtttacggctgatctgtttccagttttttctgcgtagcgaactttagtaacaaatgaatgttcatagggaatcagatctatccgaccggcaatatgagagcaaaagagccagggactcgcagagcatcttctctgaattcatgagatgcagggatcgttggctcggccaccattccgaactagttattgcttttctttttccatgtctggttgttgctgtataacaacgcgtttagtcatcttaacacgtttttttgcccatagcttggtgactaaataagaaagattcatcataagcatcttaatggttnnnnnnnnnnnnnnnnnnnnnnnnnnnnnnnnn

SEQ ID NO: 385712 - DNA, 544 bp, Oryza sativa
gtgctccggtggtgccaatatctgctcagcttaagtataacattgatgtgatatgtgaatacattgtgaagaaaatccccattcctgaaagaacttcacttcccctccaaacatgattgtcattcgctcctttgatgtcaacaagcctggttcagaggttgatgaaattaggggtggtgtagctggtggcagcatcctcagaggagttttgagggtgaaccagaacattgaagtccgccctggcattgtaatgaaggatgaaagcggcaacatcaaatgcaccccaatctattcaaggattgtttcgctctatgctgagcacaatgagctccaatttgctgtgcctggagagtcttattggtgtgggaacaaccatggatcctaccttgtcacgtgctgatagactggccggtcaggttctatgagaaaggaggtcacttgctgacgtatatgtggtgctagagatcaacttattccttcttaagaggctgtcgggtgtgaggacaaaaagtactgtgaaagctggaaaggtctccatgctcac

SEQ ID NO: 385713 - DNA, 679 bp, Oryza sativa
ccacgcgtccggcgcgctgctgctcctgctcccctgcacgcacgctcgccgccgccggcgccatggccgccttcaccaccaccgccgccggatccgccgtcgccttcgcgcggccagccaaggcaatcaatgtcagttcagtctctttcgctggtttaaggaagaacaatgtggctttcactctgcagccagtgacacaaagatttgcagttctccgtgctgccaaaaaggaaacagtggagaaggtttgtgatattgtaaagaagcagcttgtacttcctgaaggcactgacgttactggtgcctctaagttcaccgatcttggtgctgattccctggatacggttgagattgttatgggtcttgaagaggctttcaagatcagtgtcgatgaatcaagcgcgcagtcaattgcgacagtggaggatgctgctgagctcatcgacaagattgtttctaatgcaaagtaaactcaatttcgttggaataatgtgtcaactgtcaaagagattaaactgctgttgttgttcgatgtccatttttctgtgctagattttactgtggagaggtgccttaatagcacatgattatcattggctgttttgcgatgctatgacattttaagctattgaagttgttgaaaaagaaatttcattgccgaggaaaaaaaaaaaaaaaa

SEQ ID NO: 385714 - DNA, 1641 bp, Oryza sativa
tctcccaccgcctcctccaccccctcctcctccccccgcagagccgaaaccctaactccgccgatctctccaggtgcccaaggggagggaggggatggcggcggcaccgatggcgccgcgtcgacgcggcggcgggatggaccccgtcctcctcgacgatatcatcccccccctgctcgaggtgcggacggcgcgcccggggaagcaggtccacctctccgagtcggagatccgccagctctgctctgtatcccgagaaatcttcctcagccagcccaatctcctcgagctcgaggcgcccatcaagatctgcggtgacatccatggtcagtacagtgaccttctaaggctttttgagtatggtggttttcccccagaagccaattatctattcttaggtgattatgttgatcgaggcaaacaaagtttggaaacaatatgcctcctccttggatacaaaatcaagtacccggagaatttttttcttctcagaggcaatcatgagtgtgcatcaataaacaggatatatggattttatgatgaatgcaaacgccgatttaatatgcgtctatggaaggtcttcactgattgttttaactgtctccctgtggctgcgctaattgatgataaaatattatgcatgcatggtggcctctctcctgatctgacacatttagatgagataaagagcttgccccgtcctactgatgtaccggatacaggtctgctatgcgacctactttggtcagatccaggaaaagacgttcaaggttggggcatgaatgataggggggtctcatacacttttggtgctgacaaagtttcagaattcctggaaaaacatgaccttgatcttatttgccgggcacatcaggttgttgaggatggatatgagttctttgccgacagacaacttgtcaccatattctcagctccaaactattgtggtgaatttgataatgcaggtgcaatgatgagtgttgatgaaactttgatgtgttcttttcaaattcttaaacctgctgagagaaaaggcaaatttatggcatcaaacaaaatgtgaaatggtgaagcccatttcgctcatagcgactctgaggctgtcctgtggatgcatctagacatcaacgtgcaggcgttaggcttgaagcaacattgggctaattctaccggagaagccaaataatatcatatctaacagttggtctggaaggttactcttcatggcaagtgccaattttttttccattttctgttatgatgcgtgaaactatcttgtagatgtagatatattgattatggaaggatgaagttgccaattgacctgaggcggtttccttctgcagccaggaaaaatctgaatatggagtttctgtttggtagtttcactatttaaaagcacatgtatcacttgtatggaggtaacaactttacttatgcaagcccgtgttttctgttgcttgtaagcaaaattggatgagtttttatcttgttttctatagcgtgctaatattgccaatggcaacaatttgcgaactgcaattctagaatgtactggatgattgaacctttaagcatttgcgaactgcaattctagagtctaaaagtcctctggaaaggctaatgaatggtttatcctgt

SEQ ID NO: 385715 - DNA, 401 bp, Oryza sativa
ctcgtgcgcatgtgattgaggccatgacctgtggtcttccaacatttgcaactgcctatggtggtccagccgagatcatcgtgcacggagtgtctggctaccacattgatccttaccagaacgacaaggcctcggcgctgctcgtggagttctttgagaagtgtcaggaagacccaaaccactggatcaagatctcgcagggtggacttcagcgcatcgaggagaagtacacatggaagctctactctgagaggctgatgactctctccggtgtctacggtttctggaagtatgtcaccaacctcgacaggcgtgagacacgcgcttacctggagatgctgtacgcctcaagtaccgcaacatggctaccaccgttccattgcattgaggagaggctcacc

SEQ ID NO: 385716 - DNA, 1368 bp, Oryza sativa
  unsure (1)..(1368): unsure at all n locations
cttttccacacgaagagatagagtgaaataccaagagagaaaaaaaagagagaataatttcccccttttctctcttccgtgccggagaatcgatggagattagggcgccgccgacgagcctgaggctcgcgccgccgccgccggcctccgccagcttccgccggaccgcgctcaggacctccttcctcaacggcagcgtttcacttagacttattcaagtgcgccaatcaaatgtcaacaggtttaagtgcaatggcataagaagtaacctccttgatagattttctagggttgtaaagtcctatgcaaatgcagtcttaagttcatttgaagaccctgaaaagatcctagaccaggctgttttggaaatgaatgacgatttgacaaagatgcggcaagccactgcacaggtcttggcttctcaaaagcggcttgagaacaaatacaaagccgctgaacaagcttctgatgattggtatcgggagggctcaacttgctcttcagaagggtgatgaggatcttgctcgtgaagcccttaagcggcgtaaatcatatgctgacaatggcaagctccttaaaggcccagcttgatcagcaaaagggcgtggttgagaacctggtatcaaatactcgggttcttgaaagcaagatagcagaggctaagcaaaaaaagataccttaaaagcccgtgctcaatcagccaagacttcaacaaaagtgagcgaaatgctggggaatgtaaatactagtggtgctctttcagcatttgagaaaatggaggaaaaagttatggcaatggagtcccaagcagaggcactcgggtccagttggcaactgatgatcttgaaggaaagtttgcattgcttgagacttcatcggttgatgatgaccttgcacaaatgaaaaaggaaatttctggaagctcttcgaaaggagaacttcctccaggtagaacggcagtcagcaattcaggagcagcgcgccctttccgagacatcgagattgagaatgagctaaatgagctgcggaagaaggccaatgaatattagattatgcagtttccttgtccctgcaccaggcctgacgaatcctttagactgaagaaccccgggaagatataggatggtcttcaggtttctccaatgcccctttgttgaaccaccagtgcagccttttttccccccaagagtataatggatgcgtaaaaaaaattctacattttgcagtgtgattgacattgactgtacagttagctacatagttatgtaaaagtcatattgctctttctagagctgactctgcatattttagtggaaagccaaaaatttccgtccttgtgcnnnnnnnnnnnnnnnnnnnnnnnnnnnn

SEQ ID NO: 385717 - DNA, 894 bp, Oryza sativa
gattcccggtcgacccacgcgtccgcggacgcgtgggccgaccactcctctcctcctcgtctaccttacctagcagcagcagctagctagcttaattagctatagcagccatggcggcgacggcactgagcagccaggtccggttgccgatgtccctgcgggtggcgacggcgccggcgccggcgcgcgtgtcggtgctgccggcgagcaacaagctgggagacaggctgcggatgcaggcgacgtacaacgtgaagctgatcacaccggacggcgaggtggagctgcaggtgccggacgacgtgtacatcctggaccaggcggaggaggaagggatcgacctgccttactcctgccgcgcgggctcctgctcctcctgcgccggcaaggtggtctccggcgagatcgaccagtccgaccagagcttcctcgacgacgaccaggttgccgccggctgggtcctcacctgccacgcctaccccaagtccgacgtcgtcatcgagacccacaaggaggacgacctcatctaatcaatcaagcaagctccatatttataaatctctcgatccatctccatgcgttcttgagtttatcaattaagaatataatgtcgtcgtccctatgctatgcaagcaaagtattacgtacgtatatgttgagcgagataacaaaacacaggcgtgcccgagggttaattgttgttgtttaattaatgtacgttttgctgcacctgcttaatcatatccatatcacattttggtgtcatatatgcatgcattactgtgtcatatatactactgtcaaatacgtactccatgtatttgaaagaacagttaattaataagctatatatcctagttctactaaaaaaaaaaaaaaaaaaaaacccacccc

SEQ ID NO: 385718 - DNA, 537 bp, Oryza sativa
ccacgcgtccggcaacacgtgcgcatcttgcatcagtaagggggtgatggttgctggctctcctacaactggcagagagtgcgtcttgctaacggctagttcgcagggagagagcgtgctgctgcgcgagtatctctccgagtatcaacgatcatgatgttctgtgagagactgaccagtcgtgactggcggctggctccttaccgtgaactcttacagaaagtacagacataatgatcgatacctacaatgaggacgacctaatgtaattaatcaagcaggctgcatatctataaatcgctcgagccatctccagtgcgttcttgagcttatcaattaagaatataatgtcggcgtccctatgctatgcacgcaaagtattacgtacgtatatgttgagcgagataacaaaacgcaggcgtgcccgagggttaattgttgttgtttaattaatgtacgttttggtgcacttgcttaataatatccgcgcccccctaagtgtgtcataaaagaaaaaaaaaaagggagagggctgta

SEQ ID NO: 385719 - DNA, 1585 bp, Oryza sativa
ctcatctcccttctccagatcaaaagacccttgctttccctcaggatcggccatggcgaccgccgttgcgtcccaggttgctgtctctgctccggctggctcggatcgcggcttgaggagttctgggatccagggtagcaacaatattagctttagcaacaaatcatgggttggcaccacattggcgtgggagagcaaggccacgcgaccgaggcatgcgaacaaggtgctctgcatgtcagttcagcaagcgagcgaaagcaaggttgctgtcaagcctcttgatttggagagtgctaacgagccgccgctcaacacatacaaaccaaaggagccttacaccgccacaattgtctcggttgagaggatcgtaggccccaaggctccaggagagacatgccacattgttattgatcatggtggcaatgtgccttactgggaggggcaaagctatggcattattcctccaggggagaacccgaagaagcctggtgcaccacataatgtccgtctttattcaattgcatctacaaggtatggagattcattcgatggaaggaccactagtttatgtgtgcgccgtgccgtttattatgatcctgaaactggcaaggaggacccctcaaaaaatggtgtctgcagtaacttcctatgtaattcaaaaccaggggacaaggttaaagtgacaggtccgtcaggcaaaataatgctcctgcctgaggaagatccaaatgcaactcacatcatgatagctactggcactggtgttgctccattccgtggctacctacgccgtatgttcatggaagatgtcccaaagtacagatttggtggcttggcctggctcttccttggtgtggctaacactgacagccttctctatgatgaagagttcacaagctaccttaagcagtatccagacaatttcaggtatgacaaagcgctaagcagggagcagaaaaacaagaacgctggcaagatgtatgtccaggacaagatcgaggagtacagcgacgagatcttcaagctcttggatggcggcgcgcacatctacttctgtggtttgaaggggatgatgcctgggattcaagacaccctcaagaaagtggcggagcagagaggggagagctgggagcagaagctatcccagctcaagaagaacaagcaatggcacgttgaggtctactaggatctaagtgtccaaggattatgattgttgcgcagtgaaaaagagaaaacaaaacgcatgatctgatgattcttgtagggtggtgtaaaatcatcattttttttctgaatatgaatcataaaatcacccatgtaattcataagcttctgcatcacatgatgaacgaaaggaagcatgtaacttttgcctgtcactattgcagctggtacctttgctatctaagaaaataaaaaactcgtgccgaattctataaaacccaaactaactaagagaggataaaaaaaaacaaaggactaaaatgaaaacacaaatctggatcgagtgcctttcatccctgtgagattaccatggagaaaaataggccttttgatggcctggtgggtttttcccagggtg

SEQ ID NO: 385720 - DNA, 1423 bp, Oryza sativa
gaattcgcggccgcctcctcctcacacctgcacacacttgcacacttgcacccaccctctctcctccatccagcaccgaccatggccgccgtcacggccgcggccgtctccacctccgccgctgctgcagtcaccaaggcatcgccgtcccccgcccactgcttcctgccatgcccgccaagaaccagagccgcccaccagcgcggcctgctgctgcgcgcgcaggtgtccaccaccgacgccgccgccgtcgccgccgcgccggccaagaaggagaagatatccaagaagcatgacgagggcgtcgtcaccaacaagtacaggcccaaggagccctacgtcggcaagtgcctcctcaacaccaagatcaccgccgacgacgcgcccggcgagacatggcacatggtcttcagcaccgagggtgagatcccctacagagaggggcagtccatcggcgtcatcgccgacggcgtcgacaagaacggcaagccgcacaagctcaggctctactccatcgccagcagcgctctcggcgacttcggcgactccaagaccgtttcactctgcgtcaagaggctcgtttacaccaacgaccagggagagattgtcaaaggagtctgctccaacttcctctgtgacttgaagcctggttctgatgtcaagataaccggaccagtaggcaaagaaatgctcatgcccaaagatcccaatgctaatattataatgcttgcgaccggtactggtattgccccgttccgctcattcttgtggaaaatgttttttgagaagtatgatgactacaagttcaatggtctggcttggctcttcttgggagtcccaactagcagttctttactctacaaggaggagtttgacaaaatgaaggcgaaagcgccagagaacttccgggtcgattatgctgtgagcagggagcagaccaatgctcaaggagagaagatgtacattcagaccaggatggcagagtacaaggaagagctgtgggagctcctgaagaaggaccacacctatgtgtacatgtgtggactgaaaggcatggagaagggtattgatgacattatggtgtcattggctgcaaaagatggaatcgactgggctgattacaagaagcaactgaagaagggcgagcaatggaacgtggaagtctactaattcttccaattttcctcacatctgtttcttttttttcttccatttgtatctgtgtgcacatctgtgcctgtgatcactctataatgttagataggcgtatatatatactgtttgtcatgttggttaaattcaagcttcatataagaattactacttatgtctgatccaaatactactatggtcaagtcaagagtaataataataataatgcaatgcgcggccgcgaattcactcaaaaaaaaaaaaaaaaaaa

SEQ ID NO: 385721 - DNA, 507 bp, Oryza sativa
ccacgcgtccgcccacgcgtccgcccacgcgtccgcccacgcgtccggaagatatccaagaagcatgacgagggcgtcgtcaccaacaagtacaggcccaaggagccctacgtcggcaagtgcctcctcaacaccaagatcaccgccgacgacgcgcccggcgagacatggcacatggtcttcagcaccgagggtgagatcccctacagagaggggcagtccatcggcgtcatcgccgacggcgtcgacaagaacggcaagccgcacaagctcaggctctactccatcgccagcagcgctctcggcgacttcggcgactccaagaccgtttcactctgcgtcaagaggctcgtttacaccaacgaccagggagagattgtcaaaggagtctgctccaacttcctctgtgacttgaagcctggttctgatgtcaagataaccggaccagttggcaaagaaatgctcatgcccaaagatcccaatggtaatattataatgcctgcgacc

SEQ ID NO: 385722 - DNA, 2435 bp, Oryza sativa
cagcgcaccaccaccaccaccaccaccaccaccaccaccgtctccagccatggcctcctccgcctccctgcagcgcttcctccccccgtacccccacgcggcagcatcccgctgccgccctcccggcgtccgcgcccgccccgtgcagtcgtcgacggtgtccgcaccgtcctcctcgactccggcggcggacgaggccgtgtcggcggagcggctggagccgcgggtggagcagcgggagggccggtactgggtgctcaaggagaagtaccggacggggctgaacccgcaggagaaggtgaagctggggaaggagcccatgtcattgttcatggagggcggcatcaaggagctcgccaagatgcccatggaggagatcgaggccgacaagctctccaaggaggacatcgacgtgcggctcaagtggctcggcctcttccaccgccgcaagcatcagtatgggcggttcatgatgcggctgaagctgccaaacggtgtgacgacgagcgagcagacgaggtacctggcgagcgtgatcgaggcgtacggcaaggagggctgcgccgacgtgacaacccgccagaactggcagatccgcggcgtcacgctccccgacgtgccggccatcctcgacgggctcaacgccgtcggcctcaccagcctccagagcggcatggacaacgtccgcaaccccgtcggcaacccgctcgccggcatcgaccccgacgagatcgtcgacacgcgatcctacaccaacctcctctcctcctacatcaccagcaacttccagggcaaccccaccatcaccaacctgccgaggaagtggaacgtgtgcgtgatcgggtcgcacgatctgtacgagcacccacacatcaacgacctcgcgtacatgccggcggtgaagggcggcaagttcgggttcaacctcctcgtcggcgggttcataagccccaagaggtgggaggaggcgctgccgctcgacgcctgggtccccggcgacgacatcatcccggtgtgcaaggccgttctcgaggcgtaccgcgacctcggcaccaggggcaaccgccagaagacccgcatgatgtggctcatcgacgaacttggaatggaggcttttcggtcggaggtggagaagaggatgccgaacggcgtgctggagcgcgcggcgccggaggacctcatcgacaagaaatggcagaggagggactacctcggcgtgcacccgcagaagcaggaagggatgtcctacgtcggcctgcacgtgcccgtcggccgggtgcaggcggcggacatgttcgagctcgcacgcctcgccgacgagtacggctccggcgagctccgcctcaccgtggagcagaacatcgtgatcccgaacgtcaagaacgagaaggtggaggcgctgctctccgagccgctgcttcagaagttctccccgcagccgtcgctgctgctcaagggcctcgtcgcgtgcaccggcaaccagttctgcggccaggccatcatcgagacgaagcagcgggcgctgctggtgacgtcgcaggtggagaagctcgtgtcggtgccccgggcggtgcggatgcactggaccggctgccccaacagctgcggccaggtgcaggtcgccgacatcggcttcatgggctgcctcaccaaggacagcgccggcaagatcgttgaggcggccgacatcttcgtcggcggccgcgtcggcagcgactcgcacctcgccggcgcgtacaagaagtccgtgccgtgcgacgagctggcgccgatcgtcgccgacatcctggtcgagcggttcggggccgtgcggagggagagggaggaggacgaggagtaggaacacagactggggtgttttgcttgctccggtgatctctcgccgtccttgtaaagtagacgacaatatgccttcgcccatggcacgcttgtactgtcacgttttggtttgatcttgtagcccaaaagttgtgttcattctcgttacagtcttacagaggatgattgattgataaataaagaagaaacagattctgtcaagtttggcaccgatgcgaagtacattgccgtaggttctatggatcgtaacctacggatatttgggcatccgggagaagatgatcaaatggacgacgcaaagccatcggaagagtgatgaaaccaattgtacttcatttggcctgcgtaaattgctccctgtttgtgtgttttgacggtggatgagctggctgagattggaggcacataacaacgggagacgagaagttccttgcaggagcaatttggtgggctttggtcgatgtaaacaaatttgacattgttattgtatttgtaggccttactacctaatgaggatacggtttgttttggagatgaatacaatgctgaagtgctcgacttgcggacatgccaaaaatctagaatgtgtttaaaaa

SEQ ID NO: 385723 - DNA, 1021 bp, Oryza sativa
ccacgcgtccgcccacgcgtccgcccacgcgtccgcccacgcgtccggggaaattacaattgcatccatacattgaaagatcacactgccgaggttgaagctgttacagtccatgcgactcagaagtactttgtgactgcttccaaggataatacttggtgcttctacgatattccatcaggatcttgcctcacacaggttggcgagtcttcaggacaagagggatatacatctgcatctttccacccagatggtcttatcctggggacagggaccactgaagctgttgtcaaaatttgggatgtgaagacgcagccaaatgttgcaaagtttgaggggcatgttggaccagtgactgctatgtccttctctgaaaatggttacttccttgcgactgctgctctcgatggagtcaagctttgggatcttcgaaaattaagaaactttaggacgatatcaccttatgactcagacacgccaacaaattctgtggaatttgactttagcggaagttatctagctgttggtggttcagatacaagggtttaccaagtagcaaatgttaagcttgaatggaatcttgtcaagaccttaccagatttgtcaggcacagggaaagtgacaaacgtcaagtttggcaccgatgcgaagtacattgccgtaggttctatggatcgtaacctacggatatttgggcttccgggagaagatgatcaaatggacgacgcaaagccatcggaagagtgatgaaaccaattgtacttcatttggcctgcgtaaattgctccctgtttgtgtgttttgacggtggatgagctggctgagattggaggcacataacaacgggagacgagaggttccttgcaggagcaatttggtgggctttggtcgatgtaaacaaatttgacattgttattgtatttgtaggccttactaacttcctaatgaggatacggtttgttttggagatgaatacaatgctgaagtgctcgacttgcggacaaaaaaaaaaaaaaaaaaa

SEQ ID NO: 385724 - DNA, 3322 bp, Oryza sativa
gattcgccttctcccccccgaatccaaaccctctcaaatgcagatgctgctccacgccaattccctcctcctcctcgcgccgacgacctcgcggctctccgcctccgcctcgccggggagatcggggacggcccggccgctgcctccgccgcagggcacgcgcattccgcccgccccgccgctcgcgggacacggaggccgcccgccgtcgccgcagcctcgccgcggacgcgatggggtgggggaggagtgcgccgccgccgtggcttcccaggggttcgtgacggatgcgagggcatactgggtgacaaggtctctgattgcctggaatgtaaacgatcaagacacctccctcttcctgtatgcaagcagagatgccacgatgcacgtatctgatggggccattcatggttatgattcaaaaattgaactcgaaccagaacatgccagccttccagacaatgtggctgagaagttcccgtttatcagaagttacagaaccttcagagtccctagctctgttgatgtcgcgagccttgtgaaatgccaactagctgtcgcttcttatgatgctcatgggaggcatcaagatgttactggattgcaactacctggtgtattggatgacatgtttgcttatactggaccacttggtgcagttttcagtgataaagatgtcgacctctacctttgggctcctacagctcaggatgttagagtatgcttctatgatggtccagcaggacctttactgcaaactgtgcaactcaaggagttaaatggtgtttggagtgttactgtaccaagatacccggagaaccagtactatttgtatgaagttaaggtttatcatcctagtacatcacaagttgagaaatgtttagctgatgatccctatgccagagggctttctgcaaatggcacacggacttggttggttgacattaatagtgaaactttaaagccagcttcctgggatgaattgtcagatgaggagccaaaccttgagtccttctctgacataagcatctatgagttgcatatccgtgatttcagtgctcatgatagcacagtggactgtaactctcgtggaggattcgtgcatttacatttcaggttgttcagacttaatttactgaacgatttctgttcaccacctataacaaaacatcctggtcgcattatggaaactgtgatgcaggattcagcaggaatacgtcacctgagaaaattgtctgctgctggcttgactcatgttcatttgttaccaagctttcattttgctagtgttgatgacaacaaaagcaattggaaatttgttgatgaggctcagctggcaaaactccctccaggttcagatgagcaacaagctgcaatagtatctattcagcaagaggatccttacaattgggggtatgaccctgtactctggggggttccaaaaggaagctatgcaagtaacccagatggtcctagtcgtattattgaataccgacagatggttcaggccctgaatcgcataggtcttcgtgttgtcatggatgttgtatacaatcatttagactcaagtggcccctttggtgtctcctcagtgcttgacaagattgttcctggatattaccttaggcggaacgttaatggtcagatcgaaaatagtgcggctatgaacaatacagcaagtgagcatttcatggttgataggttaaccgtggatgaccttttaaattgggcaataaattacaaagttgatgggttcagatttgatcttatggggcatatcatgaaaagtaccatgataagagcaaaatctgctattcgaagccttacgagggatgtacatggagtgtatggttcaaagatatacttgtatggtgaaggatgggactttggtgaggttgcacaaaataagcgtggaataaatgcatcccagattaatatgagtggcacaggaattggtagtttcaacgataggatccgcgattctgttaatgggggtaatccatttggtaatcctctacagcaaggcttttctaccggtctgttcttggagcctaatggatattatcagggtaatgaagcagataccaggcgtgaacttgctacatatgctgatcacatacagatcggactagctggtaacctgaaggattatgtactaagaactcatactggagaagctaagaagggatcagacatttacacttttgatggatcaccagttggctatacttcatcccctgtagaaactataaactatgtttctgctcatgataatgagactctgtttgatattgtcagtataaagaccccaattggcctatcgattgatggagaatgcaggataaatcatttggcttctagcatgatcgcattatcccagggaatacctttcttccatgctggtgatgagatacttagatctaagtcacttgatcgagattcatataactctggtgattggtttaaaaagcttgatttacatatgaaccaaccaattgggtgtagactcctccaagagataagaatgaagaatatgcatttgataaaaccaagattggaaaacccatctttcagacctttgaaaaatcacattctttcctgcttcgacaattttgttgacatcttgaagatcagatactcctcaccgctctttcgtttaagtacagcaagtgacattgagcaaagggttcgctttcacaacacaggtccctcgatggtaccaggagttattgtcatgagcattaaagatgctcaaaatgaaaaatgtaaaatggctcagttagataaaaacttctcttatgtcgtgacgatcttcaatgtctgtccacacgaagtgtctattgaaatccatgatctcgcttcgttggggcttgaattgcatcctattcaggtgaattcatcggatgctctagtcaggcagtcagcatacgaggcgtccaaaggtcgattcaccgtgccaagaagaacaactgcagtgttcgttcaacctagatgttgatgcctttgggaaaacgttcatattatgtcgaaaaatatgaatgaagataagagaataaaagtcctcaagttgaatattcctgaagaaataaatggaagaatatgaagagactgggctagtatactaatagtatagttttagagaaaaaaaatacatacttgtagtatcgaataaagtgcccaagtttcgacatgctttgtcatctccgtaagggtattgtattgtactgttgtgattatcacaaacaaacaaaaaagacatacttatagttacatggaaatatggcatgctaagtaaataaaaatgctccctttgtttcatata

SEQ ID NO: 385725 - DNA, 883 bp, Oryza sativa
gcggccgcagcacccaaaccctcccctctaccccgccgccgccgccgaggaaggggcaagaggaagccggcgaagatgaagaccatcctggcgtccgagacgatggagatcccggagggggtgacggtgcaggtcgccgcgaaggtggtgacggtggagggcccccgcgggaagctgacccgcaacttcaagcacctcaacctcgacttccagctgctggagggcggccgcaagctgcaggtggacgcgtggttcggcacccgccgcaccatggccgccatccgcaccgccatctcccacgtccagaacctcatcaccggcgtcaccaagggctaccgctacaagatgcgcttcgtctacgctcacttccccatcaacgcctccatcaccaactccaacaccgccatcgagatcaggaacttcttgggcgagaagaaggtgaggaaggttgacatgctcgagggggtgaccatcttgcggtcggagaaggtgaaggacgagctcgtcctcgacggcaacgacatcgagctcgtctctcgctcagcagccctcatcaaccagaaatgccacgtgaagaacaaggatatcaggaagttcttggatggtatctacgtgagcgacaagggtaccatcacagaggatgcgtaaactcctatcttcacctagtatcatgaagtgctgtttcttgtctcccgtgtctgatcatcctctgagttgcaattttctgagagactgaattttgtaatggtgggttatttaggatgtaatggagcatggtatcttatcctacatattgtttctgtttgcggcggccgcgtctatttatcatcccctaaaaaaaaaaaaaaaaaaaaaaaaaaaggggccgctcgcgatctagaac

SEQ ID NO: 385726 - DNA, 1303 bp, Oryza sativa
  unsure (1)..(1303): unsure at all n locations
gccgangcggcggcgcctgtggtggatggctccccgccgaagctggcggaggggtactacgagatcgaggacatccgccgccgccgcctccgcaaggggaagctccagtaccttgtcaaatggcgtggatggccggaaagtgctaacacatgggagcccctagaaaacctgagtgcctgctctgacattattgatgctttcgagatgcggttacaatctccaaggcccggtcggaagcgtaacgnnaagataacaactactccagtagcaggctcaaacccatctcatggtaaacggggccgccctcgcttggatgctaagtcccacactcgagctcctgcaccagaacctaagcaactgccctgtcggacaagtagtaggagagcgactaattgtagtagtaagacagttgcagggcttgatgcgtcagggagtgtggtgaggaaccagcttgcacagaacattgtacaggagggtagttccagtgtgatttcaaggacaccatgtcaggagctaccgctctcaattaggttgacggaccaacaaaacgagcatcaccttgtgaatggttcgtctaattctgagaacttagtgaaggtacctccatctcagggtggccaggtaactggtgccaagaagcgtaaatctggaaatgtgaggaggtttgagcagaataaaccaacacaaggacaaggagaatgtggagcattagtggtggctgaggatgttggttccactggaaggagaaactggcgataagaataagacagagggctggcctaaccgagttcatatcaccaagatcatcaagccagtgcgatttgcagcagctgtgaacaacgatgtgcagcaagtttcaattacattcaaagcactcaggtctgatgggcaggaagtcatggtggacgacaaagaattgaaagcaaataatcccttgctgcttattagctactacgagcagtgccttcgttataatccgacttcgtgagagatgaactgaaggaactgggtttagctgcctgtgtatttaattagcatttgtgtgtttagaagcttgtagctctatgggcttgataatttagtctggtcttgcagtaggttgctaaatgcaagaaatgtattgcttggtctccccactgattgcttattcgcgccatcttatgtgtaacattttgaacagtggggagatatgtgtaatctatgcttagggatcgtatgtttcttttctctatgtttagttatttgggatcgtcgtgacctgcatgcatcttttctctatgtttagttatttgggatcgtcgtg

SEQ ID NO: 385727 - DNA, 577 bp, Oryza sativa
  unsure (1)..(577): unsure at all n locations
gggtaacgccagggttttcccagtcacgacgttntaaaacgacggccagtgaattgtaatacgactcactatagggcgaattgggtaccgggncccccctcgagggggtgaccatcttgnggtcggagaaggtgaaggacgagctcgtcctcgacggcaacgaccatcgagctccgtctctcgctcagcagcccctcatcaaccagaaatgccacgtgaagaacaaggatatcaggaagttcttggatggtatctacgtgagcgacaagggtaccatcacagaggatgcgtaaactcctatcttcacctagtatcatgaagtgctgtttcttgtctcccgtgtctgatcatcctctgagttgcaattttctgagagactgaattttgtaatggtgggttatttaggatgtaatggagcatggtatcttatcctacatattgtttctgtttgcgattatgaagtctatttatcatcccctaaagacagtttactggaagcattcgtggttagataaacagcataatgctacttaaaagtgtgagctggtatgttttcccctgcntaaaaaaaaaaaaa

SEQ ID NO: 385728 - DNA, 416 bp, Oryza sativa
  unsure (1)..(416): unsure at all n locations
ccccccgccccgccgccgccgccggagagggagagagagagagagagagagagagagagagagcgagagatgaagacgatcttggcttcggagacgatggagatcccgtcgggggtgacggtgcacgtggcggcgaaggtggtgacggtggagggtccccgtgggaagctgacgcgcaacttcaagcacctgaacctggacttccagctgctggaggtggagggggtgaggaagctgcaggtggacgcgtggttcggcacccgccgcaccatggccgccatccgcaccgncatctcccacgtccagaacctcatcaccggcgtcaccaagggctaccgctacaagatgcgcttcgtctatgcccatttccccatcaacgcctgcatcaccaactgcaacaccgncatcgagatcag

SEQ ID NO: 385729 - DNA, 1398 bp, Oryza sativa
cggacgcgtgggcggacgcgtgggcggacgcgtgggcggacgcgtgggcggacgcgtgggcggacgcgtgggccgccgccgccatcctccccgagccctagctctcccctatccctcgccgcacgcaccaccaccaaccatggccggcgcgcaggagtctctggtgttggccggcgtgatgcacggccacaacgacgtggtgacggccatcgcgacccccatcgacaactcgccgttcatcgtctcctcctcccgcgacaagtcgctgctggtgtgggacctcaccaaccccgtccagaacgtcggcgagggcgccggcgcctccgagtacggcgtgcccttccgccgcctcaccggccactcccacttcgtccaggacgtcgtcctcagctccgacggccagttcgcgctctctggctcctgggacggcgagctccgcctctgggacctctccaccggggtcaccacccgccgcttcgtcggccacgacaaagacgtcctctccgtcgccttctccgtcgacaaccgccagatcgtctccgcctcccgcgaccgcaccatcaagctgtggaacaccctcggcgagtgcaagtacaccatcggcggcgacctcggcggcggcgagggccacaacgggtgggtctcctgcgtccgcttctcccccaacaccttccagccaaccatcgtctctggctcctgggaccgcaccgtcaaggtgtggaacctcacgaactgcaagctgcgctgcaacctcgagggccatggcggctacgtcaacgctgtcgcggtcagccccgacggttctctgtgcgcgtccggtggcaaagatggcgttaccctgctgtgggacttggctgagggcaagaggctgtactcgcttgacgcgggttccatcattcactcgctctgcttctcgcccaaccgctactggctctgcgcggcgacccaggactctatcaagatctgggatcttgagtcaaagcacattgtgcaggaccttaagcccgagatccctgtctccaagaaccagatgctctactgcacaagcttgaactggagcgcagatggaagcaccctctatgctggttacacagatggaaccatcaggatctacaagatctcaggtttcagctacgccggctagagatggggagtgttgttttagttatcgcgttctggtaaacgactgtggtatcaccctagtgttctttttggctgtttgaaaggcattaatctgcctgagtacttctgcttaatttacccatctatgtagtagctccagtactgagctcatggatactgtggaatagggatctgttttgcaccatgttttgttttgacttccttttcaatatattgtctgatgaaccatgcgatccatggtgcttctctcttttt

SEQ ID NO: 385730 - DNA, 672 bp, Oryza sativa
tttacggccacaggcgacgctcctgactctccatcggcgaccctcgaaccacaactgggcgttcatcacctgctgctcgcgagacaagttgatgatggtgtgggacctcaccaaccccgtccagaacgtcagcgagggcgccggcagcctccgagtacggcgtgcccttccgccgcctcaccggccactcccacttcgtccaggacgtggtgctcagctgcgacgggcagttggcgctctgtggcttctgggacggggagctccggctctgggacctctccaccggggtcaccacccgtcgcttcgtcggccacgacagagacgtgctctccgacgccttctccgtcgacaaccgccagatcgtctccgccgcccgcgaccgcaccatcaagctctggaacaccctcggcgagtgcaagtacaccatcggcggcgaccttggcgccggcgagggccacaccgggtgggtctcctgcgtgagattctcccccaaccccatggcccccaccatcgtctccggctcgtgggatcgcagcgtcaaggtctggaacctcacgaactgcaagctgcgcaccaagctcgagggccacaacgggtacgttaacggcgtcgccgagagcccagacagatgcctgtgtgccttccgtgggaaggaccgaaccaccctgctct

SEQ ID NO: 385731 - DNA, 1053 bp, Oryza sativa
gccgccgccgcttttctcctccgatccagcgccgccccccgagggagaatcttccgccgccgcggcccgcaccccgcaccctcacgcagtagggatcgaggatgtcgtacgcgtacctcttcaagtacatcatcatcggcgacacaggcgttgggaagtcgtgcctgctgctgcagttcacggacaagaggttccagcccgtgcacgacctcaccatcggcgtcgagttcggcgcccgcatgatcaccatcgacaacaagcccatcaagctccagatttgggacacggctggtcaagaatcgttcagatctataactagatcatactacaggggtgctgctggtgcccttttggtgtatgatatcaccaggagagagacttttaatcatcttgctagctggctagaagatgcaagacagcatgcaaatgccaacatgacagtaatgcttattggtaacaaatgtgatctgtctcatagacgtgctgtcagctatgaggaaggtgaacaatttgccaaggagcatggcctagtatttatggaggcatctgcaaaaactgcacaaaatgttgaggaggcattcatcaagactgctggaacaatttacaagaaaatccaaggtggtgtctttgatgtatctaatgagtcttatgggtcaaagttggctatgcggtaccaaatgcttcaggtggtggagctggctcatcctctcaaggtggtggctgctgcggctaaaggcagcagcagtatccaactagtcatgtatccagcctaaattgaaaagtcagatcatgtgtaacatggccctcaatatttcgatgttgccttgtggaaaaaatagctggtattggtactgtgttttttactccttccagctaccgacgttcagtgttagtgcacaaaatgttcatccatggtagtttgtctacattgcagtcatgtaaagttaaacattcacgatttctgtacttttgcatgtgtaactaaatgaaatggtgtgttacattcattccttcaatcaaaaaaaaaatagaaacaaaaaaaaaaaaaaaaaa

SEQ ID NO: 385732 - DNA, 616 bp, Oryza sativa
  unsure (1)..(616): unsure at all n locations
cngccacnnntccgtccacgtaaccctcctctcctctcctcgcctcgcctccctcccgacgaaggaaatcccaccctctccccgccccgcgaatccgccgcggtaaaccaccccccgcgccgccgccgccggtgcgggccgaggcggcgaagatgtcgtacgcctacctcttcaaatacatcatcatcggcgacacaggggtgggcaagtcgtgcctgctgctgcagttcacggacaagcggttccagcccgtccacgacctcaccatcggcgtcgagttcggcgcccggatgatcaccgtcgacagcaggcccgtcaagctccagatttgggacacggcaggccaggagtcattcagatcgataactagatcgtactacagaggggctgccggtgctcttttggtttatgacattacaaggagggagcacattcaatcatcttgcgagctggctggaagatgcaaggcaacatgcgaatgctaacatgaccataatgcttgtgggaaataaatctgatctatctcataggcgttctgttagctatgaggaaggcgagcagttttcaaaagagcacggtcttatatttatggggggcgtcttcaaaaaaccgcgca

SEQ ID NO: 385733 - DNA, 1619 bp, Oryza sativa
ttttagatagatcgccgccgccgccgtcgtctccgcccctctccagccaccagatccagcgaccatggggcagggcaccccgggaggcatgggcaagcagggcggtgcccccggcgaccgcaagcctggcggcgacggcgacaagaaggaccgcaagttcgagccctccgccgccccctcccgcgtcggccgcaagcagcgcaagcagaagggccccgaggcggccgctcgcctccccaacgtcgcccctctctccaagtgccgcctccgcctcctcaagctcgagcgggtcaaggactacctcctcatggaggaggagttcgtcgccgcccaggagcgcctccgccccaccgaggacaagaccgaggaggaccgatccaaggtcgacgacctccgcggcacccccatgagcgtcggatccctcgaggagatcatcgacgagagccatgccatcgtctcctcctccgtcggccccgagtactacgtcggcatcctctccttcgtcgacaaggaccagctcgagcccggctgctccatcctcatgcacaacaaggttctgtctgtggtcggaattttgcaagatgaagttgatcctatggtttctgtgatgaaagtggagaaagctccgctggaatcctatgctgacattggtgggctagatgctcagatccaagaaatcaaagaggcagttgagcttcctttgacccatcctgagctatatgaagacattggcatcaggccacccaagggagtcatattatacggagaacctggaacagggaagacactacttgccaaggctgttgctaactccacatccgcaactttcttgcgtgttgttggaagtgagcttattcaaaagtatcttggtgatggtcccaaactagtcagggaactgttcagagttgctgatgagctttctccctcaatagtctttatcgatgagattgatgctgttggaacaaagaggtacgatgctcattcaggaggggagcgtgagattcagagaactatgttggagcttcttaaccagttagatggttttgactctcgtggtgatgtcaaagttatactagcaacaaatcgcatcgaaagtcttgatccagcattgctacgccctggtcgcatagatcggaagatagaatttcctctgccagatattaaaactaggcggcgcatcttccagatacacacatctaagatgacattggcagatgatgtgaacctggaagagtttgtcatgaccaaggatgagttttccggtgctgatatcaaagcaatatgtactgaagctggacttcttgctttgagagaacgccgaatgaaggtgacacatgctgacttcaagaaggcaaaggagaaggtgatgttcaagaagaaggaaggtgtgccggagggtctttacatgtgatgtgctcactggtcgccagtgacggggtgggtaaccttgtaggacgaatatatatttgatttatcacataggctatgctgccttggtttgtaaaatacttgtgaaatttgttttgttacttcttgggatggagttggatagaacaaattgcatttctcatgatttgccttctcaagtactgcactgaataatgaactgtggctaatgt

SEQ ID NO: 385734 - DNA, 910 bp, Oryza sativa
  unsure (1)..(910): unsure at all n locations
ccacgcgtccgcccacgcgtccgggcacaggcaaaactctacttgcaaaggcggttgctaattctacatcagcaacatttttgcgtgttgttgggagtgagttgatccaaaagtaccttggtgatggccccaagcttgtaagagaattgtttagggtggctgatgatctttctccgtcaattgtctttattgacgagattgatgcagtcggaacaaagaggtatgatgctcattcgggtggagagcgtgaaattcagagaaccatgttggagttgcttaatcagctggatggttttgattcaaggggagatgttaaagttattttagcaacaaatcgcattgaaagtcttgacccagctttgcttcgacctggtcggatagacagaaagattgaatttccgttaccagatattaaaaccaggaggcggatcttccagatacacacatctaagatgacattggcagatgatgttaacctagaagagtttgtgatgaccaaggatgagttttctggtgctgacatcaaagcaatatgtacggaggccggattgctcgctttaagggagcgcagaatgaaggtgacacatgccgatttcaagaaggccaaagagaaggtcatgttcaagaagaaggaaggtgtaccggaagggctttatatgtgagacatccaccactcatcagcaccagaattacctccaggacacggttaagtgtaatagagaactggtagagctggtgtttggttcaatgttcggagaatgtttgcttacacccttcttattcagcaatgtcgaactaaagaaccccctgaacaatgtatggctaccaggaatgcatgcagttacggttcaatgttaaatgctttttgatcaaannnnnnnnnnnnnnnnnnnnnnnnnnnnnnnnnnnn

SEQ ID NO: 385735 - DNA, 1548 bp, Oryza sativa
  unsure (1)..(1548): unsure at all n locations
tcgactaacgcaaaccgcatcgatcaactccttccccaagtcgaagcaaaatccctagcgatgtcgtcgccgccgcccgccgccgccgccgcgatggccgtcgacgacgccgacgacgaccagctcgcctccatgtccacggaggacatcgtcagggcaacccgcctcctcgacaacgagacccgcgtcctcaaggatgagctgcagcggacgaaccttgaggtggaatcctacaaggagaagatcaaggagaaccaggagaagatcaaactcaacaagcagctgccttaccttgtcggcaacatcgtcgagatattggaaatgaaccccgaggatgaggctgaagaggatggtgcgaacatcgatctggattcacaaaggaaaggaaaatgcgttgttttgaagacatccacaagacaaacaatattccttcctgtaatcgggcttgttgaccctgaaaagctcaagcctggggatttggttggagtcaacaaagacagctacttgatactagacacgctaccttcagaatatgattcacgggttaaggcaatggaggtagatgaaaagcctacagaggattacaatgacattggtggccttgagaaacagattcaagagcttgttgaagcaatagtattgcccatgactcacaaggaccggtttcagaagttgggaattcgccccccgaaaggtgttcttttgtacggaccacctggcactggaaagaccctaatggctcgtgcatgtgctgcccaaactaacgccacatttctgaaacttgctggtccacagcttgtccagatgttcatcggtgatggtgcaaagcttgtccgtgatgcctttcagcttgcaaaggagaaatccccctgcatcatttttattgatgaaattgacgcaattggaacaaagcgttttgatagtgaagttagtggtgacagagaagtgcagcgcacaatgttggagttgctgaatcagctagatggattcagtagtgacgagaggataaaggtgatagctgcaactaatcgcgcggacattcttgatcctgctttgatgaggtctggtaggctggaccgaaaaattgagttccctcatccatccgaagaagcacgagctagaattttgcaaatccattcaagaaaaatgaatgtaaaccctgatgtcaactttgaagagttggcacgatctacggacgacttcaatggtgcacaactgaaggccgtttgtgtagaagcaggcatgcttgccctacgccgagatgctacagaggtgacacacgaggatttcaatgaagggatcatacaagtgcaagccaaaaagaagtccagtttaaattattacgcttaattcttccgagagagttattaggcctaaggaaacgctccgtccaaaattgtttgtttgtaacactaccgttttatatatttgtgtggttcaagatgtgattgtacgaaacatgtcttgcgctgttccttctctgcttgatatatactgatagaagttgactcgtcccttgcgtnnnnnnnnnnnnnnnnnnnnnnnnnn

SEQ ID NO: 385736 - DNA, 863 bp, Oryza sativa
ccacgcgtccgagaatctgacataacaaaggagcgaattgagaaaattctgaaggctggtgctaatgttgtactgaccactaagggaattgatgatatgtcactgaagtacttcgttgaggctggagcaattgctgtaaggcgtgtgcgtaaggaggatttgcgccatgttgccaaggctactggtgcaactatggtatctacatttgctgatatggaaggtgaagagacattcgattcatcgttccttggacatgctgatgaagttgttgaggaaagaattgctgatgatgatgtaattttggtgaaaggaacaaagaacaccagcgctgtctcaattatacttagaggcgcaaatgacttcatgctagatgagattgacagatcattgcatgatgcattgtgcattgtgaagagaactctggaatccaatatggttgttgctggtggtggtgcagttgaagctgcattgtctgtatacttggagaatcttgctacaacccttggtccagggaacagttggccattgctgaattcgcggaatctttgttaatcattccaaaggttctttctgtcaatgctgcaaaagatgcaactgagcttgtagcaaagcttagggcatatcatcatactgctcaaacaaaggctgataacaacacttttcaagcatgggtcttgacctttcaaaaggtatattcgcaacaaccttgaatatggggtcattgagccagcaatgagtaaagtaaagatattcagtttagcactgagcggccatactatcctgaggttgatgactgatcaacttccgaggaagagagccggaacaagagtaactagcattgaccccctttttgtgacacgttg

SEQ ID NO: 385737 - DNA, 825 bp, Oryza sativa
  unsure (1)..(825): unsure at all n locations
cctcccagtcgctgtcacgcgcttcgtgctcgccgccttccaccttcgtgctaccccccgccatggcttcctccctcgccggatccgccctctccttcgccacccccgtcaaggcagtcaagactaattcgatatctttcaccagcgcaaggaagggaaatgcatttctccgcctgcagccagtgcctatgagatttgctgtttgctgtgccgcaaaaaaggagacagtggagaaggtttgtgacattgttaagaagcaactcgctgttcctgagggcactgaagtttctggtgcatccaagttctcagatcttggtgctgattcactggacacggttgagattgtgatgggtctcgaggaggagttccacatcagcgtcgaagagtcaagtgcgcagtcaattgcaacggttgaagatgccgctgcactcatcgacaagcttgttgagcagaaatctgctgaagcgaaatcatcttgatatgcacaaatcacaatgttgaagctcgtaaactagctctacttctaccttgggccagcccttgttgttttaagattgtatccttatcgccttttttttttatgacttgatggtttggtgttctcaagattattgccctctgtgccgtaataatactaattaaagtatttaggccctctttcttttagcttgggattattataatccagattattgggagtaagctgaaaaaaacagacnacttattgaagtagcttattataatctgataagctcatttaggtgagctttttctagattattgggtgnnnnnnnnnnnnnnnnnnnnnnnnnnnnnnnnnnnnnn

SEQ ID NO: 385738 - DNA, 659 bp, Oryza sativa
  unsure (1)..(659): unsure at all n locations
ccacgcgtccgaccacgcgtccgattatgggaccatcagacagcccattagctggtggggtattctaggtgaacattcattttccaccggattatccttttgaaccaccgaaggtctatgttcgcaccaaggttttccacccgaacattaatagcaatggcagcatttgcctcgacatcctcaaggaacagtggagtcctgcacttaccatatcaaaggtcctcctgtcaatttgttcactgctgacggacccgaaccccgatgatccgttggtgccggagattgctcacatgtacaagactgatagggccaagtatgaatccaccgctcgctcctggacacagaagtacgccatgggctaaagccagccaaactggtggacgtgtcgaaacccaacgacgttatcacctaaataaccatcaagtcaccactctccccccaacgaagtatgaatggacttttgagggctgttgtgcccagttgaactcatatgtaccctaccttgtgaagtccgtttcagtctggtagtctgttctacctgactgttctgttatttaagtcgtttcctaaatcatatttattattcgtgctttgtcggtgccatagctatgatttatatgtgatcaacacggcacggatggaagatttnnnnnnnnnnn

SEQ ID NO: 385739 - DNA, 1265 bp, Oryza sativa
tttttgtttttttcacaaacgaaaccaaagctggcagcacgtaggaaacgctttgctggtaacagaagggagttcaataacagcctacaaaattctgaaacgtaacaagcaactccgatatacaaattcgactgacatatcggggactcttgaccaaatgcgacaccattatttgtttgatcagatcagcacttgcacagtgatttacggatagacaaaattcaaagttgaccgcaaacataacttgatactgcaggcagtacatgcatttcacttccgaccaagagtggggaattgggattggtctttgatttctggagctggtggagctgcagagcgatggccctcaccatatccacccctgaaaccgccacgatccccgcggcccctgccacgaccacggccgccatagtacctctctccttcagctggttttaggaactcgttgatgctcacagacttcttagcacgctcatcacgttcagcattttctttcttcttcaaagcatccttgtcagatcccagtttgatgaaaacttcatcattttctttcttattggaaagtggttgcatagacttcaaatccttgtcaatttcaaccttcctctcttcagtcttcaaagaaagaagtgctttcctcttctcctcccttaatttctcaaactcctcaagagtcatttccttatcctcttccttttcttcctcatttggagtgacatctttgttatccttgttctcatctgcctgtggagcaccctccggtgcgccttacttctcagtaacaggggccttctcatccaatttcagggcttccccagtttcctgggcgagaatttcatcagtggtagttccccagttcccacgccccgaaccctcacgcttcatctcatacccacggccagtgccgctatggcgctcatatggcctccgagacatcctctcagagtcatcaccatacccacctcgtcgacctcctccctggaagggtggccgagggcccctctccctgtcctgagcgccttcttcacctccagctctgctaccaccgcctccaccatatcctccctggaagccattcatttcttcacctccaaagtctcggttttgaccatagcctcgcccacctctgcctcggccgcgttctccgcgcccataccctccgcgtgagggtgcactgccatctcgagactccctcacggcctgtgaagggggagccggcttggtggggaacttggaggcggccggacgcgtgggcggacgcgtgg

SEQ ID NO: 385740 - DNA, 1133 bp, Oryza sativa
ttttttttttttttttgcaaggaatgcagatttttaacaaaatggtaaaagctagcctacaaaattagaggctaattctgacaagcaactccggtatacaaagtagaccaacacacgatggaaaaaaggcacaggcaacaccattatttgttccgattaaccgtgacaatatgattcaactgcgggcaaaatttaaaggtgacaccagtaaaaacaatgctgcgatgctcttagaccgttcacgcacgcggcttcccaccaagggttgggaactgagcctgatcttcaatggatggtgcagatgtagaatatgggccacgttggtaaccaccaccatatccacgaccgccacgatctccacgcccccttccacgaccacggccgccatagtacctttctccttccgcaggcttcaggaactcattgatgctcacagacttcttggcacgctcatcgcgctcagcattttcctcttcttatccttgtcagaacccagcttaatgaaaatttcatcatttcctttcttggtagaaagtggctgcatagactgcaggtccttatcgacctcaaccttcctctcttcagccttgaaagcaagaagagctttccgcttttcctcccttaatttctcaaactcctcaagagtcatctccttatcctcttccttctcttcttcctcatttgcagcaccctccttgttatccttctctccagttggagcatcatcctgctcaccctgtttctcagcaataggagcactctcctcaaccttcaaggcttcctcagtctcctgtgcaagagcctcatcagtagcagttccccagttcccacgccctgcaccatcacgcttcatctcaataaccacggccagtaccactgtggcgctcataatttctccggggcggcctctcagaatcatccccatattcaccatttcggtagccaccacgcctacctccatggaatggagctcgagggcctctctccctgtcaccttctccaccagcagcaacagccccatctccatagcctccaccgtaaccaccctggtagccattggcattgtctccaccaaaatcacggttctggccatatccccgtccacctctgccacggccacgctcaccacggcc

SEQ ID NO: 385741 - DNA, 3130 bp, Oryza sativa
  unsure (1)..(3130): unsure at all n locations
ccaaagccaacccaagccaagctcacgagtgcagagctagacgacgtgtagatacgtagtctcctccgatatctctctctctctcgatcgacgcctctgcatatataatacccataccatgttgcgtcctcagctcaatccatctagccacacgacgacgacgagcagcagcagcagcacgcagctgttcgcatcctcgtcgtgcatcgctagccttcgccggccgtcgtcgtcgtcgtcgtcggtggtcgccgccgcacgccggacgcgggggcaaggtagcagtcgggttgttgttgtgtgcgcgtcgtcgtcggcgacggcgagcaggggagatagttcttcggacatggcggcggcggcggcggtgcgggtgaaggcggtggcgacgatcaaggtcaccgtcggcgagttgatcaacaggtcgatcgacatcagggatctcatcggcaggtcgctctccctcgagctcgtcagctccgagcttgacgcgaagaccgggaaggagaaagcaactgtgcggagctacgcgcacaatgtggacgacgacgatcatagcgtcgtcacctacgaggccgacttcgacgtgccgagtggattcggccccatcggcgccatcatcgtcaccaacgaactccggcaggagatgttcctcgaggacatcaacctcaccgccagcgatggcgccggcaactccactgtcctccccatccgctgcaactcctgggtccaacccaagtccgtcggcgatgagggcacgcctagcaaacgcatcttcttcgccaacaagacttacttgccgggacagacgccggcggggctccggagctaccggaagaatgacctccagcagaagcgcggtgacggcactggcgagagggaggccgacgaccgtgtctacgactacgacgtttacaacgacctcggtaacccggacagcaacggcgatctcgcccgccccgtccttggcggcaacaagcagttcccctaccctcgccgctgccgcaccggccgccccccctccaaaaaagaccctaagtcggagacgaggaagggcaacgtgtacgtgccgagggacgaggagttctcaccggagaaggaggactacttcctccgcaagacggtggggtcggtgctccaggccgccgtgccggcggcgcagtcgctgctcctccgacaagctgaaatggaaccttccgttcccgtccttcttcgtcatcgacaagctgttcgaggacggcgtcgagcttcccggcgtcgacaagctcaacttcctcgagagcgtcgtgccccgcctgctcgaacacctccgcgacacccccgccgagaagatcctccgcttcgaaactccggccaacatccaaaaggacaagttcgcatggctcagagacgaggagttcgcgagggaaacgctcgctggcatcaacccgtacgccatcgagctcgtcagggaatttccgctgaagaccaagctcgacccggcggtgtacggtccggcggagtcggcgatcaccgccgatttgctggaggagcagatgaggcgcgtgatgacggtggaggaggcgatcagccagaagaggctgttcatgctcgacttccatgacctcttcttgccgtacgtgcacaagatccggtcgctggatcacaccaccatgtacggctcgcgcaccgtcttcttcctcaccgacgacggcacgctgcagctgctcgccatcgagctcacccggccggcctcgccgtcgcagccgcagtggcggcaggtgttcacgccgtccacggacgccaccatgtcgtggctgtggcggatggccaaggcccacgtccgcgcccacgacgccggccaccacgagctcatcacccactggctgcgcacgcactgcgcggtggagccatacatcatcgcggcgaaccggcagctcagcgagatgcaccccatctaccagctgctgcgcccgcacttccgctacacgatgcggatcaacgcgcgcgcccgctcggcgctgatcagcgccggcggcatcatcgagcgatccttctcgccgcagaagtactccatggagctcagctccgtcgcctacgacaagctctggcgcttcgacacggaggcgctccccgccgacctcgtccgccgcggcatggccgaggaggaccccacggcggagcacggcctcaagctcgccatcgaggactacccgttcgccaacgacggcctcctcatctgggacgccatcaagacctgggtccaggcgtacgtcgcgcggttctaccccgacgccgacagcgtcgccggcgacgaggagctccaggcgttctggaccgaggtgcgcaccaaggggcacggcgacaagaaggacgccccgtggtggccgaagttggactcgccggagagcctcgcccacacgctgaccaccatcgtctgggtggcggcggcgcaccacgccgccgtcaacttcgggcagtacgacttcggcggctacttccccaaccggccgtccatcgcgcgcacggtcatgccggtggaggagcccgtggacggcgccgccatggagaggttcctggacaacccggaccaggcgcctccgcgagtgcttcccgtcacaggtgcaggcgacggtggtgatggcggtgctcgacgtgctgtccagccactccaccgacgaggagtacctcggcggcgagcagacgaggccgtggaacagcgacgcggcggttgcaggcggcgtacgacgggttcgcagcccggctcaaggagatcgagggcgtcatcgatggccggaacaaggatagaaagctcaagaacaggtgcggcgccggcatcctgccgtaccagctgatgaagcccttctccgactccggcgtcaccggcatgggcatccccaacagcacatccatctgatgagacaaaacgctccaaaactacttgcaaattgatcattcatcatctactgttttaaccaatatgtcactcccaaatctttattgatttttatcatgtttgaaaagataatcgagaggtatcataccatttttatagtctaaaatttagatattatgtatctcaaggtatcacaatgtttaatgtaaataaattttgttacctcaagatatnnnnnnnnnnnnnnnnnnnnnn

SEQ ID NO: 385742 - DNA, 1412 bp, Oryza sativa
tccatttcaggagagatccacatcgccgttggcctttcatccagtgagtgagggagggagatctcgatccagtgagtgagggagggagatctcgatctcggtctcgcgacatgaagaaggcttcgtctctgtcggagctggggttcgacgcggagggcgcgtcgtcggggttcttccgtccggtggcggacggcgggtcgacgccgacgtcgcaccggcgtcggctgacgaagatatcggtgatcggcgcgggcaacgtggggatggcgatcgcgcagaccatcctgacccgggacatggcggacgagatcgcgctggtggacgcggtgccggacaagctgcgcggggagatgctggacctgcagcacgcggcggcgttcctcccccgcgtccgcctcgtctccgacaccgacctggccgtcacgcgcggctccgacctggccatcgtcacggccggcgcgcgccagatccccggggagagccgcctgaacctgctgcagcggaacgtggcgctgttccggaagatcgtgccggcgctggcggagcactcgccggaggcgctgctgctgatcgtctccaaccccgtcgacgtgctgacgtacgtggcgtggaagctgtcggggttcccggcgagccgcgtcatcggctccggcaccaacctcgactcctccaggttccgcttcctcctcgccgagcacctccaggtcaacgcccaggatgtccaggcgtacatggtgggagagcacggggacagctcggtggcgatatggtcgagcatgagcgtggccgggatgccggtgctcaagtcgctgcgggagagccaccagagcttcgacgaggaggccctggagggaatccggcgagcggtggtggacagcgcgtacgaggtgatcagcctcaagggctacacctcctgggccatcggctactccgtcgccagcctcgccgcctccctcctccgcgaccagcaccgcatccaccccgtctccgtcctcgcctccggcttccacggcatcccccaagaccacgaggtcttcctcagcctccccgcccgcctcggccgcgccggcgtcctcggcgtcgccgagatggagctcaccgaggaggaggcccgccgcctccgccgctccgccaagacgctctgggagaactgccagctgctcgacctctaataaatcttattattatcatcgtcgtcgtcgtctcgtcacggaattaattaaagtacctactccgtacttagctagctacaataataaggattcattgatcactacaagagtgatcgactcgactgtagtatgtgtgtgcaatataatgtgctgtctatcaacaactactagtattgtcatttttttcgaaccagggaactttttaatgataagaagaaaaagacaagtacttattgtcga

SEQ ID NO: 385743 - DNA, 556 bp, Oryza sativa
  unsure (1)..(556): unsure at all n locations
gattttgaagaagaaattgttgtcagcgtcattacctcttgtgtgaggatatttcagagtcaaatcaccatgagcggtttggaaaaccgctgtctgtagtgtagcggttttgtctccagagcgacctcttctctataaagaggaggagaacttccatggaatgagccacaaaaccaccatcgatcatttccatttccattttcaggagagatccacatcgccgttggcctttcatccagtgagtnagggagggagatctcgatctcggtctcgcgacatgaagaaggcttcgtctctgtcggagctggggttcgacgcggagggcgcgtcgtcggggttcttccgtccggtggcggacggcgggtcgacgccgacgtcgcaccggcgtcggctgacgaagatatcggtgatcggcgcgggcaacgtggggatggcgatcgcgcagaccatcctgacccgggacatggcggacgagatcgcgctggtggacgcggtgccggacaagctgcgcggcggagatgctggaccttccagacgcggcggcgtttcttccccg

SEQ ID NO: 385744 - DNA, 1075 bp, Oryza sativa
  unsure (1)..(1075): unsure at all n locations
cctacattttgctaactatccagtaccaagaacggagctgcaaggaagagacgtacgatgaccatgacgtcgacgacgacgaaggccatggcgatggcggcggcggtcctcgccgccgccgccgtcgcggcgacgaacgcgcagacgtgcgggaagcagaacgacggcatgatctgcccgcacaacctgtgctgcagccagttcgggtactgcggcctcggccgcgactactgcggcacggggtgccagagcggcgcctgctgctccagccagcgctgcggcagccagggcggcggcgccacctgctccaacaaccagtgctgcagccagtacggctactgcggcttcggctccgagtactgcggctccgggtgccagaacgggccgtgccgcgccgacatcaagtgcggccgcaacgccaacggcgagctctgccccaacaacatgtgctgcagccagtggggatactgcggcctcggcagcgagttctgcggcaacggatgccagagcggcgcgtgctgcccggagaagcggtgcggcaagcaggccggcggggacaagtgccccaacaacttctgctgcagtgccggcggctactgcggcctcggcggcaactactgcggctccggctgccagagcggcggctgctacaagggtggcgacggcatggcggccatcctggctaacaaccagagcgtctctttcgaagggatcatcgagtcagtggctgagcttgtgtagatcgatgagtcgatcgtcgccatgagcgttttctgctttgtatgcctctcggcgtacagggcttttcagcttagctgcctttcaataaaatcactgatcatggcgatcgacatgcagagcagtgttgtgtacgtagttgctcatctgaataaataaaggggctgagcctgagctgctgcctagctcgcaccaacagagtccggccgggaggagttgtagtttctgaaggtgagctagctagctttgggatcgatgtatggatcagcaatgtaacaatgtgttgtggaagcccgtagctactaactagctcattnggntngncnaatngcgctcn

SEQ ID NO: 385745 - DNA, 652 bp, Oryza sativa
gggcatcatctctcttcgcggaatcggtgttcactacatctgctgctgctggtcgtcgtcgttgtcctcgtctcgccgccgttcccgttaccctcttcttctccaccggtcgcggctcgccggcgatggccgaggaggcgcagagccacgcggcgtgaaggtgggcggcatccacgacgcgccggccgggcgcgagaacgacctcaccaccgtcgagctcgcccggttcgccgtcgccgagcacaacagcaaggccaacgcgatgttggagttggagagggtggtgaaggtgaggcagcaggtggtgggcgggttcatgcactacctcaccgtcgaggtgaaggaacccggcggcgccaataagctgtacgaggccaaggtgtgggagagggcgtgggagaacttcaagcagctccaggatttcaagcccctcgacgacgccaccgcctaaacgtacatagatcatcgtccggctgctgaatcatcggcttaaagcagagccatccagtgatccaattagtctgctactagaacatgttactgctcttgctggaaggtgtaatatgatgaataaaacctgctgctttgccgggtcataatagacatatcacttctgtatttcctagtgcaatacacaacattttcgcagtct

SEQ ID NO: 385746 - DNA, 1199 bp, Oryza sativa
  unsure (1)..(1199): unsure at all n locations
cacagaaaaactagcttgcaaaggggatagagtagtagagagagagagagaggagaggaggaggaagaagatggggagggggaaggtggagctgaagcggatcgagaacaagatcagccggcaggtgacgttcgccaagcgcaggaacggcctgctcaagaaggcctacgagctctccctcctctgcgacgccgaggtcgccctcatcatcttctccggccgcggccgcctcttcgagttctccagctcatcatgcatgtacaaaaccttggagaggtaccgcagctgcaactacaactcacaggatgcagcagctccagaaaacgaaattaattaccaagaatacctgaagctgaaaacaagagttgaatttcttcaaaccacacagagaaatattcttggtgaggatttgggcccactaagcatgaaggagctggagcagcttgagaaccagatagaagtatccctcaaacaaatcaggtcaagaaagaaccaagcactgcttgatcagctgtttgatctgaagagcaaggagcaacagctgcaagatctcaacaaagacttgaggaaaaagttacaggaaaccagtgcagagaatgtgctccatatgtcctggcaagatggtggtgggcacagcggttctagcactgttcttgctgatcagcctcatcaccatcagggtcttctccaccctcacccagatcagggtgaccattccctgcagattgggtatcatcaccctcatgctcaccatcaccaggcctacatggaccatctgagcaatgaagcagcagacatggttgctcatcaccccaatgaacacatcccatccggctggatatgatgtgtgtgttcagttcaggcttcaggcttcagagaagccaatgcaaacagtgtcctgtaatccagtaattacagggcatatgtaatgtaatgtaatgtaatccctgatctatattttgctaagtacgtgcgtgctctcttacgaccttctcccccaaacagttaatcaggggaataataatttcgtttgatgcacgtactgtatgtctgtatctgtcactgtatcgtaggaccgtccatgtataacaatttccgttttggatgtggtaacaattaattggcacttaaatttatatttgtgatgatctgggagagtnnnnnnnnnnnnnnnnnnnnnnnnnnnnnnnnnnnnnnnn

SEQ ID NO: 385747 - DNA, 2360 bp, Oryza sativa
ggccgccgacggcctcgtccacgtcacgtgtgccgcgccaccctccgcaacgcaacccccttccttttttataccggcctcctccctcccattacccccctcacgcgctcgcttcctcttccccccagccatcggcgacgcgaggacgcgacgcgccccaccaaccaccaccgcctccgccgacctcgccgccatgctgtccgcgcgcgccgccgccaccgccgccgccgccgccgcctccccgctgtggaagcgcggcgagggtggcagcagcgggagcgggagcggatgcacgagctgcagggaggtgcggaggagggccgcggcggtgagggtccgtgcggcggcgccgaggagggtggaggcggtcgcgatggagtccgcggcggagaccgagaagaaggaggaggttgcggcggccggcggcggggttgaggacatggctaccgaggaggtgcccgtcacgccatgggccttctccgtcgcgagtggttacacccttttgagggatccacatcacaacaagggccttgcctttagtgagaaggagcgggatgctcattacttacgtggccttcttcctccggcagttgtgtctcaggatcttcaagtgaagaagatcatgcataatcttcgccagtacagtgtacctttgcagcgttacatggccatgatggatctccaggagaggaacgagaggctcttctacaagcttttgattgataatgtggaggagcttctccctgtggtgtatacaccaacagtaggtgaggcctgccagaagtatgggagcatatttagacaaccacagggtctctatgtcagcttgaaggacaagggaaaggttcttgatgtgctaaggaactggccagagagaaacattcaagttattgttgttactgatggtgagcgcattttggggcttggagatttgggttgtcagggaatgggtattcctgttggtaaactttctctgtacactgcccttggaggagttcgcccgtcagcttgtttacctatcacgattgatgttggtacaaacaatgagcaattgttgaatgatgaattctacattgggctccggcaaaggcgtgctactggcaaggagtaccatgagctcatggaagaatttatgagtgccgttaagcaaatctatggtgagaaagttctgatacagtttgaggacttcgccaatcacaacgcatttgatttgcttgcaaaatacagcaagagtcatcttgttttcaatgatgatatccagggaacagcatctgtggtccttgcaggtcttttatcatcactaaaggtggttggtggaaccctggctgaacacacttatttgttccttggtgctggtgaggctggaactggtattgcagaactcattgctcttgagatttcaaaacagacaaaggctccaattgaggagtgccgcaagaaggtttggctgctggattcaaaggggttgatcgttaactcacgaaaagaatccctccaggcatttaaaaagccttgggcacatgagcatgaacctgtaacgacactgttagatgctgtccagtccatcaaacctactgtgctgattggaacatccggagttggcaaaacttttactaaagaagttattgaggccatggcttcctttaacgagcgacccgtcattttctctctggcaaaccccacatcacactctgagtgtactgctgaagaagcatataattggagccagggtcgtgcagtatttgccagcggcagtccgtttgaccctgtggagtacaatggaaagatacatgtgccaggccagtcgaacaatgcctacattttccctggattcggcctcggtgtcgtaatctctggagctgtccgtgttcacgaggatatgcttctagctgcctcggaaacactagctgatcaggccactcaggagaactttgagaagggatcgatcttcccgcccttcacaaacatcagaaagatttctgctcgcattgccgcaaccgtggctgcaaaagcctatgaacttggactggcgacccggctgcctcaacccagggatctggagaaatacgcagagagctgcatgtacacccccgtataccgcagctaccggtaacgccgcggaggtcaaattttgcagtaataaaacctaccaatgcagtaggggataatgctatgttgtgttgccattgtcgccgttggccgttgctgctgcaaggcattgtatctgtctatataaatcacctgttgtaacgttatggaagcaatctccatgtgtaccaccagtgtttcattctttgatcgttataaagagtgcaataagaacatagttttagctcccattgtaatgggcagcatttccc

SEQ ID NO: 385748 - DNA, 797 bp, Oryza sativa
  unsure (1)..(797): unsure at all n locations
ccacgcgtccgctgcttcctcccacctgcggagacggaaccctaaaaaatttcttcttccccttctcgtccgggcagcggaaggagctctaagccagaagaagcatcatgcctaagataaaaacaagtggtgtgaaatatcccgatgggtgggagcttatagaacccaccctctcagagctccattccaagatgagagaagctgagaatgatccgcatgatgggagaaggaagtgcgaggcactgtggcccatcttcaagatcaatcaccagaggagccgatatctttatgacctatactacaacaggaaggagatatcccaggagttgtatgagttctgccttgaccagggacatgctgaccgtaacctcatcgccaaatggaagaagcaaggcttatgagcgtctctgctgcctgcgctgtatccagacacgagaccacaactttgcgaccacctgtgtttgcagggttcctaagcacctaagggaagaacaggtgatagagtgtgtccactgtggttgcaaaggttgtgctagtggtggctaagtatccactattgggattacttttcaagttacatcaggagcaagttgatgaatgtaaactgaataactgatgtagtgatatctctgatgtacttggaaaaaaatgcctagcctgtctagagagtagactgaatgtactcgtaaggtgatggatgtggtaatgtgaaaaaaacttgagttcttctaccacttctatcttatcttatttccantcnttntnnnnnnnnnnnnnnnnnnnnnnnnnnnnnnnnn

SEQ ID NO: 385749 - DNA, 432 bp, Oryza sativa
gaggatccgggaccatgaaaatttcttcttccccttctcgtccgggcagcgaaggagctctaagccagaagaagcatcatgcctaagataaaaacaagtggtgtgaaatatcccgatggtgggagcttatagaacccaccctctcagagctccattccaagatgagagaagctgagaatgatccgcatgatgggagaaggaagtgcgaggcctgtggcccatcttcaagatcaatcaccagaggagcccgatatctttatgacctatactacaacaggaaggagatatcccaggagttgtatgagttctgccttgaccagggacatgctgaccgtaacctcatcgccaaatggaagaagcaggctatgagcgtctctctgacacctcacaagactggtttccgccccagaccccccccttgcgccccccttt

SEQ ID NO: 385750 - DNA, 835 bp, Oryza sativa
  unsure (1)..(835): unsure at all n locations
ccacgcgcacgcgtccgcactcctctcctctccgcatcctcctcatcgcctccgcttctgcttttttttttcttttttctcgttgatcggtttgttcgatcagatcggttctttggagagatggagcagtccttcatcatgatcaagcctgacggcgtccagagaggcctgattggagacatcatcagcaggttcgagaagaaaggattctacctgagggggatgaagttcatgaatgtggagaggtcctttgcacagcagcactatgccgacctttccgacaagcccttcttccctgggttggtggagtacatcatctctggccccgtcgttgcgatggtttgggaagggaaggatgttgttgccactggccgcaggatcattggggccaccaggccctgggaggcagcccccggcaccatccgtgctgactatgccgtggaagttggcaggaatgtcatccatgggagcgactccgtggacaacgggaagaaggagatcgctctctggttccctgaaggtttagctgagtggaggagcaaccttcacccttggatctatgagtcttagagcttcgcgcctataatcgatcacctcttggtggctagttctcgttaaatatttgagttttgtttcagagttgtcatctggctgcctcctgagtcaccattataattctgctgtgatacaatcacagttatatgttgcctgaacttatatggctttttaagtttctggattggatgtgatgggaaaataatactagcagtcagtttttgcttataaaaatcgtaatatcttaaaaaaaaaaaaaaaaaaannnnnnnnnnnnnnn

SEQ ID NO: 385751 - DNA, 709 bp, Oryza sativa
  unsure (1)..(709): unsure at all n locations
aagcgtaattcgactnacttttagggcgaattgggtaccgggccccccctcgaggtcgacccacgcgtccgcattttccctctccccgctcgccgccgccgccgccgccagccaagctcgccgctcgccatggcccggatcaaggtgcacgagctccgggggaagaacaaggcggagtgcaggcccagctcaaggacctcaaggcggagtctccctcctccgcgtcgccaaggtcaccggcggcgcccccaacaagctctccaagatcaaggtggtgcgcacctcgatcgcgcgcgtgctgacggtgatctcgcagaagcagaaggcggcgctgagggaggcgtacaagaagaagagcctgctcccgctcgacctccgccccaagaagacccgcgccatccgcaggcgcctcaccaagcaccagctctctttgaagaccgagagggagaagaagcgtgagaagtatttccccatgaggaagtatgctgttaaagcttaggttattaggaacataaatgttttaccggtcaagttttgcccagttgcctaaatttgatgttttgtgtggacatccattgtcaccttagtacaatgtatttggtctactgcatgaagtgcgtactattttgccttttaacgttgttatttggttatnnnnnnnnnnnnnnnnnnnnnnnnnnnnnnnnnnnnnnnnnnnnnnnnnnnnnnn

SEQ ID NO: 385752 - DNA, 595 bp, Oryza sativa
gcaccgccgccgccgccgccgccgccgccgcccgccgcgccgcctccgtcgccatggcccggatcaaggtcgacgagctacgggggaagaacaaggcggactgcaggcccagctcaaggacctcaaggcggactctccctcctccgcgtcgccaaggtcaccggcggcgccccaacaagctctccaagatcaaggtggtgcgcacgtcgatcgcgcgggtgctgacggtgatctcgcagaagcagagggcggcgctgcgtgaggcgtacaagaagaagagcctcctccccctcgacctccgccccaagaagacccgcgccatccgccgccgcctcaccaagcaccagctttcgctgaagacggagagggaaaagaagcgcgagaagtatttccccatgaggaagtatgccatcaaggcgtaggtcagggaacatgagagaatgttatgtttagcacatcactcagtcaatttatctgccctcgagttccttgaattttgatgttatcatgtatggacatgccttgtggtcaagtacaatgtgacgggggtttgagtacttgcatgctaacattgataaaaaaaaaaaaaaaaaaa

SEQ ID NO: 385753 - DNA, 973 bp, Oryza sativa
  unsure (1)..(973): unsure at all n locations
tatttttctcctccttcgacttcgatttttcgaactcccccgaacacgacgccgacgagaaggagtcgaggaggcttcgaatccgccgncgncgccaccgccgccgccgncaccgncgacgncgacgagatgtcctccccggcagagtactacaactcacttccaccaataagcaaggcatatggaacattgtgtttctttgccactgtactgtgccagctccagatactgaatccaccttttcttgccttatactatccctttgtgttcaagaaatttcagatatggaggctatttacaagcttctttttcctgggcaagttttctatcaactttgggattcgccttctgatgatagaagatacggcgtgcagttagaaaagggtgcatttgaaaagcgcacagctgatttcttgtggatgaatgatatttggtggccatatcactgcctgggcattgtcagctcattacccttcctggatatttatttccttgggagtatacccatggtcagcactgcttctttatgtctggagcagagaatatccgaattctcagatcagcatgtatggccttgtccaactgaggtccttttatctaccatgggcaatgcttgggttggatgtgatatttggctcagagatactccctggccttctgggaattctcgttggacacacgtactacttcctctcagtgttgcacccgctagccaccggaaagaactacctgaagacaccaatgtgggtacataagattgttgctcgattcagaataggtgtgcaggcgaaccgtccggttccgacccgcgtccgccaacaccggtaacacgccttcagccggtccaccacggcggttcccttccatggtaaccggccggcccaaccaaattcccaccctcccaattgaattcgtggtttgccccgtcnnnnnnnnnnnnnnnnnnnnnnnnnnnnnnnnnnnnnnnnnnnnn

SEQ ID NO: 385754 - DNA, 1013 bp, Oryza sativa
  unsure (1)..(1013): unsure at all n locations
cggacgtacagagcaccgtgtggaaaaaaacctcaccatcatcgacccacttgttcctagcgatctagaacgagagacttggcaatggcgggaagcggcgagctgaagctgctgggcgtttggagcagcccgtacgcgatcagggtccgcgtcgtcctcaacctcaagtcgctgccgtacgagtacgtggaggagaacctgggcgacaagagcgacctcctcctcgcctccaacccggtgcacaagagcgtccccgtcctgctccacgccggccggccggtgaacgagtcgcaggtcatcgtgcagtacatcgacgaggtctggccgggcggcgccgggggacgcccgtccgtgatgccctctgacccctacgagcgcgcggtggcgcgcttctgggccgcctacgtcgacgacaaggtccggccggcgtggctggccatcctgttcgggagcaagacggaggaggagagggcggcggcggtggcgcaggccgtggcggcgctggagacgctagagggcgcgttcggggagtgctccaaggggaagccgttcttcgcgcgacggcgtgggttcgtcgacgtcgtcgtgctcggcggctacctcgggtggttcacggcgatcgacaagctgatcgtcgcaggctgattgacccggcgaggacgtcatctctggccgcgtgggaggagcgttccactcaccgactacagtgtgtagacgtgccgatgactgccgacaagctgctcgttcagcagacctcaaccgactgttttcgccatggtgatgctgaatctaagtatgctgtacgtgtgttgtataataacaaggagaaatgctgcacgattgagtttccttgttcctcagcatagtttcttttttttttatctagctatatttaatatatagcgccatgttcttcataataaaagggctattttaagctgtaaattgcatacatttgtatttacataataaaaaaatgaatcttacgttgtnnnnnnnnnnnnnnnnnnnnn

SEQ ID NO: 385755 - DNA, 671 bp, Oryza sativa
gcttttctgggccgcctacgtcgacgacagggtcgggccggcgtggctggccatcctgttcgggagcaagacggaggaggagagggctggcggtggaggcgcatgccgtgtcggcgctggagacgctagagggcgcgttcggggagtgctccaaggggaagccgttcttcggcggcgacggcgtcgggttcgtcgacgtcgtgctcggcggctacctcgggtggttcacggcgatcgacaagctgatcggtcgcaggctgattgacccggcgaggacgccggcgctggccgcgtgggaggagcggttccgcgccaccgacgcggccaagggagtcgtgccggatgacgccgacaagctgctcgagttcaggcagaccctgcttcgctggagcgcatccaaagcaaagtgagatgacatgacacgactgttttcgccatggtgatgctgaatctaagtatgctgtacgtgtgtttgtataataacaaggagaaatgctgctgcacgattgagtttccttgatcgattcctcagcatagtttcttttttttttatctagctatatatttaatatatagcgccatgttcttcataataaaagggctattttaagctgtaaattgcatacatttgtatttacataataaaaaaatgaatcttacgctgtggtgtt

SEQ ID NO: 385756 - DNA, 3073 bp, Oryza sativa
gttgggctactcgttgagggtgggtttcagaggtgtgggaggtcgcctccatggcggaggacaagggaggcctcgatgccgtcctcaaggagtcggtcgacttggagaacatcccgatcgaagaagtattccagaatttgaaatgctgccgacaggggctcacttccgaagaggcgcagctgcgcctgcaactttttggtccgaacaagctcgaggagaaggaggagagcaaattcctcaagttcttggggttcatgtggaatccgctgtcatgggtcatggaggctgcagctatcatggccattgcattagccaatggtggggggaagccaccagattggcaggactttgttggtatcatcacactgctacttatcaactcaactatcagtttcattgaggaaaacaatgctggcaatgctgctgctgcgctcatggcgcgtcttgcgccaaaagccaaggtgctccgaaatggtagttggactgaggaagaggcagccatccttgtgcctggggacatcatcagtattaagctgggagatatcattcccgcagatgctcgcctcctggaaggagatcctttgaagattgatcagtctgcgctgactggagagtcattgccagccaccaaaggtcctggtgacggtgtttactctggttcaacggttaagcagggtgagattgaggctgttgtgattgcaactggtgtgcacactttctttggaaaggctgcacatcttgttgattccaccaatcaagttggccatttccaaaaggttttaacagctatcgggaatttttgcatttgctcaattgctgtggggatgtttgttgagatcattgtcatgtaccctatccagcacaggccataccgccctgggattgacaacctattggtgcttctcattggaggcattcctatagcaatgcccacagtcttatctgtaaccatggcaatagggtctcatcgcttgtctcagcagggagctataacaaagagaatgactgcaattgaagagatggctggcatggatgttctttgcagtgataaaacaggaactctgactttaaataagctcacagtggacaagaatctcattgagatttttgaaagaggagtcactcaggaccaagtaattctgatggctgctagagcatcccgaacagaaaatcaagatgctattgatactgcattagtcgggatgctcgctgatccaaaagaggcacgtgctggtattcaagaggttcacttcctgccattcaatccgactgacaagagaactgcattgacatacattgatagtgatggaaagatgtaccgtgttagtaaaggcgcaccagagcagattctcaacctggcacacaacaagacacagatagaacgacgagtccatgctgtaattgataagtttgcagaacgtggacttcgatcacttgctgtagcatatcaggaagttccagatggaaggaaagagagtcctggtgggccatggcgctttgttgctctccttccactctttgatcctccaaggcatgatagtgcagaaacaattcgaagggcacttaaccttggtgtaaatgttaagatgatcacaggtgaccaactagcgattgggaaagaaacagggcgtcgtctaggaatgggtacaaacatgtacccttcatctgctttgttgggacagaacaaggatgagtctgttgctgctttaccagttgacgatctaatcgagaaagctgatggttttgctggtgtattcccagagcacaagtatgagattgtaaaacgtctgcaagcacggaagcacatctgtggaatgactggtgatggtgtaaacgatcctccagccctaaagaaagctgatattggtatagcagttgctgatgcgactgatgcagcaaggagtgcatctgatattgtactcacagaacctggcttgagtgtgatcattagtgctgttcttaccagtcgggcgattttccagcgaatgaagaactacactatatatgctgtctcgattacaatacgtattgtgtttgggtttatgctgcttgcccttatatgggagtttgatttcccgccatttatggttctgatcattgcaattctgaatgatggtaccataatgactatatctaaggatctagtaaagccttctccactacctgacagctggaagttggctgaaattttcacaactggagttgtgctgggtggatacttggcaatgatgactgttatatcttctgggctgcatacaagaccaactttttccctaggatctttcacgtcgaaagccttgagaagacagctccaagatgactaccaaaagcttgcatctgctgtatatcttcaagttagcaccatcagccaagctcttatctttgtcacaaggtctcgcagctggtcatttatcgaacgccctggctttctacttgtctttgctttcttcgttgcacagctgatagctacattgatagctgtttatgctaactgggcattcacttcaatcaaaggcattggatggggctgggccggtatcgtgtggctctacaatctcgttttctacttcccgctcgatatcatcaagttcctcatccgatatgctctgagtgggaaagcatgggatcttgtcattgagcagagaattgcgtttacaaggaagaaggattttggcaaggaagagagggaactcaagtgggcacatgcacataggacactccatggcctgcagccaccggatgcgaagcccttcccagagaagaccggctacagtgagctgaatcagatggcggaagaggcgaaacggagggccgagattgcaaggctcagggagcttcatacgctgaaggggcatgtggagtcagttgtgaagctgaagggcctggacattgataccattcaccagtcctacacagtgtgatagactcttatctaacaagagtaatatggttgctgcagaggaacttgttcgtttcatctaattagtagtttttatctcctctcagctaacataaatgtaatcaaccaacagttcatacaatctataaatcaaatcatcaaaggggattgttg

SEQ ID NO: 385757 - DNA, 483 bp, Oryza sativa
tttttttttttttttggtttatgctgcttgctcttatttgggagtttgatttcacgccatttatggttctgatcgttacaatttctgaatgatggtatatgatatccttgttccctccatacctactatatctcataatacttcagtactaagtagttcattttcttgattttcactccaaccattttccaccacaaacaggtaccataatgactatatctaagcatcgagtaaagccttctccaatacctgacagctggaagttggctgaaaattttacaactgcagttgtccttggtggatagttggcaaagatgcatgttatattcttcagagctgcatacaagtccaactttttcaccaggctgtcattgctttggtagctcttcctcatcaaaccaccttgggggatcatatccatgaccaccaagaggattacagcggcatagacgccaagctgtcaagattgtaccctttgcaaca

SEQ ID NO: 385758 - DNA, 3424 bp, Oryza sativa
gaagggcagcagcagcagcagcagcagcaaacgcagcaggcgaaggcgccggcttggagaggctggtggcttcgtggtctctctcttctctctccccctagcagcagcgcagaggcggaggaggggggagatggccgagaagggtgacaatctggaggccgtgctcaacgagtccgtcgatctcgagaacataccgttggaggaggtgttcgagcacctgcgatgcaaccgcgagggcctcacctccgccaatgccgagcagcgcctcaacctcttcggcctcaacaggctcgaggagaagaaggagagcaagttcttgaagttcttggggttcatgtggaacccactgtcctgggtcatggaggccgccgcaatcatggccatcgttctcgccaatggaggagggaagccgccggactggcaggatttcgtgggcatcattacactgctcatcatcaactccacaatcagtttcattgaggagaacaatgccggcaatgccgccgccgctctcatggctcgcctcgcccccaaggccaaggttcttagaaatggaagatggagtgaagaggaagcagccatccttgtgccgggggacatcatcagcgtcaagcgtggagatatcatccctgctgatgcccgtctccttgagggtgatccgttaaagattgatcagtctgcgcttaccggtgagtcccttccggtgaccaagggccctggagatggagtgtactctggctccacatgcaagcagggtgaaatcgaggctgttgtcattgcaaccggtgtgcacacgttcttcggcaaggccgcacatcttgtcgattcgacaaaccaagttggccatttccagaaggttctgactgccatcgggaacttctgcatctgttcaattgctattggaatggttgtagagattattgtcatgtaccccatccaacacagggattaccgaccagggattgacaatcttttggtgcttctgattggaggaattcccattgccatgcccactgttctttctgtgactatggcaatcgggtcacaccgcttggctcagcagggagcaattacaaagaggatgacagctattgaggaaatggctggtatggatgttctttgcagtgacaaaacaggaacactaaccttgaacaagttgactgtggataagagtcttattgaggttttccaaagaggtgttgaccaggatactgtcatactaatggctgccagagcttcacgtaccgaaaatcaggatgccatagatgccacaatagttggtatgcttgctgatccaaaagaggctcgtgctggtattcaagaggttcattttctgccattcaatccaactgacaaaaggactgctttaacctacattgatggtgaggggaaaatgcaccgtgtaagcaagggagcaccagaacagatccttaatcttgcacacaacaaaactgagattgaaagaagagtcagagctgtaattgacaaatttgctgagcgtggcttgcgatcacttgctgtgcaataccatcaagtgccagatggtaggaaagaaagtcctggaggaccatggcaatttgttgggctcttgccactttttgaccctcctcgacacgatagtgcagaaacaatcaggagggcactcaaccttggtgtcaatgttaaaatgattacaggtgaccaacttgcaataggcaaggaaacagcacgccgcttgggaatgggtactaatatgtatccctcatctgctttactgggacaagataaggatgaatcaattgtggctttgccagttgatgaattaattgagaaagctgatggctttgctggagtctttcctgagcacaagtatgagattgtgaaacgcttgcaagcaagaaaacatatatgtggtatgactggagatggtgtgaatgatgctcccgctttgaagaaggctgatattggcattgctgtggacgactcgactgatgcagcccgtagtgcctccgatattgtcctaactgagccaggccttagtgtgattattagtgctgtgcttacaagtcgagcaattttccagaggatgaagaattacactatttatgctgtttcaattacaattcgtattgtgcttggttttatgcttcttgctctgatatggaagttcgatttcccaccatttatggtcctgatcattgccatcctcaatgacggtaccataatgaccatttcaaaggacagagtaaaaccatccccacaacctgatagctggaagttatctgagatttttgcaactggggtcgtccttggtagttacttggccatgatgacagtcattttcttctgggtagcatacaagactgatttcttcccgagagtgtttcacgttgaaagccttgaaaagactgctcaggatgactttcagaagcttgcatctgctgtctatcttcaagtcagcacaatcagccaggccctcatcttcgtaactcggtctcgcagctggtcatttgtggagcgcccaggattcttgttggtttttgctttctttgtagctcaactgattgctactctgattgctgtatatgccaactggggattcgcttcaatcaagggcattggatggggctgggctggtgtcatctggctctacaacatcgtcttttacttgccactggacatcatcaagttcctgatccgttatgcgttgagtgggagggcatgggatcttgttcttgagcaaaggattgctttcacaaggaagaaggatttcggcacacaagaaaaccagctcaagtgggcgactgctcagaggaccatccatgggctccagccagccgccaccgcggctgtcttccgcgacatgacaagctacaacgatctcaaccagcttgcagaagaggcccgtaggagagccgaaatcgcaaggttgagagagctgaccaccctgaaggggcggatggagtcggtggtgaagcagaagggcttggatcttgagaccatccagcagtcatacaccgtgtgattaacagagaatctccaatatatatatttattatatactatttataatgtgctaggccacaacaataatttacctggatgatgatgattgagcggatttccagtgtcggtgcggtgctaatcgctagagttcatcccccatctatcttgtgtccattaaccacccccggcagatgggcttgcattgagatactatatacaaactctttttactactagatgatataataggttcaattttgttttgtcaaaaaaaaaacgaaaaaaaaaaaaaaaaaaaaaaaaataataaagataattataaaaagaaaaaaaaaaaaatagatattaaaaataattaatttagttaaatttaatgtgggggcggcccctttaaaggatccaagctaacttccccgtgcttcgcgacgaaaagtttttt

SEQ ID NO: 385759 - DNA, 1266 bp, Oryza sativa
  unsure (1)..(1266): unsure at all n locations
ccacgcgtccggccgcgcccccactgcgctctcctcttcgtcacccgtcgccacctcgccccatcaccctctccctccaccacactacaccccgctccactctcaggcaggcaatcagcggcgaggcaccagcccaccggccggcaatggcgtccacctcctgcttcctccaccagtccacggcccgcgtcgccgcgcgcgtcgcctccccgtccccggcgacacggacccacctcctcgtctgccgcgcccagaagcaggacgacgccgacgtctcccgccgcgcggcgctcgcgctgctggccggagcgacggcggcggtgggggtgaaggtggcgcccgccgccgcggcctacggcgaggcggcgaacgtgttcgggaagcccaagacgaacacggagttcatcgcctacagcggcgaggggttcaagctgctgatcccgtccaagtggaaccccagcaaggagcgcgagttccccggacaggtcctccgctacgaggacaacttcgacgccaacagcaacgtctccgtcataatcaaccccaccaccaagaagaccatcaccgagttcggctcccccgaggagttcctcgcccaggtcgacttcttgcttggcaagcaggcctactccggcaagacagattccgagggtgggtttgagtcggacgcggtggcgacggcgaacatcctggagagctcggcgccggtggtgggagggaagcagtactacagcgtaacggtgctgacgaggacggcggacggcgacgagggcggcaagcaccagctgatcacggccaccgtcaacgacggcaagctgtacatctgcaaggcgcaggccggcgacaagaggtggttcaagggcgccaggaagttcgtcgagagcgcagccagctccttcagcgtcgcatgatcgtcgaaatctctatctcagcttctctttaatccctagcgaatcaaaatcaaatcaatcgagttcgttgctcagagagatgcagtgcacgcatgtgtgtgtgcgtgtgtgtttctttgattgtacatgagaattaagaacaagttaaggagagaggtcgatccatcgatttcccctgcatgcaaggattgattttctgtgatccgtgtgttaagtaatcctagtaattaatcatgtttcatttaaaaaaaaaaaaaaatttaatccatgcttgacatgacactcatatatatgtaggagctgctttatttagtttaatctagtgcattttcatnnnnnnnnnnnnnnnnnnnnn

SEQ ID NO: 385760 - DNA, 869 bp, Oryza sativa
  unsure (1)..(869): unsure at all n locations
ccacgcgtccgcccacgcgtccgcccacgcgtccgcccacgcgtccgcccgccgccgcggcctacggcgaggcggcgaacgtgttcgggaagcccaagacgaacacggagttcatcgcctacagcggcgaggggttcaagctgctgatcccgtccaagtggaaccccagcaaggagcgcgagttccccggacaggtcctccgctacgaggacaacttcgacgccaacagcaacgtctccgtcataatcaaccccaccaccaagaagaccatcaccgagttcggctcccccgaggagttcctcgccccaggtcgacttcttgcttggcaagcaggcctactccggcaagacagattccgagggtgggtttgagtcggacgcggtggcgacggcgaacatcctggagagctcggcgccggtggtgggagggaagcagtactacagcgtaacggtgctgacgaggacggcggacggcgacgagggcggcaagcaccagctgatcacggccaccgtcaacgacggcaagctgtacatctgcaaggngnaggccggcgacaagaggtggttcaagggcgccaggaagttcgtcgagagcgcagccagctccttcagcgtcgcatgatcgtcgaaatctctatctcagcttctctttaatccctagcgaatcaaaatcaaatcaatcgagttcgttgctcagagagatgcagtgcacgcatgtgtgtgtgcgtgtgtgtttctttgattgtacatgagaattaagaacaagttaaggagagaggtggatccatcgatttcccctgcatgcacggattgnttttnaaagaagacttnaaaatagngacnatactttgttccttttnaaagngctca

SEQ ID NO: 385761 - DNA, 2598 bp, Oryza sativa
gcatgctcgcgaaaaacgaggaggggagttaggaaccttgacatacaaccaatgataccattttttttcaagcagctagaggtacagaggttcatattttttagatggctcattagtgatattttagtcaaaaatttcagaagtacggccacgggtgatggcctgaactaatattttattcgaggtgccgctacatcatcgtctaaagtacacgcaagattcaacggaaaaaagaaaccgatcgatcgagatcagttagttaatgaaataactagatcaactcatgtcgtcaaaaacaaaagatgctcatctatggacaacacacgctgatgattcgatcatcaaacaaaggtggtagtagtagtaaagcgtatcgtgtttctcatcagaaagaagaattaaagaaaaaactaatcccgtctcgcgagccagagaaaattccctacaaaagccactcctttgatttgacatgcaaaagcaaggctccactcctctactaccctacaactacacaacactgtctctctatctccaaaggcagtagctgtattggcttccagcttttcctctctacctctaatgatagcttggagcaagttcaatagtatagctaactactagctctaattcatctataatcaatctaatagcttattcatacaatagttatatactacattattaatatctggtcccatctatcatacacactgagtctgtgctatagctgactacaaatctgtagcccgctgctcttctctcttcatttatcttcttaaaatatatttgcagctggcttatggcttatagcttgatattgagagggagaggagtgagagctagctcagctcagctcaaggtaaacaacaaggcacactcttcctacctcttctccggttcttcctttttcctctttctcttcgtccaagaacttcacctcaatagctcgagctacggcctaacttttgcgttgcgcaggagagctcgatcgctgcaccaatacttcactggagatcgcctagctgcagctagctagcttatcctgcgtgtcttgagcttctctcatggaggagatctcccaccacttcggggtcgtcggagccagcggcgtccatggcggccaccagcatcagcatcaccaccacccgtggggttcttccctgagcgccatcgtcgcgccgccgccgccgccgcagctgcagcagcagcagacgcaggccggcggcatggcgcacacgccgctcacgctgaacacggcggcggcggcggtcggcaacccggtgctgcagctggcgaacggcagcctgctcgacgcgtgcggcaaggcgaaggaggcgtcggcgtcggcgtcgtacgcgcccgacgtggaggccatcaaggccaagatcatctcccacccccactactcctccctcctcgccgcctacctcgactgccagaaggttggggcgccgccggaggtggcggcgaggctgacggcggtggcgcaggacctggagcttcgccagcgcacggcgctcggcgtcctcggcgccgccacggagccggagctggaccagttcatggaggcgtaccacgagatgctggtgaagtacagggaggagctgacgaggccgctgcaggaggccatggagttcttgaggagggtggagacgcagctcaacacgctctccatctccggcagatcgcttcgcaatatcctttcctccggctcttctgaggaggaccaagaaggtagcggaggagagacagagctacctgagattgatgcacatggtgtggatcaggagctcaagcaccatttgctgaagaagtacagtggatacctgagctccctgaagcaagaactgtcaaagaagaagaaaaaagggaagctccccaaggatgctcgtcaacagctcctcaactggtgggagctgcactacaaatggccttacccctcggagagtcagaaggtggcactggcggagtcgacggggctggacctgaagcagatcaacaactggttcatcaaccagaggaagcggcactggaagccctccgacgagatgcagttcgtgatgatggacggctaccacccgaccaacgccgccgccttctacatggacggccacttcatcaacgacggcggcctctacaggctcggctagctagctagcctactccttatccccagctaccatgacctagatcgatctcgaccccaaatcaatggtcgctaagctactgaaaagtttgtgatgagaattgaagaacctaggttagtcttcctggtaatttgatgctcgcgcgtacgcacgccatggatggctgcgtgcttattttgtttcttgccgcaatatgtaatgcaattgccttagctaatgcatcaactcgggtcggttttagctgctgctgctgcgccacaatgaaggtggttgtggttatgcttttgtgtggtttaatacgccaagacgtacacattgcttcgaaatgtcgctactcttgctgctgctaattaagtgcgtgtttgaataattcggatctatatactacctggttaattcctatcttctgattatataatttgctgatcgttcgagtttgtgagattttttt

SEQ ID NO: 385762 - DNA, 1370 bp, Oryza sativa
tctttaatacctctcctcctcctgttgctgcttctgcctctctcacatcttctttctttccttctctggatctcttccatcttcagaagagagagcactagttagcatacccatccatgatgaacatgatgaccgatctgagctgcgggccatcgtcgatgacggagctgaccgcggcaggcgccggctgggtcaggatcgtcggcggcggtggcggcggggagcagcgagaagatggggagggggaagatcgagataaagcggatcgagaacacgacgaaccggcaggtgaccttctgcaagcgccgcaatggcctcctgaagaaggcgtacgagctgtccgtcctctgcgacgccgaggttgccctcatcgtcttctccagccgcgggcgcctctacgagtacgccaacaacagtgtgaaatccaccgttgagaggtacaagaaggcaaacagtgacacctccaactctggcacagttgcagaagtcaatgcccagcactaccagcaggagtcctccaaactgcgccaacaaatcagtagcttacagaacgcaaacagtaggaccatagtgggggattctatcaacaccatgagcctcagggaccttaaacaggtagagaacaggctggagaaaggcatagctaagataagggctagaaagaatgagctgttatatgctgaagttgagtacatgcagaaaagggaagttgagctgcagaatgacaacatgtacctgaggagcaaggttgttgagaatgagaggggacagcagccactgaacatgatgggggcagcatcaacaagtgaatacgatcatatggttaataacccatatgattccaggaactttcttcaagtgaacatcatgcagcagcctcagcattacgcccatcagctgcagccaactacccttcaactcgggcagcagccggccttcaattagttttggtgtagacaccgtacgtacacacatgaaatctgaaggcgtcgatacccgcggctacgtaacagcgtgatcaacctgaagaaatcgatgcagtaattctatgtgttcgtcagatcatcataaccagtattgtcattaggcgttgtgaaaaaaaaatgtgtcagcatgcattgcaagctagcgtttgtggctgctcatcagctgcatgcgtaattgcgtacgtgcacaaattaaacagaccttgctaccattgtgccatattgtgtgtgttgtatgatatatatatatatatatatatatatatatatatatatatatatataaacagcacgtttgtgctctgattcgtgtaactgatcagcagatcaaactctaccactgccgatatatatgtgaggaccatggattgatgcattgtcgtt

SEQ ID NO: 385763 - DNA, 1929 bp, Oryza sativa
ctcctcctcctcctcttcttggtcgtcttctcctagctcgccaagatgaggatttccatggctctcgcggcggccgcgctgctgctgctgctgtcgctggcagcggcggacatgtcgatcgtgtcgtacggggagaggagcgaggaggaggcgcggcggctgtacgcggagtggaaggccgagcacggcaagagctacaacgccgtcggcgaggaggagcggcggtacgcggcgttcagggacaacctccggtacatcgacgagcacaacgccgccgccgacgccggggtccactccttccgcctcggcctcaaccgcttcgccgacctcaccaacgaggagtaccgggacacctacctcggcctcaggaacaagccgcggagggagaggaaggtcagcgacaggtacctcgccgccgacaacgaggcgctgccggagtccgttgactggaggaccaagggggccgtggctgagatcaaggaccagggaggttgcggaagttgctgggctttctcagcaatagcagctgtagaaggcatcaaccagattgttactggcgacctgatatctttgtctgagcaggagctagttgactgtgacacttcatataacgagggatgcaatggaggtctgatggactatgcatttgatttcatcatcaacaatggtggaatcgacaccgaggatgactacccttacaaaggcaaggacgaacggtgtgacgtaaacaggaaaaacgcaaaggttgtcacaattgacagctacgaagatgtaacaccaaacagtgagacgagtctgcagaaggcggtagcaaaccagcccgtcagtgttgcaattgaagccggtggcagagcattccagctctactcatcgggtatcttcacgggtaaatgtggaacagcactagaccacggcgtcgctgctgttgggtacggcacagagaatggcaaggactactggatcgtgaggaactcgtggggcaagagctggggtgagtccggctacgtccgtatggagcgcaacatcaaggcgagcagtggcaagtgcggcattgccgttgagccatcctaccctctgaagaagggcgagaaccccccgaaccccggccctactccgccgtccccaaccccgcctcccaccgtctgcgacaactactacacttgccccgatagcaccacctgctgctgcatctacgagtatggcaaatactgctacgcctggggctgctgcccactcgagggcgccacctgctgcgatgatcactacagctgctgccctcacgagtaccccatctgcaatgttcagcagggaacctgcctcatggctaaggacagtccactggcagtgaaggctctgaagcgtaccctggcaaagccaaacttgtctttcttgtttggcaacggcaagaagagcagcgcttgagcaatttcagaaccgtatcagaccgtccagagccagcgtggttgcatcatcaaatgatcagctggtaactgacgaagacgattgcgcagctcggcggcgaaccctgcgcactaagtatatctgcttttataatagatttctcgtgtacataaaatctaaaaaaacgggttcagttggttacagaactgccaaatttgcttctgaatgtatatgtaaaattcagctaggtttgctcctaagctcctagatgccagttcgacggaactgcaaattgatattggaacaagataaggtcattgccatattaatccatcattcatgtattccataccaatatctcattcgcaagcagtgctgatgatcatgctcttgacttttggggtcttgccaatgagcaaattatacttggcttccctcagaaacacatacatactcactccgttcccagttcatgtacaagcctaccctgatagctgttatccagatctgagttgtagttctgtgatt

SEQ ID NO: 385764 - DNA, 312 bp, Oryza sativa
  unsure (1)..(312): unsure at all n locations
cgaagacgattgcgcagctcggcggcgaacctgcgcantaagtatatctgcttttataatagatttctcgtgcacataaaatctaaaaaaacgggttcagttggttacagaactgccaaatttgcttctgaatgtatatgtaaaattcagctaggtttgctcctaagctcctagatgccagttcgacggaactgcaaattgatattggaacaagataaggtcattgccatattaatccatcattcatgtattccataccaaaaaaaaaaaaaaaagcaagaggagcatctaaaaaacgaaactattaaaatt

SEQ ID NO: 385765 - DNA, 1822 bp, Oryza sativa
  unsure (1)..(1822): unsure at all n locations
aattcggcacgagctcgtcaattcgagcaagcgaagaaggaaaaaaaaaggaggaaaagaaaagaggaggaaagcgaagaggttggagagagacgctcgtctccacgtcgccgccatggccgcccgcgccgccgccgccgcgttcctgctgctgctcatcgtcggcgcggccaccgcggcgccggacatgtcgatcatctcctacaacgcggagcacggggcgcgggggctggaggaggggcccacggaggccgaggcgcgcgccgcgtacgacctctggctcgccgagaacggcggcggctcgcccaacgcgctcggcggcgagcacgagcgccggttcctcgtgttctgggacaacctcaagttcgtcgacgcccacaacgcccgcgccgacgagcgcggcgggttccgcctcgggatgaaccgcttcgccgatctcaccaacgaggagttccgcgcgaccttcctcggcgccaaggtcgccgagaggagccgcgccgccggggagaggtaccgccacgacggggtggaggagctgccggagtccgtcgactggagggagaagggcgccgtcgcccccgtcaagaaccagggccaatgcggaagctgctgggccttctccgcagtaagcacagtagaaagcatcaaccaacttgttactggtgagatgatcacattgtcggaacaagaacttgtagaatgctcaaccaatggacagaacagtggctgcaacggtgggctcatggctgatgcctttgacttcatcattaagaatggaggcattgatactgaagatgactatccttacaaagctgtagatggcaagtgtgacatcaacagggaaaatgctaaggttgtgagcatcgatggctttgaggatgtacctcaaaatgatgagaaatcacttcagaaggcggttgctcaccaaccagtcagtgttgctattgaggctggtggccgcgagttccagctctatcattcgggcgtcttcagcggtaggtgtggcacaagccttgaccatggtgtggttgccgtcggttatggcactgacaatggcaaagactactggattgtccgcaactcttggggcccgaagtggggtgagtctggatacgttcgcatggagcgcaatatcaatgtgaccacggggaagtgtggcattgccatgatggcatcataccctaccaagagcggagcaaacccacccaagccatctccgactcctccaactcctccaacaccacctcccccatccgcccctgaccatgtctgcgatgataacttctcttgcccagcgggcagcacctgctgctgcgcattcggcttcaggaatctctgcttggtttggggctgttgcccagttgaaggtgcaacctgctgcaaggatcatgccagctgctgcccgcctgactaccctgtctgcaacacccgggctggaacctgctcagcgagcaagaacagcccattgagcgtgaaggctttgaagcgcacgctcgctaagctgaacaccgcatgagctcatcgataacatgtaatcggcgaggagaggggatgaggcagcgtggagcctttctgaaatttctgcttccgtgcctccatatatcgttgtcgcattttgaggggacagcttatttactctactgcctgccttttatcttacagtgatctgtgtacatagctcgatccaatttgtactcttatttatcttctccaatttgtactctatataatttatcatctcaagaatacattaacgaagatcctgttttaccgttccaaaaaaaaaaaaaaaannnnnnnnnnnnnnnnnnnnnnnnnnnnn

SEQ ID NO: 385766 - DNA, 1485 bp, Oryza sativa
ccacgcgtccggtccactctcacaccaaaaccagtaaaaaaatatcgtcaccttcgccggcgagatggcccaccgccgcatcatcctcctcctcgccgccgccgccgtcgccgcgacctccgccgtcgccgccgcgtcctccggcttcgacgactccaacccgatccgctccgtcacggaccacgccgcctccgcgctcgagtcaaccgtcatcgccgccctcggccgcacccgcgacgccctccgcttcgcccgcttcgccgtcaggcatgggaagaggtacggcgacgcggcggaggtgcagcggcggttccggatcttctccgagagcctcgagctcgtccgctccaccaaccggaggggcctcccctaccgcctcggcatcaaccgtttcgcggacatgagctgggaggagttccaggcgagccggctcggcgcggcgcagaactgctcggcgacgctcgccggcaaccaccggatgcgcgacgccgccgctctcccggagaccaaagactggagggaggatgggatcgtgagccccgtgaaagaccagggtcactgtggttcctgttggaccttcagcaccactggttctcttgaggcagcatatactcaggccactgggaagcctgtctctctttctgagcagcagctggttgattgtgctactgcatacaataatttcggatgcagtggaggcctaccatctcaggcctttgagtacatcaaatacaatggtggccttgacactgaagaggcttacccttacacgggtgtcaatggcatctgtcattacaagcctgaaaacgttggagtcaaggttttggactccgttaacatcaccctgggtgctgaggatgagctgaagaatgctgttggacttgttcgtccagttagtgttgcctttcaggtgatcaacggtttcaggatgtacaagagtggagtttacacaagtgaccattgtggaacttctccaatggatgtgaaccacgctgttctggccgttggctatggtgtcgaaaatggcgttccctactggctcatcaagaactcatggggtgcagactggggtgacaatggttacttcaagatggaaatgggcaagaacatgtgcggtattgctacttgcgcatcctaccctattgttgcatgaggtgcccacggattagttccattgtgtcaatttagttggcctcaataatatatttttctgtccaaggatgaagatgggtatacagaaactgaaactttcttgtgaatataagatcataaggacatgaattagcccagtgcatgtaatcttctcctgtatggttgtgtaggtaatccagcaattggggtttcagagtactcattacatggctgtaaattcctatttatgcgacagaatggcctattcatatttcatagtgcagttacgaaaattcgggtcatgtgtacattattattcgagtgattttacagccatctattatagtttctggt

SEQ ID NO: 385767 - DNA, 1355 bp, Oryza sativa
  unsure (1)..(1355): unsure at all n locations
ctcgcgatcgcacagccggagaccgaatcggataagctcgccggagtaatcgccgccgatgccaccgccgccgccgccgctcctcttggccgcggccgttctcgcttcggcggcggcggcactcgctgaccctcctccccctccgtccccgacgccgtggccggagcggttccacgcggtgcttttcacgaacctgacccagacgagcggcggcgggaagctgcagatgaccgacctctactacgactggcctggggggcgcaacctcaacctcgtcgccggccagctctccggcgacccggtctacgacgtcgagtggaccaacggcacctcctactacttcgactccgcctcctgccgcaccttgctgttccccgtcggcatcctgccccccgactggctcgccgccggcgctcgcctacctcggccgcgaggccgttgacggcttcgactgccacgtctggaccaaggtcgacttcatctggtactacgaggacgtcgtcacccaccgccccgtccgctggaacttctacaccgggatgcagcagcatgtgatgagctttgaggtgggtggagccctagaggattccaagtggcaggcaccggcatactgcttcaacgatcaagaagccgccacaaattccgacaccgccaacgacaatgaagacggtgaggtcgatgcgatgagcagcctcctcaagttcttcagggctcagcaaacagccgtggcagcagtatgactatgagcaagacttatcacttatgagaatcttacttcctccgtttcatattataagactttctagcattatctacattcgtatatatgttaatattaacatctacatgaatatgggtaatgctagaaagttaggggctgtttggatgacttccctagtttaccacaaaatatttggcaaagtgtggcatgccatacattgtatagctaagaatttgttggccacaatcgtgagcaagttatggcaaaaaaaaattactcaatgacaagtgggctagcttgctaaaaaattgaggcataactcacttgtggcatgaaacaaccactaggcttaattggtcaaacttgattgccacaactttggcaaaggttggcactcaaccaaacaacccattataacctgaaacggaggtagtagcaattatccattggcggtctggtccagtctgttcttggatcatgttgtaattttgcataaaaagcgtttatgtatatactccccttttatgtttccnntctcatatattagaggatgaagatgggtatacagaaactgaaactttcttgtgaatataagatcataaggacatgaattagcccagtgcatgtaatcttc

SEQ ID NO: 385768 - DNA, 641 bp, Oryza sativa
atccagatctccattattactacctctctcttcttctcccacaagtcagagaaggaaggatccaatactagaaaagggaaaaaaaaataaatcaaaatccattccccttctccttccccaaacacggtgtggtctgcacgcgactcctcccccctccgccgccgccgccgccgcagcgagaccccggcgaatggcgtcccgcatcgcctctcgcctcctccgccgctccaacgcgactctaggcctcatcaggagttattcacatgccaggaactacagcagtcaactttcagctcttattccaattggttcccagagctcaaagcttacaagaagacgctattacttgccaaatgcctctccgtaccaactctggagtaggtcatttgcatctgacaatggagaccaggttgaagctgttgtccctttcatgggtgaatctgtaactgatggaactcttgctaacttcttgaagaaacctggtgacagagttgaggctgatgagcccatagcacagattgaaactgataaggttactatagatgttgctagtccggaagctggtgttattgaaaagtttcattgctagcgaaggtgatactgttactccaggcaccaaagttgctatcatatcaaagtct

SEQ ID NO: 385769 - DNA, 1409 bp, Oryza sativa
aacaacgtcgtcggccacctcctgcactccttcatcctcgtcccctaccatggatggaggttcagccacagaacacaccatcagaaccacggtcatatcgagagggacgagtcctggcacccgatcaccgagaaattgtactggcagctggagacacgcaccaagaaactgcgctttacattaccatttacattgcttgccttcccttggtacagaagtccgggcaagaccggatcacactttctgccgagcagcgatctgttcagccccaaggaaaagagtgacgtgattgtctccaccacctgctggtgcatcatgatttcgttgctcgtcgccttggcgtgcgtgtttggccctgttccggtgctcatgctatacggtgtcccatatcttgtattcgtgatgtggcttgatttggtgacttatctgcaccaccacggtcacaatgaccttccctggtatcgtggagaggaatggagctacctccgcggtggcctgacaacggtggatcgggactacgggtggatcaacaacatccaccatgacattggcacccatgtcatccaccaccttttcccccaaattcctcattatcacctcgtagaagcaacaaaggcagcaagaccagtgctgggtagatactacagggagccagagaagtcaggtccgctgccacttcacctgtttggcgttctgctgaggaccttgagagttgatcactttgtcagcgacgtcggggatgttgtttactaccaaacagatcacagcttgaacggcactgactgggccgaagatgctaagcacaagtgaaaaattaacttgaaaattattggagtcaccgtgtactagtagcttagtaagcgaagaatggattattttcctgatagatagcatatccatcatagcatgaactgctgaaagaaagagaaataataagcagcaagggctaccttacctgctcaaaagcatgcggccctgcagaacacagggattcattgatctgttggatcaccatattcagatcactaaacaagcattgtccaattgttgttgtagctagcgggtcgttcagttttgactagttctgaaagtgtccaagttataccgtgtaaccctttggagttcgccaggcaattcaatgtctggagtttgtatgcgccattgagcagacaattatgatccgaattaagctctgcaccttaatttttccaaaaaaaaaaaaaaaaaaaaaaaaaaaaaaaaaaaaaaaaaaaaaaaaaaaaaaaaaaaaaaaaaataaaaaaaaaaaaaaaaaaaaaaaaaaaaaaaatattgaaaaaaaaaaaaaaaaggggggggcctttttaggggaccaaagtttctttcccggggatggcaaattataattttctttatggggcccccaaaat

SEQ ID NO: 385770 - DNA, 1176 bp, Oryza sativa
  unsure (1)..(1176): unsure at all n locations
aaagcagggcacacgcatacacatcgcaagccgcccaaaccctacacaatcttcgaatccccaccgaatcgcgcgagagagaaatccaaggcgaggacgaggaggaggagaaggaagcttcgagaatgttccggaaccagtacgacaccgacgtgacgacgtggagcccggcggggcggctgttccaggtggagtacgccatggaggccgtgaagcagggctccgcctgcgtcggcctccgctcccgcacccacgccgtcctcgccgccgcgaacaaggccgcctccgagctctcctcccaccagcggaaggtcttccgcgtcgcagaccacgccggggtcgcgctcgccggcctcaccgccgacggccgcgtcctctcccgattcctccgctccgagtgcatcaaccacgccttcgtctacgacgcgcccctccccgtctccaggctcgcgctccgccttgccgacaaggcgcaggtttgcacacagcgatcatggaagaggccatatggtgttggcctccttgttgctggattagatgagtctggagcccatctatactataactgccccagcggcaactattttgagtaccaggcatttgctattggctctcgctctcaagccgccaagactttccttgagcgcagattcgagggctacaacgactacaccccagagcaacttatcaaagatgccctctccgccataaaggagacgctgcaaggtgagaagctaaccagctccaactgcaccgttgctattgttggcagaaaggacgatggcaccgttgagccatttgagatgatcgacgtgaagaggatccaagaaataatcgattccatggaggctgccgaggaggcaccagcggcagaggctgagtcgagctcgatgcaggaggaggacaagggcacggacgccgcgcccatggacatctaggcccaagatacatcttatctcctcccttacaccgtgtctgagtttccaaaagactactgttttagaaagctgtgactgttgtgtaccctttcttcagtactacaactttgcgacggtctctttgatcaacatcgattgtgttttggaccgattatttacatgtgatgcggccaaaaaatctctttggtttcggggcccnnnnnnnnnnnnnnnnnnnnnnnnnnnnnnnnnnnnnnnn

SEQ ID NO: 385771 - DNA, 1365 bp, Oryza sativa
  unsure (1)..(1365): unsure at all n locations
tcgtagcaacatgcattctcttctagccttagcctagctagctagctttgttgtctagctctgatcgaggttggtggtgatcatggcgtcgtcgagggtgatcctagcgctgctgctcgcggcggcggcggtgatggcgtcgtcggcgcagctggacgagaagttctacagcaattcgtgccccagcgtggaggccgtcgtccggaaggagatggtgcgcgcgctcggcgccgcgcccagcctcgccggcccgctcctcaggatgcacttccacgactgcttcgtcaggggttgcgacggctcggtgctgctcgactcggccgggaacagcacggcggagaaggacgcgacgccgaaccagacgctgcgcgggttcggcttcgtcgagagggtgaaggccgccgtggagaaggcatgcccgggcaccgtctcctgcgccgacgtgctcgcgctcatggccagggacgccgtgtggctgagcaagggcccgttctgggcggtgcctctcggccgccgcgacggcagggtgtccatcgccaacgagaccgaccagctgccgcctcccaccgccaacttcaccgagctcacccagatgttcgccgccaagaacctcgacctcaaggacctcgtcgtcctctccgctgggcacacgatcgggacgtcgcactgcttctccttcactgacaggctgtacaacttcaccggcctggacaacgcccacgacatcgacccgacgctggagctgcagtacatggcgaggctgaggagcaagtgcacgagcctccaagacaacacgacgctggtggagatggacccggggagcttcaagacgttcgacctggggtacttcaagaacgtggccaagcggcgggggctcttccactccgacggcgagctgctcaccaacggcttcacccgcgcctacgtgcagcgccacgccggcggcggctacaaggacgagttcttcgccgacttcgccgcctccatggtcaagatgggcggcgtcgaagtgctcaccggcagccagggcgagatcaggaagaagtgcaacgtggttaactaatcatctctcttaattatcgtcatatatcatcagctgctcgccgagactgtgattatggatttcagcttttgattccggccgtgaccatcttataattaatttccatgtagatcattatcgtaagatttacctgtcccttctttttttttcttgatttcaatcacttcattaattaattgttttgtttatatagcgagccatgcatgtatgtaacaaagttttctccaagtacgtgctcatcatgatcatatgaataaacttcattttttttcaccttgcacacccaacnnnnnnnnnnnnnn

SEQ ID NO: 385772 - DNA, 978 bp, Oryza sativa
cttcccctggatccaaaatcgaaatttctctccccctgttcacaccacgcctcactcccatggcgaccgaggaggacgcgtcgaccatggcggcggccgaggcggaccccaagcccgccgccaccccgtcttacccggagatgatactggcggcgatcgaggcgctggacgacaggaacgggtcgaacaagacggcgatctcgcagcacatcgaggggaagtacgaggggctcctcccccccgcgcacccgtcgctcctcacagcgcacctcgcccgcatgaagcagaccggcgagctcgccttctccaagaacaactacttccgcggcgacgacccgtccctcccgcccaagcgcggccgcggcaggccgcccaagcccaaggacgccgccgccgccgccgctgcaccggcgcccgcgcccgcggcgccggcggcctcctcgccgcgcccccgtggccgcccgcctaagcccaaggaccccctcgccgaggcggtcgcgaaggccaccagtggcatgccccgcgcgcgcggccgcccgcccaagaaggccaaggtcgaacaggaagaccccattggcgctcccgccgcagcttcggctcccgccgcggcggctgaggccgcgccgcctgtcaagcgcggccgtgggcgcccgcccaaggtgagacccgccgcgccggtcggggagccagccgctgcttgattagctccgattctccgcatcgccgcgatggcgacgatggtaagctcctttaggttgtaacgtagtcttcagattatgtctcgtactgattggaggcgcggctcgggttgctgcttattgtaagttaatcggatggtgggaggtttaggtgtgctggatggatcatccgttgctgagagttgtgattgaattcgtgttatcgcgtgctgattattatggtaatgttggtgactttcgtgtcgtttgtgttaattctagattggtggctgcatttagt

SEQ ID NO: 385773 - DNA, 3022 bp, Oryza sativa
gcggccgctcgcgatctagaaccggacgcgtgagtctctcttctcccgcaattttataatctcgatcgatccaatctgctccccttcttcttctactctccccatctcggctctcgccatcgccatcctcctctcccttcccggagaagacgcctccctccgccgatcaccacccggtagggcgaggagggagccaaatccaaatcagcagccatggcgcagatgctgctccatgggacgctgcacgccaccatcttcgaggcggcgtcgctctccaacccgcaccgcgccagcggaagcgcccccaagttcatccgcaagtttgtggaggggattgaggacactgtgggtgtcggcaaaggcgccaccaaggtgtattctaccattgatctggagaaagctcgtgtagggcgaactaggatgataaccaatgagcccatcaaccctcgctggtatgagtcgttccacatctattgcgctcatatggcttccaatgtgatcttcactgtcaagattgataaccctattggggcaacgaatattgggagggcttacctgcctgtccaagagcttctcaatggagaggagattgacagatggctcgatatctgtgataataaccgcgagtctgttggtgagagcaagatccatgtgaagcttcagtacttcgatgtttccaaggatcgcaattgggcgaggggtgtccgcagtaccaagtatccaggtgttccttacaccttcttctctcagaggcaagggtgcaaagttaccttgtaccaagatgctcatgtcccagacaacttcattccaaagattccgcttgccgatggcaagaattatgaaccccacagatgctgggaggatatctttgatgctataagcaatgctcaacatttgatttacatcactggctggtctgtatacactgagatcaccttggttagggactccaatcgtccaaaacctggaggggatgtcacccttggggagttgctcaagaagaaggccagtgaaggtgttcgggtcctcatgcttgtgtgggatgacaggacttcagttggtttgctaaagagggatggcttgatggcaacacatgatgaggaaactgaaaattacttccatggctctgacgtgaactgtgttctatgccctcgcaaccctgatgactcaggcagcattgttcaggatctgtcgatctcaactatgtttacacaccatcagaagatagtagttgttgaccatgagttgccaaaccagggctcccaacaaaggaggatagtcagtttcgttggtggccttgatctctgtgatggaaggtatgacactcagtaccattctttgtttaggacactcgacagtacccatcatgatgacttccaccagccaaactttgccactgcatcaatcaaaaagggtggacctagagagccatggcatgatattcactcacggctggaagggccaatcgcatgggatgttctttacaatttcgagcagagatggagaaagcagggtggtaaggatctccttctgcagctcagggatctgtctgacactattattccaccttctcctgttatgtttccagaggacagagaaacatggaatgttcagctatttagatccattgatggtggtgctgcttttgggttccctgatacccctgaggaggctgcaaaagctgggcttgtaagcggaaaggatcaaatcattgacaggagcatccaggatgcatacatacatgccatccggagggcaaagaacttcatctatatagagaaccaatacttccttggaagttcctatgcctggaaacccgagggcatcaagcctgaagacattggtgccctgcatttgattcctaaggagcttgcactgaaagttgtcagtaagattgaagccggggaacggttcactgtttatgttgtggtgccaatgtggcctgagggtgttccagagagtggatctgttcaggcaatcctggactggcaaaggagaacaatggagatgatgtacactgacattacagaggctctccaagccaagggaattgaagcgaaccccaaggactacctcactttcttctgcttgggtaaccgtgaggtgaagcaggctggggaatatcagcctgaagaacaaccagaagctgacactgattacagccgagctcaggaagctaggaggttcatgatctatgtccacaccaaaatgatgatagttgacgatgagtacatcatcatcggttctgcaaacatcaaccagaggtcgatggacggcgctagggactctgagatcgccatgggcgggtaccagccataccatctggcgaccaggcaaccagcccgtggccagatccatggcttccggatggcgctgtggtacgagcacctgggaatgctggatgatgtgttccagcgccccgagagcctggagtgtgtgcagaaggtgaacaggatcgcggagaagtactgggacatgtactccagcgacgacctccagcaggacctccctggccacctcctcagctaccccattggcgtcgccagcgatggtgtggtgactgagctgcccgggatggagtactttcctgacacacgggcccgcgtcctcggcgccaagtcggattacatgccccccatcctcacctcatagacgaggaagcactacactacaatctgctggcttctcctgtcagtccttctgtacttcttcagtttggtggcgagatggtatggccgttgttcagaatttcttcagaatagcagttgttacagttgtgaatcataaagtaataagtgcagtatctgtgcatggttgagttgggaagaagatcggggatgcaatgatgcttgtgaagttgtgatgccgtttgtaagatgggaagttgggaactactaagtaattggcatgattgtactttgcactactgtttagcgttgttgatactggttaaccgtgtgttcatctgaacttgattcttgatgcagtttgtggcattaccagtttatcatcgttcttcagg

SEQ ID NO: 385774 - DNA, 2808 bp, Oryza sativa
  unsure (1)..(2808): unsure at all n locations
atggaagctcatggcaatcgtcgcagcagtccaacataccttgttatgctgtggatgatttcggtagctagcctattgataacatgtcgtggcagtatccagaagcaagttctctttccagggttcactgccgcgcaaatggattacattgataacgatgggatatttctgctttctaatggctctgtctttggctttggttttgtcacgagcaatgtctcagacaacacgttctacattcttgcagtggttcacatggccactactaccacagtctggtctgccaatcctaactctcctgtcacccattcagatgacttttttttcgacaaggatggcaatgccttcctgcagtcaggaggaggctccaagtatgggctgccaatatctccgggaagggactgccacctctatgcaactactggactctggcaatctgtagtgcttgggaaagatgcctcttctcctctctggcaaagtttcagccatccaacagacactcttctgtctggtcagaatttcatcgaagggatgacgctgatgagcaagtccaacacagtacagaacatgacctatacacttcagatcaaatctgggaacatgattttatacgccggcttcgagacacctcaaccatactggtctgcacagcaggatagcaggataattgtcaacaagaacggtgacagaatctaccctgcaaacctcagttcagcttcttggtccttctatgatcaatcagggtcccttctatcacaacttgtcatcgcgcaagaaaatgccaatgccacattgtctgctgtccttggtagtgatggattgatagctttctatatgctgcagggtggaaatggcaagagtaaattctcgatcacagttccggcagactcttgtgacatgccagcctactgcagtccttacaccatttgcagtagtgggacaggttgccaatgcccttcggccctcggctcgtttgcaaactgcaatcctggtgttacatcagcatgcaaatcgaacgaggagtttccgctggttcaactggatagtggagttggatatgtaggcactaacttcttccctcctgcggctaagacgaaccttacgggttgtaagagtgcctgtacaggcaactgctcttgtgttgctgtgttctttgatcaatcttcaggcaattgtttccttttcaaccagatcggaagcttgcagcacaaaggtgggaatacaactcgtttcgcatcttttatcaaggtatcaagcagaggaaaaggtgggagtgatagtggcagtgggaagcacaataccattattattgtcattatgctcggaactttggctatcataggcgtccttatttatattggtttctggatctacaagaggaagaggcatcctccaccatcacaagacgacgctggttcatcggaagatgatggatttctgcaaacaatatccggagcaccagtgcggttcacttacagggagctccaggatgcgacaagcaacttctgtaacaagcttggtcagggagggtttggatctgtgtatcttggtacactcccagacggcagtcgtattgctgtgaagaagctggagggcataggccaaggaaagaaagagttccgctctgaggtaacgatcattggtagtatccaccacatccatcttgtcaaactccgaggcttttgtactgagggaccacacaggcttcttgcctacgagtacatggcgaatgggtcgctggataagtggattttccattctaaagaagatgatcacctgctcgactgggatacaaggtttaacattgcgcttggaacggcaaagggattggcatacctccatcaggactgcgattcgaagattgtacactgtgacattaagcctgagaatgttctacttgacgacaacttcatcgcaaaggtatctgattttggccttgccaagttgatgaccagggagcagagccatgttttcactacgctcagaggcacgcgcgggtaccttgcacctgagtggctcaccaactatgccatctcagagaagagtgatgtgtacagctacggcatggttttgcttgagataatcggtgggaggaagagctacgatccctcggagatctccgagaaggctcacttcccttcctttgcattcaagaagctggaggaaggcgatcttcaggacatcttcgacgccaagctgaagtacaatgacaaggatgggcgggtcgagaccgcgatcaaggtcgcgctctggtgcatccaggatgatttctaccagagaccatccatgtcaaaggttgtgcagatgctcgaaggcgtctgcgaggtgctccagccaccggtgtcgtcgcagatcgggtacaggctctacgcaaacgccttcaaatcgagcagcgaggaggggacttcatcagggatgtcggactacaacagtgatgctctgctttcagctgtgaggctttctggtcccagatgatgtgaagaatcccatgtacagtgccttgtctagttaggttgcaaagtgtgcaaattttgctgtagtttccagtgttttggtgatcatttgcttcacactattgtacatatcttcttggtcatttctggtggtagtttatacatatcttgctgattatttatggtggtagtttatcggtgccattctttttttgttgcccttttggttatacataaggtctccaaaacctttgacaattaccttttgtagttatgtcttggtaaaaataataggaaatgcaatgatacaaaaggctttttcatgnnnnnnnnnnnnnnnnnnnnnnnnnnnnnn

SEQ ID NO: 385775 - DNA, 1231 bp, Oryza sativa
ccacgcgtccggcagggcagtaacttctgtgagagatggagtactcttacagctacaggttcatgcttgtatgctctgttcttgtactgtgccttaatactcggggtgcgagatgccagttatccgacgatttctacgactacatatgtcctgatgtgtacaccgttgtccagcagcatgtttatgctgccatgaggactgagatgaggatgggtgcctccctcctaaggctccatttccatgactgctttgtcaatgggtgtgacggttccatccttctggacggtgacgacggcgagaaatttgcacttcccaacaagaactctgtcagagggttcgaagtcattgacgcgataaaggaagatctcgagaacatctgccctgaagttgtttcctgcgccgacattgtagcccttgcagctggctatggagtactatttagtggaggcccttactatgacgttcttctcggtagaagggatggtcttgtcgcaaatcaatcaggagctgacaacggcctcccttcaccgttcgaacccatcaaatcgatcatacagaagttcaatgatgtcggcctcgacacaaccgatgttgtcgtcctatcaggagggcacacgatcggacgagcccggtgcacgctgttcagcaaccggttgtcgaccacctcaagctcagccgacccgacgctggacgccaccatggccgccaacctccagagcctctgtgccggtggagacggcaacgagaccaccgtgctggacatcacctccgcctacgttttcgacaaccgctactaccagaacctcctcaatcagaaaggcctcctgtcctccgaccagggcctcttctccagcgacgacggcatcgccaacaccaaggagctggtggagacttacagcgccaatgcccacaagttcttctgggattttggcagatccatggtgaagatgggcaacatcagcccactcaccggtgacgacggccagattcgcaagaactgcagggttgttaattaactgagcttcagtgtgttgaaaagatagtaaatttcttgtacttttcacaaggcgattgagacgatgtgtgttatgttttgatgttacatgaatgcttgaagaagcagaagtaataacgatgtgattgtgactagtttgtgaactgatcgtcaacaaagatgtgatccattggaaaaaaagaactgaatgtatgtgccttaaaaaaaaaaaaaaaa

SEQ ID NO: 385776 - DNA, 1398 bp, Oryza sativa
aatcacaagtgcataagtaaaagatcaattacaattcgatcgattgggcatggagtacgctactcgtggagatcgcacggctagctgcctgagtttcctctgcaatatcgtcgttctgctgggcctcgccgccgcggcgggcagcgggcagctgacggacgactactacgactattgctgcccccaggtttaccgcatcgtccggtcccgcgtggccgccgcgatgaaggccgagatgcgcatgggcgcctccctgctcaggcttcacttccacgactgcttcgtcaatggctgtgacgcgtccatcctccttgacggcacaaacagcgagaagtttgcacttcccaacaagaactcggtgagagggtacgaagtcatcgatgcgataaaggccgacctcgagggcgcctgcccgggagtcgtctcctgcgccgacatagtagcccttgcagctaaatacggagtactacttagtggaggacctgattatgatgtcctcctgggaagaagagatggtctggtggcaaatcagacgggggcgaacagtaacttgcctagccctttcgattcgatcagcgttatcactgcgaggttcaaggatgtcggtctcaacgcaaccgatgttgtggtcttatcaggggcgcacacgatcgggcgatctcgctgcctgctgttcagcaaccggctggcgaacttctcggcgaccaactccgtcgacccgacgctggactcgtcgctggcgtccagcctgcagcaggtgtgccgcggcggcgctgaccagctggcggcgctggacgtcaactccgccgacgcgttcgacaaccactactaccagaacctgctggccaacaagggcctcctcgcctccgaccagggcctcgtctccagctccggcgaccccgccgtcgccgccaccaaggcgctggtgcaggcctacagcgccaatggccagcgcttctcctgcgacttcggcaactccatggtcaagatgggcaacatcagccctctcaccggctctgccggccagattcgcaagaactgcagggccgtcaactgatgagcaaaaaggcaaagattttttgcatctgccatgaccccatcttggatttgccagaagctatatcgtcttcttggactcaagtgtgaatctgtcgtttttaatgtgttgtggagcgctacatgtttcgttttgttcaagctatctaggattctctctccaatgcacgagtagaataagcaattagcatgcaaagttgctcgtcctacacgaatctgcagctgcattttcagtgggtgtatcaccaattattagagcacagacaaacgcgctgtgtctatcagagtaaaagaaagaatatgcaactgccatatggtttaaaaaaaaaaaaaaaaaaaaaa

SEQ ID NO: 385777 - DNA, 1040 bp, Oryza sativa
  unsure (1)..(1040): unsure at all n locations
cgacacgtttgcattgcagcagctcataagtttcttcttcgtttctgctcccagtgctaaggcagcacagtcgttcgtcgccatgccagggctcaccatcggcgacaccgtccccaacctggagctggactccacccacggcaagatccgcatccacgacttcgtcggcgacacctatgtcatcctcttctcccaccccggcgacttcaccccggtctgcaccacggagctggcagccatggccggctacgccaaggagttcgacaagaggggcgtcaagctgctcggcatctcctgcgacgacgtgcagtctcacaaggactggatcaaggacatcgaggcctacaagccttgggaaccgcgtgacgtacccgatcatggccgatccgagccgcgaggccatcaagcagctgaacatggtcgacccggacgagaaggattccaacggtggccacctcccgtcccgcgcgctgcacatcgtcggccccgacaagaaggtgaagctgagcttcctgtacccggcgtgcgtggggcggaacatggatgaggtggtgcgtgcggtcgacgcgctgcagacggcggcgaagacgcggttggcgacgccggtgaactggaagcccggcgagccgttcgtcatccctcccggcgtctccgacgacgaggcgaaggagaagttcccccaggggttcgacaccgccgacctgccgtccggcaagggctacctccgcttcaccaaggtcggctagatcatatcgatatcgacctcgctcttcgtacatcatgtgcgccacacgtgcgtgataacgtgtgctggcgtgatgactatgcgagatgcatccctgtgtgtgttggtgtggataatgccgctacgtttgggacagtagtgcatttactctgtgctactgtctgaactttggctgtttggcagactgtttatgtacccgtatgttcgcccctgtacttatagagtgggtgttgtggttggcnngtnnnnnnnnnnnnnnnnnnnnnnnnnnnnnnnnnnnnnnnnnnnnnnnnnn

SEQ ID NO: 385778 - DNA, 593 bp, Oryza sativa
ccacgcgtccgagacagttcgcagaatcgcagcagcttagcttaattacttttttcaccaactcaactttcagttaatttccggttaatcctcgattcctcatcatgcctggactcaccctcggcgacgtcgtccccgacctggagctcgacaccacccacggcaagatccgcctccacgacttcgtcggcgacgcctacgtcatcatcttctcccaccccgctgacttcacgccggtctgcacgacggagctgtcggagatggcgggctacgccggcgagttcgacaagaggggcgtcaagctcctcggcttctcctgcgacgacgtcgagtcgcacaaggactggatcaaggacatcgaggcctacaagcctggccgccgcgtcggcttcccgatcgtcgccgacccggacagggaggcgatcaggcagctcaacatgatcgacgccgacgagaaggacaccgtcggcggcgagctccccaaccgggcgctccacatcgtcgggccggacaagaaggtgaagctgagcttcctgttccccgcgtgcacggggccggaacatggcggaagtgctgcgcgcgactgacgcgct

SEQ ID NO: 385779 - DNA, 750 bp, Oryza sativa
  unsure (1)..(750): unsure at all n locations
ccacgcgtccgcaaagcaacacaagccatagcagcagagccgagtagctgagctcactgttcgatcgatcactagctcgctagctgcatccatggctgcttccaaggtcgctcccgtcctggccctgagcctcctcctcctcgccgtcgcggcgcacggctgcgagccccactgctccggcggcggcgcgccggcggtcgtcataccgacgccgacggtggtggtgccactgccgtcgttcggcggcgcccatggcggctacggcggctacggccatggccgctgcccgatcgacgcgctgaagctgcgggtgtgcgccaacgtgctcaacggcgcgctcggcgtgaacgtcggccatggcccctacgactgctgcccgctgctcgccggcctcgccgacgccgacgccgccgtctgcctctgcaccgccgtgaaggccaacgtgctcggcgtcaacctcaacgtccccgtcgagctcaagctcatcctcaacaagtgcggcaagacctgcccctccgacttcacctgctaattaattgagcatggaaagtgctcaaaccatttgcgcaaaattaatgcatatttatattatatttaattgagtttgttttcatgcaatggccattggtaagttgcatgatgcatgagcaagccggcctgaataagctattatccccccttgtgttagtttaattaatttgttgcatccgcattaatttgttgtnnnnnnnnnnnnnnnnnnnnnnnnnn

SEQ ID NO: 385780 - DNA, 915 bp, Oryza sativa
taccgtccgcatttccagccacgcgtccgcccacgcgtccgatcatctccagctgatcaagagctcttaattagctagctagtgattagctgcgcttgtgatcgatcgatctcgggtacgtagcaatggcgtccaaggcgttcgctctgttcctggccgtgaacctcgtcgtgctcggggtggcaagcgcctgcggcggcagcccgtcgtgcccgacgccgacgccgtcgaccccgacaccgtcaacgccgacgccgacgccgtcggcgttcgggaggtgcccccgcgacgcgctgaagctgggcgtgtgcgccaacgtgctgggcctgatcaaggccaaggtgggcgtgcctccggcggagccgtgctgcccgctgctggaggggctcgtcgacctcgaggcggcggtgtgcctctgcacggccatcaggggcaacatcctcggaatcaacctcaacctccccatcgacctcagcctcatcctcaactactgcggcaagaccgtccccaccggcttcaagtgctaagcagcgtgcatatgcaatgcctgcatgggttgatcctacgtacggtgattagttggctttgacgactcttgatttgatttgcttgctgctctgtttatttgctactacgttacgtacgtactttgcatgcaacgcaacgcatgatcgatcgtgcatgctggctgtttgtacgtatcacggtaccagtttggattctctctgtactctctcctttgtcttctttgtagtactcttattcccgctatccgtacgtgcgcatttgttgtaagggccggtgctagcttgtgtgccggtaccaacttctaataaagctttggtttgcaacttcaaaaaaaaaaataaaatattataaataattaaaaaaatataaataaaaaaataaataagg

SEQ ID NO: 385781 - DNA, 811 bp, Oryza sativa
ccacgcgtccgcagcaatcgagctagtaatcaggagctcctgaaactagagatagttaatatcgcttcggtttagtgcgcgtgatccagcagcagcaatggcaggcaaggcctcgatcgcgctattcctcgccgtcaacctggtggtcttctcgttgggcagcgcctgcggcggccactgcccgacgccgacgccgccgaccccgtcgacgcccaccccgactcccgccgcattcggcaagtgcccacgcgacgcgctgaagctgggcgtgtgcgccaacgtgctgggcctcatcaaggccaaggtgggcgtgccgccggcggagccgtgctgcccgctgctggaggggctcgtcgacctcgaggcggcggtgtgcctctgcacggccatcaagggcaacattctcggcatcaaccttaacctccccgtcgacctcagcctcattctcaactactgcggcaagcgcgtgcccaccggcttcaagtgcttctaaaggctttataaagtagccgcgcgatcgatccatgcacgtctcaacgcaacaggggtttatttggttcctacgtgctagcagcgtgttgtcacttgtcatgcatgggcatgttcatgcatgcgtgcatttggtggcaagaagtacgtatctggtttgattcgatatgattttgtttaatttgtggccttctccgcgcgtacgcgagattatgcatcggggtacatgtttgttttattttttggaaattattgtttgattcatatcacttgtattgtattcagtacgtaaaaataaagtctctctgatatgccactttgt

SEQ ID NO: 385782 - DNA, 460 bp, Oryza sativa
gtgccgccggcggagccgtgctgcccgctgctggaggggctcgtcgacctcgaggcggcggtatgcctctgcacggccatcagaggcaacatcctcggcatcaaccctcaacctccccgtcgacctcagcctcatcctcaactactgcggcaagcgcgtgcccaccggcttcaaatgctaagcatcgataggcggcggcgctactgcgcatttgttccgctggctattttatctggactgtttgattgctactacgtgctagcttagcttgcaacatttgcgcgcatgcatggatcgatcgacaaatatgcatgcgtgcacctgcaaattaagcatgcacacgtaccatggagctactcgattttccgtgtttttattcgtttcatgtgtgggtccttgtatgatcctgttgattatttcttttggattatgaataaaataaatttcacactttgtttgg

SEQ ID NO: 385783 - DNA, 873 bp, Oryza sativa
ggcttgacccaacccaacctacctcgcgatccccccctcctccgccgccgtctcgtcgagagagagagagagagaaggactatcgagatggcaactgcaactgctccgagattgtgctttcctaaacccggcgcggccattgctccggcgaccaagagcccttccttcattggttacgcaaagcaaacattgaacatgtcaggcctaaggatctccaacaagttcagggtgtccgcgacagcggtgcacaaggtaaagcttataggcccggacggtgtcgagcacgagtttgaagcccctgaagatacctacattctcgaggccgctgaaactgccggggtggagctgccattctcatgccgtgctggatcatgctccacatgtgcgggtaagatgtcatcgggagaagttgatcagtcggaaggatccttcctcgacgagaaccagatgggcgagggatacgttctgacatgcatttcgtaccctaaggcggattgcgtcattcacacccacaaggaggaagaactctactaggtcgctctttttatgcttctgtgggcacatttgctgatttcaaagtggactcgctgttcagttagttttcgctatccaaaaaatggccatatctttgtattagtcttttgatgggaccgtgtcatatgagttgtgacaataattgtcgtagtcctgttcagcatttcaaattgcgtttgttcaattcacagcaggtccaacttccaacgatgacatgttatcagaagttgtgtgtaatggtattattgtggatcacttccagttggaaaaaattgacttgacctttctccaaaaaaaaaaaaaaaaaaaaaaaaaaaaaaaaaaagcggccgcgaattc

SEQ ID NO: 385784 - DNA, 505 bp, Oryza sativa
ggccacgcgtccgcccacgcgtccgcccacgcgtccgcccacgcgtccgatcatgctccacatgtgcgggtaagatgtcatcgggagaagttgatcagtcggaaggatccttcctcgacgagaaccagatgggcgagggatacgttctgacatgcatttcgtaccctaaggcggattgcgtcattcacacccacaaggaggaagaactctactaggtcgctctttttatgcttctgtgggcacatttgctgatttcaaagtggactcgctgttcagttagttttcgctatccaaaaaatggccatatctttgtattagtcttttgatgggaccgtgtcatatgagttgtgacaataattgtcgtagtcctgttcagcatttcaaattgcgtttgttcaattcacagcaggtccaacttccaacgatgacatgttatcagaagttgtgtgtaatggtattattgtggatcacttccagtaggaaaaaattgacttgtcctttctcc

SEQ ID NO: 385785 - DNA, 979 bp, Oryza sativa
ctcgtgccgattcggcacgagcctgcacctgcaccccgaggagaggagaggagcaatggcggcggggtaccgggcggaggacgactacgactacctcttcaaggtggtcctcatcggcgactccggcgtcggcaagtccaacctcctctcccgcttcacccgcaacgagttcagcctcgagtccaagtccaccatcggcgtcgagttcgccacccgctccctccaggtcgacggcaaggtcgtcaaggcccagatttgggacaccgccggccaggagcgataccgtgctattactagtgcatattaccgaggtgctgttggagcgttgcttgtctatgatgtcacccggcactcaacctttgagaatgttgagcgctggttgaaggaattgagggaccatacagacccaaacatagttgtcatgctagttggcaacaagtctgatctgcgccatcttgtagcggttcaaaccgatgaagggaaggcattcgcggagagagaatcgctctatttcatggagacctctgcgctcgagtccaccaacgttgagaatgcatttgcagaggtcttgacccagatctaccgcatcgtgagcaagaggtcagtcgaagcaggtgatgatgcaggttctggtcctggcaagggtgagaagatcaatataaaggatgatgtttcggcggtgaagaagggcggctgctgctcgggctaagctcttgctgtattttttttgggacctgtgtgagcttgtgttatcgccgttccagcgactgagaaattgttagtagtattagcaacttctatgttacgtagagagtttattgctataactgaaaggtttggccagatcagtttagatcttcctattgttgtatggtctccgcggcaactggggcatggtgttggttttcatgtgaatccattgcagccatgcttgaactgttgaatcaagtagaaatatgttttaaaaaaaaaaaaaaaa

SEQ ID NO: 385786 - DNA, 1142 bp, Oryza sativa
  unsure (1)..(1142): unsure at all n locations
taccgtcctgtatccctggtcgacccacgcgtccgcccacgcgtccgcccacgcgtccgcccacgcgtccgcccacgcgtccgcccacgcgtccgcttctcctccgccactccatcggcaaggaggaagatctcggaggcggtgcccggaggaggtgaggcgagatgggcgggcgggtggatcacgagtactcgtacctgttcaagatggtgctgatcggcgacacgggcgtcggcaagtctaatatcctctcccgcttcacccgcaaccacttctccctcgactccaagtccaccatcggcgtcgagttcgccaccaaatccctgcagatggagggcaaaacaataaaggctcagatctgggacacagcaggacaggagagatatcgtgccatcacaagtgcttactaccgtggcgctgttggggctctccttgtttacgacatcacaaagaggcagagcttcgacaatgtccacaggtggcttcgtgagctccgcgaccatgccgactcgagcattgttatcatgatggtcggtaataagtctgatttgattcatctaagggctgtctccgaggatgaaggtaaggcattggctgaaaaggaggggctgttttttcttgagacatcagctatggaggccgtgaatgtggaggaagcctttcagactatcatcacagaggtctatggcattgttaacaggaaagcactggccgccaaagaagcagctgctgcttctgctccgctgccttcccagggtaaaactatcagcattgacagcgctgcaggaaacacaaagagggcatgctgctctgcttgatatgtacaatggagcgttcaacatcatattgtagagagccaggtgtgagattcgcgggtagactcggagcatagtgatcttaaatggtttggaggcaagtcctacctttttttcttttcagttgcgtgaacattccagagtgcctagctgcagttgcagtttgttcagtgtttcctaatcaaaagttagatgtgtgtattaggattcattccatttccgttctgattatacaacgcaaactatagctgcaatatatctcagattatacaattcaaacaatatgtgagctgccnnnnnnnnnnnnnnnnnnnnnnnnnnnnnnnn

SEQ ID NO: 385787 - DNA, 1456 bp, Oryza sativa
  unsure (1)..(1456): unsure at all n locations
cccacgcgtccgcccacgcgtccgctcgcgccgccgccgccgtcgccgtcactctcctcaggtaaggaggaggaagatgtcgcacaggaagttcgagcacccgaggcatggatccctcggcttcctcccgaggaagcgctcctcccgccaccgcggcaaggtgaagtccttccccaaggatgacgtatcaaagccctgccaccttacttccttcgttggctacaaggctggaatgacacacattgtgcgtgaggtcgagaagcctggctccaagctccacaagaaggaaacctgcgaggctgttaccatcatcgagacccctccgcttgtcattgttggactcgtggcctatgtcaagacacctcgtggacttcgctctctcaactctgtctgggcccagcaccttagcgaggaggtgcggagaaggttctacaagaactggtgcaaaagcaagaagaaggctttcactaagtatgcccttaagtatgacagtgatgctggcaagaaagaaatccagatgcaacttgagaagatgaagaagtacgcatctattgttcgtgttattgcccacactcagatcagaaagatgaagggcttgaagcagaagaaggctcacctcatggagatccagatcaacggtggcactatcgccgacaaggtggactatggctacaagttctttgagaaggaaatccctgttgatgcagtcttccagaaggacgagatgattgacatcattggtgtcactaagggtaagggttatgaaggtgtcgtcactcgttggggtgtcacccgccttcctcgcaagacccacaggggtctccgcaaggttgcttgtattggtgcctggcatccagccagggtgtcctacactgttgcccgtgctggtcagaacggataccaccaccgcactgagatgaacaagaaggtttacaagattggcaagtctggtcaggagtctcatgcggcctgcaccgagttcgacaggactgagaaggacatcaccccgatgggcggcttcccgcactacggtgtggtgaagggcgactacctcatgatcaagggttgctgcgtcggtccgaagaagagagtcgtcaccctccgccagtcgctgctgaagcagacctcgcggctcgccctggaggagatcaagctcaagttcatcgacacctcgtccaagttcgggcacggtcgcttccagaccaccgacgagaagcagaggttcttcggcaagctcaaggcctaggccatcagaattcaatcgaacctcacctgatagctttcccagtttctgtacttgtcctgagttttgtggcagatattttgagtacccagtttaaatgctttgctactctgagctgctggtgctgcggatgatcaaactgttgagatttatgaattttgaactcgatagttatgttttttaaacaacaaannnnnnnnnnnnnnnnnnnnn

SEQ ID NO: 385788 - DNA, 602 bp, Oryza sativa
  unsure (1)..(602): unsure at all n locations
gtcataatgtgtaccaccaccgcactgagatgaatgagagggtttactagatcggcaggtctggccaggaaagccatgctgcctgcactgaatttgacaggactgagaaggacatcactcccatgggtggcttccctcactacggtgttgtgaagggcgactacctcatgatcaagggttgctgtgttggccccaagaagagggtcgtcaccctccgccagtccctgctcaagcagacctctcgtttggcgctcgaggagatcaagctcaagttcatcgacacctcgtccaagttcgggcacggtcgcttccagaccaccgacgagaaacagaggttcttcggcaagctcaaggcttagtttgtgcggttcctcagcaaagtcagaatttgtcaaaacgatcatcactactctatacttggttctcttctcttgatattttctggggtattaagttttgtagcagatgtttcaggacctgttgatctatgaatttgtgctcccttctgctgtccctaccttaactctgttgaaccctatggattaaatctcgtaatgcggttttgctagttgcttgttgtcnnnnnnnnnnnnnnnnnnnnn

SEQ ID NO: 385789 - DNA, 1145 bp, Oryza sativa
  unsure (1)..(1145): unsure at all n locations
ccacgcgtcttcctcctcctcctccgccgcccgcctcgccgcctcccgagagctccaccctcgcctccgggagaaatggcaccgaagcgaggcggcagggcgccggtgccggcgaagaagaagacggagaaggtgaccaacccgctgttcgagaagaggccgaagcagttcggcatcggcggcgcgctgccacccaagaaggatctgcacaggttcgtgaagtggcccaaggtggtgcgcatccagcgccagcgcccgcatcctcaagcagcgcctcaaggttcccccggcgctcaaccagttcacccgcaccctcgacaagaacctcgcaaccaacctgtttaagatgcttctcaagtaccgccctgaggacaaggctgctaagaaggagaggcttttgaagagggcccaggctgaggctgaaggtaaaaccgttgaggcaaagaaaccaattgttgtgaagtatggtcttaaccatgtcacatacctcattgagcagagcaaggcccaactggtcgtcattgctcatgatgtcgatccgattgagctggttgtgtggcttccagccctgtgcaggaagatggaggtcccttactgcattgtgaaaggaaaagcccgtcttggatcaattgttcacaagaaaactgcatctgtcctctgcttgaccactgtcaagaacgaggacaagcttgagttcagcaagatcctggaggctatcaaggcgaacttcaacgacaaattcgatgaggttaggaagaagtggggaggcggcgtcatgggatccaagtcgcaggcgaagaccaaggccagggaaaagctgctcgccaaggaggctgcccagcggatgacctaaattatagctcctgtagtttcatttttcagtcagattttgacgaggaactcgaattagcactgtacaaccgtgctgtggttttctgagtcttggtttcatatcttctctgttcaccggaccatgttgggatactatgcaattagtacaaccgtgcttccaaaaacctttttgtttcgttcctgttttagcggagtgactangaaatagcttaaatagttgttcattcctgttttagcgaagtgacctactgaatagcttaaattggttgttcagagctgaaaaaananaaaaa

SEQ ID NO: 385790 - DNA, 1108 bp, Oryza sativa
  unsure (1)..(1108): unsure at all n locations
ccctcgaggtcgacccacgcgtccgctccaccccccgcctcgccgtctcccgttcggaacaccaagctccagcgccccccctccggcgaaatggccccgaagcgaggcggcagggcgccggtgccggcgaagaagaagacggagaaggtgacgaacccgctgttcgagaagaggccgaagcagttcggaatcggcggcgcgctgccgcccaagaaggaccttcaccggttcgtcaagtggcccaaggtggtgcgcatccagcgccagcgccgcatcctcaagcagcgcctcaaggtgcccccggcgctcaaccagttcactcgcaccctcgacaagaacctcgcaactaatctgtttaagatgctcctcaagtaccgccctgaggacaaggctgctaagaaggagaggcttttgaagagggcccaggctgaggctgaagggaaaaccgttgaggccaagaagccaattgttgtgaagtatggtcttaaccacgtgacttacctcattgagcagagcaaggcccagctggttgtcatcgctcatgatgttgatccaattgagctggttgtgtggcttcccagccctgtgtaggaagatggaggtcccttactgcatcgttaagggcaaagctcgccttggatcgattgttcacaagaagactgcatctgttctgtgcttgaccactgtcaagaacgaggacaagcttgagttcagcaagatcttggaggccatcaaggcgaacttcaacgacaagttcgacgaggtcaggaagaagtggggaggcggcgtcatgggctccaagtcgcaggcgaagaccaaggccagggaaaagcttctcgctaaggaggccgcccagcggatgacctaaattatattcgccccccgccgttgagctcgccctgtagtttcatttttcagtgtaatgattttgacgaggaactcagttagcaccatgcgacagtgctgtggttttctgaagtctagtttcatatattttctgttcaccggaccatgttgggaaactatgcaagatatcagagctttacaatgtttggtttctacgcagtttatgctgtgtgttttgctaaaaaaaaaaaaaaaannnnnn

SEQ ID NO: 385791 - DNA, 664 bp, Oryza sativa
  unsure (1)..(664): unsure at all n locations
ttagataggncccngggcagatngagngtncgaacagaggttnttaanccattcccataaacctcatcaccaatccaacaccgccatcgagatcaggaacttcctcggcgggaagaaggtgaggaaagtggacatgcttgagggtgtgacaattttgcgttctgagaaggtcaaggatgagctggtccttgatggcaatgatatcgagcttgtctcccgttctgcggcactgatcaaccagaaatgccacgtcaagaacaaggatatcaggaagttcctggatggcatctatgtcagtgacaagggcaccatcactgaggaccagtgagctgcgtttccttactagctgtagcaaaacctgtcctagagagagtgcacaaggaacttttactgctctgtttttgagtcaaattacaaggtcattcgacaatgaaattttgtactactgggttaggatgttattatgtaattggagcatgtgctcctatggtatccgtattgtttgtgagaatgtttctgtgtcttacttctcttggatgggatcttttttacaccgtctggaaagaacctgcaacttgggttattattaaaaaaaaaaaaaaaaaaaaactcgagggggggcccggtacccaattcgccctatagtgagtcgtattacaattnc

SEQ ID NO: 385792 - DNA, 791 bp, Oryza sativa
ctgaaaacctcgcagccgtaaaaccctagaggcggattccggccgcagatcggaggcgcggcggcggcggcggcggcggcggcagaggaggagtgtccggtatgcagatcttcgtgaagacgctgacggggaagaccatcactctcgaggtcgagagcagcgacaccatcgacaatgtcaaggccaagatccaggacaaagagggtattcccccagaccagcaaaggctgattttcgcagggaagcaactggaagatggacgtacattagctgattacaacattcagaaagagtcaacgctccatttggtcctgaggctcaggggtggaaccatgatcaaggtgaagacactcactgggaaggaaatcgagatcgacattgagcccactgataccattgatagaatcaaggagcgtgttgaggagaaagagggtattccacctgttcagcagaggctcatttatgctgggaagcaacttgctgatgataaaactgccaaggattacaacattgaaggtggctcagtgctccatctcgtgcttgctctgaggggtggtcagtagatgtagtttccatgcccgcattatctctaaagggagaagcatatttgctattctatttctatctgtagttgctgcagacttatagctatatttggtaggtttattgaagtcctatgcgattggcgcattgtgtattggaatcaattgtcatctgtactggaaaggaaatattggaactaagttaagcagtagtttatcaattgccattctattaaaaaaaaaaaaaaa

SEQ ID NO: 385793 - DNA, 705 bp, Oryza sativa
  unsure (1)..(705): unsure at all n locations
atttggttacgggccccccttnaagttgacccaagcttcgggcagcagaaggagctagagagacaaaggggagagagccccggggaagaagaagaagcagcagctagggcgccaagatgcaaatcttcgtgaagaccctgactgggaagaccatcaccctcgaggtggagagcagcgacaccatcgacaatgtcaaggctaagatccaggacaaggagggaatcccgccggaccagcagcggctgatcttcgccgggaagcagctggaggacggacgcaccctggctgactacaacatccagaaggagtccaccctccacctcgtcctcaggctccgtggcggtatcatcgagccgtcgcttcaggcgcttgcccgcaagtacaaccaggacaagatgatctgccgcaaatgctatgcgcgcctgcaccctagggctgtcaactgccgcaagaagaagtgtggtcacagcaaccagctgaggcccaagaagaagatcaagaactagagcgtcactcgccgggttcatggactggttaaatcaatcgtcatattagacttttatgcttccgttgttatctccctggatgttgttgaaccgtgttttactgtgctggatgcttcagcttcttgttttgacggtcgtggtatatggtaattggcagcaaactatattggtcatgtcgaaaaaaaaaaacgtttgaatn

SEQ ID NO: 385794 - DNA, 833 bp, Oryza sativa
  unsure (1)..(833): unsure at all n locations
ccacgcgtgcccccaccggtccaaaaaaagggaaggaatttttttcttttttttttgttcgcctccgcttcttcctcacgcagctctcgcctcgcctcgccgcccgccactagagaggagagggagaaggaggaggaggcaaatcccagcaaaagaagatgcagatcttcgtgaagaccctgacggggaagaccatcaccctcgaggtggagagcagcgacaccatcgacaacgtcaaggccaaaatccaggacaaggaagggatccctccagatcaacagcgtttgatattcgccggcaagcagctggaagatgggcgcacactggccgactacaacattcagaaggagtcaactcttcacttggtcctcaggctcaggggtggcactatgatcaaggttaagaccctcactggaaaagagattgaaattgacattgagcccaccgacacgatcgataggatcaaggagcgtgttgaggagaaagaaggcattcctcccgtgcagcaaaggcttatctatgctggtaagcagcttgccgacgacaagactgcgaaggactataacatcgaaggtggctctgtcctccatcttgtccttgctctgaggggtggttattagtaaagctaatgtgctagtacttagctcaataccttcgaatggctgagaaaatttactcttgttggcatggaacttgcgaagggataataacatgctagctttgcacatttgcctagtgggagaggttgtcttccatgttattatcttatatgatttgaggcatattattccagattcaccagtcttcactgttnnnnnnnnnnnnnnnnnnnn

SEQ ID NO: 385795 - DNA, 660 bp, Oryza sativa
  unsure (1)..(660): unsure at all n locations
ccacgcgtccgacccgcagcagcagcagcagcaaggagaagaagaagagccaagatgcagatcttcgtgaagaccctaacggggaagaccatcacgctcgaggtcgagagcagcgacaccatcgacaatgtcaaggccaagatccaggacaaggaaggcatccctccggaccagcagcgcctcatcttcgccggcaagcagctggaggatggccgcaccctggccgactacaacatccagaaggagtccacgctccacctcgtcctccgcctccgcggtggcatcatcgagccctccctccaggccctcgcccgcaagtacaatcaggacaagatgatctgccgcaagtgctatgctcggctgcaccccagggctgtcaactgccgcaagaagaagtgcggccacagcaaccagctgaggcccaagaagaagatcaagaactagagtttgagatatcatttccgcggatcattgtattcaacaggaagatcagagtttaagtttttttgtagtgtaatgcctcatgttgtatgccgaactttctgtttatcctgttgtatgttaaccttggttacgctggagagtactccagcttattttgatgacataattgactacaaagtcaaggttacatggcccgccctaaaacccaaaannnnn

SEQ ID NO: 385796 - DNA, 583 bp, Oryza sativa
ccagcgtccgctttgaccgaccttgttatttatctacagatgctatgcgcgcctgcaccctagggctgtcaactgccgcaagaagaagtgtggtcacagcaaccaggtgagcttgatgattgatagtggggcttactattattttacagtagtcatgcaattcagtccatcttctggttaccctttaggaattgttatgatgattggatggaagtagggttttcatatgttctagatttgttatttgtgcctttaagcttgtaaataatggccatggcatttgctagcatgatttcaataacatataccataacatatcaacataccctttttattttggctgtttgatctaacgaaaatttctggtccttccactttcagctgaggcccaagaagaagatcaagaactagagcgtcactcgccgggttcatggactggttaaatcaatcgtcatattagacttttatgcttccgttgttatctccctggatgttgttgaaccgtgttttactgtgctggatgcttcagcttcttgttttgacggtcgtggtatatggtaattggcagcaaactatattggtc

SEQ ID NO: 385797 - DNA, 452 bp, Oryza sativa
  unsure (1)..(452): unsure at all n locations
cctagctcgcaccgtataaatcggcgaacatccagcctcctctccccccgccgccgcagcagcaaggagctagagagacaaaggggagagagccccggggaagaagaagaagcagcagctagggcgccaagatgcaaatcttcgtgaagaccctgactgggaagaccatcaccctcgaggtggagagcagcgacaccatcgacaatgtcaaggctaagatccaggacaaggagggaatcccgccggaccagcagcggcttgatctttcgccgggaagcagctggaggacggacgcaccctggcttgactacaacatccagaaggagtccacccttcacctcgtcctcaggttccgtggcggtatcatcgagccgttgctttcaggcgttttcccgnaagtacaaccaggncaagatgatctttccgnaatgttattcgcgcttcaccttagg

SEQ ID NO: 385798 - DNA, 694 bp, Oryza sativa
  unsure (1)..(694): unsure at all n locations
ccacgcgtccgcccacgcgtccgcttggaggcttctgagctcgaaccccccgccgccgccgccgtcgcctcctccgatccgccgccatgaccttcaagcgccgcaacggcggccgcaacaagcatggccgcggccatgtgaagtacatccgctgctccaactgcgccaagtgctgccccaaggacaaggccatcaagaggttccaggtgaggaacatcgtcgagcaggcggccatcagggatgtccaggaggcgtgcgtccatgacggatacgtcctcccgaagctgtacgccaaggtccatcactgcgtctcctgcgccatccacgcccacatcgtccgtgtccgctcccgcgagaaccgcagggaccgcaggccgccggagaggttcaggcgcagggaggataggcctactggacctcgccctggtggtgctggtggacctggtgcccctgctgctgctggacctggtggcccccctaatgttgctcgcacctaaacagccgtagtcgctcctttgttactctatatcatatcctgttaatggcgccatggatatcatcgttatggtctttcatgaggtcaaagtctttcttggaactagcttgtactttgcgattggcagtgtgacaatggaagtctgaatttttgcctgagttgtttatctattttaagaccnnnnnnnnnnnnnnnnnn

SEQ ID NO: 385799 - DNA, 736 bp, Oryza sativa
tcgataaaactggactccacgcggtggcggccgctctaaactagtggatcccccgggctgcacgaattcggcacgagccccgccgccgccgccgtcgcctcctccatccgccgccatgaccttcaagcgccgcaatggcggccgcatcaagcacggccgcggccacgtcaagtacatccgctgctccaactgcgccaagtgctgccccaaggacaaggcgatcaagacgtttcaggtgaggaacatcgtggagcaggccgccatcacggacctccagcacgcgtgcgtgcacgatggatacgttctccccaagctttacgccaacgtgcatcactgtgtgtcctgtgcaatccatgctcacatcgtccgtgtccgctcccgtgagaaccggagggaccgcaggcctccggaacgcttccgccgcagggaggataggccccaaggccctcgtccaggtggtggcgctccccgctcctggtggagctgctgctcctgcccccaacgttgctcgcacctgattgtctccggagtgataaaccttttttcagtcgtttccctaaatctagcatgataccagggtgttgaactttatctaggaccaacctgttctttttcaaatatcggatctgctgttactggtttcatctttactaaatgtggtttaccatttattcgattcgtttgttgttcctaaaaaaaaaaaagtatatataaaaagaatggaaatgacatgaaa

SEQ ID NO: 385800 - DNA, 597 bp, Oryza sativa
  unsure (1)..(597): unsure at all n locations
ancacccggcccancttttttnncaaacttaagggggnggggccaaaaaaaggccgggccaggaaaanttctgntcaaagggcaaaggggcccaaagaaagccntaagngttcaggggggaaattnttggcaggngccatnaggatttcagggggggggttcangagganaantcttccggaagtgnacnccaagtccatcaangggttttcctgggccatccacgccaaacatcgtccgtgtccgctcccgcgagaaccgcagggaccgcaggcccgccggagaggttcaggcgcagggaggataggcctactggacctcgccctggtggtgctggtggacctggtgcccctgctgctgctggacctggtggcccccctaatgttgctcgcacctaaacagccgtagtcgctcctttgttactctatatcatatcctgttaatggcgccatggatatcatcgttatggtctttcatgaggtcaaagtctttcttggaactagcttgtactttgcgattggcagtgtgacaatggaagtctgaatttttgcctgnaaaaaaaaaagaaagggcggccgctngcgatctagaactagt

SEQ ID NO: 385801 - DNA, 1168 bp, Oryza sativa
  unsure (1)..(1168): unsure at all n locations
attcccggtcgacccacgcgtccgctcccctctcgccttcctttccccaactaaaccctaactcctcgccgccgcctccgcctccgcctcctcgtcggagcagcgagccgctgctccttctcctccaccaccagccatggcgacccagatcagcaagaagaagaagttcgtgagcgatggcgtgttctacgcggagctgaacgagatgctgacgcgggagctggccgaggacggctactccggcgtggaggtgcgcgtgacgccgatgcgcacggagatcatcatccgggccacgaggacgcagaacgtgctcggcgagaaggggcgcaggatcagggagctcacctccgtcgtgcagaagcgcttcaacttccccgagaacggcgtcgagctctacgccgagaaggtcgtcaaccgcggcctctgcgccatcgcccaggccgagtccctccgctacaagcttcttggaggcctcgccgtccgcagggcttgctatggtgttcttcgctttgttatggagagtggtgccaagggttgcgaggtcattgtaagtggaaagctcagggcccaaagagccaagtccatgaagttcaaggatggttacatgatctcatctggtcagccagtcaatgagtacattgactcggctgtgagacacgtgctcctgagacagggtgttcttggcatcaaggtgaagatcatgctcgactgggaccccaagggcaaggttggcccgaccacccctctgccggatcttgtaaccatccatgctcccaaggaggaggaggagctgcgccctccggtgttgatcgctgaggcttaagcttatgatgatatttcacatctttttgaagccttgggcatgtttgacagtaccctcttaaaactccagtttggccagttctagctaggtctctgtcttcagtaagggcaatgcaacagtcggttacttcagttttattatggacaaaagctatgtactggtgtcattttatttttttttaaactaagttttgccgagacaaaagttccagtcatatgtatgccaaatcttggtttgtagcctcaaatgcatcccatcttgtttgtgagcgcaaaccggttttgtttcagttgatgtttnaaaaaaaaaaannnnaannnnnnnnnnnnnnnnnnnnnnnnnnnn

SEQ ID NO: 385802 - DNA, 1020 bp, Oryza sativa
  unsure (1)..(1020): unsure at all n locations
cacgcgtccgcccacgcgtccgctcctcctcctcctccgccgccgcctccctcctcccccacctccactctccactccaatggcgactcacacgcagatcagcaagaagcgcaagttcgtggcggatggggtgttcttcgcggagctgaacgagatgctgacgcgcgagctcgcggaggacggctactccggcgtcgaggtccgcgtcacccccatgcgcaccgagatcatcatccgcgccacccgcacccagaacgtcctcggcgagaaggggaggaggatccgcgagctgacgtccgtggtgcagaagcggttcaacttcccggagaatggcgtcgagctctacgccgagaaggtgaacaaccgcggcctctgcgccatcgcccaggccgagtcgctccgctacaagctcctcggtggcctcgccgtcagaagggcgtgctatggtgtgctcaggtttgttatggagagtggtgctaagggctgtgaggttattgtgagtgggaagcttagggctcagcgtgctaaatccatgaagttcaaggacggatacatgatttcttctggttatcctgttaacttgtatattgactctgctgttagacatgttcttctgagacagggtgtgctgggtattaaggtcaagattatgcttgattgggatccgaagggcaagcaaggaccaatgactcctttaccggatcttgttaccatccatgcccctaaggatgaggatgagttttcaaagcctcttacagctgagatcccagttgctgcttaaatagaataagtttaggtgatctgatgcatgcgcttcatgtttttttcagttatgtaatgttcattattaacattattactagtaaagagttctagtttttaagttgcaaacatcagcaactaatacaagattcgtcactattaatttcttcctggtgctcagtaacattnnnnnnnnnnnnnnnnnnnnnnnnnnnnnnnnnnnnnnnnnnnnnnnnnnnnnnnnnnnnnnnnnnnnnn

SEQ ID NO: 385803 - DNA, 368 bp, Oryza sativa
gaggatccgggtaccatgggcaaatgtgatattttgtacacacattaaagttgaacatagtccctttattcttattcaggtcattgtaagtggaaagctcagggcccaaagagccaagtccatgaagttcaaggatggttacatgatctcatctggtcagccagtcaatgagtacattgactcggctgtgagacacgtgctcctgagacaggtttgtttggttcaactcaagcatcgtagtatttaaaaacctcatgatctttttggctcaacgcacttgttcattatcttttgcagggggttcttggcacaaggtggaagatcatgctcgactgggaccccaaggccaaggttggccgcacccctct

SEQ ID NO: 385804 - DNA, 938 bp, Oryza sativa
cccattcgtccgcccacgcgtccgggcacagctaccggcggcgcagccacacagcagcagcaggtgaggaggagaggagacccgccgccgccgccgccatgggtatctcgcgtgattccatgcacaagcgccgcgccacgggcggcaagcagaaggcatggcgcaagaagcgaaagtatgagctcggaaggcagcctgccaacaccaagctgtcaagcaacaagacagtgaggagggtgcgtgtccgtggaggtaatgtgaaatggagggccctccgtttggatactggcaactactcatggggaagtgaggccgtgacccgcaagacccgtatccttgatgtggtctacaatgcatccaacaatgagcttgtcaggactcagacccttgtaaagagtgctattgtgcaagttgatgctgcccccttcaagcagtggtacctcactcactatggagtggatattggtaggaagaagaaggctcctgcagccaagaaggatgctgaggggcaggatgctgaagctaccacagaggaagcgaagaaaagcaaccatgttgtcaggaagcttgagaagcgccaacagggacgcacacttgacgcccacatcgaagaacagtttggcagtgggaggttgctggcctgcatttcttcccgccctgggcagtgtggccgagcagatggctatatccttgagggcaaagagctggaattctacatgaagaagctccagaggaagaagggcaagggtgcctcagcttagagcaagtctttctttgttgctggttctacactgaaagaactacccttttttgttccctgagagctcctatgttatgtttgcagacgcatagctgtttttttatgattaaacaactttagcatgatgacatgagaatgggttatgtactctggatgttattaagttaaaatatttact

SEQ ID NO: 385805 - DNA, 662 bp, Oryza sativa
  unsure (1)..(662): unsure at all n locations
ttcccgggtcgacccacgcgtccccgaacgcgtgggcgaacgcgtgggcgnacgcgtgggcgaacgcgtgggcggacgcttgggctgctgctaagaaggatgctgctgcgggacaagagggtgaggctgccacggaggaagcaaaaaagagcaaccatgttgtgaggaagcttgaaaagcgtcagcaaactcgcactctggactcgcacattgaagagcaatttggcagcggaaggctcttggcctgcatctcctcccggcctgggcaatgtggcagagctgatgggtacatcctggagggcaaagagcttgagttctacatgaagaagctccagaggaagaagggcaagggtgctgcagcttagagcgttctctcgagtgtgttttacgctggaaggcccgcctattttattcagtggattttgttagtcatgtttgcgtctatgtcgtgcctacagaccctactgaacaccaattttctgaaagaatgatgaatcaactcttagcttggaagaactgattgtgagaattttcacatgctatggttgtattctcgtggtatttaggttccatgtgtactcagctacagcattctgttatgttttatgcccttccaaggttttagtttttcggtctcnnnnnnnnnnnnnnnnnnnnnnnnn

SEQ ID NO: 385806 - DNA, 881 bp, Oryza sativa
  unsure (1)..(881): unsure at all n locations
ccacgcgtccggttcccaaccagcagctgcggcggcgcgagcacacgaagaggaggcggagcagccggagccacctccgccgccgccgccaccatgggtatctcgcgtgactccatgcacaagcgccgggccaccggtgggaagcagaaagcgtggaggaagaagcgaaagtatgagcttggtcgccagccggcaaacaccaagttgtcgagcaacaagacagtgaggagggtccgtgttcgtggaggaaatctgaagtggagggctcttcgcctggatactggtaactattcttggggaagtgaggctgtcactcgcaagacccgtatccttgatgtggtctacaatgcgtcaaacaatgagcttgtgaggacccagacccttgtgaagagtgccattgtgcaagttgatgctgccccattcaagcagtggtatctcactcactatggtgtcgatatcggtaggaagaagaaagctcctgctgctaagaaggatgctgctgagggacatgagggtgaggctgccacggaggaagcaaaaaagagcaaccatgttgtgaggaagcttgaaaagcgtcanaaactcgcactctggactcgcacattgaagagcaatttggcagcggaaggctcttggcctgcatctcctcccggcctgggcaatgtggcagagctgatgggtacatcctggagggcaaagagcttgagttctacatgaagaagctccagaggaagaagggcaagggtgctgcagcttagagcgttctctcgagtgtnttttacgcttgnaaggccccgcctattttattcagttggattttgttaagtnatgtttgcgtctatntcgtgcctacagaccctacttnacaccaattttctgaa

SEQ ID NO: 385807 - DNA, 876 bp, Oryza sativa
  unsure (1)..(876): unsure at all n locations
acgggcccggactgactggctggatcgacgcatgcgtgttgcttctgctctcccgcaccaagccgcctgagccctagccgccgccgccgccgcgcgccaccaccgccgcaaccatggccgccgcgctcacccgcccgccgccaggcacggtccagtgcttcgggcgcaagaagacggcggtggccgtctcctactgcaagccggggcgcgggctgatcaaggtgaacggcgtcccgatcgagctgatcaggccggagatgctccgcctcaaggcgttcgagcccatcctgctcgcggggaggtcacgcttcaaggacatcgacatgaggatccgcgtccgcggcggagggaagacgtcgcagatctacgcgatccgccaggccatcgccaaggccctcgtcgcctactaccagaagtacgtcgacgaggcatccaagaaggaggtcaaggacatctttgcccgctatgaccgcactctactcgtcgccgaccccaggcgctgcgagcccaagaagttcggtggtcgcggcgcccgcgccaggttccagaagtcgtaccgttgagcgctcgccggatcgattcggagcggtgttctcttttccaccctatcaatggagctattttgctggttctacatctagctactgctttacttcaagtttagtctttttaagcttagtcccgaacctttttgacattgtgaaatggatgcgactgaggcgtttaagactatcgtagtctctggaatatggttttgcatgttacctatgtccagggaagttgtgatactattgccttaattaatgtttatgctatgttatgagttttaannnnnnnnnnnnnnnnnnnnnnnnnnnnnnnnnnnnnnnnnnnnnn

SEQ ID NO: 385808 - DNA, 673 bp, Oryza sativa
  unsure (1)..(673): unsure at all n locations
acaggggntcgtccnattcncnatttcagntncnnaactnttgggaaggccnatcgtncngtcntttttcnntnttacgcctnttggnnaaaaggggnntgtgctgcaaggcgnttaanttggntaacnccnggnttttcccngtcacgacgttgtaaancgacgncctttgancgcgngtaatacgantcactntagggcgaattggntaccgggccccccctcgaggtcgacccacgngtccgcatcgccaaggccctcgtcgcctactaccagaagtacgtcgacgagncgtccaagaaggaggtcaaggacatcctttgcccggcctacggaccgcaaccctccctccgtcggccgacccccagggcgctgcgaagccccaagaaagttcggttggtcgcggcgcccgccgcaaaggtttccaagaaagtcgttatccgcttgaagcgcctcgccgggaaccgatttcggagcggctgttctcttttccaaccctaatcaatggagctacttggcccttgttctacatctatctagctaactgcattactttcaagtttagtcttttaaaacttagccctgaaccttgcctttttgacattgtgaaatggatgtgattgaaatgtttaagactctactctagtctctcaaaaaaaaanaaaaanaaaaa

SEQ ID NO: 385809 - DNA, 507 bp, Oryza sativa
gacgtcgcagatctacgcgatccgccaggccatcgccaaggccctcgtcgcctactaccagaagtacgtcgacgaggcgtccaagaaggaggtccagagacctcttttgcccgctacgaccgcaccctcctcgtcgccgaccccaggcgctgcgagcccaagaagttcggtggtcgcggcgcccgcgcaaggttccagaagtcgtaccgctgagcgctcgccggaccgattcggagcggtgttctcttttccaccctatcaatggagctacttggcttgttctacatctatctagctactgcattactttcaagtttagtcttttaaaacttagccctgaaccttgcctttttgacattgtgaaatggatgtgattgaaatgtttaagactctactctagtctctggaatatggttttgcctgttacctatgttgagttatatttatgttgttaagatgatccatactgcaagtgttatgctatgttaagatgattctgcgagtaaa

SEQ ID NO: 385810 - DNA, 505 bp, Oryza sativa
gcccggactgacttgctggacccacccacgcgaccttgttcacccagatgacggagccatagactgggaggtctttgttgagcgtcaggggcggaaccatggccgccgcgctcacccgcccgcctccaggcacggtccagtgcttcgggcgcaagaagacggcgggtgccgtttcctactgcaagccggggcgcgggctggtcaaggtgaacggcgtcccgatcgagctgatcaggccggagatgctccgcctcaaggcgttcgagcccatcctgctcgcggggcgctcgcgcttcaaggacatcgacatgaggatccgcgtccgcggcggtgggaagacgtcgcagatctacgcgatccgccaggcgcccgcgcaaggttccagaagtcgtaccgctgagcgctcgccggaccgattcggagcggtgttctcttttccaccctatcaatggagctacttggcttgttctacatctatctagctactgcattactttcaagttta

SEQ ID NO: 385811 - DNA, 726 bp, Oryza sativa
cccacgcgtccgcggacgcgtgggcggcaaactatagtgtgaacgggagcttttcaggtggccataatggaaacaatgggcaaagaggacctagtactgctcccaatgttgggaggccaaacatggagactgttaatggtatcgtggatgaaaatggggctggaggtggcaatggaagtgggagcggtagtggtaatgacttgtatcagaatggggtctgttaccgagaagctgcattgaacaaattcagacagaaacggaaagtgaggaactttggaaaaaaggtagcctgttttcagttacacgcctatcaaagtcatgagtcctaaaattagtagtattaatcacttgaactctttgagggggctatgaattctactcagtatagcaaaaacgagtggtagtatattctaatgattgggtaaacaaaatgacaattgatacaatttcttcgtaccgatgtgaacactacttttgaaaagagtataaaaaagtgttgtttcttccaagggtgggccaaactttaataagtaccaggatcgaaccagtgaattactacattccacaaagtaattcataatgtctaatgaggggagtatgatctttaggcaataatcggttttgacactgttgtttcacttttgaggaaaaagacacttttttcttgctggtgtgccttgactaacgttagcattgaaccggtatttttttgatggctttgtccgc

SEQ ID NO: 385812 - DNA, 644 bp, Oryza sativa
  unsure (1)..(644): unsure at all n locations
ctcttcttgattagactcccctgttgttacctagtactggtcctgacaacaaggcagatgaatctactgagctantggggaatttcatccggcttcgatggagataccagttcagaggaggataatgtgcctgcatcttatggcaaggtncctgctggtgaattggtggcgcttctagatggtccagaactcagcaataagatagatgacatgatcgaggccaacttatcgggcttttcaggtcaagagaataatcattgctcagctgtcaaatgttctggtataagcaggaggaggaggttgcatggagagagtaatgttctctaagcttgattgcctgtatgcacgcatttgcttggggtattgtctccatgttgctatctgctgtagtagcgcctaactaaaaaaacctgagcgtgtcaatatacttctgccctaacaaatttaagcccaatacctagatctgatatgtgctcgtcttaagtggtggtgtcatgtataaatgtgatcagggatatggtaagctcatgtaataattgttcctagtgctattcgtgtgtcaaatctttgtaatgcctgttaaggccaaccaaattaatttttgaaaacttccatagtaacaaatgcatgtttggtttgttccc

SEQ ID NO: 385813 - DNA, 961 bp, Oryza sativa
aaagatcgcgccctccggttttactactacaattgctggagggcgctcaaaagggcctggtcgcaaggatggacctgcacagaatgctacattctcttcagattttgagcttgtttatgtcccaaaaatgtgtgctctgttagttactgacagaggaaatcgtttgatcaggcaaatcaatctaaaacaagaagattgtgcacgtgagacacagccaggcttgggaacaacttcggtgtcaattattgcagtgctatgtgcactgcttggttcagttattgggttctccattcggcattggtgaccctgctcatgcaggaagtctccatcaaccgctttttcaggaggatgcagatgcagtacaagacaatccagaggacggccgctctgatcagcttctccgacatcagaagcgtagctgctaactccacgtttcacgccctcctgctgaagctagttagagtttgtgttggctatctaagtgttgtgttccctagcgttaggttagagaaacgagcccctgttaagccttgtccttctcttcttgatttagactaccctgttgttactagtactggtcctgacaacaaggcagatgaatctactgagctagtggggaatttcatcggcttcgatggagataccagttcagaggaggataatgtgcctgcatcttatggcaaggtgcctgctggtgaattggtggcgcttctagatggtccagaactcagcaataagatagatgacatgatcgaggccaacttatcgggcttcggcaacgtcagcaatggcggaaggatcaagtgcatgcaggtgtggccaattgagggcatcaagaagttcgagaccctatcgtacctgccaccactcaccgtggaggatcttttgaagcagatcgagtacctgcttcgatccaagtgggtgccttgcctcgagttcagcaaggttggattcgtctacc

SEQ ID NO: 385814 - DNA, 1874 bp, Oryza sativa
ccacgcgtccgcgttaatccaacagaaaaacagcatgaaactctcatgccccaaagtaaaacaacaagagaaacagatagtaggaacacacagaatgaaccaactactcaaactgttgatttaattagttcaatagccagaagcacagatgacaaacaagtagttagaatcaataatgctcctgattgctcctccaaggttccagatggaaatgataaaaatcgtgattctctcattgatatgacatctgaagagttgggtttgaagagattgaaaacaactggatctgcaacttgaatccatgatgaacgaaatattcttgaaagatcagatctctcagctttcaacaggtaccatacaactgtggcttctaatcaaggtggagctggatttgggggaaggctgttcacctcaagataacagtttcagaggctctgaaaacagactccaactgcaaggtgaagtcaaattcagatgctgctgaaataaagcaaggctccaatggtagtagcaacaacaatgacatgggctccagtactaagaatgccatcacaaaaccttcttcaaacaggggaaaagtgatatcaccatcagctgtcaaagctacccaacatacatcagcattccatcctgtgcagcgtcaaacgtyacctgctaatgttgtaaggaaagacaaagttkatgaaggaattgctaatggagttaatgtgggccaccctgtagatgtacaaaatagctttatgcagcaccatcatcatgttcattactacgtccatgttatgacacagcagcagcagcagccatccattgagcgaggatcatcagatgctcagtgtggttcatccaatgtatttgatcctcccattgaaggtcatgcggcaaactatagtgtgaacgggagcttttcaggtggccataatggaaacaatgggcaaagaggacctagtactgctcccaatgttgggaggccaaacatggagactgttaatggtatcgtggatgaaaatggggctggaggtggcaatggaagtgggagcggtagtggtaatgacttgtatcagaatggggtctgttaccgagaagctgcattgaacaaattcagacagaaacggaaagtgaggaactttggaaaaaaggtgcgctatcagagcagaaagaggttggctgagcagcgccctcggatccgcgggcaattcgtgcgacaatctggacaggaagatcaggcaggccaagaccgaagaacagataaactaagagaccacctacatatccaacatggcatttgctttgacagctggagagctacgcaattcattccatagctgaaagcagctcatcgatccccacattggagtgctcaataaataaaacccatatgattattttctgtgcctgactccagatgaaatttgtgctatggagtggaccacgcatttaattttaatatgggcaatcgggtaaacaacttaagatgcgatgggttattttgtggacctccagttccctttgcagagatccacttggacactttgtcgagtctaaggaggagcaaaccatctgacgtttctatcggatcatgaatgctaaatctttactctactactacatcgagctgacatcagtgagggttcaactattcattgcgagacattattttcaagtcaaatagtacatacttttctgctggctgcatttctttttcatgttaatttccgctggctccaattttgtggttgactactgttatggagtaatggcaaccccagtgcagtaatgacggtttctttttaagttttgctttagctttgtcttgtaatgaacctctgtgatgtttgggatttcttacaaagccggatgctgacgatctttcctct

SEQ ID NO: 385815 - DNA, 1011 bp, Oryza sativa
tcgacccacgcgtccgcggacgcgtgggcggacgcgtgggcagcacactgcaacttaagtttttctatagctcctagcaagctagcaatggctccctcggtgatggcttcgtcggccacctccgtggctcccttccaggggctcaagtccactgcgggcctcccggtgaaccgccgctccagcagctcgagctttggcaacgtcagcaatggcggaaggatcagatgcatgcaggtgtggccgattgagggcattaatatagttctagactctgtcgtacttgccgccattgacagtggaggaccttttgaagcagatcgagtacctgctccgatctaagtgggtgccttgctttggagttcagcaaggtcggattcgtttaccgtgagaatcacagatcacccggatactatgacggtaggtactggaccatgtggaaactgcccatgtttggatgcaccgatgccacccaagtgctcaaggagctcgaggaggcaaagaaggcataccctgatgccttcgttcgcatcattggctttgacaacgttaggcaggtgcagttaatcagcttcatcgcgtataagccaccgggttgcgaggagtcaggcggcaacctagcgcttttcgttccttcgtgcatgttctttctttttcttttttttttttgtgtgtccgtgttaagctgcacgtaattgttctctcgcgctccgacctgccgttgttgcaagagtactactacaactatcggtctatcgttcggtgacggtgagacagggcacgtgaatgcaagatctccggctatacacacgtactcatgtaatatgatgcctagagcatatctgaatccgtcgacaatgaaattttggttttgcaaaatgctggtatttgtttatcatcctggcacgtgatatttgcctagagcatctaaatcacttttacgaaatgtgcgcgtcaacaaactgatacggcccaaatgccagaaattaccagcacatatagccatatcaaaaa

SEQ ID NO: 385816 - DNA, 982 bp, Oryza sativa
tcgacccacgcgtccgcccacgcgtccgtgctctagcaccttaccaagcagaaagctagagagctagcaatggcgcccaccgtgatggcctcgtcgggcacctgcggtgctcccttccaggggctcaaatccaccggcgggctccccgtcagccgccgctccaacagcgccggcctcggcagcgtcagcaacggtggaaggatcagctgtatgcaggtgtggccgattgaaggcatcaagaagtttgagacccttgtcgtacctgtccccgctcacggtcgaggacctctttaagcatatcgagtaccctgctccctgcccaaatgggtgccttgccctcgagtttagtaaggtcgggttcgtctaccgtgagaaccacaggtctcctgggtactatgatggcaggtactggaccatgtggaagctgcctatgttcggatgcactgatgccacccaggtgctcaaggagctcgaggaggccaagaaggcatattccaaaggcattttgttcgaatcatcggtttcgacaacgtcaggcaggtgcagttgattagcttcgtcgcgctacaagcccccggggttgcgaggagttccgggcggaaacttaagctagtttgggcaaagccagcaagcttcactcgtgagctctatacagaggagactcgattgatctattcggttttggcaagctttagaacgcttcgaattcggagccactcttgctttgagtttcccctttcccagtttgtggcctcagtttttttttttttcatcttgtttgtgtcaacgatctagctgtgtatgtatgcacatatgtatgggtatcaaccataggtttgaagagcatgcatatgtgaatgctaagcaccaggctaatcatatgcacatacacatcgtaataaatatattgtacaaatcgtcaaaaacgaatacttatatgtaatactatactcacaccaaacttgatacctctggtttccaa

SEQ ID NO: 385817 - DNA, 1274 bp, Oryza sativa
cccgcgtccgcccacgcgtccgcccacgcgtcctccgcacgcgtccgcccacgcgtccgcccacgcgtccgcaccactgctagcttgggatagaggaggaggagcttgagcttggagagagacaacagtggcggctcaggctcgttctctctgggaggcagctgctggggaggccattgcaatcttcagtctccaggtcttcttcctccaggaaggcacccttcatggtcagggcagaggccactccccctgccaagcaaggtgctgacaggcagctgtggttcgcatccaagcagtccctgagctacctgggatggcacgcttccgggagacttcgggttcgaccccgttggggctatcggacccggaagggacccggatgggttcatcgagccacggtggcttggcctacggcgagggtgttcaacggccggaccggcgatgaatgggcgtcgtctgtgcatggtcgccctcggagctcctcggcaaagcttgggcctcgtccccgccgagacggcgatccccgtgggtccagaaccggcgtgatccccccccggggcacctacacctactgtgccgaccctttacactctcttcgtcttcgagctcgccctcgtcggcttcgcccgagcaccgccgcttcccaggactggtacacgccgggctccatgggggaaccagtacttcctcggccctccgagaagtaccctcgcccgggctcccggcaagcccggcctaccccggcgggcccgcctctttcaacccggctccggctttcgggacccaagaagcgaaggcggaaaatgaaggaagctcaaggctcaaggagaatcaaaaaatggcagggctcgccatgctggccttcctcggcttctcccgttccaggcgcttcttcaccggggttgggccccgtgccagaaacctggcttgatcaacctcgctgatccccgtccacaacaaaacatcctcaccagcctcaaggttccattagagaatgccatcaaactacggtatttaattaattacgagttttttaaattatgtactgtatgtacgatgcgtatgacgtataatgtgtgtaacgtatgtatgtacccaactttgtacgatcgatggtgcgtgtgatccaaaggggtatgtatgaacgaacgtatataccatgtattattatgcatgggtgtagggtgtgggtgtaacatgtaccctttgtgctccaacttgatttgcacgcatgcctcgcctggatcgatttgctaaaaaaaaaaaaaaaaaaa

SEQ ID NO: 385818 - DNA, 2128 bp, Oryza sativa
  unsure (1)..(2128): unsure at all n locations
tttttttttttttttaaaaacaaacataattacgtgataccagtgccagtttttttattgtcgacgaatttatcaaatatgcgctagaatacatatcttgtgtgtatatagcccgggagctttgtgtttcacatattcctcaacccaacggataattggaggtacttttaacaataaaacccgggtcggaggaggggaggggaaggagattattacatatgggttaaggagcagagggccatgtgagagtggtacaataaccacaattggtaaaaataaaaattatatgagcaatattatattatggagtatattcatcaacatatgcccaaaacaaaggctgcatactaattattatagggcagcaatccaccaagcgcgatgcttgaatcttagcttaagttgccaccagactcctcgcaacctgggggccttgtaggcgatgaagctaatcaactgcacctgcctgacgttgtcgaaagccgatgatacggacaaaggcattcggggaaggccttcttggcctcctcgaggctccttgagcacctgggtggcaatcggtgcagccgaacatgggcaagcttccaacatggtccaaatacctgcccatcgtagtaccccgggaagaccttgtggttcctcacgggtaagacgaatcccaaccttggctggaactcgaggcagggcaccccacttgggatcgaaagcaggtactcgattctgcttccaaaagatccccccgggtgagtggtggcaaggtacgataggggtctcgaacttcttgatgcccttcaattgcgccacacctgcatgcacttgatccttccgccatttgctgacgttgccgaagcccgaagttggtggagcgtcaggctatcggaggagccccggcgtgtggcacttgagcccttggaatggagccgcggaggtgtccgagtaggccatcacggttgggggccatacgccacgtagttagttagctagcttaactggctgagtagagtagagcggacgcgtccgcccacgcgtccgcggacgcgtgggcggacgcgtccgcggacgcgtgggcggacgcgtgggcggacgcgtgggcggacgcgtggggaagtactcgagcaaagaagcgagagagcttcgtgtgagctagcagagatggcctctctccgtgatggtcgtagcaagacactcaccgttgctcccttccagagggctcaagtgcaccgacagcatgcccgtcgcccgccgctccggcaactccagcttcggcaacgttcagcaaatggcggcaaggatcaggttcatgcaggtgcatgcaggtgtggcctgatttgaaggcatcaagaagtttcgaagacccttctcttaccttgccacccgctcaccgtggaggacctccttgaagcagatccgagtaccttgctcccgttccaaagtggggtgcccctgccctcgagttcaagcaagggtcggatttcgtctaaccgtgagaaccaacagatccccccggataactacgattggcaaggtactgggaccattgtggaaagctgccccatgtttcgggtgccactgccgccacccaaggtgcttcaaggaagcttcgaaggaggccaagtaaggcnttaccctgatgcattcgtcccgaatcaatcggctttcgaacaaccgtcaggccaggttgcagctcatcagctttcatcgcctacaaagcccccgggcatgccgagggagtcttggtggcaactaaagccgtcatcgtcatatatagcccttgttttaattgttcatctctgattcgatagatgtctcccgaccttgttctcgtggtcgttcccagtttgtttcatcggtcttttgatgtttcaccggggccgntgctcgtgcttttgggtttttggtttcacctgatcgtctctctgacttgatgtaagagtgcgtatctgctaggcctcatatgttgttgggtgacccatactctgaatgaaacccactgcccagctccggccccatatatatttatacaaagggtacgagatggatgtgaatcctagagcatatgtgtccaacaatcaattcgtcgacaatgaaaatttgatcatggaattaaaaaatcatgcttctgttgttc

SEQ ID NO: 385819 - DNA, 696 bp, Oryza sativa
tcgtgtacgcgtgggtagggttttaggaggcaacacgccgccctgcgccgccgtcgccgccgccgccaccgccaccgccaccgtcagattctcctaagcggcgatggccatggcacggcgttccgcctcccgtctcctctcctcgttccgccccttctcgctcctccttcaaccgctcgatgacgccccttcgctctcggccgcggcggcagcagcgtcggcccgccgggggatgtcttcggcgtcggcgctgcgggcgcgggacgagaaggaggtggcgaggtggcgcgagtcgatcatggggatgcggaatatcggaatctccgcgcacatcgactccgggaagacgacgctgacggagcgcgtcctgtactacaccggccggatccacgagatccatgaggtgcgtggccgcgacgcgtgggccaaagatggactccatggacctcgagcgcgagaagggcatcaccatccagtccgctgcaacctactgcacctggaatggataccaggttaatatcatcgatactccaggtcatgtggatttcactattgaggttgaaagagcactccgtgttcttgatggtgctatacttctgctatgtagtgttggtggtgtaccaagtcaatcaattactgtcgatcggcaaatgagaagatatgaaattccaagggttgcatttttcacaagttggg

SEQ ID NO: 385820 - DNA, 1173 bp, Oryza sativa
  unsure (1)..(1173): unsure at all n locations
agttgagaagatattccttgcacagaagatgatgatttacaagtgcaaccttgctggaaagcctgttgtgactgctactcagatgcttgagtcgatgatcaaatcaccacgtccaactcgtgctgaggcaactgacgttgcaaatgcagttcttgatggaactgactgcgtcatgcttagtggagagagtgctgctggcagcataccctgaagtagctgtgaagatcatggcacgtatatgtgttgaggcagagtcttcccttgacaacgaagctgtcttcaaggagatgatcaggtctgcgccccttccgatgagcccattggagtctctcgcatcctctgctgtacgcacagccaacaaggccaaggcagccctgattgttgtcttgactcgtggtggtaccacggcaaagctggttgccaagtatcgtcccacggttccaatcctctctgtggttgtccccgtgttgacaaccgattcattcgactggacaatcagctcggagggcccagcaaggcacagcctaatctacagaggtcttgttcctctcctggctgagggttctgccaaagccaccgattcggagtcgacagaggtcatccttgatgctgctctcaagtcagctgtacagaagcagttgtgcaagcctggtgatgctgttgttgctctgcaccgtattggcgtcgcatccgtgatcaagatctgcatcgtgaagtaatcgctacacggtgtcttcttagcgccattttgctgggttaagtggcaaaacaaaaactgctatgcttgtttttactcccatagtccatctttgggagacaatttaattaccgtatcagcccctgcagttcgcagggtgcctttcgttacatagatttgctggtaaaatgaggagagatagaactccattatgtagagctctatttatcgtcgatgccatgtagtatggcaggtggtttctattccatgcctgcacaattttctggtagctactgtgttgtttgattactgttttttcaggtgatgtcgatggagttgataataatattggcatcattgtcgttgtatacgagttaaaaaagaatgtcccaggattcatcaggaatctggtgtgcccatatngccatatggatttttgtcttgtttaagattccggtgaccggggacgaaatctt

SEQ ID NO: 385821 - DNA, 491 bp, Oryza sativa
ccaaactctcctttaccccaatctcgtgagcggcgacgaactttgccaccgatttcgatccttttttttggcagcgtgtagtgacgcgagagagaaatggcgagcaagaggagcgtgggcaccctgacggagtcggatctgaaggggaagaaggtgttcctccgcgccgatctgaacgtgccgctggatgacagccagaagatcaccgacgacacccgcatccgcgcgtcggttcccaccatcaagttcttgatggggaagggcgccaaggtcatcctggccagccatctgggtcgcccaaaaggtgtaaccccgaagtacagcttgaagcctcttgttccgcgcttgtctgagcttcttggtgttgatgttgtgatggccaatgactgcatcggtgaggaagtccagaaattggctgccactttaccagatggtggtgttctgcttctagaaaatgtcggtctacaaggaggaagagaaaaatgaccctg

SEQ ID NO: 385822 - DNA, 129 bp, Oryza sativa
cctcatcgtcctcctcggcctctcctcaacttggcaccgggaagtcctgtttcagggtttcaactgggagtcgtggaaggagaatggcgggtggtacaactgcttatgggcaagctaggtggacgacat

SEQ ID NO: 385823 - DNA, 2367 bp, Oryza sativa
  unsure (1)..(2367): unsure at all n locations
gttcctaacaggcatctgtcatcgaagctcttccatgacaaggagagcatgtacccactgctcaacttccttcgtgcacacaactacaagggcatgaccatgatgttgaatgacagaatccgcagtctcagtgctctccaaggtgctctgaggaaggctgaggagcatctttctggtctttcagcagacaccccttactcagaattccaccacaggttccaggaacttggtctggagaagggttggggtgactgtgccaagcgttcccaggagaccattcacctccttttggaccttcttgaggcccctgatccgtccaccctcgagaagttccttggaacaatcccaatggtgttcaatgttgtcattatgtccccacacggttacttcgcgcaagccaatgtcttgggttaccctgacactggagggcaggttgtctacattttggaccaagtccgtgctatggagaatgagatgcttctgaggatcaagcagcaaggtctcaacattacaccacgcatccttattgtcaccaggttgctccctgatgcaactggcaccacctgcggtcagcgtcttgagaaggtccttggcaccgagcacacccacatcctacgtgtgcctttcagaactgaaaatggaattgttcgcaagtggatctcacgttttgaagtctggccgtacctggaaacattcactgatgatgtcgcgcacgaaattgctggagagctccaggccaatcctgacttgatcatcggaaactacagtgacggaaaccttgttgcatgcttgcttgcacacaagatgggtgttacccattgtaccattgcccatgcgcttgagaaaaccaagtaccccaactctgacctctactggaagaagtttgaggatcactaccacttctcatgccagttcacaactgacttgattgcgatgaaccacgctgacttcatcatcaccagtaccttccaagagattgccggaaacaaggacactgttggtcagtatgagtctcacatggcattcaccatgcctggtctgtaccgtgttgtccacggtattgatgtttttgacccgaagtttaacattgtctcgcctggtgcggacatgtccatctacttcccttactctgagtctcgtaagaggctcacctccctccacccagagattgaggagttgctctacagcgaagttgacaacaacgagcacaagtttatgctgaaggacaggaacaagccaatcatcttctccatggctcgtcttgaccgtgtcaagaacttgactggtctggttgagctgtatggtcgcaaccctcgcctgcaagagctggttaaccttgtggttgtctgtggtgaccatggcaacccatctaaggacaaggaggagcaggctgagttcaagaagatgtttgaccttattgagcaatacaacttgaatggccacatccgctggatctccgcgcagatgaaccgtgtccgcaacggtgagctctaccgttacatctgcgacaccaagggtgcttttgtgcagcccgctttctacgaggcattcggtctcactgttgttgagtccatgacctgtggtctcccgacattcgcaaccgcctatggtggtccagctgagatcatcgtgaacggagtgtctggcttccacattgacccataccagggtgacaaggcctcggcgctgctcgttgagttctttgagaagtgccaggaagaccccagccactggaccaagatctcgcagggcggtcttcagcgtatcgaggagaaatacacctggaagctctactctgagaggctgatgaccctcaccggcgtctacggattctggaagtacgtctcgaacctggagaggcgtgaaacccgccgctaccttgagatgctgtatgccctcaagtaccgcaccatggctagcaccgtcccgttggccgtcgagggcgagccgtcgaacaagtgagctggccaacatctcaggctgagactctgaaagaggagagcattggagtttctttgctttgtttccattctctggtttcagagatgaaaagagaagagagatatttcaggatgctttgcattcctaggcactgctctttttccttaagaaagtaaggtcgattgaatttgggagttttctagtttgatttagttgggggtgagttcagtggaatgtggtgtgtggttggtgctctgtctcctcttgttattgggatgttacctatgaataatagaaacggccttggtgccgtttctgcaataatatattgtagcatccttgtttccaagaaaaaattgtcactgaaatgctcacttctccttggggttcnnnnnnnnnnnnnnnnnnnnnnnnnnnnnnnnnnnn

SEQ ID NO: 385824 - DNA, 590 bp, Oryza sativa
gtttaccacagattggggataagtttagtagtaggcatggtcagaaaggaactgtgggaatgacttatacacaagaggacatgccatggactattgaaggcatcacacctgatattattgtgaatccacatgctattccatccgtatgactattggtcaactgattgagtgtattatgggtaaagttgctgctcacatgggaaaagaaggagatccaactcctttcactgatgttactgtggataacatcagcaaagcacttcataaatgtggttatcagatgcgtggattcgagaccatgtacaacggtcacactggaagaaaattaactgccatgattttccttggtcctacttattaccagagacttaagcacatggtggatgacaagattcactctagaggccgtggtcctgtgcagatacttaccagacaacctgcagaggggcgctcacgcgatggtggtctcccgtttggagagatggagagggactgtatgattgctcatggcgctgcattttttcttaaggaaaggttatttgaccagagtgatgcgtacagagtccatgtatgcgagaaagtgtggctta

SEQ ID NO: 385825 - DNA, 154 bp, Oryza sativa
gcgcgtcgtgtggagcgcgggctgtgcgatcggcttcgagagcgttcaacacggcttgcatcaccaagctcttcccacgcgtcgacaccgtcgcgcgagggtgcataaatgctgctcttgaaacatgacgagatgactgagatgcatatgatga

SEQ ID NO: 385826 - DNA, 1482 bp, Oryza sativa
ccacgcgtccggtcgctttctaattttttcttttctcccaccctctctctctctccggtctccactccctccgctcctccgctcctcgcctcttttacccgctcttccccccgatctccccggactcccacagccgcagcgaacaaatcccgcgcgggttgggaagagcgagctcgtgaggagagcagagggaaagcgcgagggggaaggaggaggaaaggtgcacaaggtcagactaagtttgcgttgaagaacaaaggagaggaaaaatgtcgcctgctgaggcatcgcgtgaggagaatgtgtacatggcaaagcttgccgagcaggctgagcgttacgaggaaatggtcgaattcatggagaaggtggcaaagaccactgatgttggtgagctcaccgttgaggagcggaacctgctttctgtggcttacaagaacgtgattggtgctcggagggcatcgtggaggatcatctcttctattgagcagaaggaggagagccgtgggaatgaggcatatgttgcatcaattaaggagtaccgtagcaggattgaaactgagctcagcaagatctgtgatggtatccttaagcttctggattcccaccttgtcccatctgccactgctgcagagtccaaggtgttctacctgaaaatgaagggtgactaccacaggtaccttgctgagtttaagtcaggagctgagaggaaggaagcagctgagaacactcttgtggcatacaagtctgcccaggatattgcactcgctgacctgcctacaactcacccgataaggcttggacttgcactgaacttctcagtgttctactatgagatactgaactcaccagaccgtgcttgcaaccttgcaaagcaggcgttcgacgatgctattgctgaactggacactcttggcgaggagtcttacaaggacagcaccttgatcatgcaacttcttcgtgacaatctgactctctggacctctgacaatgcggaggatggtggtgacgagatcaaggaagcagcgaagcctgaaggagagggccactaatctgtcctgaagtctatttctgagtccatttactcagctacctgctgtattactggatcataagatgtactaggatcaattgctatgtggaatcataagattagggctgcgtatgtcaaaatgtgtcgagctgaagtacccagtggacacagtttatgtgcactacattgcttccgtgacttatttactagttaattagcaactttcaaccacttcctgtatttgcagcacattattagtatcgctgtattagcgttttccatgggctggttatgattgagaatacaggccaggcattgcatgtcctttatttgtaagctcgatgtggacacgttggaattcgtgcttttcttattgtcatgagagttgagatgatgtttggattggcggcatcctgtccgtccaagggtcaatgttatttttgaaggtt

SEQ ID NO: 385827 - DNA, 2302 bp, Oryza sativa
  unsure (1)..(2302): unsure at all n locations
gtctgcttaacatagagcaggtcattgtgcttgactggggcagggagggtgacaaatgagtctgtatccgactagtatttggaacaacataagagaggaggctctctgtacggtcgtgtgaggaagagcaatccagacatgttcattgcttaacaagatacatatagtgaaaaattgttcgtagcattttagctctagtatagatcgatcaatcgatcgttcgttcgttcgatcgttcgaggacgagagatttgctaacatggcgttggcagggacctccaaagtagtgctgggatgtgtcgcgtttgggatattctgggtgctggccgtcttccccaccgtcccgttcatgcccgtcggccgtacggccggctccctccttggcgccatgctcatggtcctcttccgtgtcatctcgccggaggacgcctatgccgttatcgacctcccaatcatcggcctcctctttggcaccatggtcgtcagcatcttcctcgagagggctgacatgttcaagtacctcggcaacctgctctcctggaagagcaggggcagcaaggacctgctcttccgcgtctgcatcgtgtccgccattgccagcgcgctcttcaccaatgacacctgctgcgtcgtgctcaccgagttcatcctcaaggttgccaggcagaacaacctgccgccgcagccgttcctcctcgccctcgccaccagctccaacatcggctccgcggcgacgccatcggcaacccgcagaaccttgtcattgccgtggagagcggcatctcctttggacagttcttgcttggagttttcccggcgatgatcgtcggcgtcctgacaaatgctgccatcctcctctgttacttctggaagtacctttcagtggagaaggatcaggaaggcgggcagccggctgggccggaggtggtcgccgacgacgaggtcacctcacacaggttcacacctgcaagaatgtcacacgtctcatctctgaacccggatgatatggactgcataagtgagccaatcatcaggagcaacagcgtgaggagcaccagtgctaatgagaatctgaggagcaggagtgtgaattcggaggcggacatacagctcgcgatcaagtcgctccgggcatcgagcatgtcgcatgagatggtcgaggtctcaactgtcactgacaggagggatgaaggtgcatcctccaggaagttcacaagaactgctagccagcagaggagtgtgatcatagaggactcgccgccgtctcccgccagcaatggcgacaaggagaaggaagatgaggttgcggagaagagatggagggtgtttgtgtggaagactgctgtttatctcatcactcttggcatgctcattgcacttctcatggggcttaacatgtcatggacagccatcactgcggctcttgttcttctggcgcttgattttactgatgcacaggcttgtctggagaaggtgtcatactcattgctgatcttcttctgcgggatgtttattacggtcgatggcttcaacaaaactggcataccgaacacactttgggagctcgttgaaccgtattcacgaattgacagtgctaagggtgttgctcttcttgctgtggtaattcttatcctctcaaatgtggcctcaaatgttcccacagtactactgctcggcacaagagtggctgcatcagctgctgcaatctctcacgattcagagaggaaggcctggcttatcctagcgtgggtcagcaccgttgccgggaacctcacactactgggctcggctgcgaacctcatcgtctgcgagcaggctagaagagctcagttcttcggctacaacctctccttctggagccacctccggttcggggtgccgtcgaccatcgtcgtcacggcgatcgggctgctcatcgtcaccagttactgaagaagaagaagaagaagaagaagctgacagcagcataaggtagcgtacaagaaggagatagatgaacgaaccctttggatcaataagagagagtacatgtaaaatttctaaaataggcttgtcctgtaaaactcgtgtgtgttttgtgtgtatctatgccagctgctgcgtctgtgcccttgctcttttgttgtcgctaagcagacggtgattgagaaggatgcagatgtagcaggctaagcaacctgcattttcagtgtttttcttcagagtcggaagttgcaaatagggcgagtaaatgaagaatgctatgacaatctgattttagtttttatacaacnnnnnnnnnnnnnnnnnnnnnnnnnnnnnn

SEQ ID NO: 385828 - DNA, 689 bp, Oryza sativa
cttatcctctcaaatgtggcctcaaatgttcccacaggtaaatcttcagaacaatattcttttggatactgactgtcaaagttatcccaaagttctgaacaattcttttgtggcacttttataacatttctgaactttgtctttcagtactactgctcggcacaagagtggctgcatcagctgctgcaatctctcacgattcagagaggaaggcctggcttatcctagcgtgggtcagcaccgttgccggggaacctcacacccctgggctcggccgacgtacctcatcgcctgcgaccaggcctgaactcttccaattcggagaatggtgttctccagctcaagcaaccacccgaagcttgaaggagaggcccactaatctgtcttaaagtcaatttctgagtccattcactcagctacttgctgtattactggatcataagatgtactaggatcaattgctatgtggaatcataagattaggcctgcgtatgtcaaaatgtgtcaagctgaagtacccagtggacacagtttatgtgccctacattgcttccgtgacttatttactagttaattagcacctttcaaccacttcctgtatttgcagcacattattagtatcgctgtattagcgttttccatgggctggttatcattgagaatacaggccaggctgtgcaagtcaattt

SEQ ID NO: 385829 - DNA, 469 bp, Oryza sativa
  unsure (1)..(469): unsure at all n locations
ctccctccgctcctccgctcctcgcctcttttacccgctcttccccccgatctccccggactcccacagccgcagcgaacaaatcccgcgcgggttgggaagagcgagctcgtgaggagagcagagggaaagcgcgagggggaaggaggtggaaaggtgcacaaggtcagactaagtttgcgttgaagaacaaaggagaggaaaaatgtcgcctgctgaggcatcgcgtgaggagaatgtgtacatggcaaagcttgccgagcaggcttgagcgttccgaggaaacggtcgaattcatggagaaggtggcaataggaccacctgatcggttgggtgagcctcaacccgtttgagcgaagcccgggaacccttgcttttttcttgtgggcttttaccaaagggaaccggtgatttnggtgcttccgggaggggcaattcgttgggaggggttccancctctttctatttt

SEQ ID NO: 385830 - DNA, 1701 bp, Oryza sativa
  unsure (1)..(1701): unsure at all n locations
ggangcngtctgcgtcttagcagaagtccaggtggacaagaacgcgaggaggggaagaatcatccccgagatctcgctgccgctgctcatggcgttcgcggcgtcccacaccgcatcgccgtactcctgcggcggcgtggcgcagaggaggagcaatgggatgtcgccggtggtggccatggcctccaccatcaacagggtcaagactgctaagaagccctacactcctccacgtgaagttcatctccaagtcaagcattcactgccaccccaaaagcgggagattttcgattcgcttcaaccttgggccaaagagaaccttttgaacctcctgaagccagttgagaagtcatggcagccacaggacttcctgccagacccttcttccgatgggttttatgatgaagtaaaagagctgcgggagagggctaaggagatccctgatgactactttgtttgcttagttggagacatggttactgaggaagctcttcctacctatcaaacaatgcttaacacccttgatggtgtccgagatgaaactggcgcaagcccaaccacctgggctgtttggacaagagcatggactgctgaagagaacaggcatggtgatcttcttaataagtacatgtaccttactggacgtgttgacatgaaacaaattgagaagacaatacaatacctgattgggtctgggatggatccaggaactgagaataatccctacttgggtttcctttacacatcatttcaagaaagagctacatttatatcccatggcaatactgcaaggcacgccaaggagtacggggaccttaagctggctcagatatgtgggacaatagcagctgatgagaagcgccatgagacagcttacaccaagatagtggagaagctcttcgagattgatcctgactacacagttcttgcatttgctgacatgatgaggaacaagatctcaatgactgctcatctgatgtatgacggcaaggacgacaacttgttcgagcatttgagcgctgtggcacagcggctgggtgtctacactgtaagagactatgccgacatgctggagttcttggtccagaggtggaaagtcgcagatctcaccgggctgtccggagaagggagaagggctcaggatttcgtctgcacgttggcgccgagaatcaggcggctggatgaaagagcccaagcaagagctaagcaagcgcctgttattcctttcagctgggtttatgaccgcaaagtgcagctttgatcatgatcagtgagcaaccgagactgcatcctatatattggttctaagatatgaggttctctatatggaaaaaaatctaggttatctagctggggtagaatgcaattacctgtccatctgccctcacaaaatctgttgtcttttaagttgataacagtgtcgatgagtctggtgagaagctgatgtgagatgcaacagagtgaacttatgttgtattgatgtgagatgagtatggtgacatttatgtgtacttgcaggttttacatgacttgtataagttttaaagtaataatggagatttgtatacagacaagcgtgtgcactgtcgcatgattaagtagtctaaaatccagactatcttttgtgctctgaatttagcagtaataagattgatcggcttgttcgttttgagctctgaatccannnnnnnnnnnnnnnnn

SEQ ID NO: 385831 - DNA, 870 bp, Oryza sativa
ccacgcgtccgcgtccgcggacgtccagattccaaaccagcaggagtcgcctcgcctcctccttcatcctcctcgtcgtcgccgcgggggtcgcctgagatcacattaacaatggtgaaggctgttgttgtgcttggtagcagtgagattgttaagggcactatccactttgtccaagagggagatggtcccaccactgtgactggaagtgtctctggcctcaagcctggtctccatgggttccatattcatgcacttggtgacaccaccaatggttgcatgtcaactgggccacactacaatcctgccggaaaggagcatggagcaccagaagatgagacccgccatgctggtgatcttggaaatgtcaccgctggagaagatggtgttgctaatatccatgttgttgacagtcagattccacttactggaccaaattcaatcattggcagagccgtcgttgtgcatgccgatcctgatgatcttggaaagggtgggcacgagctgagcaagaccaccggaaacgctggtggccgtgttgcttgcgggatcatcggacttcaaggctgaaacctggaggtgtgaactcaccttccatctcccagcaccagaagcctgaaactctacgagctcttagccgtttcgtctttacctgagtggctactctagattctacaataagcacctgatctctgcgcatggtttttggtgtaccattctgtcgcccgcatcgttggcgcccaatgaactatgtgttttgtgttaaaccttaagctgaagggtaccatttgtagactcgatgttgctctcttcctcggaatgtcgttacatctgttcgctcgtttcgtccgtaaaaaaaaaaaaaaaaaa

SEQ ID NO: 385832 - DNA, 463 bp, Oryza sativa
ccacgcgtccgctccagattccaaaccagcaggagtcgcctcgcctcctccttcatcctcctcgtcgtcgccgcgggggtcgcctgaggtaggaatcccaacaaccccccccccccccccccacccaagcaagcttctagggttttcgaccgcgcctcgcttcctccggtttcgtgggaggcgatcacattgacaatggtgaaggctgttgttgtgcttggtagcagtgagattgttaagggcactatccactttgtccaagagggagatggtcccaccactgtgactggaagtgtctctggcctcaagcctggtctccatgggttccatattcatgcacttggtgacaccaccaatggttgcatgtcaactgggccacactacaatcctgccggaaaggagcatggagcaccagaagatgagacccgccatgctggtgatcttggaaatgtcaccggtggag

SEQ ID NO: 385833 - DNA, 851 bp, Oryza sativa
  unsure (1)..(851): unsure at all n locations
gtgtccacgtggactggactcccgccctcgcctccgcccttctggagtcttcctcatcagaaatcagaagaggagagggtgggcaactcgcagatcgccttctcgtcgcgctcgcgccgcaggggtcgcctgagaacacatagacaatggtgaaggctgttgctgtgcttgctagcagtgagggtgtcaagggcaccatctttttctcccaagagggagatggtccgacctctgtgacgggaagtgtctctgggctcaagccagggctccatggattccatgtgcacgcgctcggtgacaccactaatggctgcatgtcaactggaccacacttcaatcctactgggaaggaacatggggcaccacaagatgagaaccgccatgccggtgatcttggaaatataacagctggagcagatggtgttgctaatgtcaatgtctctgacagccagatcccccttactggagcacactccatcattggccgagctgttgttgtccatgctgatcctgatgatcttggcaagggtggacatgagcttagcaagaccactggaaatgctgggggccgagttgcttgcggaatcatcggactccagggttagacgtctcaactttccaacatacagaagctgttcatgttcgctcgtatggatgttgaaataaaaataagcacctgatgtatgaccagtgtgcagtttgccccagtttatatatatgtgctatactcctgtccgaacattacagtcatttgacttgagtgcatgcgttttaagtatcattggtggacttgagtacatgtccataacccatcnnnnnnnnnnnnnnnnnnnnnnnnnnnnnnnnnnnnn

SEQ ID NO: 385834 - DNA, 1111 bp, Oryza sativa
  unsure (1)..(1111): unsure at all n locations
cgccgggggggccgaggggtggcccgctcgccgggaagaacgacgacgacgacaacaacggcaacggccgggtccagccgcggttctccatcgagtccccgttcttcgccgccgccagagggttttcttcatctgaaacacttgttccaaggaaccaagatactggcttggctgaactacctgcaaccgttgctgcactgaagaatcccaacccaaaggtggtgtacgatgagtacaaccatgagaggcatgcacctggggatcccagcaagcgtgcatttgcttactttgttctaagtggtgggagattcatctatgcatcgttgctgcggctcctcgtattgaaattcgtgctgagcatgtctgcaagtaaggacgtgcttgcgcttgcttccctggaggtggatctctcaagcattgagcctggtaccacagtgacggtgaagtggcgtgggaagccagttttcatcagaaggaggacagaggacgacatagcgctggccaatagcgtggacgttgggtccctgcgccatccccagcaggacgcagagcgtgtgaagaacccagagtggctagtggtcattggcgtctgcacccaccttggttgcattcctctccccaatgctggagatttcggaggttggttctgcccgtgccatggctcccactacgacatctctggcaggattcgcaagggccccgctccattcaacctggaggtccctacctacagtttcttggaggagaacaagctcctcataggctaagagcctgagaccactctctatatctatctaccttctgcactggggtgagagtccctattgtgctgtctattttgttacagtttggctagaaaattttttgttccgcaacgattattgccatgttggctgttactttccgaggtgcattttggagcgcgaaataatttgctactatgatgctactgaaatgtaatctgtaagttacctgggacgtttatttctgggggtacaaacaataggaagcactctgagcacctacctgcccttcacccatgtaatgaatttggccaatgcttttgcccttttgttcttccaaaaaaaaaaaaaaaannnnnnnnnnnnnn

SEQ ID NO: 385835 - DNA, 864 bp, Oryza sativa
  unsure (1)..(864): unsure at all n locations
tcgacccacgcgtccgccccgcttaggtttaggtcttctccgcctccggtttctccctccgccgtcgaaatggtcgcctacaggttccatcagtaccaggtggtgggtcgcgcgctcccgacccccggcgatgagcaccccaagatctaccgcatgaagctctgggccaccaacgaggtccgcgccaagtccaagttctggtacttcctgaggaagctgaagaaggtgaagaagagcaatggacagatgctcgccatcaacgagatctttgagcgtaaccctacaacgatcaagaactacggcatctggctgcgttaccagagcagaacaggttaccacaacatgtacaaggaataccgtgacactactctgaatggtgctgtggagcagatgtacaccgagatggcctctcgtcaccgtgtgaggttcccctgcattcagatcatcaagaccgcaacagttcacttcaagctctgcaagagggacaacactaagcagttccacaactcgaatatcaagttcccgctcgtgtaccgcaaggtcaggccgcccaccaggaagctgaagaccaccttcaaggcatctaggccgaacttgttcatgtgatctaccagtgtgtacccatgttctgcaatttagcccaagaatcaaaagattttgtctgtggaagttttggtgccctgctggttaggcatttccagtttcatatccaaatgatgcttaggcatttccagttacccttccaaatgatgctttgcaaacccttgaatttcctcgtattagtaatcagcagacttcttggtacttcaacctggctcactttnnnnnnnnnnnnnnnnnnnnnnnnnnnnnnnnnnnnnnnnn

SEQ ID NO: 385836 - DNA, 691 bp, Oryza sativa
  unsure (1)..(691): unsure at all n locations
acgccagctggcgaaagggggatntgctgcaaggcgattaagttggggtaacgccagggttttcccagtcacgacgttgtaaaacgacggccagtgagcgcgcgtaatacgactcactatagggcgaattgggtaccgggccccccctcgaggtcgacccacgcgtccggcaagcgtgacaacactaagcagttccacaagtcagatatcaagttcccactggtgtacaggaaggtcaggccccctaccaggaagctgaagacaaccttcaaagcttcaaggccaaacttgtttatgtgatccaagtcgccttccatgttctgtaagatctgccagtatggtgtagtcgtagttcagaacttaagatgaatcttatccatatgaagcctgtttttgaaaagttctggtaggtccatgctgcggtctctctaggttctcgtatcgtatcctggtatccttttcttttgctttgtgatcatctgatgcctcatactgacaattcccagtttgcgttgatattggtttactgaaatattataacgttgctattttgctcaaannnnnnnnnnnnnnnnnnnnnnnnnnnnnnnnnnnnnnnnnnnnnnnnnnnnnnnnnnnnnnnnnnnnnnnnnnnnnnnnnnnnnnnnnnnnnnnnnnnnnnnnnnnnnnnnnnnnnnnnnnnnnnnnnnnn

SEQ ID NO: 385837 - DNA, 842 bp, Oryza sativa
ctcggaccaccgtagcacgccgcctccccgcccagcgacctcggcaactccggcgaagatgggcgccttcaggttccaccagtaccaggtggtggggaggggcctgccgacgccgaccgacgagcaccccaagatctaccgcatgaagctctgggctaccaacgaggtccgcgccaagtccaagttctggtacttcctccgcaagctgaagaaggtgaagaagagcaacgggcagatccttgccatcaacgagatttttgagaagaacccaacaactatcaagaactatggcatctggctgcgttaccagagtaggactggctaccacaacatgtacaaggagtaccgtgataccaccctcaatggtgccgttgagcagatgtacactgagatggcttcccgccaccgtgtcagattcccttgcattcagatcatcaagactgctactgtccactttaaactctgcaagcgtgacaacactaagcagttccacaagtcagatatcaagttcccactggtgtacaggaaggtcaggccccctaccaggaagctgaagacaaccttcaaagcttcaaggccaaacttgtttatgtgatccaagtcgccttccatgttctgtaagatctgccagtatggtgtagtcgtagttcagaacttaagatgaatcttatccatatgaagcctgtttttgaaaagttctggtaggtccatgctgcggtctctctaggttctcgtatcgtatcctggtatccttttcttttgctttgtgatcatctgatgcctcatactgacaattcccagtttgcgttgatattggtttactgaaatattataacgttgct

SEQ ID NO: 385838 - DNA, 708 bp, Oryza sativa
ccacgcgtccgccacgcgtccgcggacgcgtgcgcaatttggtccgcccaaagttcaagttctgggacttgctgacgaagctgaagaaggtgaagaagagcaatggacagatgctcgccatcaacgagatctttgagcgtaaccctacaacgatcaagaactacggcatctggctgcgttaccagagcagaacaggttaccacaacatgtacatggaataccgcgacactactctgaatggtgctgtggagcagatgtacaccgagatggcctctcgccaccgtgtgagattcccttgcatccagatcatcaagaccgccactgtccacttcaagctctgcaagagggacaacaccaagcagttccacaacgggagcatcaagttcccccttgtgtaccgcaaggtcaggccgccaaccaggaagctcaagaccacgttcaaggcgtcgaggccaaacctgttcatgtgattggttacgaagtgatgtggatctttgtttggtagtacaagagttggaaagtttttcgtttgttgaaagttttgatgcgcaaaagactttgagcattttgatacttatttatcgtttggaacatgcttggcaaaccttatgcatatggcgttattagtaattggcagacttaaatcttgcttggtgtttgatatatataatctgcttggtttggtcgtgtaaaaaaaaaaaaaaaaaa

SEQ ID NO: 385839 - DNA, 640 bp, Oryza sativa
cttcgcgctctcccccatcctcccgtaggttaggctaggctagggtttcgaggagctcgcggaaatggtggccttcaggttccatcagtaccaggtggtggggcgcgcgctgccgacccccggcgatgagcaccccaagatctaccggatgaagctctgggccaccaatgaggtccgcgccaagagcaagttctggtacttcctgaggaagctgaagaaggtgaagaagagcaacggccagatgctcgccatcaacgagatcttcgagcgcaacccaaccacgatcaagaactatggcatctggctgcgttaccagagcagaaccggttaccacaacatgtacaaggagtaccgtgacactacattgaatggtgccgtggaacagatgtacaccgagatggcttctcgccaccgtgtgaggttcccctgcattcagatcatcaagaccgcaacagttcacttcaagctctgcaagaccgcaacagttcacttcaagctctgcaagagggacaacactaagcagttccacaactcgaatatcaagttcccgctcgtgtaccgcaagtcaggccgcccaccaggaatgctgaagaccaccttcaaggcatctaggcgaacttgttcatgtgatctacagtgt

SEQ ID NO: 385840 - DNA, 1045 bp, Oryza sativa
  unsure (1)..(1045): unsure at all n locations
cggacgngncncaaaaccctaggattccaacgcgagcttatccacgcgcacgagcttatcatcaatcggcgcctccctctctctcgctcaccgcctccttctcctcgcgatctatccaaacaaggggctcgctaagatcggcatgtcggactctgaggagcaccatttcgagtcgaaggccgacgctggggcgtccaagacctatccccagcaggccggaaccatccgcaagaatgggtatattgttatcaagaaccgcccctgcaaggtggtggaggtttctacctcgaagactggtaagcacggtcatgccaagtgtcactttgttgccatagatatattcaatggtaaaaagcttgaggatattgttccttcgtcccacaactgtgatgttccacatgtgaaccgcacagagtaccagctgattgacatatcagaggatggattcgtgagccttcttactgagagtggtaacactaaggatgatcttagactcccaactgatgacagtctcctgggtcagatcaagactggatttggtgaaggcaaggatcttgttgtgactgtcatgtccgccatgggggaggagcagatctgtgcgctgaaggacattggccccaagtaactccctcaagtggaaggcagaacagaggggcaactccctcaagtggaaggcagaacagaggggtaactccctcaagtggaaggcagaacagagggatccttatgtatcaaacctaaactaaaaaacaaagacatgtattgagaaggaatgctacaaaagacatccacccagcttgaagccgcagtaacaagtgcagtgattgctgggtgtggcattatctgattaccgctaccccatcatgacatttgggatcctgtattttccatggttttatttgtgccctctgtttggtatcaataattgatttggaacggtggaaaccatatactgaagctgaagattatcattgggtcatttcgtgcctatggatttttctctgaaaatttccctagtcactgtttaaaaaaaaaaaaaaaaaaa

SEQ ID NO: 385841 - DNA, 901 bp, Oryza sativa
  unsure (1)..(901): unsure at all n locations
attcccggtcgacccacgcgtccgcggcagtgcattagcgcgaagcagttttgctaaggaacgacaccatgcatacagcttttatgccttttgcatgagagatcaaacgtggaaagctttcctgactgcataacaagtcaaaagcccaccctggggcgtncaagacctatccccagcaggccggaaccatccgcaagaatgggtatattgttatcaagaaccgcccctgcaaggtggtggaggtttctaccttgaagactggtaagcacggtcatgccgaaggtgtccctttgttgccatagatatattcaatgcgtaataagcttgaggatattgttcctttcgtccccacaactgtgatgttccacatgtgaaccgcacagagtaccagctgattgacatatcagaggatggattcgtgagccttcttactgagagcggtaacactaaggatgatcttagactcccaactgatgacagtctcctgggtcagatcaagactggatttggtgaaggcaaggatcttgttgtgactgtcatgtctgccatgggggaggagcagatctgtncnctgaaggacattgggccccaagtaactccctcaagtggaaggcagaacagaagggatccttatgtatcaaccctaacctaaaaaccaaagccatgttttgagaaggaatgctccaaaaaacatccccccagcttaaacccccagtaccaagtccagtgattgctgggtgtggcattatctaattaccgctaccccatcatgacatttgggatcctgtattttccatggttttatttgtgccctctgtttggtatcaataattaatttggaccggtggtggccatgggcaaaaccgccnnnntttaaaaaaacaaannnnnnnnnnnnnnn

SEQ ID NO: 385842 - DNA, 1303 bp, Oryza sativa
  unsure (1)..(1303): unsure at all n locations
cggcgctccaccaccaggcggcggcggcgccggtgacgacgacgacggacgggggcgagctgcgggcgatggacctgtacgagaagctggagaaggtcggggaggggacgtacgggaaggtgtacaaggcgcgggagaaggcgacggggcggatcgtggcgctgaagaagacgcggctgccggaggacgacgagggcgtgccgccgacggcgctcagggaggtgtcgctgctgcggatgctgtcgcaggactcgcacgtggtgcgcctgctggacctcaagcaggggcagaacaaggagggccagaccatcctctacctcgtcttcgagtacatggacaccgacctcaagaagttcatccgcgcccaccgccagaatctccagaagatccccgtgcccaccgtcaagatcctgatgtaccagctctgcaagggcgttgctttctgccatggccgcggtgtgctgcaccgtgacctcaagccgcataacctgctcatggaccgcaagaccatggcgctcaagatcgccgacctcgggctcagccgctcgttcactgtccctctcaagaagtacacccacgagatcctgacgctgtggtacagggctcccgaggttcttcttggcgcggcacactactccactccggttgacatctggtctgtgggctgcatttttgctgagttggccactaaccaacctcttttcgctggagattccgaggttcagcagcttctgcacattttcaagttgctgggcaccccaaatgagcaagtttggccaggagtgagcaagctacctaactggcacgagtacccccagtggaatccctcgaaagtgtctgatcttgtccatggtctcgacgctgatgctcttgatcttcttgagaaaatgctgcagtacgagccgtcgaagcggatctctgcgaagaaggccatggagcatccctacttcaacgacgtgaacaaggagctctactgaaggtcgattgatgatgttcaccaccaaggaaaaaaaaacgttgtgcgtcttcgtgactagcctgccctgaagcattgcttttgcttttagggggaaaagtactgtttgtgtctgtttcctggatgctgcttagtgtgcttaagaattcacttgtttgtgatggtaatgagtaatgacttaagaattcgacaaaatctgtgtgtttatatgtttcataagtcgatcagttttcttgtttggttttgtttgttgtcgttaattcgtcaagtcngtcagcnngttntgtgngnnnnnnnnnnnnnnnnnnnnnnnnnnnnnnnnnnnnn

SEQ ID NO: 385843 - DNA, 780 bp, Oryza sativa
cttttatccacataagaacactcgcggcggcgaccacttgtgctcggggaagttcgatcgatccctcaccatggcgtcggagaaggaggcggcgctcgccgcggtgcccaacgacaaccccaccatatttgacaagatcatcaagaaggaaataccttccactgtggtatttgacgatgagaaggttctggctttcagagacataaatcctcaagctccgacccacattgtgatcattcccaaagtgaaggatggattaactggcctatcaaaggcagaagagaggcatgtagaaatactcggttacctcctctatgttgccaaagttgttgcaaagcaggagggacttgaagatggctaccgtattgtcatcaatgatggccccagtggatgccaatctgtttaccacatacatgtacatctcctcggaggcaggcagatgaactggccgccgggctaacgagtgcccgtctgttgaactgccttcatggcaaggatgtcacactgcctctccgttgaataattcctgtaactggcataacaattggtgccctgaacttatgctatatgtttgtggatgttaccaggacaggacatgaccatcctgctatgatttatggacaagatacattgcgttctcactagtgattactgctttttttttccatgttgaatacttgctgttgcctgcattgcttctgcatgatgcgtctgtatttcaagagcagtgcagtgaaagatgatcttcagatggagttgataaaaaaaaaaaaaaaaaaa

SEQ ID NO: 385844 - DNA, 652 bp, Oryza sativa
  unsure (1)..(652): unsure at all n locations
ctcccaccaactaatcgatctcctctctctctctctctctccctctctatcccattcgcgaggcggcgtctcctcctcctccccgtctctctcgcttcccccccaaatccggcggcgaatccagggccccgcgccgcgccgacgaccaccgccgatcgcgaccaggagggaggatgctgggcgccgcgaggaggcagctcggatccggccccatgctggggcaggtgctgcggaggctccggccggcgacggcggctgcagcggatgcggcgagggcgtactccgcggcggcgaaggagatgactgtccgtgaagcgctgaactctgcactcgatgaagaaatgtctgctgatccttctgtttttctgatgggtgaagaggtgggagagtatcaaggtgcatacaagatttcaaagggctttcttgacaagtatggtcctgagagggttctggatacaccaatcacagaggctgggtttactggcatttgctgttggtgcagcgtatcaaggtcttcggacctgttgtagagtcatgaacattcaatttctcaatgcaggcaattatcatatcatcaaattcagctgtcaaggnaaactacaatgtcagcgggtcanatatctgtcccctattgnttttcagaggncctnat

SEQ ID NO: 385845 - DNA, 1330 bp, Oryza sativa
cttcttgtggagatgctactacagaaggattaattaaggtgaggccagcatattcgtttggcgtcgatcctgtatggcatggtagccgcagtgagctgccttttcttaactccttgaagatgaagctgtctattcttattggagttgcacaaatgaaccttggaataatgatgagttactttaacgcaaagtttttcagaaatgctattaatgtttggtatcagtttattcctcagctgatattcttgaacagcttatttggttacctttcactcctcatcattattaagtggtgcacgggctcaaaagctgacctttaccatgtgatgatatatatgttcctgagtccaactgatgatcttggggagaacgagctatttcctgggcagaaactagtgcagcttgtactacttctgcttgctctggtttctgtgccttggatgctgattccgaaaccatttttcctgaagaagcaacatgagcagaggcaccaaggccagcagtacaccatgcttcaggccactgatgaatcagtgacagagctagaagaacaccaggatgaccctcaccaccatgaggagtttgaattcagcgaagtctttgttcaccagctgatccacacaattgagtttgtgctcggtgcagtctcaaatacagcctcttaccttcgtctttgggctcttagtcttgcacactcggagctgtccactgtcttctacgagaaagtttctggttctaatccatgggggttacaataaccattttcatccctgaatccattggagcagtgatctttctctttgccactattggtgtcttacttgtgatgggagaccctaagtgcattcttgcatgctctgaggctccactgggtggagttccagaacaagttttacgagggtgatggatacaagtttgtaccctttgctttcgcatcaatcatcgaggaggaagattgaatctgaattgttgtatgtaatctagaatgtaaaatcgtaagagtccttcccttgaataatcattgtttatcaccattggtgaagattcagaaaaccccagttcgttgtgtctgagcaggggatgccaaatcattctttttttgcctacacgattagccatgctaggttattctgtatattatgatctgttattactttgagcggtgacaggagcggctgggacgaagttgcaaataagtctagtgcatagcataactgcctttttacatggtgctatgttaataaaagttctgtactcatggctgtgacacgagtgatgtgtcttttgaattacacttgtggaaataaataagttccattctttgtgaaaa

SEQ ID NO: 385846 - DNA, 784 bp, Oryza sativa
gtcttcctctgaaccctgaaccaatcccgaactctgaactctgaaggctgcagagacaggcagagagatatgagggagataataagcatccacatagggcaggcgggcatccaggtggggaattcttgctgggaactatactgcctcgagcatggcatccagccggacggcctcatgcccagcgacacaactcctggaattgcaagggatgcattcaacacgttcttcagcgagacgagttcaggcaagcacgtcccaagggcgttgttcgtcgacctggagcccacggtgattgatgaggtgaagaccgggccataccgccagctcttccacccagagcagctcatctccttacaaggaagacgctgctaacaactttgctcgtgggcactacacagttggaagagaggtggtagatctttgccttgatcgactaagaaaactggcagataactgcactggtctccaaggttttctggttttcaatgctgttggtggaggaaccggctctggacttggttcattacttttggagcgcctatcagtagattacggtaggaagtcgaagctcgggttcacaatatatccttcaccacagttctcaacggccgtggtggagccttacaacagcgtgctctcgacccactccctgatcgagcacaccgacgtcgtcgtcctcctggacaacgaggccatctacgacatctgcaagaggtcgctggacatcgagcggccgacgtacaccaacctgaacaggctcatctccaaggtgatttcgtcgctg

SEQ ID NO: 385847 - DNA, 1439 bp, Oryza sativa
tcgcttataaccctagctgctcgcctcgcccacgccctcgctcgcctcgcctgatcccgccgcgtcgtaccagcagggcggagccatgtcgtccgggaagggaggtggaggcggcggcaagggaggcggagggaagaagaaggaggtgaagaaggagacgaagctcgggatggcgtacaagaaggatgacaacttccgggagtggtactccgaggttgtcgttaacagtgaaatgatcgagtactatgacatatccggttgttatatcttgaggccatgggcgatggagatctgggaattgcttaaagaattctttgatgcagaaataaaaaagctgaagctgaaaccttattatttcccattgtttgtcactgagaatgtcctacagaaggagaaagaccacattgagggctttgcaccagaggtagcatgggtcactaaatcaggaaaatctgatctggaagctcctatcgcaatccgtcctacaagtgagactgtcatgtatccatacttctccaaatggataagaagtcatcgggacttacctttgaggtgtaaccagtggtgtaacgtcgtgcgatgggagtttagcaatccaactccattcataaggagccgtgagttcctttggcaagaagggcatacagcttttgcaactaaagaggaggctgacgaagaggttctccaaattttggaactctaccgaaggatttatgaagaatttttagcagggccagtttctaggggggggagaagtgagatggaaaaatttgctggtggactgtatacaacaagggttgaggccttcattccaaacacaggaccgtggtgtacaaggggcaacatcacattgtcttggtcaaaactttgcaaagatgtttgatatcacttttgagaatgataagggctcaagatccatggtgtggcagaactcttgggcatacaccacccgctcgattggggtgatggtgatgacacacggagatgacaaaggtttagtgcttccaccaagggtggcacctctgcaggtcattgttattcctgttccatacaaagatgttgacacaacagctattgtaaacgaatgcaaaaagactgttgagacactggagaaagctggtattcgagcagacttggatacccgcgaaaactattctccaggatggaagtattcccactgggagatgaaaggcgttcctctaagaattgagataggtccaaaagatatggcaaacaatcatggcccgtgttgttaggcgagacaatggtgcaaaagctgatattcctacggctgacttggttgagaaagttaatgggttacttgatgaggttcagaaaaacttgtttgagacggcgatacataagagagatgcctgccttaaggggtgtaacacctgggatgaattcatagtggctctgaatgacaaaaaattgatcct

SEQ ID NO: 385848 - DNA, 352 bp, Oryza sativa
  unsure (1)..(352): unsure at all n locations
cattgagnaaaatgatgaggtgttgattgctgggatttgggccgtaaagggccatgctgtgggagatattccctggtgtccgattcaaggtcgtcaaggtctctggtgtgtctctccttgctctcttcaaggagaagaaggagaagcccaggtcttagattactggtacatcttggttggcaagcatggaatagacagaatgaaggctttagatgctcaagaagatggttccttgctatgtttaaagtgcactctctatattgttaacttaagattgtgttggtaaaaaccatgccttgtcatcagattttgcttcttgttgagggaaagtactatgttgagtttttttttt

SEQ ID NO: 385849 - DNA, 455 bp, Oryza sativa
cccgggtcgacccacgcccgcgcacgcgtccgcccacgcgtccgcccacgcgtccggtcactctcttgtctcgtactcccagctctcaaactggggccagtgctcctcatgggagggtttcaaggtgtcaccattcacagcaggtgcccgtacattcaacttcgatgtgaacccatgtgattacttccagggcggcaaaattaaagcgacaaccctctccctgtctgtcttggtggccattgagatgttcaactcgctgaatgcgctgtcggaggatggtagccttctgagcatgcctccgtgggttaacccttggcttcttctggcaatgtcgggttcattcgggctgcatttcttgatcctctacgtgccattccttgcccaagtctttggtattgtgcccctaagcttcaatgaatggcttttggtgatagcagttgctttcccagtgggtc

SEQ ID NO: 385850 - DNA, 636 bp, Oryza sativa
ccacgcgtccgcccacgcgtccggggaggtcaatctacgacaatatgaaggcatttataagatatatgatctcttcaaacatcggggaagttgcttccatatttctaacgtcagctttaggtattcctgaaggtctcatccctgtgcaacttctgtgggtcaatcttgttacagatggtcctcctgcaacggctttggggttcaacccacctgataaagatatcatgaagaaacctccacgaaggagtgatgactcgttgatcactccatggatcctattccgttatatggtcattgggatgtacgttgggattgccacagtgggagtgtttatcatttggtacacacatggctctttcctgggaattgacctggctggtgatggtcactctcttgtctcgtactcccagctctcaaactggggccagtgctcctcatgggagggtttcaaggtgtcaccattcacagcaggtgcccgtacattcaacttcgatgtgaacccatgtgattacttccagggcggcaaaattaaagcgacaacccctctccctgtctgtcttggtggccattgagatgttcaactcgctgaatgcgctgtcggaggatggtagccttctgagcatgcctccgtgggtt

SEQ ID NO: 385851 - DNA, 706 bp, Oryza sativa
  unsure (1)..(706): unsure at all n locations
ccacgcgtccgcccacgcgtccgggaggggagcgggggctgtggtggcggcggcaatgcggccggcgaaggcggtggcgtcgccggcgaaggaggcggccggggaggtgaacggggcggcgtcgggggggttcgcgaggcccgacgcgttcgggaggttcgggaagttcgggggcaagtacgtgcccgagacgctgatgcatgcgctcaccgagctcgaggccgcgttccatgccctcgccggcgacgaagatttccagaaagaacttgatggtattctcaaggattacgtcggccgggagaccccgctgtactttgcggagcgattgactgagcactacaagcgcgctgatggcacaggccccatgatttacctcaagagggaggatcttaaccacactggcgcccacaagatcaacaatgctgtcgctcaagtcttgcttgccaagcggcttgggaaggaacgtatcatcgccgagactggcgccggccagcacggtgttgccactgccacggtgtgcgcgaggtttgggctgcagtgcatcatctacatgggtgctcaggatatggagaggcaggcacttaatgttttcaggatgaagcttcttggagcagaggtgagggcagtacattctgggacagcaactttgaaggatgccacctcggaggccatcccgtgacttggggtcaccaattttnaggacaat

SEQ ID NO: 385852 - DNA, 766 bp, Oryza sativa
cggcacgagcggccagaaaaaaaaggaaaaaaagagagtcgtagttcgcctcttcttcctcctctcgttctcgcggcggcggcggagatggcgtcgttctcggaggctcccccgggcaaccccaaggccggcgagaagatcttcaagaccaagtgcgcccagtgccacaccgtcgacaagggcgccggccacaagcaaggtccaaacttgaatggtctgtttggaaggcagtcaggtaccacccctggttattcctactctacggccaacaagaacatggctgtgatctgggaggagaacacactttatgactacctgcttaatcctaagaagtacatccctggaaccaagatggtcttccctgggttgaagaagccacaggagcgtgctgatcttatttcctacctgaaggaagcaacctcttaaaaggagtggagctgtcgtaacatgagacaatcggacaattcattctacagttaaataaaaatatttagacatctgggtcgctctggttttacagggtgcaatccacgagacaattatcttgttatattttgttcttatggtttatgggttccatatcttaggtttagcaggaaaagtctttcacagcttttgctttaactgctggaaaacaccagtattttgatcaccagtcggtgagactggattgcatcccttttggaaaaatactgagatccttaaatttgtgatattttgatccattgcatttgctaaaaaaaaaaaaaaactaaaaaaattattg

SEQ ID NO: 385853 - DNA, 845 bp, Oryza sativa
  unsure (1)..(845): unsure at all n locations
cccacgcgtccgcccacgcgtccgaagaaaaaaaatcctattcaaatcgaaacccctctctttgatctcgtcgccgaggaattaggaggagagagagcaatggccgccgaggagggagtcgtgatcgcctgccacaacaaggacgagttcgacgcccagatgaccaaggccaaggaggccggcaaagtggtcataattgacttcactgcttcctggtgtggcccttgccgcttcatcgccccagtgttcgctgaatacgccaaaaagttccctggtgctgtcttcctgaaggttgatgttgatgagctgaaggaagttgctgaaaagtacaatgtcgaggcaatgccgaccttcctattcatcaaggatggtgctgaggctgacaaggtcgttggcgccaggaaggatgacctccagaacaccatcgtgaagcacgtcggtgccactgctgcatctgcttctgcctaagaattctcgcaggcgcaagttatcaaataagggccagcacctggtgttgtagtaggtattagcgttagtcatcgttatcgtcagtttggcttgggtgtcctcgaatatcatgcgaaatcgattccgagttctctttttaaaattcctgatgatgatatatagtttgtggaaatttggatctggctattctgtacgagtttgctgactattaaagcaattattataatatgatgatgctggcaagcttgtagatagcttgaatttgtcctgaatcctgttctgagcttattattcctgcatggctgcatgaacgacgtttgttcatgccntgnnnnnnnnnnnnnnnnnnnnnnnnnnnnnnnnnnnnnnnnnnnnnn

SEQ ID NO: 385854 - DNA, 542 bp, Oryza sativa
gaaaaaaaatcctattcaaatcgaaacccctccttctttgatctcgtcgccgaggaattaggaggagagagagcaatggccgccgaggagggagtcgtgatcgcctgccacaacaaggacgagttcgacgcccagatgaccaaggccaaggaggccggcaaagtggtcataattgacttcactgcttcctggtgtggcccttgccgcttcatcgccccagtgttcgctgaatacgccaaaaagttccctggtgctgtcttcctgaaggttgatgttgatgagctgaaggaagttgctgaaaagtacaatgtcgaggcaatgccgaccttcctattcatcaaggatggtgctgagggtgacaaggtccgtgggcgccaggaaggatgacctccagaacaacatcgtgaagaaacgtcggtgccactggtgcatctggttctgcttaagaattctcgaaggcgaaagtatcaaataagggccaggaactggtgtgagaggataggtagcatcgtatcgcagttggttggtgcccgaaacattac

SEQ ID NO: 385855 - DNA, 1730 bp, Oryza sativa
cgcagcactaagcaagtcaatgccgcaatgactacatgcaacaacctcaacttggatggcctggtcatcatcggaggagtgacatccaattcagatgctgcacagcttgcagaggcccttgtccagaataactgtaagaccaaggttgtcggtgtgcctgtttcactgaatggtgatcttaagaaccaatttgttgaaacaaccgtgggatttgatacagtgtgcaaggttaactctcagcttgtgagcaatgtttgccttgatgcaatctcagctggaaagtactactattttgtccgtctgatgggtagaaaagcatctcacgtggcctttgaatgtgcacttcaatcacacccaaacatgcttatcttagcggaggaggtagcactatcaaaactcacactgatggaagttattaacaagatatgtgatggagtacaagcaagggcagaattagggaaattccatggtgtgctccttattccagaaggactaatagaaagcattccagaaatgtatgctctgcttcaggaaatcaatatcctccacaacaacaatgttcctgtggcagagatgccatcacaactgtctccttgggcagctgcgctgttccagttcttgccacccttcatcagaagagagctgctgctccatcaagaatcagacaactctgcccagctgtcccagattgatactgagcaattgttggcccacttagtagaagcagaaatgataaagagaacaaaagaaggaagatacaagggaaggaagttcagctctgtatgccatttctttggatatcaggctcgaggatccgtcccatcaaactttgactgtgactatgcttatgctcttggccgtatctccttgcatatgatagcagctggcttgactgggtacatggcaactgtggctaatctgaaggaccctgtagacaagtggcggtgtgctgctgctcctctaactgcaatgatgagtgtgaagaggcatttgcgtggtcctggagcaatcccgataggaaagcctgccattcatccttctccaattgacctgaaagggaaggcttatgagttgctgcgagagaaagcatcaagttttctccttgatgatttctacaggactccaggaggcattcaatatgaaggcccgggttgcaatgcaaaacccatcacattgaccattgagaaccaagactacatgggcgacattgagatactgaaagactgtctcagcaaggtgaggacgatggtgaagcctggatgctcgcgggaggttctgaaggcggcgatatagctcgatgctgtcggtgaccgacgtgctgacggtgatgtcgcacccgctcaacgccgagctgccgctctaccatttcaactgagcgttgtagagaataaggtccagttttgtaacacaccgggagagactggcgtattgggctactggtatttggtagcttcatccactttcattttcatttctgttcgttgctgggagtgagaaccactggaattttcatgtcaataaacatcgaaaacggtagttgatcctgaagtgcagctattttcaggatctgaaatgcatgttctgtaatatggtgttttgcagccttggagctcagatccatctgatcgaatcatgtggtgttatgccaatcgaaatggaactttgtatataactccctttggtaaaaaaatatatgacgttttgcacacggtctaaaaaaaaaaaaaaaa

SEQ ID NO: 385856 - DNA, 1662 bp, Oryza sativa
  unsure (1)..(1662): unsure at all n locations
cggacgcgtgggcggacgcgtgggcggacgcgtgggccgcttcgtcccccacccacccaccactccactccccgcagttggtggcccgcggcggcgcaagccctagcgtccacgcgaagcaaaccccccaaaaccctagctccgccgccgtcggcggcgcccgagctgcaacccccgccacgacgccatccgggtggctagcctaagcccctaaccaaaccctagcgaccggcgccgcagtcggngggagagatgccgagggagatcattacgatacaggtggggcaatgcgggaaccagatcgggatggagttctggaagcagctctgcctcgagcacggcatcggcaaggacggcctcctcgaggacttcgccacccagggaggagataggaaggatgttttcttctaccaggctgatgaccagcattacataccgagggctcttcttgtggatctagagccgagagtgatcaacggaatacagaacagtgagtacaggaatctatacaatcatgagaatatatttgtggctgagcatggaggtggtgctgggaacaactgggctagtggatatcaccagggtgagcaagttgttgatgatatcatggatatgatagacagagaagcagatggaagtgatagccttgagggttttgtgttatgccactcaattgctggtggaactggttcaggtatgggttcttacctgttggagactctgaatgaccgatacagcaaaaagcttgtccagacatacagtgttttcccaaatcagatggaaacaagtgatgttgttgtccagccatataattcgcttttaactctgaagcggctgacactgaatgctgactgtgtggttgttcttgacaatacggcccttaataggattgctgtggaacgtcttcatttagcaaatcctacttttgcacaaacaaactctttggtctcaacagttatgtctgcaagcacaactactctgaggtatcctggatatatgaacaatgacctggttggccttcttgcctctttgatccctactccaaggtgtcattttctgatgacaggttacactccattgactgttgaacgacaggttaacatgatacgcaagacaacagtattagatgttatgaggcgacttctgcagaccaaaaatataatggtgtcatcatatgctcgaaataaggaagctagtcaggctaaatacatctccatacttaacatcattcagggagaggtggatcctacacaggtccatgagagcctacaaaggatacgtgaaaggaagcttgttaacttcattgagtggggacctgcaagcattcaggttgccttatcaagaaaatctccatatgtacaaaccacgcatagggttagtggattgatgctggcgaatcatactagtatccgtcacttattcagcaaatgcctgggacagtatgaaaagctaaggaaaaagcaagcttttcttgacaactacagaaagttcccaatgtttgaggacaatgatctctctgaatttgatgaatctcgagaaataatagagagcttagttgatgagtacaaggcttgcgaatcaccagactacatcaaatgggggatggaggatgctggagaggcaaacgttgcggccgcacttgattcgaagttagtggtgtaa

SEQ ID NO: 385857 - DNA, 504 bp, Oryza sativa
  unsure (1)..(504): unsure at all n locations
ccaaggatgacgtcaacaaaccatgccacctcacctcctttgtcggttacaaggctggaatgacccacattgtgcgtgaggtcgagaagcctggttccaaactccacaagaaggagacctgtgaggctgttaccattattgagacacctcctattgtcgttgttggacttgtggcctatgtgaagactccacgtggcttacgcagtctcaactctgtctgggctcagcatcttagtgaagaagtaaggagaaggttctacaagaactggtgcaagagcaagaagaaggctttcaccaagtatgctctcaagtatgatagcgatgccggcaagaaggaaatccaaatgcagcttgagaagatgaagaagtatgcttcttttgtccgtgtgatcgtgcacactcagattaggaaaatnaagggcttgaagcagaagaaggctcacctcatggagatccagatcaatggtggtacccttnccgataaggtggnctttggnttcaaag

SEQ ID NO: 385858 - DNA, 800 bp, Oryza sativa
  unsure (1)..(800): unsure at all n locations
gcctgagctaccttggtcggaaacctattttcccaggaactgagtgcctaaatcagctcaagctcattgtcaatgttcttggcaccatgagcgagtctgacttggagttcattgacaacccaaaagctcgcagatatatcaaatccctcccctacactcccggtgtgcccctcgcgagtatgtatccgcatgcacaccctcttgccattgatctttttacagaagatgctcatatttgatcctaccaaaagaatcagtgtcaccgaggctcttgagcacccttacatgtcccctctgtatgatccaagtgcaaatcctcccgcgcaagtgcctatcgatctggacatagacgagaacatcagtgcagatatgatcagggaaatgatgtggcacgagatgctccactaccaccctgaagttgttgcagcaatgagtgcccgatgatcttcaactgtccccaggaactttgcaggctcacttttttttcttcttctaaaagcctacggcgattatcgcacctattaagtaaccaagacgtgcaagacttatttcatgtatatatgagcgaaataagaacgttgttgtatccatatagttcatgttatggaccattacttggtgtatgcatttcacatttccactggacagttatgttgttgtactagttcatgatgagaagtgctattaaagtgaattcagtaatgctgcgaagtgttaattctggattatgttataattttttgcggttactgcttctttagtggtgatctgctgcnnnnnnnnnnnnnnnnnnnnnnnnn

SEQ ID NO: 385859 - DNA, 674 bp, Oryza sativa
  unsure (1)..(674): unsure at all n locations
ccagtgcagtagtacactagctcttcttcacaacagctaatcgagtagctagaaccattatatactcttctctcgacgctttctgtgctaggttaaccgatccatcttctggtactgaaatggagtgcgagaacggccgcgtttctgccaatggcatgaggggtctctgcgtcgcggcgccccgcgccgaccccgctgaactgggggaaggccacggaggagatgacggggagccacctcgacgaggtgaagaggatggtggcggagtaccgccagcctctggtcaagatcgagggcgctagcctgaggatcgcgcaggtcgccgcggtggccgcggccggcgaggccagggtggagctcgacgagtcggcccgcgagcgcgtcaaggccagcagcgactgggtgatgaacagcatgatgaacggcacggacagctacggtgtcaccaccggtttcggcgccacgtcccacaggaggaccaaggagggtggtgctctgcaaagagagctcatcagattcctcaatgccggcgcgttccgcaactggcaccgacggtcatgttttgccggcggaggcaacccgcgcggcaatgctcgtccgcatcaacacactcctccagggntactccggnatccggttcgagatcctcgaggcgatcgccaagctgctcaacg

SEQ ID NO: 385860 - DNA, 1189 bp, Oryza sativa
ccacgcgtccgattactagtaagaagatctcatccctcctccgcgcgtccgggtgagttgagttggggattgattgattgattcggattgggaagaagaagaagcaggggagcatgggcagcaagtcgtacccgacggtgagcgatgagtacctggcggccgtgggcaaggcgaagcgcaagctccgcggcctcatcgccgagaagaactgcgccccactcatgctccgcctcgcgtggcactctgctggcaccttcgatgtgtcgtcgaggaccggcgggcccttcggcaccatgaagaaccccggcgagcagtcccacgccgccaacgccggcctcgacatcgccgtcaggtttctcgaccccatcaaggaccaacttcccatcctctcctacgccgacttctaccagcttgctggcgttgtggccgtcgaggtcaccggcggacctgaggtccccttccatccgggcaggcaggacaagcctgagcctcctcctgaaggccgtcttcctgatgccacacaaggttctgaccacctaaggcaggtcttttctgcgcagatgggtttgagtgacaaggacatagttgctctttctggtggtcacaccctgggaagatgccacaaggagagatctggctttgagggagcctggacgtccaaccctttgatctttgacaactcttacttcaccgagcttgtgagtggcgagaaggaaggccttcttcagctgccaagtgacaaagccctcatggctgacccagccttccgtccactggtggagaaatatgctgcggatgaggacgccttctttgcggattacgccgaggcccacctcaagctctctgaactgggatttgctgaggaataagaagcctttagagagcgggatatccgcaaaagattaatgccgatttgtattttgcgccttagagtcagtacgatcaagactgtcgtggcggttgtaataaaaattagtgtgctttgggccatctttttatgtgattccaattgtctttctcttcattcttgctttgatgctctttgtctggacctctagaccgccgtattgtactgtggagtttcaaagttaccaagctatttgctgtcaagataactatggattgaattccccttgatggatgaaccaactgttgctgtttgcccgttcttcaaaaaaaaaaaaaaaaa

SEQ ID NO: 385861 - DNA, 384 bp, Oryza sativa
  unsure (1)..(384): unsure at all n locations
ccacgcgtccggaggatctaccagagatggtacgggtgtacatgatagcattgtaaatcagctccttacaaagatagatggtgttgaggcattgaataatgtgctcctcattggaatgaccaatcgtaaggatttacttgatgaagctttactgaggcctggacgattggaagttcatattgagataaacctgcctgatgaaaatggccgtttgcagattcttcaaattcatacgaataagatgaaagaaagctctttcctttccccgaatgttaatcttcaggagctagctgcacggacaaagaactacagtggagcagagctggaaggtgtcgtcaaaagtgcagtctcatatgctttgaacaggcagatangcatggatga

SEQ ID NO: 385862 - DNA, 783 bp, Oryza sativa
  unsure (1)..(783): unsure at all n locations
ttagtacgtgaagtagaagccattggagggaatgtctctgcatcagcctctcgtgaacaaatgtgctatacctatgatgcattcaaggcctatgtacctgagatggttgaagtgcttattgatagtgtgaggaacccagccttttttaactgggagattaaagagcagctggagaagatcaaggctgaaatagctgaagtttctgataatcctcaaggtttacttctagaggcactccattctgctggctattctggggcactggcgaagcccctaatggcacctcagtccgctattcataggttggacagtagtatccttgaggaattcattgctgaaaattacacagcacctaggatggtccttgcggcatctggagttgaacatgatgaactagtttcaattgctgagccacttctgtcggatcttcccagtgtgaagcgtccagaagagccaaaatcagtttatgtgggaggagactatcgttgtcaagcggactctgacaagacacatattgctcttgcttttgaagtaccaggtggatggtttgaagagaaaactgccatcattgttactgttcttcagatgctcatgggaggaggtggttctttctctgctggtggtcctgggaagggcatgcattctcgattgtatctccggatattaaacaactaccatcagatcgagtcattctctgcattcaacagtatctacaaccattctggnctttttggaattcatgcaacaactagcccaattttggttncaggtttgtggatttgg

SEQ ID NO: 385863 - DNA, 2606 bp, Oryza sativa
tcgacccacgcgtccgaccaccacccccgcctccgccccctcctccccctccaccaccaccaccaccaccaccaccgcccgccaagcgcggcccgcccgacacagcagcagcaggatcggcggagaggaggggggatcatggcgacggcggcggggatggggatcggggcggcgtgcctggtggcgccgcaggtgaggccggggaggaggttgcggctccagcgggtgcggaggcggtgcgtggcggagctgagcagggacggtgggtcggcgcacggcccgctggcaccggcgccgctggtgaagcagccggtcctgccgaccttcctcgtgccgacgtcgacgccacccgcgcccacgcagtcgccggcgccggcgccgaccccgccgccgttgccggactccggcgtgggggagatcgagcccgatctagaaggtctcacagaagattccatcgacaaaacaatttttgtggctagtgagcaggagtctgagatcatggatgtgaaggagcaagctcaagctaaagtaacacgcagcgttgtctttgtaaccggtgaagcttctccttatgcaaagtcaggtggactaggagatgtttgtggttcactgccaattgctcttgctcttcgtggtcatcgtgtgatggttgtaatgccgagatacatgaacggggccttgaacaaaaattttgcaaacgcattttacactgagaagcacattaagattccatgctttggcggagaacatgaagttactttttttcacgagtatagggattctgttgattgggtgtttgttgatcatccctcatatcatagacctggaaatttgtatggagataattttggtgcttttggcgataatcagttcagatacacactcctgtgctatgcggcgtgtgaagccccattaattcttgaactgggaggatatatctatggacagaaatgcatgtttgttgtgaatgattggcatgccagtcttgtgccagtccttcttgctgcaaaatatagaccatatggtgtttacagggatgcccgcagtgttcttgtcatacataatctagcacatcagggtgtggagcctgccagtacatatcctgacctgggattgccacctgaatggtatggagcattagaatgggtgtttccagagtgggcaaggcggcatgcccttgacaagggtgaggcagtcaattttttaaaaggcgcagttgtgacagcagatcgaattgtgactgtcagccaggggtattcatgggaggtcacaactgctgaaggtgggcaaggcctcaatgagctcttaagctcccggaagagtgtattgaatggaattgtaaatggaattgacattaatgattggaacccatccacagacaagtttctcccttatcattattctgttgatgacctgtccggaaaggccaagtgtaaagctgaattgcagaaggagctgggtttacctataaggcccgatgtgcctctgattggctttattggaagattggactatcaaaaaggcattgatctaattaaacttgccattccagatctcatgcgggacaatattcaattcgtcatgcttggatctggtgacccaggttttgaaggatggatgagatccacagaatcagggtacagggataaatttcgtggatgggttggatttagtgttccagtttcccaccgaataactgcaggttgcgatatattgttgatgccatccagattcgaaccttgtggcctcaatcagctatatgctatgcaatatggtacagtgcctgttgttcatggaactggaggcctcagagatacagtggagaattttaacccgtttgctgagaaaggagagcagggtacagggtgggcattctcgccactaaccattgaaaaaaatgctgtgggcattgcggatggcaatttcgacatacagggaacacaagtcctcttgggagggtctaatgaagcgaggcatgtcaagcgactttacatgggaccatgccgcctcacagtatgaacagatcttcgaatgggccttcatggatcaaccatatgtcatgtaaatggatttgaaggaagcagcgaatttctccgaggaccctcaatcttcctgtctttcatgagcggaatgaaaactttgtacactacatggaaagggaaccagttatgcaaagttgcaaacgatcactcaaggttacccttgtaggcctgctacttggccaatatggttccagtgaccatatgcagagtcaggttcagatgaatggcacttgtgagtagtgaagaataagatgaggatgcttgaagcggtttcacatgtggctgataccacgcaagcaacctctcaatgcatcgaaatgtgagtcttggaatcaataggatttagctcccatcaattacagttgtacccttttttgcttaatactttgtcgcctgtgctgttcttatatttgtgtgaagataaattttagtccattaggtaactgtattgttgagtcttaaggtgaagactaaatagtgtttggaagctgtagctactgcgatgtcaagtgtcaaaagagatcttggaaaaaaaaaaaaaaagactaaaaaaaaaaaaaaaaa

SEQ ID NO: 385864 - DNA, 732 bp, Oryza sativa
  unsure (1)..(732): unsure at all n locations
ctttgggcngcaggatgccgtttgagaacttccactctcctcctccgtctccaagctctcgtcgtcgtcgtcagacatgtcgggccgtggcaagggaggcaaggggctgggcaagggaggcgcgaaaaggcacaggaaggtgctgcgcgacaacatccatggggatcacgaagcccgcgatccggaagctggcgaagaagggcggcgtgaaacgcatctccgggctgatctacgaagagacccgcggcgtgctcaagatcttcctcgagggggggcccggtacccaattcgccctatagtgagtcctattacaattcactggccgtcgttttacaacgtcctgactgggaaaaccctggcgttacccaacttaatcgccttgcagcacatccccctttcgccagctggcgttataacgaaaagcccgcaccgatcgcccttcccaacagttgcgcancctgaatggcgaatggcaaattgtaagcgttaatattttgttaaaattcgcnttaaatttttgtttaatcagctcantttttaaccaataggccgaaatcggcaaaatccttatnaatccnaagaatanaccgagataggttgaatgttgttcccctttggaacaaaattcnctattaaagaacttgactcccactcaaagggcgaaaaacctctttcagggcganngcccctactttaaacatcncctaatcaatttttttggggtcaaagtcn

SEQ ID NO: 385865 - DNA, 536 bp, Oryza sativa
  unsure (1)..(536): unsure at all n locations
naagacgggccaatccntggaaggggnaggcaccccaagngttcgggaaaaatcaggggatcaccacccgggatccggaggctggcgaggagggggggcgtgaagcgcatctccgggctcatctacgaggagacccgcggcgtgctcaagatcttcctcgagaacgtcatccgcgacgccgtcacctacacggagcacgcccgccgcaagaccgtcaccgccatggacgtcgtctacgcgctcaagcgccagggccgcaccctctacggcttcggcggctgagccctccggtcctccctcgccctcgcgctggccgcctctgccgccgccgcctcctggactggctgttgctggtgttttagctcttgttgtgtccttttgctttgctggtgtagagagacccggatgtgccacgggtgggtttttagtagtaggattagtagtatcccaactcctggttgtgatttgctcatttccatagatgtaatgacattacgatttcaatcgtaagcaaaattatttgtttccaaaaaaaa

SEQ ID NO: 385866 - DNA, 933 bp, Oryza sativa
  unsure (1)..(933): unsure at all n locations
ggnaaatntnnnnnccnnnannaaaaaatancncccccnnnnnagnnnccnngngnggngngannnccccccnnnnnnnnnnnnnnnnggggggggggggggggnaagaaaaanccccccccccccccgggggnnngnnanangggnnnncccccccccccngnggggggggggggnnnnnnnnnnnnnnnnnnnnnnnnnnccncccccccnnnnnnnnnnnnnnnnnnnnnnnnnnnnnnnnnnggngggnnggggggngnnnnnnaaaaaaaaaaaaaaaangagngngnccccnccnccnnngngnnanncccccccntggggggaangnggggngcnnccccccgggggggcngcttttagaaanagtggatcccccnggnngcnngattaggcacgagcccaaatctcaaatcctcctccgtctccaagctctcgtcgtcgtcgtcagacatgtcgggccgtggcaagggaggcaaggggctgggcaagggaggcgcgaagaggcacaggaaggtgctgcgcgacaacatccaggggatcacgaagcccgcgatccggaggctggcgaggaggggcggcgtgaagcgcatctccgggctgatctacgaggagacccgcggcgtgctcaagatcttcctcgagaacgtcatccgcgacgccgtcacctacaccgagcacgcccgccgcaagaccgtcaccgccatggacgtcgtctacgcgctcaagcgccagggccgcaccctctacggcttcggcggctgattccttccttccttccttcctggtggcgtgcgggtggtggtggtggtgtaggagctagggtttcgatgggattcggggggaatttctgctttgtgttggcttctgtgtagcgactcttctgtttaaatgaattcgatgaatctgaactgaagatttggttccaat

SEQ ID NO: 385867 - DNA, 581 bp, Oryza sativa
  unsure (1)..(581): unsure at all n locations
cttccacatctccacccaaattccaaatctctcggtgatcggagcggttagctgcggcgatgtcggggcgcggcaagggaggcaaggggctgggcaagggcggcgcgaagcgccaccgcaaggtgctccgcgacaacatccaggggatcaccaagccggcgatccggaggctggcgaggaggggcggcgtcaagcgcatctccgggctcatctacgaggagacccgcggcgtgctcaagatcttcctcgagaacgtcatccgcgacgccgtcacctacaccgagcacgcccgccgcaagaccgtcaccgccatggacgtcgtctacgcgctcaagcgccagggccgcaccctctacggcttcggaggctagacgagtacagattcgatggtgttgggcgtagcagcgctagcattattatgtcgtgtgctccgtgtgtgtcgttgtgtctgtgactccttgtgttctagtcgtcggtgtgtttcatcaagtttcgacttctggtcgactggatgtaataccttgttctgttcaatgaaaccttgtttatgaccgnnnnnnnnnnnnnnnnnnnnnnnnnnn

SEQ ID NO: 385868 - DNA, 543 bp, Oryza sativa
  unsure (1)..(543): unsure at all n locations
atccccaaatcctccagatcgtcttcgtcttccacctcgagctcttacgcatcgtcagccatgtcgggccgcggcaagggaggcaagggtcttggcaagggcggcgcgaagggcacaggaaggtgctgcgcgacaacatccagggcatcaccaagccggcgatccggcggctggcgaggaggggcggcgtgaagcgcatctccgggctgatctacgaggagacccgcggcgtgctcaagatcttcctcgagaacgtcatccgcgacgccgtcacctacacggagcacgcccgccgcaagaccgtcaccgccatggacgtcgtctacgcgctcaagcgccagggccgcaccctctacggcttcggcggctgagttcccggccccctgtgctcgatccagatctgatgccgttagcgttgcttagggtttcgttgcggaaattgtactacttcgttgtttctgcttgtgcaaagtgaatggatggttggattaaatgaatcattttctctcttgattagtnnnnnnnnnnnnnnnnnnnnnnnnn

SEQ ID NO: 385869 - DNA, 525 bp, Oryza sativa
  unsure (1)..(525): unsure at all n locations
gnnntnnnnnnnnnctcngggtgcaggattcggcacgagccaagtcaaatttcttcctcgcgaccggcggcgaacggcggcggcggccacgcgtccggtctgggccgtggcaagggcggcatggggctcggcaagggcggcgcgaagaagccacaggaaggtgctgcgcgacaacatccaggggatcacgaagcccgcgatccggacggctggcgacggaggggcggcgtgaagcgcatctccgggctgatctacgaggagacccgcggcgtgctcaagatcttcctcgagaacgtcatccgcgacgccgtcacctacaccgagcacgcccgccgcaagaccgttaccgtcatggacgtcgtctacgcgctcaagcgccagggccgcaccctttacggcttcggcggttgattccttcctttctttcttcctggtggctgtgcgggtggtggtggtttttattttatcttttatattttttattttttctcttttaatttatttattatattttgcttcttttat

SEQ ID NO: 385870 - DNA, 462 bp, Oryza sativa
  unsure (1)..(462): unsure at all n locations
cagcgatttcagatctccccaagtagtagacttctctcttcttccatctcggattcgtctcggtctcgtctcggtctccggcgatgtctgggcgcggcaagggaggcaaggggctgggcaagggcggggcgaacgccaccgcaaggtcttccgcgacaacatccaggggatcaccaagccggcgatccggaggctggcgaggagggggggcgtgaagcgcatctccgggctcatctacgaggagacccgcggcgtgctcaagatcttcctcgagaacgtcatccgcgacgccgtcacctacacggagcacgcccgccgcaagaccgtcaccgccatggacgtcgtctacgcgctcaagcgccagggccgcaccctctacggcttcggcggctgagccctccggtcctccctcgccctncgcgctggccgcctctgccgccgccgccttccttggactggctg

SEQ ID NO: 385871 - DNA, 717 bp, Oryza sativa
  unsure (1)..(717): unsure at all n locations
antaatcgccgctacagggcgctcccattcgccattcagctgcgcaactgttgggaagggcgatcggtgcgggcctcttcgctattacccagctggcgaaagggggatttgctgcaaggcgattaagttgggtaacgccagggttttcccagtcacgacgttgtaaaacgacggccagtgagcgcgcgtaatacgactcactatagggcgaattgggtaccgggccccccctcgaggtcgacccacgcgtccgaaaatccccaattccatcgtcgtcgatgtcggggcgcggcaagggagggaagggtctcggcaagggcggggcgaagcggcaccggaaggtgctccgcgacaacatccaggggatcacgaagccggcgatccggaggctggcgaggaggggcggggtgaagcgcatctcggggctcatctacgaggagacccgcggggtgctcaagatcttcctcgagaacgtcatccgcgacgccgtcacctacaccgagcacgcccgccgcaagaccgtcaccgccatggacgtcgtctacgccctcaagcgccagggccgcaccctctacggcttcggcggctaggagccttttgcattgtgtttgtcttgttaggaatctgcttgtttcggatgtagccctgtatcctgtaatgaagaaaatgctagcagtaaaacttgtttgaattcacctatgaaaaaaaaaaaaaaaa

SEQ ID NO: 385872 - DNA, 679 bp, Oryza sativa
ccacgcgtccgcggacgcgtgggcggacgcgtgggcgccgccaaccactcctcaccaagtcaaagtttcttcctcgcgaccggcggcgagcggcggcggcggcgatgtctgggagaggcaagggcggcaaggggctcgggaagggcggcgcgaagaggcacaggaaggtgctgcgcgacaacatccaggggatcacgaagccggcgatccggaggctggcgaggaggggcggcgtgaagcgcatctccgggctgatctacgaggagacccgcggcgtgctcaagatcttcctcgagaacgtcatccgcgacgccgtcacctacacggagcacgcccgccgcaagaccgtcaccgccatggacgtcgtctacgcgctcaagcgccagggccgcaccctctacggattcggcggctaggcgaggcgatgcgaggccacgcgattggatagggattcgattagtgccatgttcttcagttcgtcgtagtagcctagcctcttctcctgtagctgttgtttcatctcgtctcctgttccttcattaattagggatgtatgaactactggttcgttcgttcgaatggaataggaaatctgcagtgatttaccctctaaattcagttgcaatctcttgccgtgctatgtgaacgttttgcaacctgcattgttctagttggtgac

SEQ ID NO: 385873 - DNA, 751 bp, Oryza sativa
  unsure (1)..(751): unsure at all n locations
ancgagttcgacccacgcgtccgcaaccaccaatccttccccaaaatccccaattccccatctcttcctcctccagcgagcgagcgcggcggccatgtcggggcgcggcaagggcggcaaggggctcggcaagggcggcgcgaagaggcatcgcaaggtgctccgcgacaacatccaggggatcaccaagccggcgatccggaggctggcgaggaggggcggcgtgaagcgcatctccgggctgatctacgaggagacccgcggcgtgctcaagatcttcctcgagaacgtcatccgcgacgccgtcacctacacggagcacgcccgccgcaagaccgtcaccgccatggacgtcgtctacgcgctcaagcgccagggccgcaccctctacggcttcggcggctgaggtccgccgctgcatccgcctggccgtggggacaagtcttggctcgcggtcaagaaatccgggaggatatctccaattgatctgggtctcagttagtagtagtagcagtagtttgtgttggcatcgttcttgtgcctggggcaagtttgctttcgtgttctgaacttgtgctgtgtaaatccgtatggtgttttagctattaacaaagttgggtcattcgctgcaaacctcatgcttctagttattgttgttcatatgagctagtataaaactgctagttttgtcttgtgcaaatctcacattaggaatttctattcgctccnnnnnnnnnnnnnnnnnnnnnnn

SEQ ID NO: 385874 - DNA, 578 bp, Oryza sativa
  unsure (1)..(578): unsure at all n locations
ccacgcgtccgcggacgcgtgggcgccaccaaaaaaatccccaattccgccgtcgtcttcgtcgccgtcgccgcgaggatgtctgggcgcgggaagggagggaagggcctgggcaagggaggcgcgaagcgccaccggaaggtgctccgcgacaacatccaggggatcacgaagccggcgatccggaggctggcgaggaggggcggggtgaagcgcatctcggggctcatctacgaggagacccgcggggtgctcaagatcttcctcgagaacgtcatccgcgacgccgtcacctacaccgagcacgcccgccgcaagaccgtcaccgccatggacgtcgtctacgcgctcaagcgccagggccgcaccctctacggcttcggcggctaggctccccccaaatatttctctctcttcgtgtcgaggcgtcgcgtgttggttgccctgtgtagattgctgatttcaatgtagtacttagattctggcagtgaagaactgcaagtaaacttgtttgaaattcaccttgttgctattcaatctaatgcaagtttttgcaattttttttggcggtcaaannn

SEQ ID NO: 385875 - DNA, 653 bp, Oryza sativa
  unsure (1)..(653): unsure at all n locations
acacgcgtgcgcccacgcgtccgccaccacctcttctccaattccactcgcttttctctctctctcgtgcgtcgagccaccggaatcgtcgtcgtcggcggccatgtcggggcgcggcaagggaggcaaggggctcggcaagggcggcgccaagcgtcaccggaaggtgctccgcgacaacatccaggggatcaccaagccggcgatccggaggctggcaaggaggggcggcgtgaagcgcatctccgggctgatctacgaggagacccgcggcgtgctcaagatcttcctcgagaacgtcatccgcgacgccgtcacctacaccgagcacgcccgccgcaagaccgtcaccgccatggacgtcgtctacgcgctcaagcgccagggccgcaccctctacggcttcggcggctgatcgatcttgcctccctccgccatctctcccatgtcgtctggccgtgcccacaagtcttgcggtcaagaaaaaaagtttgatggaaagccgtggaatccaccttgttcagttcgctgtttagtttttctagtgtttacctgaatcatgaaattgtgaagcaaatgatgtttgcaactgggatttgaattgaaacatgtttcagagccnnnnnnnnnnnnnnnnnnnnnnnnnnnnnnnn

SEQ ID NO: 385876 - DNA, 565 bp, Oryza sativa
atccccaaatctcaaatcctcctccgtcttccaacctctcgagctcgtacgcatcgtcagccatgtcgggccgcggcaagggaggcaaggggctgggcaagggcggcgcgaagaggcacaggaaggtgctgcgcgacaacatccagggcatcaccaagcccgcgatccggcggctggcgaggaggggcggcgtgaagcgcatctccgggctgatctacgaggagacccgcggcgtgctcaagatcttcctcgagaacgtcatccgcgacgccgtcacctacacggagcacgcccgccgcaagaccgtcaccgccatggacgtcgtctacgcgctcaagcgccagggccgcaccctctacgggcttcggcggtaggctccccccaaatatttgtgtgtgttagtgtagaggcgtcgcgtgttggttgccctgtgtagattgctgatttcaatgtagtacttagattctggcagtgaagaactgcaagtaaacttgtttgaaattcaccttgttggtattaatgtaatgcaagtttttgcaaaaaaaaaaaaaaaaaaaactcgtgc

SEQ ID NO: 385877 - DNA, 1185 bp, Oryza sativa
  unsure (1)..(1185): unsure at all n locations
ggcctgtaattaaccctcactaaagggagagaattcgacgtcggtaccctctctcgcgccgccgccgccgccgagcgcctggagcagcgtcagccatggccgtaggtaagaacaagcgcatctccaaggggaagaagggatccaagaagaagaccgtcgatccctttgctaagaaggactggtatgatatcaaggccccgtcggtgttcaatgtgcggaacatcggcaagaccctcgtgtccaggacacagggtacaaagattgcttctgagggcctaaagcatagagtgtttgaggtctccttagctgatctccagaacgatgaggatcaggcgtacaggaagatcagacttcgtgctgaggatgtgcaagggaagaacgtgctcaccaacttttggggcatgtcgtttactaccgataagctcagatcacttgttaagaagtggcagacactgattgaggctcatgtggatgtcaaaaccacagacggctacatgctgcgtctgttctgtatcggcttcaccaagcggcggcctaaccaggtgaagaggacttgctatgctcaagcgagtcagatcagacagattcgtcgcaagatggttgaaatcatggccaaccaggcttcaagctgtgatttgaaagagctagtttcaaagttcattcctgaagttattgggaaggaaattgagaaggcgacatccagtattttcccccttcagaatgtgtttgtccgcaaagtgaagattctaaaggccccgaaatttgacctggggaagctcatggaggtgcatggtgactatgccaaggaggacatcggtacgaagcttgataggcctgcagaagatgaggccatggccgggcaggaggtcgctgctgccgagtagagattatcacttattttgctgcccgtttatttagacaacaagtaaacagctatctagttgtggatcgtgaacatcctagcctgtgtcaatggcagatattctgaatagtttgttgggattacttgccagctgcatatttgctttctgatgagaaatgaatgtttttgagtctatgcgtttgctttgtttggtcttgatgatgaagttaagaattttgaagtaattgtttggtctggagttgttccaaaaaaaaaaaaaaaaacaaannnnnnnnnnnnnnnnnnnnnnnnnnnnnnnnnnn

SEQ ID NO: 385878 - DNA, 454 bp, Oryza sativa
  unsure (1)..(454): unsure at all n locations
ccacgcgtccgcgagagcgagcgaggcagtgccgccgccgccgccactgacgccgcccgagcaccaccggagcaggagcagcgtcagccattggccgtcggcaagaacaagcggatctcgaaggggaagaagggatccaagaagaagaccgtcgatccttttgcgaagaaggattggtatgatatcaaggccccgtcggtgttcaacgtgagaaacgtcgggaagacgctcgtgtccaggacacagggcacaaagattgcttcagagggcctcaagcaccgtgtgttttgaggtctccttggctgatcttcagaacgatgaggatcaggcgtaccgtaagatccagactacgtgccgaggatgtgcaggggaaaaatgttcttaccaaacttctgggggcatgagttttcacggnccgncaagctcaggatcattggtcaagaaatggcagacg

SEQ ID NO: 385879 - DNA, 441 bp, Oryza sativa
cgctgcacctcggccatctcatccccttcatgttcaccaaatatctgcaggatctttcaaggtgcccctagtaatacagctaactgatgatgagaagttcttatggaagaatttgactgttgaggaaactaaaaggcttgccgtgaaaatgcaaaagatatcattgcttgtggatttgatgtcgaaaggactttcattttctctgattttaattatggtggaggggctttttatgaaaacatgggtaaaggtgccagatgtgtgacatataataagggtggtggaatatttggattcaccccagaggatcatatagggaaaggcagctttcctcctgggcaagctggtccatcattcccttcttcatttccacatctcttctgtggggatgaccaactacggggcttaatcccatgtgcaatataccaggatccttatttc

SEQ ID NO: 385880 - DNA, 320 bp, Oryza sativa
ggggggaaatccttccccctctaccgttacaacaaatagccccccatcccctcccgcgagatccagacctccggccgcctggtcctccccggcgagctcgccaagcacgccgtctccgagggcaccaaggcggtcaccaagttcaccagcaactaggcctgtctctctagggtttcgatgccatgcttctctccttccctttcccctcgtgtgcagtgtgctaggtggcagtagttgcaaacttgtgcctgctttgtaaattgtgcttgatcataatgggcagcttggatttgaagtaatagacgtgtcgagtgttattt

SEQ ID NO: 385881 - DNA, 875 bp, Oryza sativa
ccacgcgtccgcgccccgccgtgctacggtgatccgcgccgccgccgtctcctacgccgacgagctcgtctccaccgcgaaatctgttgcttccccagggcgtggtatcctggcaattgatgagtcgaatgccacatgcggaaagagattagcatccattggtttggacaacacagaagttaaccgccaggcttacaggcagcttttactgaccactgctggtcttggtgaatatatttctgagtgctatactttttgaggaaactctttatcagtcaaccactgatggtaagaagtttgttgactgcttgaaggatcagaatatcatgcccggtatcaaggtcgacaagggcttggttccattgcctgggtccaacaatgaatcttggtgccaaggcctagatggtttggcttcaaggtgtgctgagtactacaagcagggggcacgcttcgctaagtggcggactgttgttagcatcccttgtggtccctcagcattagcagtcaaggaagcggcatggggacttgctcgatatgctgccattgctcaggacaatggcttagtgccaattgttgagccagagatccttcttgatggtgacccatgcgatcgagagaactcttgaagtggcagagaaagtgtggtctgaggtattcttctacctggcccaaaacaatgttctttttgagggtatcctgctgaaacccagcatggtgacccctggagctgaacacaagcagaaggccactccagaagccattgcgaagcacacccttacaatgctgaggaggagagtgccgcctgctgtccctggaatcatgttcctttctggtgggcaatctgaggtggaggcaaccctgaacctgaacgcgat

SEQ ID NO: 385882 - DNA, 699 bp, Oryza sativa
ccacgatgctatggagttggccttggctctcgaaaagcttgtaaatgagaagttgcacaacctgcacagtgtggcatcaaggtgcaatgatccacagctgaccgacttcgttgagagcgaattccttgaggagcaggttgaagccatcaagaagatctctgagtatgtcgcccagctgagaagagtgggaaaggggcatggggtgtggcactttgatcagaagctgcttgaggaagaagcttgaatggaggagacggtgtgaagggcagtagtaggtttcgtttcttccatccatgggatcatgcagctaaagaaagaaaataagtcgagtctgtgtattcatcaaattaagcacgcagtagcaatggagtgaatgaaccaaccaatttggtcatgaacttccccctgtgtctaggtcagtagagcttcagaatcatgtgtatgtcgcgcgtcctcgcagaaaaggaacatggcgcggctggctgtagcgatacttgtgatattgtggctatgcatggagtcatggtgatggtgtattttggggagcatttacacgtttgttgctagagagattttgctggcagccagtaaggaacagtatgataatccattgtggtgttaatgcttgtttcatcgtgcttatgtcatgttcctagtagtttatgttagtaactcgaagcctggcaagtttttatgcat

SEQ ID NO: 385883 - DNA, 487 bp, Oryza sativa
  unsure (1)..(487): unsure at all n locations
cagtgagcctcagaagatntctgagtatgtcccccagctgagaagagtgggaaaggggcatggggtgtggcactttgatcagaaagctgcttgaggaagaaagcttgaatggaggagacggtgtgaagggcagtagtaggtttcgtttcttccacccatggggtcatgcagctaaagaaagaaaaattaaagtcgagtctgtgtattcatcaaattaagcccccagtagcaatggagtgaattgaacccaaccacatttggtcatgaacttccccctgtgtctaggtcagtagagcttcagaatcacgtgtatgtcgcgcgtcctcccagaaaaggaacatggcgcccctggctggagcgatacctgtgatattgtggctatgcatggagtcatggtgatggtgtattttggggagcatttacacgtttgttgctagagagatnntnttaccccccaggcgttntatccacagacacagctccagac

SEQ ID NO: 385884 - DNA, 978 bp, Oryza sativa
aagaggcaagagcatccgtattaaccagccttttgagacttgagagtgtgtgtgactcgatccagcgtagtttcagttcgtgtgttggtgagtgattccagccaagtttgcgatggcttctcagcaggaacgggctagctaccacgccggcgagaccaaggcccgcgccgaggagaagacggggcgcatgatgggcacggcgcaggagaaggcgcgggaggccaaggacacggcgtccgacgccgcggggcgcgcgatgggcaggggacacggcgccaaggaggcgaccaaggagaaggcgtacgagaccaaggacgcgaccaaggagaaggcgtacgaggcaaaggacgcggcctccgacgccaccggccgcgccatggacaagggccgcgccgcgggcgccacgagggacaaggcgtacgatgccaaggacagggcggctgacacggcgcagtccgccgccgaccgcgcccgcgacggcgccgggcagaccgggagctacattggacagaccgccgaggccgccaagcagaaagcggccggcgccgcgcagtacgccaaggagaccgcgatcgccggcaaggacaagaccggcgccgtgctccagcaggcaggggagcaggtgaagagcgtggcggtgggggcgaaggacgcggtgatgtacacgctcgggatgtcaggcgataacaagaacaacgccgctgccggcaaggacaccagcacctacaagcctggaactgggagtgactaccagtaatacggtagaagaagcatgtgtcgtctttggcactgatgccaaagtgtacgtgttgtatcctcttttttaagtttcagctcgacttcgacgtgttcggtgtcacactttggtttttcagttgtgctcaactgttcatgtttctggttccatggagggccagtgtggaggtcaatgtttaagctttcgttttaaaatctgataataaagttggttaagacctg

SEQ ID NO: 385885 - DNA, 567 bp, Oryza sativa
  unsure (1)..(567): unsure at all n locations
catctactaagcaaagcacaaccaaagcttaagcgtcctccaaatcctcacacaagaactcgctcttcttaaccctcccggattttctccgacgagatcgatggctcctccccagcttgccggcaagatgaccgccaaggccgccgcggcggtgaagcccgcgacgagggcgtacgtgacgttcctcgcgggcgacggtgactactggaagggcgttgtcgggctggccaagggccttcgcaaggtgggctcggcctacccgctggtggtcgccgtcctccccgacgtgccggagtcccaccgccgcatcctcatctcccagggctgcatcgtccgggagatcgagccggtgtacccgccggagaaccagacgcagttcgccatggcctactacgtcatcaactactccaagctccgcatctgggagttcgtggagtaccagaggatggtgctccttgacgccgacatccaggtgttcgacaacatcgacgagctgttcgagctgcccaaggggcacttctacgcggtgatggactgcttctgcgagaagacgtngagcaaaacccg

SEQ ID NO: 385886 - DNA, 492 bp, Oryza sativa
tccccatcacctttgaaaagatcgccccctgggtgaaggcggccaacatcaaggtcaaggcctactggcccggtcttttcgccaagctcctcgagcaccgcagcgtcgatgacctcatcctctcagtcggatctggtggtggtgctgctccagttgctgctgctgctgcccctgctgctggcggtggtgctgctgctgccccaagctgccgaggagaagaaggaggaggcgaaggaggagagcgacgatgacatgggtttcagcttgttcgactaagcagtccacagatgttagccagtccgcctatgctttgcaagactatcttatgttgtgtcttttaggttcacttaaagtactctcaagttttgagttttgatatggtgttatcgagaatctgtgtctgtgggatgagaacctcaaacctccttggatggtcctattagaatgaaaccgttctacattcttatatctagctcttttattctgtggtct

SEQ ID NO: 385887 - DNA, 1146 bp, Oryza sativa
  unsure (1)..(1146): unsure at all n locations
ccacgcctttagccgcagctgcttcgctctgctttctccgtaggtttatccctttgcttctcctcgtctccctccccctcgcacgcaaaggcacaaagcccggattccaccgccggagccgacccgcttcgaggcgaatcgagagttagctttccagccagcaatcgaggatgtcgtcggtgcagctctccggtgccggagtcgccgcggtggccttcaccaagaatggcgcgtcttccttcgacgggctccgcctcgcgccgccatctgtgcgagtctgctcctccaggcgcccgtctcgtagcctcgtcgtcaaggccgccacggtcgtcaccccaaagtatacctcgctcaagcctctgggagacagagtgcttgtgaagcttggtgctgcagaggagaagactgttggtgggattctgcttccgtcaaccgcacagtctaagcctcagggaggtgaggttgttgctgttggagagggaagaactattggggataagaaagttgaggtcagcttgcagattggggctgaagttgtatattcaaaatatgctgggactgaggtgcaatttaacgacaccaaacatcttattctaaaagaggatgatatcattggtgttcttgagactgatgatgtcaaagatatgaagccccttaatgaccgggttctcatcaaggttgctgaggctgaagacaaaactgctggtggccttattctcactgaaaccactaaggagaagccatcaatcggaacagttgtagccgttggtccaggccctcttgatgatgaaggcaagaggcagccattgtcagtttcagcgggcagcactgtgatgtactccaagtacgcaggcagtgagttcaagggagctgatggcaccaactacattgtcttgagagtatcagatgtgatggctgtcctatcttgagctgtgatttgtttcaattttgagttcagaatagacggtagcaggtggtaatggttgccatgtggtgatcttcactctgcggagatgctgtctttgataatcctagaattcgaacgcaacaatttgcagatctcctacgggatcaacattccactgtgactgatttttatttataaaagtttgttttgtttcaaaaaaaaaaaacaaaannnnnnnn

SEQ ID NO: 385888 - DNA, 531 bp, Oryza sativa
gctgacctccgttaaccccgttcgttttatttgcgtttacttcgtttcttgggaaggcacttccttcctcttcctaggaaggcttgaggagccaagaggaagaggagagcaatgggggaagctgccggcgaccgcgtcctgagccgcctccacagcgtcagggagcgcatcggcgactccctctccgcccaccccaatgagctcgtcgccgtcttcaccaggctggttaacctcggaaagggaatgcttcaggcccaccagatcattgctgagtacaacaacgcaatctctgaggctgatcgtgagaagctgaaggacggtgcttttgaggatgtcctgaggagtgcacaggaggggattgttatctccccatgggttgcccttgccatccgcccgaggcccggtgtctgggagtatgtgagggtcaatgtgagcgagctcgctgttgagttgctgacagtccccgagtacttgcagttcaaggaacagcttgtggaagaggcaccaacaacactttgtgcttgagctgga

SEQ ID NO: 385889 - DNA, 997 bp, Oryza sativa
cttaaatctgtctgtgttttttgatttttgttattcttagtcatttttttattttttactactaaatggaaggatcttatcaacgtccatgaatgcgaaatcatagatcgaactgccgaattggcaaaattcggtgctatcatagtatccgctaagttcacgggctggagataagcggactcgaaccgctgacatccgccacagggtaaaccaccgcctctcaggcctccccgacgggttctaccatagaggccaacgatagacaataactcccccccgaacacagcttacaactttcatcgtactgtgctctccaaagagcaactcttctcaaaatctcaaaacaaaaggtgctgagttggaatcccattctaaggattcttgtggttccggggaatccagctacaggagaaccaggaacggggagctctcccctttttccgcccgactctttgatcttaaacttaagaatgctggttttaagaacgagtgattgcccttctccgacccttactgcccaaccggagagcggacggctaatgtgttccacttattgaacagggtctatggtcggtccgtgacccctggacgccgaaggcgtccttggggtgatctcgtagttcctacggggtggagataatggggtcggtccatggattttccttccttttgccacatttcgctcaaagggttgaagggagatagtgcatcaagctattcgcaagggccaacttgatcctcttccccagggatcccagatgagggaagcctaggagagccgccgactccaactatcgtccatgtacgatccatactagatctgaccaactgcccatcctacctcctctacctttttgacagcccatctttttgtctcagtagagtctttcagtggcatgtttcagtcctcttccccattacttagaaaaagtgagccaccggttcaggtacaagatactaccattgccgcctggacaattagacagccaaccaacaa

SEQ ID NO: 385890 - DNA, 710 bp, Oryza sativa
  unsure (1)..(710): unsure at all n locations
aggntaccgggccccccctcgaggtcgaccccgcacgatcctcccctccgccgccggccttgcttcttccccattcctgctcttcgaggcgttttttaacttcacaatgaagctgatcgctgcctacctgctcgctgttctgggtggaaacacctctccatctgctgatgacattaagaacattctggaatcagttggcgttgaagctaatgacgagaggctggagttcctgctctcagaactggagggcaaggacataacagaagtgattgctgctggaagggagaagtttgcttctgtgccctcaggtggtggtggtggcatagctgtggcagctcctacagctgcaggtggcggtgcagcacctgctgaagaggcaaagaaagaggagaaggtcgaagagaaggaagagtctgatgatgacatgggtttcagcttgtttgactaagtaccttcggctgcatatttacccccgttcaccccagtatctttctgcattgcttgctttatcactatgtgtgcaaaaatgagcaatgtgatggctctatgtgtttctgctattttttggtcgagactgtatatgtctagtatcctaagaagtttaatgtaaaatttcagggaactggtcaaaacatgtaatgtttgctatcgtgagttagcattatctactctcnccgcnnnnnnnnnnnnnnnnnnnnnnnnnnnnnnnn

SEQ ID NO: 385891 - DNA, 1442 bp, Oryza sativa
ccacgcgtccgcccacgcgtccgcccacgcgtccgcccacgcggacgcgcacgcggccgcccacgcggacacggccacaccacccaccaactgagagctgagcaggcgagcgagcggacatggcagcatcgctccaagccgcggccaccctgatgcagccggccaagctcggcggccgggcctcctccgccgcgctgccatcgcgcccgtcttcgcacgtcgccagggcgttcggcgtcgacaccggtgccgccggcaggatcacgtgctccctgcagtccgacatccgggaggtcgccaacaagtgcgccgatgccgccaagctcgccggcttcgccctcgccacctcagctctgctcgtctcgggcgccagcgcggagggcgtgccgaggaggcttaccttcgacgagattcagagtaagacgtacatggaggtgaagggaaccggcacggcgaaccagtgcccgacggtggagggcggcgtcgactccttcgccttcaaggccggcaagtacaacatgaagaagttctgcctggagccgacgtccttcaccgttaaggcggagggcgtggccaagaacgcgccacccgagttccagaagaccaagctcatgacccgcctgacctacaccctcgacgagatcgagggcccgctcgaggtcagctccgacggaaccatcaagttcgaggagaaggacggaatcgactacgccgccgtcaccgtgcagctgccgggaggcgagcgcgtgccgttcctcttcaccatcaagaatctggtcgccaccggcaagccggagagcttcggcgggcccttcctcgtgcccagctaccgtggttcgtccttcctcgacccaaagggccgcggtggctctaccggctacgacaacgctgtggcgctccccgccggaggcagaggagacgaggaggagctcgctaaggagaacgtcaagaacgcctcgtcgtcgacgggcaacatcacgttgagcgtcaccaagagcaagccagagaccggcgaggtgattggcgtcttcgagagcgtgcagccgtcggacacagacctcggcgccaaggtgcccaaggatgtcaagatccaaggggtgtggtacgcgcagctcgagtagggaatgaacaaatgttttgtgcgtggccgggttgatatatcgatacatggagagagggaaggaaggctgcaatgtgtgtatctagtaatgcaaactcgatcgggctgttgatggttttaatttttagcttttgtttcttcctctgttctcgtgaactgatgatcatatcccccgatgatgttatttgcatttcgacaagcggagaggacattgtacgatacatatatgtgcctatcttcacgaacatttgccttccaatcgtgacttctcctcttctctccattcacgttatatcttgcacattttttttaccaaagacca

SEQ ID NO: 385892 - DNA, 746 bp, Oryza sativa
  unsure (1)..(746): unsure at all n locations
ccacgcgtccgcccacgcgtccgcccacgcgtccgggcgtggccaagaacgcgccacccgagttccagaagaccaagctcatgacccgcctgacctacaccctcgacgagatcgagggcccgctcgaggtcagctccgacggaaccatcaagttcgaggagaaggacggaatcgactacgccgccgtcaccgtgcagctgccgggaggcgagcgcgtgccgttcctcttcaccatcaagaatctggtcgctaccggctacgacaacgctgtggcgctccccgccggaggcagaggagacgaggaggagctcgctaaggagaacgttaagaacgcctcgtcgtcgacgggcaacatcacgttgagcgtcgccaagagcaatccagagaccggcaaggtgattggcgtcttcgagagcgtgcagcagtcggacgcagtcctgggcgccaaggtgcccaaggatgtcaagatcgaaggggtgtggtacgcgcagctcgagtagggaatgaacaaatgttttgtgcgtggccgggttgatatatcgatacatggagagagggaaggaaggctgcaatgtgtgtatctagtaatgcaaactcgatcgggcgtgttgatggtgttaatttttagcttttgtttcgtcctctgccctcctgaatggatgatcatatanaaaaaaaaaaagggcgagggcggtcgctctagagaattcaaggcttgcgtacatcgtgcatgcgtacgtcatagc

SEQ ID NO: 385893 - DNA, 2474 bp, Oryza sativa
ccccgctctagaggatccaactggttcggacccaaactcgcacaagggagaagagaagagaagcttcgagagagaggtggaggaggagacgagcgcgtggtggtggtggtgttggcggcgatggatcgggttcgcggatgcgcgttcctgctcggcgtcctgctcgcaggatccctgtttgcattttctgttgcgaaggaggagaccaagaagctcggtaccgtgatcggtattgatcttggtacaacctactcgtgtgtcggtgtgtacaagaatggtcatgtcgagattatcgccaatgaccagggtaaccgtatcacaccctcatgggttgcattcaccgatagcgagaggctcatcggtgaggctgccaagaaccaggcagctgtgaacccagagaggaccatcttcgatgtcaaacgtctcattggaagaaagtttgaagacaaggaagttcagagggacatgaaacttgtcccctacaagattgtgaacaaggacggtaagccctacattcaggtcaagatcaaggatggagagaacaaggtcttcagccctgaggaggtcagtgctatgatccttggaaagatgaaggagactgctgaggcataccttggcaagaagatcaacgatgctgtcgtgactgttcctgcgtacttcaatgacgcgcagaggcaggcaaccaaggatgccggtgtcattgctggcctgaatgttgctaggatcatcaatgagccaactgctgctgctattgcgtacggtttggacaagaagggtggtgagaagaacatccttgtctttgaccttggtggtgggacattcgatgtcagtatcttgaccattgacaacggtgtgtttgaggtgttggccaccaatggtgacactcatcttggaggtgaggactttgaccagagaatcatggagtacttcatcaagttgatcaagaagaagtacagcaaggacatcagcaaggacaaccgtgctcttggaaagctgaggagggaagctgagcgtgccaagagggccctcagcaaccagcaccaggtccgtgttgagattgagtccctctttgacgggaccgatttctcggagccgctgacccgtgccagatttgaggagttgaacaatgatctgttccgcaagaccatgggacctgtcaagaaggctatggacgatgctggccttgagaagagccagattcatgagattgttcttgtcggtggtagcaccaggattcccaaggttcagcagctcctcagagactacttcgagggcaaggagcccaacaagggtgtcaaccctgatgaggctgttgcctatggtgctgcggttcagggaagcattctcagcggcgagggcggtgacgaaaccaaagatatccttctcctggatgtggcaccccttaccctcggtatcgagactgtcggtggagtcatgaccaagttgatccccaggaacaccgtcatccccaccaagaagtcccaggtgttcaccacctaccaggatcagcagacaaccgtctccatccaggtctttgagggtgagcgcagcatgaccaaggactgccgtcttctcggcaagttcgacctatctggcattccagcagcaccaaggggcaccccccagattgaggtgaccttcgaggtggacgccaacggcatcctgaacgtgaaggctgaggacaagggcaccggcaagtcggagaagatcacgatcacgaacgagaaggggcgcctgagccaggaggagatcgaccggatggtgcgcgaggcggaggagtttgcggaggaggacaagaaggtgaaggagcggatcgacgcccgcaaccagctcgagacctacgtgtacaacatgaagaacaccgtcggcgacaaggacaagctggcggacaagctggagagcgaggagaaggagaaggtggaggaggccctcaaggaggccctcgagtggctggacgagaaccagaccgccgagaaggaggagtacgaggagaagctcaaggaggtcgaggccgtctgcaaccccatcatctccgccgtctaccagaggaccggtggcgccccgggtggcggcgccgacggcgagggcggcgtcgacgacgagcatgacgagctgtagatgatgatgatgatgatctgattcgattgattcaaaggagacagccaatttttgtaagagatggccggttacttttagtggggtgacttactactaccttgggttggggtttaggggtagcaagaggggagagttttatttgcagaacaccagaaaagagactaaatctctcctcttgttacttgtgttgctctcttagtttgttactctgtcgagtgtagaacagctcttccttttgctacttccttctgatttccatgtgaactgtgaagaagaagaagaaacataagtaaattttaattactaaaaaaaaaaaaaaacaaaaagccttgggcgtctccgcggtccgggcggac

SEQ ID NO: 385894 - DNA, 734 bp, Oryza sativa
  unsure (1)..(734): unsure at all n locations
tggccgcccgggcaggtaccaggcaggaaccctcagtggaaaccctctagctatgactgctggaatccgcacactcaagcgtctgatggagcctggaacctacgattacttggacaagatcactggtgatcttgttcgcggggtattggacgcgggtgcgaaaactggacatgagatgtgtggaggacacatcagggggatgttcgggttcttctccaccgctggcccagttcacaactttggtgacgccaagaagagtgacaccgccaagtttgggaggttctaccggggcatgcttgaagaaggtgtgtacctagctccatcccagtttgaggcaggtttcaccagcttggcacacacctcccaggacatcgaaaaaaccgtggaggcagctgcgaaagttcttcgccggatatagagtcttcgacagttgagcttaagctacggcttgtgaatcacttgctatttttcatttgtgttgtacactgttagttctacatcactcaaaatctgtattgtgcagcagcggtacatttcctctagcccccatatcattgtgagttagcagcatccatggggtttttgcagtgccaataaagttatttttgatatctcgatggattccactgacagttcccaaatattgtgccattcaaccatactcaaaatttctctggtcatgttcgtctttatcaacatgtacctcgntcttttctaattaagatacatatttt

SEQ ID NO: 385895 - DNA, 956 bp, Oryza sativa
  unsure (1)..(956): unsure at all n locations
aaccantggagatactttccttggtggtgaggactttgatggtgcattgcttgactacctggttagtgagtttaagaagtctgacaacattgatctgagcaaggataagttggccttgcaaaggctcagggaagctgcagagaaggccaaggtcgagctttcctcaaccatgcagactgaaatcaacctcccctttattactgctgatgccactggtgcaaaacacttcaatattaccttgaccagatcaaagttcgagtctcttgtgcagtctctcattgagagaactcgcatcccctgtgtgaactgcctgaaggatgcaggcgtatctgcaaaagacattgatgaggttctactggttggtggtatgacgagggtgccaaaggttcaggatattgtttctcagatattcaacaagacaccaagcaagggtgtcaatcctgatgaggctgttgccatgggagctgccattcagggtggcatcttgaggggtgatgtgaaggagctccttttgctggatgtcactcccctctcccttggtattgagactcttggaggcatcttcacaaggctaattaatcggaacacaaccatgccaaccaagaagaggcaggtcttctccactgctcgcagacaaccagacccaggttggaatcaaggtgctccagggtgagagggagatggccacagacaacaagcttcttggtgagttccagcttgaaggtattccaccagccccaagaggtatgcctcagattgaggtcacattcgacatcgatgccaatggtattgtcaaggtgtcagccaaggacaagtccactggcaaagagcaagaaatcactataaagtcttcaggcggtttgtctgaaagtgatatcgagaagatggtgagggaggctgagctacattctcagaaggatcagganaggaaatcattgattgatctgaagaactct

SEQ ID NO: 385896 - DNA, 416 bp, Oryza sativa
  unsure (1)..(416): unsure at all n locations
cacccgcatcgcatcccacccacgaacgcttcgccgcttgataaaccaaattccccaccgccgcttcgttctcgccgatccggagggctcgagatgaaggcgaggtcgaggtccagcaatggcgactccaggctctcggtgaggaagaccaaggcggagaaggacccgaacaagccgaagaggccaccgagcgcgttcttcgtgttcatggagcagttcaggaaggactacaaggagaagcaccccaacgtcaagcaggtctcggtgattggcaaggctggtggtgacaaagtggaagtccatgactgatgctgacaaaggctcctttcgtgaccaaggcttgaggaagctcaaggcttnagtacaccaaggaagattgacgncctacaacgacaagcaggccaggaggcccggtt

SEQ ID NO: 385897 - DNA, 775 bp, Oryza sativa
  unsure (1)..(775): unsure at all n locations
ccacgcgtccgcggacgcgtgggcggacgcgtgcgtgcaaacacacgcagcaaaatccacaccgtttcccctccccgagaagaagagagcagcatccatggcgcccaaggcggagaagaagccggccgcgaagaagcccgcggaggaggagcccgcggcggagaaggccgagaaggccccggcggggaagaagcccaaggcggagaagcgtctccccgccggcaagggcgagaagggcagcggcgaggggaagaaggcggggcggaagaaggcgaagaagagcgtcgagacctacaagatctacatcttcaaggtgctcaagcaggtccaccccgacatcggcatctcctccaaggccatgtccatcatgaactccttcatcaacgacatcttcgagaagctcgccgccgaggccgccaagctcgcccgctacaacaagaagcccaccatcacctcccgcgagatccagacctccgtccgcctcgtcctccccggcgagcttgccaagcacgccgtctccgagggcaccaaggctgtgaccaagttcacctccgcttaggctcataggcccctttctcgtcttgctgctaatggtagttgtggtaggttggaattttggatggtatggtactgtgctgtagttattctggcttttggacttatcttgggttcatgtaagaaatatcctggtgggatttagggacaatattgttatctggatctggtaaagtagtaattatgatgatgatggcttaaaaannnnnnnnnnnnnnnn

SEQ ID NO: 385898 - DNA, 837 bp, Oryza sativa
  unsure (1)..(837): unsure at all n locations
ccacgcgtncgcccacgcgtncgcccacgcgtccgccacgcgtccgccaaatcagaaacacactcgcctcgcctcctttcgctcgtttcgtccaacaccaccaccaccaccaccgatctcgatggcgcccaaggccgagaagaagcccgcggagaagaagccggcggaggagaaggccggcgagaaggcgcccgcggccgggaagaagcccaaggccgagaagcggctgccggcgtccaagggggagaagggcggcgagggcaagaaggagcgcggcaggaagaaggccaagaagagcgtcgagacctacaagatatacatcttcaaggtgctcaagcaggtgcacccggacatcgggatctcctccaaggccatgtcaatcatgaactcgttcatcaacgacatcttcgagaagctcgccggcgaggccgccaagctcgccaggtacaacaagaagcccaccatcacctccagggagatccagacctccgtccgcctcgtcctccccggcgagctcgccaagcacgccgtctccgagggcaccaaggccgtcaccaagttcaccagctcttaggcgctctagtgtagtaggtgtttggtgattttctcttcgttttcgtcgtagcgagtccatggcagcggtggtagttgccctgtcgatctctgatttctttctcttgtgtctagtgttcctgtctagtgcttgctgattactgtaagaatctcttggttgtgcccgttgagttctgatcttaaaattaatggtgatggttgcaacctctggttgctaaattgttactatcnnnnnnnnnnnnnnnnnnnnnnnnnnnnnnnnnn

SEQ ID NO: 385899 - DNA, 762 bp, Oryza sativa
ccacgcgtccgcccacgcgtccgcgaatcccaccgcttccctttcctctcctctcctctccccgggaagaagacagcagcggcatccatggcgcccaaggcagagaagaagccggccgcgaagaagcccgcggaggaggagcccgcggcggagaaggccgagaaggcccccgcggggaagaagcccaaggcggagaagcgtctccccgccggcaaggccgagaagggcagcggcgaggggaggaaggcggggcggaagaaggcgaagaagagcgtcgagacctacaagatctacatcttcaaggtgctcaagcaggtccaccccgatatcggcatctcctccaaggccatgtccatcatgaactccttcatcaacgacatcttcgagaagctcgccggggagtccgccaagctcgcccgctacaacaagaagcccaccatcacctcccgcgagatccagacctccgtccgcctcgtcctccccggcgagctcgccaagcacgccgtctccgagggcaccaaggccgtcaccaaattcacctccgcttaggcttcacccctgcatctatctatgtgttagttttagtgctatcgatgattggaaaatggatgttagatcgttagtttggtagtcagatgtcagtgatctggaacagtagctctgattttaaaccatgtgaatgtgattcctgggtatgtgatgtttgaccgccttgtgtctgctggtcaacgagtgacaactagatctaatttttgtggaact

SEQ ID NO: 385900 - DNA, 740 bp, Oryza sativa
  unsure (1)..(740): unsure at all n locations
ccacgcgtccgagcaaatcaaatccaatccacctctcgcctccaaatcccaaatcctctactcgtcgtcgtcgcggttcatctccagcgaattcccgatggcgcccaaggcggagaagaagcccgcggagaagaagccggtggaggagaaggcggagaagaagcccaaggccgagaagcgggtgccgggcgccaaggagggcggcggcgagaagaaggggaagaagaaggccaagaagagcgtcgaaacttataagatctacattttcaaggtcctcaagcaggtgcatcccgatatcgggatatcgtccaaggccatgtcgatcatgaactcgttcatcaacgatatcttcgagaagctcgcccaggaggccgcccgtctcgcccgctacaacaagaagccgaccatcacctcccgcgagatccagacctcggtgcgcctcgtcctccccggcgagctcgccaagcacgccgtctctgagggcaccaaggccgtcaccaagttcacgtcgtcttaagacgggtgatcttgttcatgttcgttgggtgtttatctgttctgatgtttattttaggggcgttttagnttttcccacatgggacaatgtagtatcggtgaaattcggtataaaatgaatcgntgatcttttnacaaaaaaaaaaaaaaaaanggggggccgcanccgggtgggggtccagtttttnttccctttagggngggtaatttcgngttttgggaaa

SEQ ID NO: 385901 - DNA, 732 bp, Oryza sativa
  unsure (1)..(732): unsure at all n locations
gctcacacacccagcgaaatccaagaagagagaagcagccatccatggcgcccaaggcggagaagaagccggcggcgaagaagcccgcggaggaggagcccgcggcggaagaaggccccggcggcggggaagaagcccaaggcggagaagcggctccccgcggggaagggcgagaagggcggcgccggcgaggggaagaaggccgggaggaagaaggggaagaagagcgtggagacctacaagatctacatcttcaaggttctcaagcaggtccaccccgacatcggcatctcctccaaggccatgtccatcatgaactccttcatcaacgacatcttcgagaagctcgccgccgaggccgccaagctcgcccgctacaacaagaagcccaccatcacctcccgcgagatccagacctccgtccgcctcgtcctccccggcgagctcgccaagcacgccgtctccgagggcaccaaggccgtcaccaagttcacctccgcttaggcttttcctctgtcctcctgtctcgtcttgtcgctgctaatgctagttgtagttgtggtagtttgcagatttggatagtttggtactgtggtgtatttaccctggctattgactatcttggtggataaggaacactatcattgttattatggagaaatagtagttatgctactttaatcaactaaaaaaaaaaaaaannnnnnnnnnnnnnnnnnnnnnnnnnnnnnn

SEQ ID NO: 385902 - DNA, 755 bp, Oryza sativa
gcggcccacgcgtccgcccacgcgtccgaggtcttcctcctcctcacgaatcccgcctctctctctgtctcggggctctctgtgggtggtggctctctccatttgagccgatccctcgagaggcagctccgatggcgcccaaggcagagaagaagccggcggagaagaagcccgcagccggcgaggagaagtcggcggagaaggcgccggcggggaagaagcccaaggcggagaagcggctgccggcgtcgaaggcgtcgtccaaggagggcggcgccggcgacaagaagggcaggaagaaggcgaagaagagcgtcgagacctacaagatctacatcttcaaggtgctcaagcaggtccaccccgacatcggcatctcctccaaggccatgtccatcatgaactccttcatcaacgacatcttcgagaagctcgccggggagtccgccaagcttcgcgcgctacaacaagaagcccaccatcacctcacgggagatccagacctccgtccgcctcgtcctccccggcgagctcgccaagcacgccgtctccgagggcaccaaggctgtgaccaagttcacctccgcttagattccatctattggtagtatttagttctgtctactatctggtagtggtagaaatggatgtcttattagtgtgtagttggcggttgtggcgctgcttttggtaaactgttgcttatttatctgagatattaacgatgctcttctagaaaaaaaaaaaaaaaaaaa

SEQ ID NO: 385903 - DNA, 762 bp, Oryza sativa
cgcaacacatcagcacacaccgctccaaagcaaaacccacggacccgcttcccctccccgagaagaagagagaagcatccatggcgcccaaggcggagaagaagccggccgcgaagaagcccgcggaggaggagcccgcggcagagaaggccgagaaggcccccgcggggaagaagcccaaggcggagaagcgtctccccgccggcaagggcgagaagggcagcggcgaggggaagaaggcggggcggaagaaggggaagaagagcgtcgagacctacaagatctacatcttcaaggtgctcaagcaggttcaccccgacatcggcatctcctccaaggccatgtccatcatgaactccttcatcaacgacatctttcgagaagctcgccggagagtccgccaagctcgcgcgctacaacaagaagcccaccatcacctcccgggagatccagaccgccgtccgcctcgtcctccccggcgagctcgccaagcacgccgtctccgagggcaccaaggccgttaccaagttcacttcctcctaggctgtacgcctgcatctagtcctagtagtaatagtagtttttatatgtttatgtgggtatattgtttaagtgatatccaagattggaaatggatgttaaattgttggtttggtagtcattggctgtaagaagaatggctttgggttgcctttgggaaacacttgctttacggatcgggcttaagttaccttgcttttataacatgctaaattgtgcttt

SEQ ID NO: 385904 - DNA, 528 bp, Oryza sativa
  unsure (1)..(528): unsure at all n locations
cagcggcgaggggaagaagncggggcggaagaaggggaagaagagcgtcgagacctacaagatctacatcttcaaggtgctcaagcaggtccaccccgacatcggcatctcctccaaggccatgtccatcatgaactccttcatcaacgacatcttcgagaagctcgccgccgaggccgccaagctcgcccgctacaacaagaagcccaccatcacctcccgggagatccagaccgccgtccgcctcgtcctccccggcgagcttgccaagcacgccgtctccgagggcaccaaggccgtcaccaagttcacttcctcttaggctgcacctggtgctattgtgctagtagtaatattagtttgatctatttatctactagctgtagtgcatcaatgatgggaaatggatgttggggatttagtgactgtaagaagaattaggtggggctgcttttgaggaacttctgtttcatggattcgaaatacactagtaatgcttttgtatcaaaaaaaaaaaaaaaaaaaggg

SEQ ID NO: 385905 - DNA, 588 bp, Oryza sativa
  unsure (1)..(588): unsure at all n locations
naagaagcccaaggcggagaagcgtctccccgccggcaagggcgagaagggcagcggcgaggggaagaaggcggggcggaagaaggggaagaagagcgtcgagacctacaagatctacatcttcaaggtgttcaagcaggttcaccccgacatcggcatctcctccaaggccatgtccatcatgaactccttcatcaacgacatcttcgagangctcgccggggagtccgccaagctcgcccgctacaacaagaagcccaccatcacctcccgggagattcagacctccgtccgcctcgtcctccccggcgagcncgccaagcacgccgtctccgagggcacgaaggccgtcaccaagtttacttccgcttaggctgcatgccttcctctagtttgttagtagtagtagtagcagtagattgatctgtttatgtggtagtttaagtggaaatgatgattgcaaatgaagaattgtgcggggcttcttttggggaactcactgatctggaatagtaatgctttttatgtcatgtgaacatatctctggttgccnattgattttttgttttgtngaaaaaaaaaaaaaaa

SEQ ID NO: 385906 - DNA, 554 bp, Oryza sativa
  unsure (1)..(554): unsure at all n locations
ccacgcgtccgcggacgcgtgggcgggggttcttcttcttcttcctcctcctcgcgctcccccgattcgaagcgtgaagagaggaacggcgcttgcgagaggagagagatggcccgtaccaagcagaccgctcgtaagtccacaggaggaaaggctcccaggaagcagcttgccaccaaggctgctcgtaagtctgctcccaccactggaggagttaagaagccccaccgttaccgccctggaactgttgccctccgtgagattcgcaagtaccagaagagtactgagcttttgatcaggaagctgcccttccagaggcttgttagggaaattgcacaggacttcaagaccgatctgcgttttccagagccatgcttgtccttgccctccaggaggcttcggaggcataccttgttggtcttttcgaggacaaccaacctgtgcgccattcatgccaagcgtgtgaccatcatgcctaaggcattcagttgctaaggagggttcgtggttagaggctttaaattccctcgcgattctttgaaatnaagatcgna

SEQ ID NO: 385907 - DNA, 318 bp, Oryza sativa
ccacgcgtccggcgatggcttgtcacccgagcgggggcaataaggtggtgcggatgcctggtcgtttgcgctttggcctgggcctgtggttcgctctatgcggcccagcccgttccaaagttgcgtagcgtgtatggggcgccctggcgaaagctagagcgtccctgcacctagagtggcgggtattgcgtgaggctggtttcacagagcagcgagtaccgcccgcttccaacggtggaaggattacgggccgctgcagccctggcccgcttccggcccatgtgccttccatggcagacccccatcttaaaaaaagag

SEQ ID NO: 385908 - DNA, 520 bp, Oryza sativa
cccacgcgtccgctgcaagctcgctgggcagcttacacaggggagtgaagtggagtgagtgtgagagagagtgagtgagaatgggtggcaaggccgctctcctgatggccctggtggccatcagcgtcgtcctggaggccagggcggacgccggtggctacggcggcgggtacacgcgacgccgacgccggtgaaacgcgccgaagccggagaagccgcccaaggagcacaagccgccgcaccaccacgagcccaagccggagaagccacccaaggagcacaagccaccggcctacacgccgtccaagccgacgcccaccccacccacgtacaccccgacacccaagcctacgccaccgccatcgtacaagccgcagccgaagccgactcccactccgtacactcccactccgacgccgccatcctacaagccgcagcccaagccgaaccctgcacccacgtacaagccgcagcccaagccaaacccgccacccacgtacatgcctgcgccgtcacctac

SEQ ID NO: 385909 - DNA, 462 bp, Oryza sativa
  unsure (1)..(462): unsure at all n locations
agaagaaaccaattanaacattgttttgcagaagtacgtgctgtcgaagatgatgtcggagaaggagctcctgggctacaacgacggcgagggccgggcgttcgaggtggtcaccctgccgtgcggcctcgtcgccggcgacacggtcctcggccgcgccccggagacgctggagaacgccgtgtcgccggtgtcccggaacgagccgtccttcgcgttcctgaggctgctgcagaggctggtcgggtcggtgccgctggtgcacgccgacgacgtctgcgacgcgctcgtcttctgcatggatcagccgtcgctcgccggccgcttcctctgctccgccgcctacccgaccatccacgacatcgtcgaacacttcgccgccaagtaccctcacctcgacgtcctcaaagagtatgccgatctttctttctctgatcgagaacaaatcggacgcctagcgcc

SEQ ID NO: 385910 - DNA, 533 bp, Oryza sativa
gaccgactcgacccacgcgtccggacccacacggtttcgtcgccaagccggagacgttggccgacgggacggtcaacctcatgatctggcactgcacaatccccggcaagcaagggactgattgggaaggtggatactttcctctcactcttcatttcagtgaggattaccctagcaaacctcccaagtgcaagttcccacagggtttcttccacccaaatgtctatccttcagggacagtctgcctttcaattcttaatgaagacagcggttggagacctgctattaccgtcaagcaaattcttgttggaatccaggacttgcttgatcagcctaatcctgctgatcctgctcagaccgatggttaccatctttttatccaggatcctacggaatacaagaggcgtgttcggctgcaggccaagcagtatcctccgattgtctgagaatattggcatagggacccatgctgcacattcgcttagttcttgctagatctaaaatgagtccctctgcaaatatggattaggcca

SEQ ID NO: 385911 - DNA, 746 bp, Oryza sativa
gtgccgtaccgataccggagtgttcgagcccagagcgtacccgtcgggaaccattttgcagctcttgcgtttgaggcagatctttaatggagtgttcttgaaggtcaacaaagccaccattaacatgctgcgcagggttgagccatatgttgcatatgggtacccaaatttgaagagtgtccgtgaattgatctacaagaggggctatggaaagctcaacaagcaaagaatccctcttacaaacaacaaagtcatcgaggagggtttgggtaagcatgacatcatctgcattgaggatcttgttcatgagatcatgactgttggcccacatttcaaggaggccaacaacttcctctggccattcaagctgaaggcaccactgggtgggctgaagaagaagaggaaccactacgttgagggtggtgatgctggtaaccgtgagaactacatcaacgaactcatcagaaggatgaactagttccatgagctcattgttagcgcactgtgtttggatgatattttaaagtaagcttattttgcactaggaagtgtatcaagaaaatcttgcaattttgatattcagaatctgacccttttatccggtggtttgatgttattcctaaatttgaagtgcttttaatcatgatatgcgaacatgtgttagtacttattatggctctactgcctttgtgttgacatcaagactaaaatccagctcttatgccatttatacaatgcttagcctg

SEQ ID NO: 385912 - DNA, 866 bp, Oryza sativa
  unsure (1)..(866): unsure at all n locations
ttgcgtttccccactccccgtctcctcctccctcacgcagctcgtcgagatggcgtccgaggcggccaaggtggtggtgccggagtccgtgctccgcatgaggaagcgggaggaggtgtgggcggccgcgagcaaggagaaggccgtcgccgagaagaagaagtccatcgagagccgcaagctcatcttctcccgcgccaagcagtacgccgaggagtacgaggcccaggagaaggagctggtgcaacttatgcgtgaggctcggatgaagggtggtttctatgtcagccctgaggaaaagttgctgtttgtggtccgtatccgtggtatcaatgccatgcacccgaagaccaggaagattttgcagctcttgcgtttgaggcagatctttaatggagtgttcttgaagggcaacaaagccaccattaacatgctgcgcagggttgagccatatgttgcatatgggtaccctaccttaattacattcgagcctaatatattatatatatgcaccatcttgctattttattttgaattaccatctgttgttttactagaaatgtgatcttggcatttactagaataactggaacatttcacaattaaaggcttctaaaattgcttacactgaatttgtgttattaagtagcaactgtttgcatcattgtgttctgcatcaaaatcataacaaattgtagtcaatcaattttatattttaatttgaattgtctagggtctgaaatagttcaagcccctaatgactagagttgattattgatcttcttactagattagtgattcttatgttntaggtacccaaatttgaagagtgtccgtgaattgatctacaagaggngctatggaaa

SEQ ID NO: 385913 - DNA, 1124 bp, Oryza sativa
tgcggtaccggtaccgatctcgcgggttcacgcgtgcgcccacgcgtagccacacacacaccactccatttctgagctcttctagtttgagtgagagagcagcagaagggagtagtgcaagatgccgatccgcaacatcgccgtggggagccaccaggaggtgtaccacccgggtgcactcaaggcggcgttggccgagttcatctccaccctcatcttcgtcttcgccggccagggctccggcatggccttcagcaagctgaccggcggcggagcgacgacccccgccgggctgatcgcggcggcggtggcccacgccttcgccctgttcgtggcggtgtccgtcggcgccaacatctccggcggccacgtgaacccggccgtgaccttcggcgccttcgtcggcggcaacatcaccctgttccgcggcctcctctactggatcgcccagctcctgggctccaccgtggcgtgcttcctcctccgcttctccaccggcgggctcgccaccggcaccttcggcctgaccggcgtctccgtgtgggaggccctggtgctggagatcgtcatgaccttcggcctcgtctacaccgtgtacgccaccgccgttgaccccaagaagggcagcctcggcaccatcgcccccatcgccatcggcttcatcgtcggcgcgaacatcctcgtcggcggcgcgttcgacggcgcctccatgaacccggccgtctccttcggcccggccctcgtcagctggtcctgggagtcccagtgggtgtactgggttggcccactcatcggcggtggcctcgccggcgtcatctacgaggtcctcttcatctcccacacccacgagcagctccccaccaccgactactaagctcatcgccgccgccgccgcttgtccatgatcgcctcgtctccgactccgatccaaccgtttagtttctcgcatcagtgcatcatcaaacctgtttcatttgcttggatcagttgtacgttgaacgtactgtaagtgtggacctttgggaacccgttgctttgcttctgtaaaactgtgcatgcatttgcctgagttccttcgttttttcctagtcaaattcgatcgctattcgcaaccagtaaaaaaa

SEQ ID NO: 385914 - DNA, 1241 bp, Oryza sativa
  unsure (1)..(1241): unsure at all n locations
ccacgcgtccgccaagctctctttcaagcgtagagacctctccacacttatcagagtaataaggaaaaaaatatagattaaaaatggtgaagctcgcattcggaagcttgggtgactccttcagcgccacgtccgtgaaggcctacgtggcggagttcatcgccaccctcctcttcgtcttcgctggcgtcggatccgccattgcctatgggcaattgaccaatggtggcgccctcgacccggccggccttgtggcgatcgcgatcgcccatgcactcgccctgttcgtgggcgtttccgtcgccgccaacatctccggcggccaccttaacccggccgtgacgttcggcctcgccgtcggcggccacatcaccatcctcaccggactcttctactggatcgcccagctgctaggcgcctccatcgcctgcctcctcctcaagtttgtcacccacggcaaggccatcccgacgcacggcgtcgccggcatcagcgagctcgagggcgtggtgatggagatcatcgtcaccttcgggctggtgtacaccgtgtacgccaccgccgccgaccccaagaaggggtcgctcggcaccatcgcgcccatcgccatcggcttcatcgtcggcgccaacatcctcgtcgccggccccttctccggcggctccatgaacccggcgcgctccttcggccccgccgtcgccagcggcgactacaccaacatctggatctactgggtcggccccctcgtcggcggcggcctcgccggcctcgtctaccggtacgtctacatgtgcggcgaccacgcccccgttgccagcagcgagttctaattacccatttcgccatcggcaacacgcataaaaatggtggtcactccatcgtcagaatcttgtgaggatgtgttgtgaaggactgatttggttcagatggggaagaaggcttttgttgcgaggatgtgacacttgggtgatgatcgatccatgtttagtttcttcttgattaatttgtaatgtgatcagtgtggagcaagttggatgagatgcatgtttaagatcgaacacttctgttgagtttcattgtgagatttcatttgattcgggccatgtccatttcagtttgtttgtagcctccaaaataagcttgtgtcttctcctcgcaaataggaaatcagaaataaaattgttccgggcgaaaataagacttgctatattttgtgtgttttgtcggcctnnnnnnnnnnn

SEQ ID NO: 385915 - DNA, 547 bp, Oryza sativa
ccacccaccccccatatcacatcctctccttcctcttcctctgctcactcagctctcccccgcgcgcgccaccgtcgtcgccatgtcgggcaacatcgccttcggccgcttcgatgactccttcagcgcggcctccctcaaggcctacgtcgccgagttcatctccaccctcgtcttcgtcttcgccggcgtcggctccgccatcgcctacaccaagttgaccggcggcgcgccgcttgacccggccgggctggtcgccgtggcggtgtgccacgggttcgggctgttcgtggcggtggccatcggcgccaacatctccggcggccacgtcaacccggccgtcaccttcggcctcgccctcggcggccagatcaccatcctcaccggcgtcttctactggatcgcccagctcctcggcgccatcgtcggcgccgtcctcgtccagttctgcaccggcgtggcgacaccgacgcacgggctgtccggcgtgggcgcgttcgagggcgtggtgatggagatcatcgtcaccttcgggctggtgtacacc

SEQ ID NO: 385916 - DNA, 526 bp, Oryza sativa
  unsure (1)..(526): unsure at all n locations
acggcggcggacccgaagaagggatcgctcggcaccatcgcgcccatcncaatcggcttcatcgtcggcgccaacatcctcgccgccggcccgttcagcggcggctccatgaacccagcgcgctccttcggccccgccgtcgccgccggcaacttcgctggcaactgggtctactgggtcggcccgctgaatcggcggcggcctcgccgggctcgtgtacggcgacgtgttcatcggctcataccagcccgttgccgaccaggactacgcttaaaagtggatgaaccgaattaattgaagtatccgtgtcagtttgcatgcatcgtacgtttgcttgatttgatattcgtcgtgtgtgatacgttcacaggctttgtattttccggtttaccttctttttgtcaaacacggtacatgtaaaaggtcactttctgcgattgttgtctggaagggggaaatcaaaattgtaaaatttcatcgacacaattgataagatcaatttgcattagatttggtttgtaccagg

SEQ ID NO: 385917 - DNA, 1212 bp, Oryza sativa
ccacgcgtcgcaatataatagccgcgcttagcgtaactagacgaacgtactagcagaagaagaagaagaaaatgccggtgagccggatcgcggtgggcgcccccggcgagctgtcccacccggacacggccaaggccgccgtcgccgagttcatctctatgctcatcttcgtcttcgccggatcgggatccggcatggccttcagcaagctgacggacggcggcggcacgacgccgtcggggctgatcgccgcctccctggcgcacgcgctggccctgttcgtggcggtggcggtgggagccaacatctccggcgggcacgtgaacccggcggtgacattcggcgcgttcgtgggggggaacatcagcctggtgaaggcggtggtgtactgggtggcgcagctgctggggtcggtggtggcgtgcctgctgctcaagatcgcgacgggcggcgccgccgtgggtgccttctcgctgtcggcgggcgtgggcgcctggaacgcggtggtgttcgagatcgtcatgaccttcggcctcgtctacaccgtgtacgccaccgcggtggatcccaagaagggcgacctcggtgtcatcgcccccatcgccatcggcttcatcgtcggcgccaacatcctcgccggcggcgccttcgacggcgcctccatgaaccccgccgtctccttcggccccgccgtcgtcaccggagtctgggacaaccactgggtctactggctcggccccttcgtcggcgccgccatcgccgcgctcatctacgacatcatcttcatcggccagcgcccgcacgaccagctgcccaccgccgactactgatcatatcatatcatatcgtctgctcccagtctcaataatcgaattcgtcccccgtctcgatccatatatagctagaatattaattactccatgcagctgctacctgtgtcgtcttccacccccaatcaattactactctcttcttctgtacaaacaaattacgtaaatctcctttaattccaaaatctgtgctgtgctgtcaaccaagccaaccatgcattgcagctgtaacgtcgtccatccatcggttgtctcatctgcaatataatgtcaacacatcccatgcatcctaatccaaagctctcttcactgtcgttcttcacgtccttgtttgagttggtggaaagatatatacatacccgctgcgtttgcaccatcaaaa

SEQ ID NO: 385918 - DNA, 503 bp, Oryza sativa
  unsure (1)..(503): unsure at all n locations
cacacaccactccatttctgagctcttctagtttgagtgagagagcagcagaagggagtagtgcaagatgccgatccgcaacatcgccgtggggagccaccaggaggtgtaccacccgggtgcactcaaggcggcgttggccgagttcatctccaccctcatcttcgtcttcgccggccagggctccggcatggccttcagcaagctgaccggcggcggacgacgacccccgccgggctgatcgcggcggcggtggcccacgccttcgccctgttcgtggcggtgtccgtcggcgccaacatctccggcggccacgtgaacccggccgtgaccttcggcgccttcgtcggcggcaacatcaccctgttccgcggcctcctctactggatcgcccagttcttgggttcaacgtggcgtgtttcttcttcggttttcaacggngggttgcaacggaactttggcttaccggggtttcgtttgaaggcttgtnttgagattgtata

SEQ ID NO: 385919 - DNA, 1388 bp, Oryza sativa
  unsure (1)..(1388): unsure at all n locations
ggccgccgcaaaacccggggcgcgagcccgggcggagcggccgtcggtgcagatcttggtggtagtagcaaatattcaaatgagaactttgaaggccgaagaggagaaaggttccatgtgaacggcacttgcacatgggtaagccgatcctaagggacggggtaaccccggcagagagcgcgaccacgcgcgtgcccccgaaagggaatcgggttaagatttcccgagccgggacgtggcggttgacggcgacgttaggaagtccggagacgccggcgggggcctcgggaagagttatcttttctgcttaacggcccgccaaccctggaaacggttcagccggaggtagggtccagcggccggaagagcaccgcacgtcgcgcggtgtccggtgcgcccccggcggcccttgaaaatccggaggaccgagtaccgtccacgcccggtcgtactcataaccgcatcaggtctccaaggtgaacagcctctggccaatggaacaatgtaggcaagggaagtcggcaaaacggatccgtaacttcgggaaaaggattggctctgagggctgggctcgggggtcccggccccgaacccgtcggctgccggcggactgctcgagctgctcgcgcggcgagagcgggccgccgcgtgccggccgggggacggaccgggaaacggccccctcgggggccttcccccgggcgtcgaacagccgactcagaactggtacggacaaggggaatccgactgtttaattaaaacaaagcattgcgatggtcctcgcggatctgacgcaatgtgatttctgcccagtgctctgaatgtcaaagtgaagaaattcaaccaagcgcgggtaaacggcgggagtaactatgactctcttaaggtagccaaatgcctcgtcatctaattagtgacgcgcatgaatggattaacgagattcccactgtccctgtctactatccagcgaaaccacagccaagggaacgggcttggcggaatcagcggggaaagaagaccctgttgagcttgactctagtccgactttgtgaaatgacttgagaggtgtaggataagtgggagccctcgggcgcaagtgaaataccactacttttaacgttattttacttattccgtgagtcggaagcggggcctggcccctccttttggctctaaaggcccgagtccctcgggccgatccgggcggaagacattgtcaggtggggagtttggctggggcggcacatctgttaaaagataacgcaggtgtcctaagatgagctcaacgagaacagaaatctcgtgtggaacaaaagggtaaaagctcgtttgattgatcnttgcgtcggccatcacttcgattcggcncgtnccgaatcctgcagccc

SEQ ID NO: 385920 - DNA, 1296 bp, Oryza sativa
  unsure (1)..(1296): unsure at all n locations
cttctttaaggnttaaggccccnaaaattggcccttccgtccaattcttaaatttaagtgacgccggcaatgaaattggatttaaacgaagatttcccactgtccctgtctactatccagcgaaaccacagccaangggaacgggcttggcggaatcagcggggaaagaagaccctgttgagcttgactctagtccgactttgtgaaatgacttgagaggtgtaggataagtgggagccctcgggcgcaagtgaaataccactacttttaacgttattttacttattccgtgagtcggaagcggggcctggcccctccttttggctctaaggcccgagtccctcgggccgatccgggcggaagacattgtcaggtggggagtttggctggggcggcacatctgttaaaagataacgcaggtgtcctaagatgagctcaacgagaacagaaatctcgtgtggaacaaaagggtaaaagctcgtttgattctgatttccagtacgaatacgaaccgtgaaagcgtggcctatcgatcctttagaccttcggagtttgaagctagaggtgtcagaaaagttaccacagggataactggcttgtggcagccaagcgttcatagcgacgttgctttttgatccttcgatgtcggctcttcctatcattgtgaagcagaattcaccaagtgttggattgttcacccaccaatagggaacgtgagctgggtttagaccgtcgtgagacaggttagttttaccctactgatgaccgtgccgcgatagtaattcaacctagtacgagaggaaccgttgattcacacaattggtcatcgcgcttggttgaaaagccagtggcgcgaagctaccgtgtgccggattatgactgaacgcctctaagtcagaatccaagctagcaagcggcgcctgcgcccgccgcccgccccgacccacgttaggggcgcaagcccccaagggcccgtgccaccggccaagccggcccggccgacgcgccgcggccggccgcctcgaagctcccttcccaacgggcggcgggctgaatcctttgcagacgacttaaatacgcgacggggcattgtaagtggcagagtggccttgctgccacgatccactgagatccagccccgcgtcgcacggattcgtaaaaaaaaaaaaacacagatcccccggatactacgatggcaggtactggaccatgtggaagctgcccatgttcgggtgcactgacgccacccaggtgctcaaagagctcgaggaggccaagaaggcgtaccctgatgca

SEQ ID NO: 385921 - DNA, 794 bp, Oryza sativa
  unsure (1)..(794): unsure at all n locations
ccacgcgtccgcccacgcgtccgcccacgggtccgcccacgcgacccgccacgcgtccgcgaaactcagctgcaaggagaaggagaaggtaggctccagccatggcttcccagctctccgccgccacatccgtgccgcagttccatggcctccggacctactcctctcctaggtccatggtgacgctgccatcgttgaggatgagcaagaagaggtcccagggcatccggtgcgactacatcggctcagccaccaacgttatcatggtgacgacgacgacgctgatgctgttcgcggggaggttcgggctggcgccgtcggcgaacaggaagtcgacggcggggctgaagctggaggcgcgcgactccggcctgcagaccggcgaccccgccgggttcacgctcgccgacacgctggcctgcggcgccgtcggccacatcatgggcgtcggcgtcgtcctcggcctcaagaacatcggcgtcctggaccagatcatcggctaatcaaattcattaagctagtcacacgaatcaatactcctatgtgtaatcgatgcatgagtgcctgtgtgatggacgatgtaatgatcatgtaaattgtgcgtggaatcagtgcttatctagcttaattttgtttctgtcaaccaatggaatgtttcttgatgcagagctttgttgttggatcttcgaggaagaaaatgtttttgattgcttggttttaaagttctaaacacgaaaccttttcctcttaatgtttnnnnnnnnnnnnnnnnnnnnnnnnnnnnnnnnnnnnnn

SEQ ID NO: 385922 - DNA, 1321 bp, Oryza sativa
  unsure (1)..(1321): unsure at all n locations
ccacgcgtccgcttcattgatgaaattgatgccgtcgggaggcagcgtggtgctgggctcggagggggaaatgatgagagggagcagaccattaaccagctcttgactgagatggatggatttgccggcaatagcggtgtcattgtgctcgccgcgacaaacaggcctgatgtgctcgacgcggctcttcttcgccctgggaggttcgatcggcaggtcaccgtagacaggccggatgtcgccgggcgtgtcaagattcttgaggttcactcgagaggaaaggctctggcaaaagatgtcgactttgagaaaattgcccggagaacccctggtttcactggagctgatcttcaaaacttgatgaatgaggctgctattcttgctgctcgtcgtgatctgaaggagattagcaaggatgagatctctgatgctttggagaggatcattgctgggcctgagaagaaaaatgctgttgtttcagaagagaagaggagacttgtggcttaccatgaggctggtcatgcccttgttggtgccctcatgcctgaatatgaccctgttgctaagatttccatcattcctcgtggtcaagctggtggactcacattctttgctccaagcgaggagaggcttgagtctggattgtacagcaggagctacctagagaaccaaatggccgtagctcttggtggaagggttgccgaagaggtgatctttggccaagaaaatgtgacaactggggcctccaacgattttatgcaggtttcacgtgttgcaagacaaatggttgaaagatttggattcagcaagaagatcgggcaagttgcgattggtggacctggtggaaatcctttcttgggccagcagatgtcgagccagaaggactactcgatggccaccgcggatgttgtggatgctgaggtgagggagctcgtggagaaggcctactcaagagcaacgcagatcatcacgacacacatcgacatcctccacaagcttgctcagcttctgatggagaaggagacggtggacggggaagagttcatgagcctgttcatcgacggtcaggcagagttgtttgtcgcttaattgcgttgtatgttcatccccttgggtgaaatggagaaggcgaatttgtaggaagcacatcaatttaggcgagatgtttttgcatatacttgtatagttcattgtaaagaatggcaaatactgacattgatcaagtaaacagttggtgcttacgattatagcaccgctaactaaacannnnnnnnnnnnnnnnnnnnnnnnnnnnnnnnnnnnnnnnnnnnnnnnnnnnnnn

SEQ ID NO: 385923 - DNA, 872 bp, Oryza sativa
  unsure (1)..(872): unsure at all n locations
nnnnnnnnnnnnnnnnntttgaagaaattgaagcaaacaaattataaggttaagatcaccatcaacctttgaaaaaacaactttgcataagcatctactacatccagcagcatgaaacataatgttcaaggtatcagactttggaagatacttaaatactaggccaaacggttcgtatttcaaaattcagctaacacctccactggtttcactaagacgaccacacttcaagccaggtgttcacttctttgccttcttaggtgccgctgcagtttgagcaggagctgccgctgcaggagctgctggctctcttgggccctgagccaacctctcctccctcctggcaatcttcctctcacggcttgccttgctcttggcacgcttagcctcaaactggtcagagagtgtcttctctcttgccttctcagccttagacttgtggatactttccatgaagaacacgcttgttcttgaacatgttacccttgaccttcatgtacatgtcatgatacatgtgcttgtcaatcttcttggcctcacgatacttgcgcagcaaacgcctgagcacacgcatcctcctcatccacaggatcttggcggggagcctagcctccctggtacccctacgcttgccatagccagagtgacgtccccgctgcttggcctcatgggctctccgtgcacggggacctggagtgaatcttctggggcttcttgataatgaaaccctccctgacccacctcggaatgttctaccggaagtggcccatgaggatctcgttgcccccatgggggtcgagccagacctggcccttgccgcatttgagcacgctggaggcgagccgcttctgcagcttgagggaaaccatcgc

SEQ ID NO: 385924 - DNA, 688 bp, Oryza sativa
  unsure (1)..(688): unsure at all n locations
gactagttctagatcgcgggcggccgcccttttatttttttcctcgaaactcagctgcaaggagaaggagaaggtaggctccagccatggcttcccagctctccgccgccacatccgtgccgcagttccatggcctccggacctactcctctcctaggtccatggtgacgctgccatcgttgaggatgagcaagaagaggtcccagggcatccggtgcgactacatcggctcagccaccaacgttatcatggtgacgacgacgacgctgatgctgttcgcggggaggttcgggctggcgccgtcggcgaagcaggaagtcgacgggcggggctgaagctggaggcgcgcgactccggcctgcagaccggcgaccccgccgggtttcacgctcgccgacacgctggcctgcgggcgccgccggccacatcagtgggctgtctgagcgtcagtcctctggcctcagagaactatacggcgtctctggacccagaatcatcggcttaatcaaattcattaagctagtcacatcgaatcaatactcctatgtgtaatcgatgcatgagtgcctgtgtgatggcacgatgtaatgatcatgtncattgtgcgtggaatcagtgcttatctagcttaattttgtatctgtctaaaaaaaaaataaaagggcgatcgctatagaggatccaagct

SEQ ID NO: 385925 - DNA, 602 bp, Oryza sativa
cgcaaaacccggggcgcgagcccgggcggagcggccgtcggtgcagatcttggtggtagtagcaaatattcaaatgagaactttgaaggccgaagaggagaaaggttccatgtgaacggcacttgcacatgggtaagccgatcctaagggacggggtaaccccggcagagagcgcgaccacgcgcgtgccccgaaagggaatcgggttaagatttcccgagccgggacgtggcggttgacggcgacgttaggaagtccggagacgccggcgggggcctcgggaagagttatcttttctgcttaacggcccgccaaccctggaaacggttcagccggaggtagggtccagcggccggaagagcaccgcacgtcgcgcggtgtccggtgcgcccccggcggcccttgaaaatccggaggaccgagtaccgtccacgcccggtcgtactcataaccgcatcaggtctccaaggtgaacagcctctggccaatggaacaatgtaggcaagggaagtcggcaaaacgaatccgtgcgacgcggggctggatctcagtggatcgtggcagcaaggccactctgccacttacaatgccccgtcgcgtat

SEQ ID NO: 385926 - DNA, 1484 bp, Oryza sativa
  unsure (1)..(1484): unsure at all n locations
ntccgcagtagcagcatcagcntngccatggaaggagagagaaagagagagagatcttagcttgcttggcgccaataaataggagcccgggtcatcngcgaatccattgccattgcagttgtatccttcttcttcttcttctttctctactcacctgcatctgtagagagagagagagagagagagagagagagagagagatggcaggaggtgacaacaactcccagaccaccaatggcggctcaggtcacgagcagagagccatggaggaaggcaggaagcaggaggagttcgccgccgacggccagggctgcggcctcgccttctccgtccctttcatccagaagatcatcgcggagatctttgggacatacttcttgatcttcgcggggtgcggggcggtgacgatcaaccagagcaagaacgggcagatcacgttcccgggggtggcgatcgtgtgggggctggcggtgatggtgatggtgtacgccgtggggcacatctccggcgcgcacttcaaccccgcggtgacgctggcgttcgcgacgtgccggaggttcccttggcggcaggtgccggcgtacgcggcggcgcagatgctgggcgccaccctcgccgccggcacgctccggctcatgttcggcggccgccacgagcacttccccggcacgctccccgccggctccgacgtgcagtcgctcgtcctcgagttcatcatcaccttctacctcatgttcgtcatctccggcgtcgccaccgacaaccgagccatcggggagctggcagggctggccgttggtgcaaccatcctgcttaacgtgctgattgctgggccgatctcgggagcatcgatgaacccggctcggagcctggggccggcgatgatcggcggcgagtacaggtcgatctgggtgtacatcgtcgggccggtcgccggcgcggtggccggagcttgggcctacaacatcatccgcttcaccaacaagcccctccgggagatcaccaagagcggctccttcctcaagagcatgaaccggatgaactcctccacctaacctctatctagctaaccaccaagaaccctaattaattactactgccagtactactactgctactttctgttcgagatcgatatcgagatgcttgatcgatgcaccgcatcgcatttaaaagggaagagatggatgaactactatttgtgacgtacacatatatagtagtaatttaattagcgttagttcgttgtcgtctcggctacgtgccacaaggcctcctttgtaacgcaggaattttataggaattctgtgatgtgtgtttttagatgtggggattcctataaaattcgtgtggaacttctctgcctcctatatatgtagaacttaaaaaatctatgtatatgtgtgtgtggaatagtatgttttggaccacgtgataaaattgcagagtgtttacttgcagattatggttttcttttnnnnnnn

SEQ ID NO: 385927 - DNA, 533 bp, Oryza sativa
cggcaaacccagcctagggcgaagggaagaaggagaagaagatggtggagaagaagggaggagcggcgaggaaggaggaggtggtgacgagggagtacaccatcaacctccacaagcgcctccacagctgtacattcaagaagaaggcgcccaatgccatcaaagagatcaggaagtttgcgcagaaggctatgggcactacagatgtcagggtcgatgtgaagctcaacaagcacatctggagcagtgggatcaggagtgtgccgcggagggttcgtgtgaggatcgcccgcaagaggaatgacgaggaggatgccaaggaagagctctactctctggtcactgtggccgaggtccctcctgagggtttgaaggggctgggaaccaaggttgttgacgaaacggattaagctttaccttctctgcatctttagaatgagtttagtttgaattgcaacatcaaactttattttggcaaatcagaagttttggactatagcacatcgcaagctgtctatcttcgtatatattcc

SEQ ID NO: 385928 - DNA, 606 bp, Oryza sativa
  unsure (1)..(606): unsure at all n locations
gcagccgccgccgccgcctctctcactgccgccgccgccgcctgcctcgtactccaactcttcggcgactagatgacgaagcgcaccaagaaggcaggaatcgttggcaaatatggtaccaggtatggtgccagtttgcgtaagcagatcaagaagatggaggtttcccagcactccaagtacttctgcgagttctgtggcaagtttgctgtgaagaggaaagcagttggaatctggggatgcaaggactgtggcaaggtcaaggctggtggtgcctacaccatgaacactgccagtgcggtcacggtcagaagcacaatccgtcgcctgagggagcagacagaagcctgatcaggatctgtttgagaaagtgttcttggagttctatcaagactggtgaagttgccattttgcatatttagctaaaaagagaaatctagaatgttatctatctatttgtagatggaatatctgtccgcattgtgtacttgatttcccaagctaattttatcaaatgcgagcacttgatttgcgatccaaattcttaattctctgaacaaatgcgagnatttccaagatttgccnnnnnnnnnnnnnnnnnnnnnn

SEQ ID NO: 385929 - DNA, 621 bp, Oryza sativa
  unsure (1)..(621): unsure at all n locations
ccacgcatccgcccgcgcgccgccgcctccccggacctcgccgccgcttgccgcagacgcctccgttccagcccccgtcgacgagatgacgaagcgcaccaagaaggctggaattgttggcaaatatggtactaggtatggtgccagtttgcgtaagaaattcaagaagatggaggtttctcagcactccaagtacttctgtgagttctgtgggaagtttgccgtgaagaggaaagcagttggaatctggggatgcaaggactgtgggaaggtgaaggccggtggtgcttacaccatgaacactgctagtgcggtcactgtcaggagcacaatccgtcgtctgagggagcagactgaagcctgattgcactacgtttgtgccgtaaggagtcctgtggattctgtatcgagtcaagacctatattgggctgttggagccaaagcacatcgtttaagcatttttgttctctactttaggatctcctaaagcatgttggctaaaaacctgtacttttgaagccattgtggaacttaaaatcacgttacctgcgatccaaaatatttgaatgagcgctttgccgggcgccaaaacttgtttttttaaaaaaggnaaaaaaaaaa

SEQ ID NO: 385930 - DNA, 661 bp, Oryza sativa
  unsure (1)..(661): unsure at all n locations
aagtcgatgangcnggcaacatatgntgtatatggaccngttaattagtcgttgagtggggatggncgatacatttanacngaacagtagactgtacgcaagttgaataacctcataaggggacaaagtggagtccaccgcggtggcgccgntttagaattagtggatccccngggtgcaggattcggcacgagaaggacggaggtcggtgcggatcaagaggaccaaggacgcgtcaagttcaaggtgcgctgctccaagtacctctacaccctctgcgtcttcgacgccgacaaggccaacaagctcaagcagtcgcttcccccgggtttgactgtccaggaggtttaagcatcaaagccagaccatgctgtttgtagcagcaggattgcttgctcccgttcgcattagtagctattagatgctgaaattttatctgtcttgagttttgaatgtaacacccaaagtttatgtgctgaaccttcttcgagtcagattgcgctgttactcctttctggagatagctaccagtcgtactgtccctaaacacactgaattttgctccatttctctctaattgctggagtaaaaaaaaaaaaaaaaaaactcgagggggggcccggtacccaattcgccctatagtgagtcgtattacaatttn

SEQ ID NO: 385931 - DNA, 619 bp, Oryza sativa
  unsure (1)..(619): unsure at all n locations
ccacgcgtccgcccacgcgtccgcttctccacctgcgccgccgcagcctcctcaactcaactctcttcggcagcgagcagcagcgccttccaccatgccgaagcagatccacgagatcaaggacttcctcctgacggcgaggaggaaggacgcgaggtcggtgcggatcaagaggaccaaggacgccgtcaagttcaaggtgcgctgctccaagtacctctacaccctctgcgtcttcgacgccgacaaggccaacaagctcaagcagtcgcttcccccgggtttgactgtccaggaggtttaagcatcaaagccagaccatgctgtttgtagcagcaggattgcttgctcccgttcgcattagtagctattagatgctgaaattttatctgtcttgagttttgaatgtaacacccaaagtttatgtgctgaaccttcttcgagtcagattgcgctgttactcctttctggagatagctaccagtcgtactgtccctaaacacactgaattttgctccatttctctctaattgctggagtgtttcatatttgttcaaaaannnnnnnnnnnnnnnnnnnnnnnnnnnnnnnnnnnnnnnnnnnnnnnnnnnnnnnnnnn

SEQ ID NO: 385932 - DNA, 507 bp, Oryza sativa
ggattggtgcagcctaaagaccagccaacttacaaccctgtaatacacacaattgagctgtctatagttcatcctgaatttatatatgttttttacattgccttctgtgctttactgtttttatcactgacacataaggtacaaaatttcttttgttgaattgaccagccattgttagctgttactgattgtgaatttcttttttcaggtttgactgtccaggaggtttaagcatcaagacagactatgctgttggtagccccaggaatgtttgctccagttcgctttagtagctattagaaggtgaaatttatatgctgggttttgaatgtaaccccaaaagtttgtgtggtgagccctgctgtttctccctgctggacttatctaccgctcgtattgtcccgaattagactgaattttgaatcatttccccctggatgctgaagagtgttgtctatgcttgttagaaaataaagaataattcttttaaaaaaagggcggccacgc

SEQ ID NO: 385933 - DNA, 608 bp, Oryza sativa
  unsure (1)..(608): unsure at all n locations
tcccggtcgacccacgcgtccgcacccctcgccgccgccgccgccgccgcctccgtcgtcttctgccgccgagcagcagcagcagtgccttccaccatgccgaagcagatccacgagatcaaggacttcctcctgacggcgaggaggaaggacgcgcggtcggtgcggatcaagaggaccaaggacgccgtcaagttcaaggtgcggtgctccaagtacctctacaccctctgcgtcttcgacgccgacaaggccaacaagctcaagcagtcgctccccccaggtttgactgtccaggaggtttaagcatcaagacagactatgctgttggtagcaccaggaatgtttgctccagttcgctttagtagctattagaaggtgaaatttatatgctgggttttgaatgtaacaccaaaagtttgtgttgagccttgctgtttctccttgctggacttatctaccactcatattgtcccaaatagactgaattttgaatcatttctccctggttgctggagagtttcgtatttgttttgaactcaatttttacttctgaaattgtgttgacagagctgtnnnnnnnnnnnnnnnnnnnnnnnnnnnnnnnn

SEQ ID NO: 385934 - DNA, 723 bp, Oryza sativa
  unsure (1)..(723): unsure at all n locations
cacccgccgcgcttaatcccccgcttacagggcgcntcccattcgccatttcagctccgcaactgttgggaaggccnatcggtgcggccctcttcgctattacccagctggcgaaagggggatgtgctgcaaggcgattaagttgggtaacgccagggttttcccagtcacgacgttgtaaaacgacggccngtgagcgcgcgtaatacgactcactatagggcgaattgggtaccgggccccccctcgaggtcgacccacgcgtccgctagggtttcgccgccgcctcttcgtccccgccgcgacgatgccgtcccacaagaccttccgcatcaagaagaagctggcgaagaagatgcgccagaaccgccccatcccctactggatccgcatgcggaccgacaacaccatcaggtataacgcgaagcgcaggcactggcgccgcaccaagcttgggttctgagcaggaggtggcaccggctgctgcctgcggattttgttttatggatgtttcagtgtttatgcaagcttaggatgtgattccatgatgctttttattaaggttttctgaaatgttaagggtagtagtactctggtttactgaggataccatgctatgctgtgctgagtaaaagaaccattctaatatatctgccttgttgaagttactcaggattataaaaaaaaaaaaacggccggccgctcggacgcgtgggtggacaa

SEQ ID NO: 385935 - DNA, 541 bp, Oryza sativa
  unsure (1)..(541): unsure at all n locations
ccacgcgtccgcggacgcgtgggcggacgcgtgggcggacgcgtgggggtttcctcgcgccgccgccgccgccatgccgtcgcacaagacgttccagatcaagaagaagctggcgaagaagatgcgccagaaccgccccatcccgtactggatccgcatgcgcaccgacaacaccatcaggtacaacgcgaagcgcaggcactggcgccgcaccaagctcgggttctgagcttggggaggagaggaggacgaggcgccggacgccgctgccctgggaagaagaagaagaaggagaagctagggcttatgggttgcgtcgtgttcgtttcgaggttttgcctgtcctgaagagactatcagtagctgtgtgtatcttggagcatcataattttgctgattaaagaaccactttcttatcctgcctaaagttgtctgaattttatctcagctgcagtggattgatcagttgaactcccttgttagcataatctgaatatctgattatctgcaaaaaaaaaaaaaaaaaannnnnnnnnnnnnn

SEQ ID NO: 385936 - DNA, 623 bp, Oryza sativa
  unsure (1)..(623): unsure at all n locations
ngggcgctggcaagtgtagcggttcactgcgcgtaaccaccacacccgccgcgcttaatgcgccgctacagggcgcgtcccattcgccattcagntgcgcaactgttgggaagggcgatcggtgcgggcctcttcgctattacgccagctggcgaaagggggatgtgctgcaaggcgattaagttgggtaacgccagggttttcccagtcacgacgttgtaaaacgacggccagtgagcgcgcgtaatacgactcactatagggcgaattgggtaccgggccccccctcgaggtcgacccacgcgtnccgcgcgaagcgcaggcactggcgccgcaccaagcttgggttctgagcaggaggtagcaccggttgctgcctgcggaggctagggttactgagttatctgcatcattttgttttatggatgtttcagtgtttatgcaagcttaggatgtgattccaggatgctttttattaaggttttctgaaatgttaagtgtagttgtactctggtttactgaggataccatgctatgctgtgctgagtaaaggaaccattccaatatatgtcctttttgacgttaccccccccccctttcnnnnnnnnnnnnnnnnnnnnnnn

SEQ ID NO: 385937 - DNA, 505 bp, Oryza sativa
  unsure (1)..(505): unsure at all n locations
cccccctcgaggtcgacccacgcgtcttcgccgccgccgccgccgcttcttcgtccccgccgcgacgatgccgtcccacaagaccttccgcatcaagaagaagctggcgaagaagatgcgccagaaccgccccatcccctactggatccgcatgcggaccgacaacaccatcaggtacaacgcgaagcgcaggcactggcgccgcaccaagcttgggttctgagcaggaggtagcaccggttgctgcctgcggaggctagggttactgagttatctgcatcattttgttttatggatgtttcagtgtttatgcaagcttaggatgtgattccaggatgctttttattaaggttttctgaaatgttaagtgtagttgtactctggtttactgaggataccatgctatgctgtgctgagtaaaggaaccattccaatatatgtcttttgaagttatttcacaggcttattctgtttcaaaaaaaaaaaaaaaaannnnnnnnnnnnn

SEQ ID NO: 385938 - DNA, 530 bp, Oryza sativa
  unsure (1)..(530): unsure at all n locations
gggggcgggcgtccgccacgcgtcgcctcctgcgcctccgccgccgccgccttcttcgtctgctgagttcgtagatcagctcgagctcgccgccatgtcgtccagcgaggtcgcctgcacgctcgccgccctcatcctccacgacgatggcatccccatcacctctgagaagatcgccaccctggtgaaggcggccaacatcaaggtcgaggcctactggcccggtctcttcgccaagctcctcgagcaccgcagcgtcgatgacctcatcctctccgtcggatctggtggtggtgctgctccagttgctgctgctgctgcccctgctgctggcggtggtgctgctgctgccccagctgccgaggagaagaaggaggaggcgaaggaggagagcgacgatgacatgggtttcagcttgttcgactaagcaagtccacagatgttaagccagtccgcctatgcttttcaagacttatcttatgttgtggtcttttaagggtcanttaaagtactttnaagttttaagtttg

SEQ ID NO: 385939 - DNA, 1747 bp, Oryza sativa
ccacgcgtccgctttaattgctgcagcacaattgtcataccagtatatcagtgatcgcttcctgcctgataaggctattgacttgattgatgaagcaggatctcgtgttaggctcaggcatgcacagctccctgatgaagccaagccgctggacaaagagcttcgacaggtaaccaaagacaagaacgaggctgtacgtggccaagattttgaaaaggctggggaattaagagatcgggaaatggaattgaaggcccaaattacagccattattgacaagagcaaggaaatggttaaagcagagactgaatccggtgaagtcggtccccttgttactgaggcagatattcagcatatcgtgtcctcttggactggaatacctgtggagaaagtctcatctgatgagtctgaccgtctccttaagatggaggagacactccatacgcgtatcattggtcaggatgaggctgtcaaagctattagccgtgccatccgccgtgctcgtgttggcctcaagaacccaaatcggcctattgctagcttcatcttctctggaccaactggtgtcggtaaatcagagttagcaaaggctcttgcagcctactactttggctcagaagaggccatgatcagactagacatgagtgagttcatggagaggcatacagtctccaagctcattggatcacctccaggttatgttggttacacttgagggtggtcaactgacagaagcagttcgccgccgaccatacaactgttgttctcttcgatgagattgaaaaggcacatcctgatgtcttcaacatgatgcttcagatcttagaagaatggaagactaactgacagcaagggtcggactgttgatttcaagaacacactgttgatcatgacatcaaatgttggaagcagtgtcattgagaagggaggacggaagattggatttgaccttgactatgatgagaaagacaccagctacaataggattaagagcttggtgactgaagagctgaagcagtacttccgacctgagttcttaaacagattggacgagatgattgtgttccggcagcttaccaagctggaggttaaggagattgctgatattatgctcaaagaagtgtttgacaggctcaaggcaaaggacatcgacctccaggtgacagagaagttccgggatagagttgtcgacgaaggttacaacccaagctatggtgccaggcctctgcggcgtgctattatgaggcttctggaggacagcttggcggagaagatgttggctggcgaggtcaaggaaggtgactctgctattgttgatgtggattcagagggcaaggtgatagttcttaacggtggtagtggtgttccggaaccactggcacctgctctgagtgtctaattgaaggataatatcgtcgttctggaattatggccttttctcttctctcagctggggcgctcatgatggtaaaactagatggcataaattctcccttcatttaggtgctttcacttttcctctttttttccaacagaggcagtaggaatgttatggaaatgaatcaacagagatgcatttagcaaacaaactgtatgctagatcttgagttgcttttatttttaaaaggatgtcagaagctttactccttcaagtacgtgtatttattcttttggtagcagtaagataaacgctgcactgttgtacctgtacattacctcgcaccccatggcttccaatactttttaa

SEQ ID NO: 385940 - DNA, 973 bp, Oryza sativa
cggaattatacgggcgacgccccacgcgcccgctcgtttagggtttccctccgccgccgccgcctcccgcatccacgcgcctcctcctcctccgccgccgccgccgccaccgcagcatcagccatggccgaagtggagctcccgcagcaggaggtcaagctcttcagccgctggtccttcgaggacgtccaggtgaacgacatctcgctggcggactacctggcggtgaacccgacgaagcacgcgacgtacctgccgcacacggcggggaggtactcggcgaagaggttccggaaggcgcagtgccccatcgtggagcgcctgaccaactcgctcatgatgcacggccgcaacaacgggaagaagatcatggccgtgcgcatcgtcaagcacgccatggagatcatccacctcctcaccgacgccaaccccattcaggtcatcgtcgacgccatcatcaacagtggccctcgtgaggatgcgacccgtattgggtctgcgggtgctgtgaggaggcaggctgtggatatctctcccttgaggagggtcaaccaggcaatctacctcctcaccactggtgccagggagagcgccttcaggaacatcaagaccattgctgagtgccttgctgacgagcttattaatgccgccaagggctcatccaacagctatgccatcaagaagaaggatgagatcgagcgtgttgccaaggccaaccgttgagtggtgatcccatgtcattgtgctaaagctcttgcgctgtttggcaggactatactttttgctagtaatttaagccttttcagacctacctgtggtttaatgtttgaatgaacatcactagtgctgagaaaaatatgtagtgctctattctatctatctatcgacatggttttatattgaacccgcaattcccgttccttcataatctgagttccttgatgcgtgctgaatggctctgctctggttatat

SEQ ID NO: 385941 - DNA, 522 bp, Oryza sativa
gctactccacccactcttgtttagggtttccctcagccgccgccgccgcatccacgctcagcagccatggcggtggtcgagcagccgcagcagcaggtggtgaagctcttcaactgctggtccttcgaagacgttcaggtgaacgacatatccctcgccgactacctcgcggtgtcctcgacgaagcacgccacctacctgccgcacacggttggccgctactcggcgaaggcttccgcaaggcgcagtgccccctcgtggagcgcctcaccaactccctcatgatgcacggccgcaacaacggcaagaagatcatggctgtccgcatcgtcaagcacgccatggagatcatgcacctgctcaccgacgccaaccccatccaggtcatcgtagatgccatcatcaacagcggcccgcgtgaggacgcaacccgtatcggctctgctggcgctgtgaggaggcaggctgtggatatctctcccttgaggagggtcaaccaggcaatctacctgctcaccactg

SEQ ID NO: 385942 - DNA, 826 bp, Oryza sativa
  unsure (1)..(826): unsure at all n locations
tcccgggtcgacccacgcctccccgccgcctccgccttcgcaagcctcgcctccactccccgcgccgccgccgccgccgccgactcgccggtcgtcaccctcgccccgcagccatggctgagcagactgagaaggctttcctgaagcagccaaaggttttcctcagctcaaagaagtctggcaagggtaagaagccaggcaagggtggcaaccgcttctggaagagcattggccttggcttcaagacccccagggaagcaattgaagggacatacattgacaagaagtgcccattcactggaactgtttctatcagaggcagaatcattgctggaacatgccacagtgccaagatgaacagaactatcattgttcgcaggaactacctccattttgtcaagaaatatcagaggtatgagaagaggcattccaacattccggctcacgtctccccatgcttccgtgtcaaggaaggtgaccatgtcatcattggccagtgcaggccgctgtcgaaaactgtgaggttcaacgtcctgaaggtcatcccagctggatccaccggcggcagcggcggcaagaaggccttcaccgcagcatgagcttgtactcgcattattcatgggtagtttatagacagatccttttgcttgaagtcctggcagggctggtgttttgaccctatcgatttggatattgttcccaacaaaacgaagtcttatcatcagaacgtgttttatggaatctactctatgcaaagttttgttaagatgcctgttaatgctcgatatgctgtgatccttgnnnnnnnnnnnnnnnnnnnnnnnnn

SEQ ID NO: 385943 - DNA, 456 bp, Oryza sativa
cttcttagcaaagcctcgtctccactcccctcccctcccgcctctccggatcccccgcgcgccgcgcgccgcccgcccgccggtcgatacccctccgcggcagcatggctgagcagactgagaaggcattcctgaagcagccaaaggttttcctcagctcaaagaagtctggcaagggtaagaagccaggtaagggtggcaaccgtttctggaagagcattggccttggcttcaagactcccagggaagcaattgaagggacatacattgataagaagtgcccattcactggaactgtttctatcagaggcagaatcattgctggaacatgccatagtgctaagatgaacaggactatcattgttcgcaggaactacctccactttgtgaaggaatatcagaggtatgagaagaggcattccaacattcgggtcaacgttttccatggcttcgtgt

SEQ ID NO: 385944 - DNA, 1672 bp, Oryza sativa
  unsure (1)..(1672): unsure at all n locations
nnnnnnnnnnnnnnnnnnnnnnnnnnnnnttttgcaccagggaactatttttgtttttaaaaaccaaaacataggaggtttcatttcttcttctcaaagtagtgtagcatctttccttctttcaccattacataagcttaagcaataacagataacaaatcctcctcctcctctaggtaaaatattcaaacacaatacccttataagtacttattattaggaaagtagcgtgcatgggcataaatggcagcggggggcaggttaagaatcacaatgctgagcagcgaggaaacaaaacaccataatgggacagagcaaaagcctccgaaagggagcttttaggcagaaggcttctcccacttgaggggcttcaccacctcccaggtgaagtctgggtcgtcccttccgaagtgaccgtaagccgccgtcttgaggtagcgtccgttgccgcctttcttgaggtcaaggttgatgatgatcatgccaggcctgaagtcgaagttctccttcacaatcttgaggatctccttgtcagggatcctgccagtgccgtatgtgtcgacgaatacggacagtggctctgggacaccgatggcgtatgatacttggacaatgcagcggcgagcaaggccactagcaacaatgctcttggcagcttgccttgcgacgtatgctccactgcggtcaaccttggttgggtccttgccagagaaggcaccaccaccgtgagctccccagccaccataagtgtcaatgatgatcttccggccagtgagaccagcatcaccatgaggtccgccaatgacgaagcgaccagatgggttaagatggaagattgtcttctcatcaaggtactgctcgggaatgacaggcttgatgacatgctccttcaggtcagcagcaatctcatcgttggtgactgtctcatcatgctgggtagagatgaggacggtgtggacacggacagggaccctggcaccgctctcattgcggtactcaacagtcacttgggtcttcccgtcaggcctgagccatgcgcaggtcccattcttgcgaacctccgtaagacgagcgccaagcttggtagcaaggacatggctgaggggcatcaactcaggggtctcatcagttgcatatccaaacatgtgtccctggtcaccagcaccaatctcctcagggcgcttggtgaagtggccgtgcacaccctgtgcaatgtcaggggactgctgctcgatgttcacaagcaccttgcagtggtcagcatcgagaccgacatcagctgacacaaaaccgatgttacggcatgtctccctgacaatcttctcatagtcaacgttagccttggtggtgatctcaccaaagaccatgaccatgtttgtcttggtgcaggtctcacaagcgaccttgctgtcagggtcctcggcgaggcaggcatcaagcacagcatctgagacttggtcgcagagcttgtcagggtggccctcgttcacagactccgaggtaaagaggaaggtatcaagtgcggccatcttctcctatctgcggcggcggtggcggcggcggaggaggaggagccgggccgatccgatcggggggaggaggaggaggtggaggaggtaaattaattagatccgaccgaacgccgggccggtcccggcggccggcccggcgg

SEQ ID NO: 385945 - DNA, 1207 bp, Oryza sativa
  unsure (1)..(1207): unsure at all n locations
caaacatgtgtccttggtcaccagcaccaatctcctcagggcgcttggtgaagtgcccgtgcacaccctgtgcaatgtcaggggactgctgctcgatgttcacnagcaccttgcagtggtcagcatcgagaccgacatcagctgacacanaaccgatgttacggcatgtctccctgacaatcttctcatagtcaacgttagccttggtggtgatctcaccaaagaccatgaccatgtttgtcttggtgcaggtctcacaagcgaccttgctgtcagggtcctcggcgaggcaggcatcaagcacagcatctgcccacgcgtccgcccacgcgtccgcccacgcgtccgcccacgcgtccgcccacgcgtccgcccacgcgtccgcggacgccccgccagcagccgcaccctcactctcctctcctgccccccacggcggcggcgggatggcggattcgacggcgaggacggtgaaggacgtgaaccctcatgagttcgtcaaggcctactccgcccacctcaagcgctccggcaagatggagctccctgagtgggttgacatcgtgaagactgcgaggttcaaggagctccctccttatgatccggactggtactacacgagggctgcctcgattgcaaggaagatctacctgaggcagggtattggtgtaggtggcttccagaagatctatggtggccgccagaggaacggctcacgccccccgcacttctgcaagagcagcggcgctatctcacgcaacatccttcagcagctgcagaagatgggcatcattgatgtcgacccgaagggcggaagactcatcacctcccagggaaggcgtgatctggaccaagtggccggaagagttgatgttaccatcgcctgaacagatccattgatcctcaacccttaatgcctgtcatgtttggtggttgagttggctacagtttgtttgcagttttgaattagaacatgccctatctttgttggctcagagaattggaagttggatgcatctagttatgatattgcagtatgtgttttttgtcttttgctgaatgaactcctaatgcactgtcactagttccggacaaaagaaaattaaattatgccaatggaatgtctctgctgatgccagttttattctnnnnnnnnnnnnnnnnnnnnnnnnnnnnnnnnnnnnnnnnnnnnnnnnnnnnnnnnnnn

SEQ ID NO: 385946 - DNA, 887 bp, Oryza sativa
gccccgccccaagtatcccgggcgacgccaccacgcgcgtcttatatcgcgagcgtcactccctcctctgtggtctcttttaaccccccggggggggctgcagcggcggcggcaggatggcggattcgaccgcgaggacggtgaaggacgtgaaccctcatgagttcggcaaggcctactccgcccacctcaagcgctccggcaagatggagctccctgagtgggctgacatcgcgaagactgcgaggttcaaggagctccctccttatgatccggactggtactacacgagggctgcctcgattgcaaggaagatctacctgaggcagggtatttggtgtaggtggcttccagaagatctatggtggccgccagaggaatggctcacgtcccccgcacttctgcaagagcagcggcgctatctcacgcaacatccttcagcagctgcagaagatgggcatcatcgatgtcgaccccaagggcggaagactcatcacctcccagggaaggcgtgatctggaccaagtggccggaagagttgatgttaccatcgcctgaacagatccatggatcttcaacccttactgcctctcatatgtttggtggttgagtcggctacagtttgtttgcagttttgaattagaacatgccctatctttggttgagtcggctatagtttgtttgcagttttgaattagaacatgccctatctttgctggctcagagaattggaagttggatgcatctaggtatgatactgcagtatgtgttttgtcttttcctgaatgaactcctaatgcactgtcactagttccggacaaaagaaaattaaattaagcccatggaatgtctctgctgatgccagtattaaaaaacccacgcgtccg

SEQ ID NO: 385947 - DNA, 942 bp, Oryza sativa
tctatctgcaccctcactccctcctctctcctgtgggctccaatcaacggcggggggggtaacagcagcaggatggcggattcgacggcgaggacggtgaaggacgtgaaccctcatgagttcgtcaagggctactccgcccacctcaagcgctccggcaagatggagctccctgagtgggttgacatcgtgaagactgcgaggttcaaggagctccctccttatgatccggactggtactacacgagggctgcctcgattgcaaggaagatctacctgaggcagggtattggtgtaggtggcttccagaagatctatggtggccgccagaggaatggctcacgtcccccgcacttctgcaagagcagcggcgctatctcacgcaacatccttcagcagcttgcagaacgatgggcctcatctgatggtcccccccaagggtgcaacactcatcccctcccagggaaggcgtgatctggacccaggggccggaagagttgatgttaccatcgcctaatcagatccattgggcctcgacccctaaaacgggtcatgtttggtggttgacatggccccagtttgtttccagttttggattagaacatgccctctctttgttggctcaaagaattggaagttggatgcatctaattaccatattgcagtatgtggctcttgtctcgtgcggaatggactccttatgcactatcgcaatttccggacaaaagaaaatttaattattgccatggaagggctcgggttatcccaggtgtattccaggggcggcgaggtgtcttatttcttgtgttccgggcatgtcagggtcttccgtgtcatttttcaggtgtgcgtcaaggggggcttgttaatccgtacgagggggaaaagtgggatgttttcttgtttaaaaaaaaaagacccatggtataaaaaaaaggaagg

SEQ ID NO: 385948 - DNA, 638 bp, Oryza sativa
  unsure (1)..(638): unsure at all n locations
aanccagggttttcccagtcacgacgttgtaaaangacggccagtgagtcncgcgtaatacgnctcactatagggcgaatttgggtnccgggccccccctcgaggtcgacccagcgtccgcgatcgagctcaagaacggcaccaccgtccatggcaccatcactggtgttgatatcagcatgaacacgcacctgaaaactgtgaaactcacattgaaagggaaaaatcctgttacctttgatcacctcagtgtgaggggaaacaacattcgctattacattcttcctgacagcttaaacctggagacattgctggttgaggatacaccgagggtcaaggctaagaagccaactgcagggaagcctttggggcgtgggcgcggccgtggtcgtgggcgcggtcgtggcaggggacgctgagcttcactccagttccctatcttggaaacttttgcatccgtgcaaatgtaatctctgctctcgtgttagcttgtacggagtagtgttctgattatggcaaagacgttgatgtaagcactcggcacctctttatcgatgtggattttttcccggttggtatttgaccagatgttcttgttcaagaatatgctacgttacattgtaaaaaaaaaaaaaaaa

SEQ ID NO: 385949 - DNA, 711 bp, Oryza sativa
agaagccgctcgaggaggcagctcccccccaaaaaccctagctcaggcttcggcaccgcctctccccccctcgccttcctccccccaccaggcgcctccaagatgaagctcgtcaggttcttgatgaagctgaacaacgagacggtaacgatcgagctcaagaacggcaccaccgtccatggcaccatcactggtgttgatatcagcatgaacacgcacctgaaaactgtgaaactcacattgaaagggaaaaatcctgttacctttgatcacctcagtgtgaggggaaacaacattcgctattacattcttcctgacagcttaaacctggagacattgctggttgaggatacaccgagggtcaaggctaagaagccaactgcagggaagcctttggggcgtgggcgcggccgtggtcgtgggcgcggtcgtggcaggggacgctgagcttcactccagttccctatcttggaaacttttgcatccgtgcaaatgtaatctctgctctcgtgttagcttgtacggagtagtgttctgattatggcaaagacgttgatgtaagcactcggcacctctttatcgatgtggattttttcccggttggtatttgaccagatgttcttgttcaagaatatgctacgttacattgtaattactgtgccatgatgctctagcttctcagtgagtggtcgaatcaaaaaaaaaaaaaaa

SEQ ID NO: 385950 - DNA, 462 bp, Oryza sativa
cgagcggccgcccgggcaggtacctgatacggtccaggttatggatatgctgggacccagtctttgggatgtttggaataataattctcacacaatgtctgttgagatggttgcgtgcatcgctattgaagctatctccatacttgagaaaatgcattcaaaaggatatgttcatggggatgtgaaacctgaaaatttcttgctagggcctattggaactcctgaagaaaagagactcttccttgtcgatcttggtttagctaccaagtggagagatgcttcaactggcctccacgttgactatgaccagcgacctgatgttttcagggggacagttcgctatgctagtgttcatgcacatctagggagaatcggtagccgaagggatgatttagaatctctagcttacacactagtttttcttctacgggggcgtctaccttggcaaggttatcagggtga

SEQ ID NO: 385951 - DNA, 1299 bp, Oryza sativa
cggacctggagcgacgccgccgccgcaagccgtccgccttgctcctcctcgccgagagcttggtcctcgccgtctcctctccccacgcgcagatctaagcctagggttagggtttgtgtagctcgcagcgatggcgatcaagaggaccaaggcggagaagaaggtggcgtacgacaagaagctctgccagcttctcgacgagtacaccaaggtgctcatcgccgtcgccgacaacgtcgggtccaaccagctgcaggagatccgcaagggcctcaggggcgactccatcgtcctcatggggaagaacaccctcatccgccgctgcatcaaggtgcacgccgacaacaccggcaacaaggagttcctcgagctcatgcccctcctcgtcggaaacgttggcctcatcttcaccaagggtgacctcaaggaggtccgcgaggaggttgccaagtacaaggttggagctcctgctcgtgttggtcttgttgctcctgttgatgtggtggttccccctggcaacactggtctggatccatcccagacctctttcttccaggtgcttaacatccccaccaagattaacaagggtactgtggaaattatcacccctgtggagctcattaagaagggtgacaaggtgggctcctccgagtctgctctgcttgccaagcttggtatccgccccttctcatatgggctggttattaccaatgtctatgacagtgggtcagtcttcagccctgaggtgcttgacctcactgaggatgacctgatggagaagtttgcttctggtgtttctatggttgcctcagtctccctggcaatctcgtacccaactattgctgctgcaccacacatgttcctcaatgggtacaagaatgtgcttgctgttgctgtggagaccgaatactcgtacccacatgctgataagatcaaggagtatttgaaagaccccagcaagttcgctgttgctgccccagttgccgccgacagtggtgctgctgctccatcggctgccaaggaggaagagaagaaggaagagcccgaggaggagtccgatggtgacctgggcatgagcctcttcgactaagcctcttgccatatcgctgcaaagttgaaagttttgtttcaagttctgaacatcgaagtttgtttttaatctttagcatattaattttctactagacaagaatgtatccaacaatggtatcgttaattatgcattttggttgtgcccgtaaaaaaaataatatggggggtattttattaaaaaaaaataaataaattaaaataaaatta

SEQ ID NO: 385952 - DNA, 431 bp, Oryza sativa
  unsure (1)..(431): unsure at all n locations
ccgaccccgagtcctcttcgtgtgagctcgcactcgcagtcgcagcaatggcgatcaagcggaccaaggcggagaagaaggtggcgtacgacaagaagctgtgccagcttctggacgagtacaccaaggtgctcatcgccgtcgccgacaacgtgggatccaaccagctgcaggagatccgcaagggcctcaggggcgactccatcgtcctcatggggaagaacaccctcatccgccgctgcatcaaggtgcacgccgacaacaccggcaacaaggactttcctcgagctcatgcccctcctcgtcggtaacgttggtctcatcttcaccaagggtgacctcaaggaggtccgcgangaggtcgccaagtacaaggtttgagcttctgctcgtgttggtcttgttgctcctgttgatgtggttgttcccct

SEQ ID NO: 385953 - DNA, 1506 bp, Oryza sativa
  unsure (1)..(1506): unsure at all n locations
aaaggaaaaaagattcatctcttcctcctcgtcttgtccccttccctcgtcgaaaccctagctaggctcgccgccggcgacgcccgcctcgccgatgcgctcccccacctgaccgctccgcctcgctctcccgggtcgtcgttgcctcaccgctgtgcccgcccacccccacctgggcagcgggcgggatccagtcccagatcggcgccatgtccaaggccagggtctacaccgacgtcaacgtgctgcgccccaaggagtactgggactacgaggccctcaccgtccaatggggtgagcaggatgattatgaagttgtcaggaaagttgggagaggaaaatacagcgaggtctttgagggtattaatgtcaacaacaatgaaaaatgcattatcaaaattctcaagcctgtgaagaaaaagaagatcaaaagagagataaaaatacttcagaatctttgtggaggtccaaatatcgtgaaactgcttgatattgttagagatcagcactcaaaaacaccaagcttgatatttgaatatgtcaacaacacagatttcaaagtgctatacccaaccctgacagattatgacatccgttattatatctacgagctactgaaggctttagattactgccattcacaaggcatcatgcaccgcgatgtgaagcctcacaatgttatgatagatcacgagcttcgaaaactccgattaatagactggggccttgctgaattctaccaccctggcaaggaatataatgtccgtgttgcttcaaggtacttcaagggacctgagcttcttgttgacttgcaagattatgactactctttggacatgtggagtcttggttgcatgtttgctggaatgatcttccgcaaggagccatttttctatggtcatgacaaccatgatcaacttgttaagatcgcaaaggtacttgggacagacagcctgaattcatacttgaacaagtaccgtattgagcttgacccacagcttgaagccctcgttggaaggcacagcaggaaaccttggtcaaagtttattaatgctgacaaccaacatctagtatccccagaggccatcgatttccttgacaagcttcttcgctatgatcaccaggatagacttactgcacgtgaagctatggcacacccatactttctccaagtgagggctgcggagaacagtaggcctcgtgcacaatagacaaaagaacgggactattgctgactgtcgattagcagcagtcatggagctgcaccgtattagtgacttagtccagtcacttgtattgggagtttgagattcggtaatggttgaatcacctggcaagaggattctgggagagcatgtaacagctcatgtgtgcttaaccgcaaacgtggattgtgatttactcgtgctgtttgtatctttgtttctgacgattgattgaaacacattgttctcgtttgtgtatgtaaaaaaaaaaaaaaaaaannnnnnnnnnnnnnnnnnnnnn

SEQ ID NO: 385954 - DNA, 540 bp, Oryza sativa
gtttattaatgctgacaaccaacatctagtatccccagaggccatcgatttccttgacaagcttcttcgctatgatcaccaggatagacttactgcacgtgaagctatggcacacccatactttctcccaagtgagggctgcggagaacagtaggcctccgtgcacaatagacaaaagaacgggactattgctgactgtcgattagcagcagtcatggagctgcaccgtattagtgacttagtccagtcacttgtattgggagtttgagattcggtaatggttgaatcacctggcaagaggattctgggagagcatgtaacagctcatgtgtgcttaaccgcaaacgtggattgtgatttactcgtgctgtttgtatctttgtttctgacgattgattgaaacacattgttctcgttgagtataaatgtttttttttaatttgcgagttggtccgttttaagactgattgtaatgatcaattagctgtaccttaatggttttatgcaccttgacttcggacatcaaaaaaaaaaaaaaaa

SEQ ID NO: 385955 - DNA, 2068 bp, Oryza sativa
ccccctcgaggtcgacccacgcgtccgcagcagctctagtttgaacgagggatcgtagagaggagggtttggtgagggagggaggaagatggcgacgtgcgcggcggacctggcgccgctgctggggccggtggcggcgaacgcgacggactacctgtgcaaccggttcgccgacacgacgtcggcggtggacgcgacgtacctgctcttctcggcgtacctcgtgttcgccatgcagctcgggttcgcgatgctctgcgccgggtcggtgcgggccaagaacacgatgaacatcatgctcaccaacgtgctcgacgccgcggccggggcgctcttctactacctcttcggcttcgcttcgcttcgcgattgccttcgcacgccgtccaacggcttcatcgggaagcagttcttcggcctcaagcacatgccggcaagaccgggttccgactacgacttcttcctcttccagtgggccttcgccatcgccgccgccgggatcacgtcgggctccatcgccgagaggacgcagttcgtcgcctacctcatctactccgccttcctcaccgggttcgtctacccggtggtgtcccactggatctggtccgccgatgggtgggcctctgcctcccgcacgtccggacctctgctgttcggctccggtgtcatcgacttcgccggctccggcgtcgtccacatggtcggcggtgtcgccgggctctggggcgcgctcatcgagggcccccgcatcggcaggttcgaccacgccggccgatcggtggcgctcaagggccacagcgcgtcgctcgtcgtgcttggcaccttcctgctgtggttcggctggtacggattcaaccccgggtcgttcaccaccatcctcaagacgtacggcccggccggcggcatcaacgggcagtggtccggagtcggccgcaccgccgtgacgacgaccctggccggcagcgtggcggcgctcaccacgctgttcgggaagcggctccagacggggcactggaacgttgtcgacgtctgcaacggcctcctcggcgggttcgccgccatcaccgccgggtgcggcgtcgtcgacccgtgggccgcgatcatctgcgggttcgtctcggcgtgggtgctcatcggcctcaacctcgccgcgcgcctcaagttcgacgacccgctcgaggcggcccagctccacggcgggtgcggcgcgtgggggatcctcttcaccgcgctcttcgcgaggcagaagtacgtcgagagatctacggcgccggccgcgtacggcctgttcatgggacgccgcaagctgctcgttggcgctgtcatccagatcctggtcatcttcgggtgggtcagctgcaccatgggacctctcttctacgggctcaagaagctcggcctgctccgcatctccggccgagacgagacgtccggcatggacctgacacggcacggcgggttcgcgtacgtctaccacgacgaggacgagcacgacaagtctggggttggtgggttcatgctccggtccgcgcagacccgcgtcgagccggcggcggccggctgcctccaacagcaacaaccaagtgtaaccaatccagaagcaagcacgtcacagcgaaggaagaaatcacgggtttctctccctctccgatctcgatcgtcacgtcataaatttgatccccatatttgattgccagtttctgtttgggccaaatgcttttgccgctctctctggtgttgcaagactgtaaaaacactgtaggatggacgagtgtctttcacttttgcctgggcttctcttgtgtacaggcatgcgtacgtgtcttagaatgtgtggtgtgaagggtggggaagaatcagaggttagggtttaattttcttttgcacaatggttactgctattattgttttattttgtggtcgaattttatcgtcataagggtgtggtggaatggtggtcaagataggtggctgtgcagggctcaaagactttgcgtgggtccttttgtcctgcagtgctctacctctctatcaaaactttggcttatttcctggaaaaaaaaacaaa

SEQ ID NO: 385956 - DNA, 2061 bp, Oryza sativa
  unsure (1)..(2061): unsure at all n locations
ctcgtgccgaattcggcacgagcatactaccactcaaaaactctctctctctacccaaacaggttttgagaaagaagtggaggacagatccaaaaagttcaccttttgattatccaaacaagtttggagtttgttacctgaatctcctcttcttcctgtcaccggaagggaaattgataaaaaaaaagcagtgaaagcctcaaggaatgctgaaagatttgcttgcataaaaaaaattttccgtgtgagataaaacaaattgctggttcactagtgctactgatctgctcaagtcttgatgtgagtgatcaactttcctgcactaattctaccccatttagactccgaaacgacgatgatataagaatgttgttctccattcatgatcatgaccttggggaggatggctaaagaattgcagtccatctgattggtggtcaaaacatagtgctgagatttatatctttgtgggcatggagagtaaagggaaaatactaatggaaaggtatgagttgggcaaattgttggggaaaggaacatttggcaaggtgcactatgcagggaatctggagtcaaaccagagtgtggccataaagatgatggacaaacagcaggtgttgaagttcgggctttcggagcagatcagacgtgagatcacaaccatgcggttggtggctcataagaacattgttcagcttcatgaggtcatggcaacacggaacaagatctactttgtgatggagtatgtgaaaggtggtgagctatttgaaaaggttgcaaagcgtggaaagcttacagaggttgttgccataagtacttccagcaactcattaagtgcagtggattactgccacagtcgaggtgtgtatcaccgggacttgaagcctgaaaacctgctgttggatgagaatgagaacctgaaagtctcagactttggactgagtgcgctttcagagtcgaagaggcaagatggcttactccataccacctgtggaacacctgcatatgtagctccagaggtgatcagcaagataggatatgatggtgcaaagtcagatatttggtcttgtggtgttatcctgtttgttcttgttggtggttaccttcctttccagggcccaaacttgatggaaatgtatcggaagatacaacatggtgaattcaggtgccccggttggttttcacgcaaacttcagaatttgttgtacaagatcatggaccccaacccaagcacaaggatttcaatccagaagataaaggagtctacctggttccggaaaggtcctgaggaaaatcgtattttgaaggaaagaactttgaatgaaaacccccccaaaaatgttgctctggtgcttggtgtgagacccaagaaaaatgctcatgaagatgtgaagcccatgtcagtgacaaacttaaatgcctttgaaattatctctttctccaaggggtttgatctctctggcatgttcattgtaaaggaatggagaaatgaggcaaggttcacttcaaataaatctgcctcaaccataatctcaaagctagaagatgttgcaaaggcgctaaatctcagggtaaggaaaaaagacaatggtgtagtgaaaatgcaagggaggaaggaaggaaggaatggtgttcttcagtttgacataaaaatatttgaggttaccacttcctatcatatcatcgagatgaaacaaacaagtggcgattcattggagtaccgacagctactggaggagggcatccggccagctctgaaggacattgtcttggcctggcatggagatgaatagcagcagtcgcaagagtagattttgatgtctcaagcatttagtttccgctcctcaaattcattaggttttagctcaaatgaatttatttgtcttgcctatgttctttttagcatctatgtttttgtatctggagagttcatgttgaggcaatctatgcacaatttagatggagtctgtcgagagtaattttatgagaagttgagctgcaatataaaagttggctttgagcctttcaagctttcttcaaaaaaaaaaaaaaaaannnnnn

SEQ ID NO: 385957 - DNA, 1777 bp, Oryza sativa
ccgggcaggtttttactgtccccatgcagacaatgccaaagggataaacagagttaaaattggtgaaaattcactcgaatccaaatgtaaacaacccatttttctcctgttccaatcccatccattccattccattccttctccctgtgctcggattcctgttcttgcagctgatccctagatcttcctctttgcccgagaattttccgcccaattccccactccgattcctcttctttcgcccaaattttggctcaacatttcgcagcgcaatctcgagctgaatcttggggggtaaagctttgcttcttggaatcttggtgcggtttttgggggagatttgcgagcgtttggagccgagaagatgaacagggagaaatccccgatcccgggagacggcggcgacgggttgccgccgcaggccacccgccgggcgggccctccggcggcggcggcggcggcggagtacgacatcagccgcatgccggatttcccgacgaggaaccccggccacaggcgcgcccactccgagatcctgagcctccccgaggacctcgacctgtgcgcggccggcggcggcgacgggccgtcgctgtcggacgagaacgacgaggagctcttctccatgttcctcgacgtggagaagctgaacagcacgtgcggggcgtcgtcggaggcggaggcggagtcgtcgtccgccgccgcccatggagcgaggccgaagcaccagcacagcctgtccatggatgagtcgatgtcgatcaaggctgaggagctcgtcggggcgtcgcccgggacggaggggatgtcgtcggcggaggccaagaaggccgtgtccgcggtcaagctcgccgagcttgctctcgtcgatcccaagagggcgaaaaggatttgggctaacagacaatctgcggcaagatcaaaggaaaggaaaatgcgatatattgctgaacttgagcgcaaggtgcaaaccctgcaaacagaagcaacaacactgtcagcccagttggcactgctacagagagataccagtgggctaactactgagaatagtgaactgaagctacgtctgcagaccatggagcagcaagtccacttgcaagatgctttgaatgacaccctgaagtctgaggttcagcggcttaaggttgcaaccggtcaaatggcgaatggtggagggatgatgatgaacttcggtggcatgccacaccaattcggaggcaaccagcagatgttccagaacaaccaggccatgcaatctatgctggcagcacaccagctgcaacagctccagcttcatcctcaggctcagcagcagcaggtgctgcaccctcagcatcagcagcagcagccattgcaccctctacaagcgcagcagctccagcaggcggcacgagacctcaagatgaaatcgccgatgggcggccagagccagtggggagatggcaagtcaggaagcagcggcaactgatgcgtcatttacaaatttacaaaaaaattcgccaaagtttcggtgtaaggttgtggtttaacaaccatggagatggtctgtttcattgagatgatgatgatgtgcaagagtagttatcatcatcatcatcggtaggttcaggttggcttcagcttcagtcaaacagttgggtggatgttcagttggagagtttatctgtagctggttcagtaaggaaatggtcgaataatcaagaattccaggttaaaatctttcgtttctttggtaaggtagcacatcaccaagatgtactgttgtagtgttgtc

SEQ ID NO: 385958 - DNA, 759 bp, Oryza sativa
  unsure (1)..(759): unsure at all n locations
ttgggtgcaggattcggcatgagcagacacagacgcagacgcagaccaagaagaaatacaatacactagctaccatggccgctctttcctctgccgccgtcaccatcccttccatggccccctccgctcccgggcggaggaggatgagatcttcgctggtcgtgcgcgcctcgctcggcaaggcagccggcgcggccgcagtggccgtggccgccagcgccatgctcgcgggcggcgccatggcgcaggaggtgcttctcggcgccaatggcggcgtgctggtgttcgagccgaacgacttcaccgtcaagtccggcgagaccatcacgttcaagaacaacgccggcttccctcacaacgtggtgttcgacgaggacgcggttccgagcggcgtcgacgtgtccaagatatcgcaggaggagtacctcaacgcccccggcgagaccttctccgtcacgctcaccgtccccggcacatacggcttctactgcgagccgcacgccggagctgggatggtcggcaaggtcaccgtcaactaattattctttcttctcaatctaaatatgcctcctacggctctatcctatatatatatatatcgatatatatatatatatatatatatcgatttgtccatcgcgaatatactacgtaccgatgatctgttcctcagttttctcttgtgtgtatgcaagtgtgtatcaattatcaatagcaatgagacgaacaattcaacgatnnnnnnnnnnnnnnnnnnnn

SEQ ID NO: 385959 - DNA, 743 bp, Oryza sativa
acgcagacgcagacgcagaccaagaagaaatacaatacactagctaccatggccgctctttcctctgccgccgtcaccatcccttccatggccccctccgctcccgggcggaggaggatgagatcttcgctggtcgtgcgcgcctcgctcggcaaggcagccggcgcggccgcagtggccgtggccgccagcgccatgctcgcgggcggcgccatggcgcaggaggtgcttctcggcgccaatggcggcgtgctggtgttcgagccgaacgacttcaccgtcaagtccggcgagaccatcacgttcaagaacaacgccggcttccctcacaacgtggtgttcgacgaggacgcggttccgagcggcgtcgacgtgtccaagatatcgcaggaggagtacctcaacgcccccggcgagaccttctccgtcacgctcaccgtccccggcacatacggcttctactgcgagccgcacgccggagctgggatggtcggcaaggtcaccgtcaactaattattctttcttctcaatctaaatatgcctcctacggctctatcctatatatatatatatcgatttgtccatcgcgaatatactacgtaccgatgatctgttcctcagttttctcttgtgtgtatgcaagtgtgtatcaattatcaatagcaatgagacgaacaattcaacgatatattatctatgttgatgatttgtgtcattgctattgataattgatacacacttgc

SEQ ID NO: 385960 - DNA, 435 bp, Oryza sativa
gaccatctcgttcaaggtcagcgcgggcttccctcacaacgtggtgttcgacgaggacccggttccaagcggcgtctaggtctccaatatatcgcagaaggagtacctcaacgcccccggcgagacgttgtcggtcacgctcaccgtccctggcacatcaggcttttactgcgagccgcaccccggagctgggatggtctggcaaggtcaccctccactaagcattctttcctctcaatctaaatatgcctccttcggctcgatcccatatatatatatatcgatttgtccatcgccaatatactacgtaccgatgatctgttcctcagtcttctcttgtgcgtacgccagtgtgtatcggtgctcgatagcgatgagacgaacaattcatcgataaaaaaaaaaaaaaaaacccacgcgtccccgcacgcgtgg

SEQ ID NO: 385961 - DNA, 649 bp, Oryza sativa
  unsure (1)..(649): unsure at all n locations
ngagcggcgcaacctcgtgccggattcgtgtcgaacttttgctcggtcttttttgcttgcttcgcaagaagaagaagaagagggcggcggcgatggcgaggcggctgatcccgtcgctgaaccgcgtgctggtggagaagctggtgcagcccaagaagagcgccggcggcatcctcctccctgagacgtccaagcagctcaactctggtaaagtggtggctgttggccctggcgaacgtgacaaggatggcaagctgatccctgttgctctcaaggaaggagacactgttctcctgcctgaatatggtggactcgaagtcaagcttgctgctgaaaaagagtaccttctcttcagagagcatgacatcttgggcacccttgtggactgatttggatcgtcatgaacgccatcagtaatcagttgcgctaatgcaaggcatgtttttttagtattggatcgacgggacacaatcctccagacacaactgtcttttatgatgtcgtagaattttggctaagaacatcatgaacttgcaaaagattgttgcttccttttatctgttgcgatgaaattcagtaaacgttaacgcatctgaagagcctcttcctttttaaacaactctgtcttctatgcaaaaaaaaaaaaaaa

SEQ ID NO: 385962 - DNA, 623 bp, Oryza sativa
  unsure (1)..(623): unsure at all n locations
ccttggtgcaggattcgccctagccaagtcgaattcggcccgacagatccaccacaccaaatttttcgcgctcagttcatcgcagatcgatcgatcgatcaacatgtcggacaagtgcggcaactgcgactgcgctgacaaaagccagtgcgtgaagaaaggaaccagctatggcgtcgtcctagttgacgccgaaaaaaccacttccaaatggctgaggaggtcggctaccaagaaaacgacaggcgggtgcaagtgcaccaccggctgctcctgcgccgggtgcaactgcggcaagtgatgaacaaagctatcctctgcaacctggccccacaatccagtgtgtcttccgttttgcgcccctgcgtgcatatatatgcatatgcctgcctgcctgctaaataatgtttcgtgtggcgtatgtgtgccatgggacttgctatcatgggcgtccccacctgcacctttgggtgtctatatgtttgttcgtgtcccgggatgggaggatgtacccgtgctgtcctatatatggagtttactgatatataacttaatgggtgtgcttgtnnnnnnnnnnnnnnnnnnnnnnnnnnnnnnnnnnnnnnnnnnnnnnnnnnnnnnnn

SEQ ID NO: 385963 - DNA, 1198 bp, Oryza sativa
ccacgcgtccgcccacgcgtccgcccacgcgtccgcccacgcgtccgcccacgcgcgcacacgacacgacgcaccaatggcgctcgtctccgcctcctcctccaccaccgccgtcgcggcgctccccggcgccgccagggcctcctccttcctcggcggcgccggcaggagcggcaggctgctgctgaggcaggccgagtcgtcgtccgcgcgggcgtcgttcgccgtgcgcgccgcggcgcccgacaggccaatctggttccccggcagcaccccgccgccgtggctcgacggcagcctccccggcgacttcggcttcgaccccctgggtctcggatcggacccggagagcttgcggtggaacgtgcaggcggagctggtgcactgccggtgggcgatgctgggcgcggcgggcatcttcatcccggagttcctgaccaagatcggcatcctcaacacgccgtcgtggtacaccgccggcgagcagcaatacttcaccgacaccaccaccctcttcatcatcgagctcatcctcatcggctgggccgagggccgccggtgggctgacatcatcaagcccggctgcgtcaacaccgaccccatcttccccaacaacaagctcaccggcaccgacgtcgggtaccctggtggtctgtggtttgacccgctcggctggggcaccggctcgccggagaagatcaaggagctgcgcaccaaggagatcaagaacgggcggctcgccatgctcgccgtcatgggagcttggttccaggcagagtacaccggcaccggccccatcgacaacctcttcgcccatctcgccgaccccggccacgccaccatcttccaggccttcacccccaaatgaggagttcttcaggtgttggagtgttagcaatggctgccaatggaggaagatgaaaagactgttcgtcgacgcgacttacctctcttttttgggatcggagtaggctgtgaatggtggtggtgtattgggatgtaattgtggatggagcactgcatgccttgttgattgtgtacctgtactatgatgtaaccgatgtaaaaaacaagttgatactcttttagaagtgaagttctcttcatccctggacaacgggtacaccggaaaaaaaaaaaaaagggcgagcgcggcacgctataaggctcccggctgccggcagcgtgcgtcagacgt

SEQ ID NO: 385964 - DNA, 624 bp, Oryza sativa
ccacgcgtccgcccacgcgtccgcccacgcgtccgcggacgcgtgggggccgccggtgggctgacatcatcaagcccggctgcgtcaacaccgaccccatcttccccaacaacaagctcaccggcaccgacgtcgggtaccctggtggtctgtggtttgacccgctcggctggggcaccggctcgccggagaagatcaaggagctgccccccacgcgtccgcaagaacgggcggctcgccatgctcgccgtcatgggagcttggttccaggcagagtacaccggcaccggccccatcgacaacctcttcgcccatctcgccgaccccggccacgccaccatcttccaggccttcacccccaaatgaggagttcttcaggtgttggagtgttagcaatggctgccaatggaggaagatgaaaagactgttcgtcgacgcgacttacctctcttttttgggatcggagtaggctgtgaatggtggtggtgtattgggatgtaattggggatggagcactgcatgccttgttgattgggtacctgtactatgatgtaaccgatgtaaaaaacaagttgatactctttttgcacttgacaagaacacatgaagatattggcgaacgac

SEQ ID NO: 385965 - DNA, 391 bp, Oryza sativa
  unsure (1)..(391): unsure at all n locations
actgacaaaggcagaggcaataantcagccttggtccagaccaccacacgcgcacacgacacgacgcaccaatggcgctcgtttccgcctcctcctccaccaccgccggcaggagcggcaggctgctgctgaggcaggccgagtcgtcgtccgcgcgggcttcgttcgccgtgcgcgccgcggcgnccgaaaggccaatctggttccccggcagcaccccgccgccgtggctcgacggcagcttccccggcgacttcggcttcgaccccctgggtctcggatcggacccggagagcttgcggtggaacgtgcaggcggagtgggtgcactgccggtgggcgatgctgggcgcggcgggnatcttcatcccggagttnctgaccaagatcgg

SEQ ID NO: 385966 - DNA, 215 bp, Oryza sativa
  unsure (1)..(215): unsure at all n locations
aaggtagacccaagagtcagccnaagagtcagcccaagcgtcagcctaagagtccgctgtggatggtggtggtgtttggggatgtaattgtggatggagcactgcatgccttgttgattgtgtacctgcactatgatgtaaccgctgccaaaaacaagttgatactcttttagaagtgaagttctcttcatcactgaatcagagttgtgatttag

SEQ ID NO: 385967 - DNA, 801 bp, Oryza sativa
tcgcttcctcctcccgcagctcacctcaactccggaagcgagagctcactccccccatcccatggcttccaccgcgctctcctccgccttctccctcctctccctcccctcctcctcctcccccgccgccgccgccgccgccgccccaaggtccttcgccgtccccagccgcgcccgcccacgccgcgccgtcgccgtggtggcgtccaccgccaccgattcccccaaggtcctggagctcggggacgccatcgcggggctcaccctcgaggaggcgcggggcctcgtggaccacctccaggagcgcctcggcgtctccgccgccgccgccgacgaggcccccgccgagaagacggagttcgacgtggtcatcgaggaggttcccagcagcgcgcgcatcgccagcatcaaggtggtgcgcgcgctcaccaacctggccctcaaggaggccaaggacctcatcgagggcctccccaagaaggtcaaggagggtgtcagcaaggacgaggccgaggatgccaagaagcagctcgaggaggtcggcgccaaggtgtccattgcgtgacactaggtaattttaggactcccctttttttctcaccctaatcttgtgtaccacctttgatatttacaatggtttgttgtttcatactatgagatttctgtatgtggatctgttagttcacattccatcttgtattgatatcgatgttccacgcgctaaaattgccaatgtagattttgtatattggcgcaatcataatggtgagaagtgtgcaatggcggtgtagtgttgaacac

SEQ ID NO: 385968 - DNA, 1321 bp, Oryza sativa
  unsure (1)..(1321): unsure at all n locations
ctcgtcttccttgcttttatcgccggcgacgtcgccgtcggctccgccgccgccgaggagtaggagtagtaggaggaggaagccggtagccggaggaggagcggggagatggcggacgcgaagcagcagcagcagcagctgacggcggcggccgccacgggggtctggaagacggtgaagcccttcgtcaacggcggggcctccgggatgctcgccacctgcgtcatccagcccatcgacatggtcaaggtgaagatccagctgggagagggatctgcagctcaggtcacaaagaacatgcttgctaatgagggtattggttccttttacaagggtttgtcagctggtttactaaggcaggcgacatatactactgctcgtctcggatcctttagggttctaacaaacaaagcggttgaagcaaatgatgggaagccactgcctctagttcagaaagcttttattggccttactgctggagcaattggagcctgtgttggtagtcctgcggatttggcactcattaggatgcaggctgattcaacgttgccaacagcccaaagtcgcaattataagaatgcttttcatgcactttatcgtattgctgctgatgaaggtgttctaccactttggaagggcgcaggtccaactgtagtgagagctatgtcactaaatatgggcatgcttgcctcctatgatcagagtgtggaattatttagagacacacttggtgctggagaattcactactgtacttggggccagtgctgtttcagggttatgtgcgtctgcttgcagtttaccctttgattatgtgaagacacagattcaaaagatgcagcctgatgcctccgggaagtatccatacactgggtctcttgattgtgccatgaagaccttgaagagtggaggcccatttaagttctacactggctttcctgtgtactgtgtcaggattgcaccacatgccatgatgacttggatattcctaaatgagatccagaagctcgagaagcgtttaggcctttaagagctggttggttcggtcatgctgtccttacctaagacataacaacagtccaggtgtacatagtcgagcaattgcttttgataaacaaaatctttagcctatatgcttccttggtgctttgagccattgacaccaaatgatcacctcatttattgttctttggatcattttttggtaaattttggggtaacatactgttatcagtttaaaacgaataccaagtaccatgagaacaataagttgttgaatgttgattactggtttgcccttttnnnnnnnnnnnnnnnnnnnn

SEQ ID NO: 385969 - DNA, 546 bp, Oryza sativa
  unsure (1)..(546): unsure at all n locations
cccacgcgtccgagaagatgcaacctgatgccagtgggaagtacccgtacaccggttctttggactgtgccatgaagaccttcaagagcggtggcccattcaagttctacactggcttccctgtgtactgtgtcaggattgctccccatgtgatgatgacatggatattcttgaatcaaatccagaagttcgagaagcagattggaatataaggtcttcagttggaggttaatatgcggagttatcatttgctcgagtggagataataacgttccagctgcttacactatcggtagttggttttggtagacaaaagtttaaaccaagttatcctagcttaaatgttgccgtggtggtactattgtgtcttttacaataatcgaatcatttgttgtaactggggcgatttttttggggtggacatactttatttttgttggctgggactcagccatgaggggggatacttcctgcttgcgccattgaattaaatgggaccatattttatacagatttccaaaaaaaaaaaaaannnnnnnnnnnnnn

SEQ ID NO: 385970 - DNA, 446 bp, Oryza sativa
caccaccactgcctcttcctcttctccgggagtcccaaactgcagcagcgcgcggcacaggagagcgaggaggaggaggagatggcggaggcgaagcggcagcagcagcagccgcaggccgcgaccgcggcggcggcgagccgggtgtggaagacggtgaagcccttcgccaacggcggcgcctccgggatgctcgccacctgcgtcatccagcccatcgacatggtcaaggtgaggatccagttgggtgagggctcggcggcttctgtcaccaagaaaatgcttgcaaatgagggaattagtgccttctacaaggttcgttgtcttgaggccgtggtttaaaaattccagtatttgcgttgtgcactaacccagtaatgtagcattgttacacacgtacggaacctgcagttacatcatctggattggaaccccgtagtcttgta

SEQ ID NO: 385971 - DNA, 621 bp, Oryza sativa
  unsure (1)..(621): unsure at all n locations
cccatgcgtccgcccacgcgtccgcgtcgccttccactttcccctctctctctctctccgccgccgccgacgccgacgatggcctccagccgctgggtccgaccggaggtgtacccgctgttcgcggcgatgggcgtggccgtcggcatctgcggcttccagctcttccgcaacatcaccggcaaccccgaagtcagggttaacaaggtagggagggcagctggagtgctcgagaaccatgaggagggaaggcgctacgcagagcatgggctaagaaactatgtgcgcgacaagacccctgagatcatgccagctatcaacaagttcttcactgagccaacaaaatgatgaaggaatttagttggttgttgattgctctgctattagttactattgcggattgatttaatggattttacccatttcaagcattacatatgttgtctcatccataaatcggaggacatcaaatgcctcttgttggaagttaccatatgtgtttgtggtcaatgactagtcaaatgttctaatactatttgtctgatgattgatgagtgttacattaccctgcttgattctctaaaaaaaaaaaaaaaaaaannnnnnnnnnnnnnnnnnnnn

SEQ ID NO: 385972 - DNA, 2255 bp, Oryza sativa
  unsure (1)..(2255): unsure at all n locations
ctttcggttattgccgctccctcatatgtatgtttgtacttctgtagggagtgtggtgaggactgatgaacttgtaaacattgggtatggatggatgtgactgcatcgagccactatggccaactgatgagctcctcatcaagtatcagtacatctcggacttcttcatagccctcgcatatttctcgatcccgttggaactaatttatttcgtgaagaagtcatccttcttcccatacagatgggttttgatccagtttggtgcatttatagtcctatgtggagcgactcatctcataaacctgtggactttcaccacacacacaaagactgttgctatggtcatgacagtcgcaaaggtttcaacggctgttgtgtcctgtgcgacagctttgatgcttgtacatattatccctgacttgctgagcgtgaaaacaagggaattgtttctgaagaataaagctgaacagcttgatagggagatgggcttgattaggacacaggaagagactgggaggcatgttaggatgcttacccatgaaatcagaagcactcttgatagacatacgattttgaagactacacttgttgagctaggagggaccttgggcctggaagaatgtgccctatggatgccatcaagaagcggttcaagtcttcagctttctcatactctccgccaccagattactgttgggtcaactgtatcaattaatcttcctgttgtcaatcaagtgttcagtagcaacagagcaattataataccccacacatctcctttggcacggatccgacctcttgcagggagatatgttccaccagaagtggctgcagtgcgagttcctcttctacatctttcaaactttcaaataaatgattggccagagctttcagcaaagagctatgcaatcatggttctgatgcttccatctgatagcgcaagaaaatggcatgtgcatgagttggagcttgttgaggtcgtggctgatcaggttgcagttgcactttctcatgcagctattcttgaagagtccatgcgtgcgcgtgatctgctaatggagcaaaatgttgctctggatttagctcgacgtgaggctgaaatggctatccgtgctcgtaatgatttcctggctgttatgaatcatgaaatgagaacaccaatgaatgcaataatagccctttcgtccttacttttggaaaccgaacttactcctgagcagcgcttgatggtggaaacagtcttgaaaagcagcaatcttttagcaacactcatcaatgatgtgttagatctttccaaacttgaggatggtagccttgaattggagattaaagcattcaatcttcatgctgttttcaaggaggtaatgagtttcatcaagccaatcgcagccatcaagagactgtctgtgtcagttatgttggcaccagacttgccattatgtgccatcggtgatgaaaagaggctaatgcaaactattttgaatatctctggcaatgctgttaagtttacaaaggagggccacatcacacttgtagcttctgttgtgaaggctgactctttaagagaattcagaaccccagattttcacccaactgcaagcgatgacaatttttatttgaaagttcagattaaagatacgggctgtggcattagccctcaggatctacctcaggtatttacaaagtttcctcaatctcagcctggaggaaacagaggatacagtggtagtggtcttggccttgccatttgcaagaggtttgttactttgatgggagggcacatctggttggatagcgaaggaacaggaagaggctgcacagtaacgtttgtcatccagcttggcatatgcgataatacgaatgcatatcagcagaagctgattcctctagtctggccgagcagtggggatgctgattttgttggtccggtgccaaatgctcctaatgaagagaaaggtcaggcttctctgaaatctcggtatcagagaagtatatgagctactgtaaattgatcgacggcattgtatcaagtagggcctggttagtttgtctctaattttgtgcctagccttgtgatagctggaatatatttgtacaaataatgtacagcagatgggactgcataatgcagctatgcacctgggtacaactctaacttgcgtagtgtcctgtcagcgaaatgtgattctgggctgttcgtgtgaccttctgatannnnnnnnnnnnnnnnnnnnnnnnnnnnnnnnnnnnnnnnn

SEQ ID NO: 385973 - DNA, 765 bp, Oryza sativa
  unsure (1)..(765): unsure at all n locations
aagctggcacgcgtgcggtcccggcccgaattcccggggtgagccacagccgtccgtactattacagttgactcttgtgctgcaaagggtgactatttaagagaatggagatgcccacattttcacccaactgcaggcgatgacaatttttattggaaagttcagattaaagatacgggctgtggcattagccctcaggatctacctcaggtatttacaaggtttgctcaatctcagcctgggggaaacagaggatacagtggtagtggtcttgcccttgccatttgcaagacgtttgttactctgatgggagggcacatctggttggatagcgaacgaacaggaagaggctgcacagtaacgtttggcatccagcttggcatatgcgataatacgaatgcatatcagcagaagctgattcctctagtctggccgagcagtggggatgctgattttgttggtccggtgccaaatgctcctaatgaagagaaaggtcaggcttctctgaaatctcggtatcagagaagtatatgagctactgtaaattgatcgacggcattgtatcaagtagggcctggttagtttgtctctaattttgtgcctagccttgtgatagctggaatatatttgtacaaataatgtacagcagatgggactgcataatgcagctatgcacctgggtacaactntaaaaaaaaaaaaaaaaaaaactcgagggggggcccggtacccaattcgccctatagtgagtcgtattacaattnc

SEQ ID NO: 385974 - DNA, 417 bp, Oryza sativa
ggcagcctccatgccgtgccgcctgcctctgcgcagcgggctggctatcttacctcccttttctgcgccgcgtcctcctctctctcctttcccctagggctctagctccaccgcctctcggccaccgccgctccccgccgccgccgccgacgacgcgcgagggagtgtggtgaggactgatgaacttctaaacattgggtatggatggatgtgactgcatcgagccactatggccaactgatgagctcctcatcaagtatcaggacatctcggacttcttcatagccctcgcatatttctcgatcccgttggaactaatttaatttcgtgaagaagtcatccttccttcccatacagatgggttttgatccaacttggtgcatttatagtcctatgtggagcgacttaacttataaa

SEQ ID NO: 385975 - DNA, 641 bp, Oryza sativa
ccacgcgcccactcccagatcacatcctcagattcagagtcgtcgaaaatcatcaagaagatggagcggctgagctcatcggtgcagtcgtgggtggaggaacacaagctggccagcatcggagggctgtgggcgacggcggtgggcgcatcggtggcgtacgggcggaggaagacgccgcagatgcggctgatccacgccaggcttcacgcgcaggccctcaccctcgccgtcctcggtggagccgcccttgcgcaccactactacaacccatcatccaacaccaacaacagcagcagcttggactacgacttctactcgcagctgccgccggccaccaccgacgacggccaggagaacgagaggtggagctggtagtgctacccttccttcctgctgcaagatgcagacaaatgaagatgatgacgatcacgatgatcaattagtaataatctaatcggctccattagttattatcttatcttaataatagagtatgtcctcctcctaatccatccacctaggatggtcttatccactccaacccatcctctgctctgtactatgtaattatccattccattccatccggaccctgcttttccgatgccttgattaaaaaaaaaaaaaaaaaaaaaaaa

SEQ ID NO: 385976 - DNA, 750 bp, Oryza sativa
  unsure (1)..(750): unsure at all n locations
ngagcggagnancngnttgcagntgnacgntgcantncntccacaccgctggctctcactcccaaatcacatcctcaaattcagattcagagtcgtcgaaatcagtagtattcatcaggaatggagcggctgagctcatcggtgcagtcgtgggtggaggaacacaagctcgccagcatcggagggctgtgggcgacggcggtgggcgcatcggtggcgtacgggcggaggaagacgccgcagatgcggctgatccacgccaggcttcacgcgcaggccctcaccctcgccgtcctcggcggcgccgccctcgcgcaccactactacaacccatcatccaagaccaacaacagcagcagcttggactacgacttctactcgcagctgccgccggccaccaccgacgacgggcaggagaacgagaggtggagctggtagtgctacccttccttcctgctgcaagatgcagacaaatgaagatgatgacgatcacgatgatcaattagtaataatctaatcggctccattagttattatcttatcttaataatagagtatgtcctcctcctaatccatccacctaggatggtcttatccactccatcccatcctctgctctgtactatgcatgtatccattccattccatccggaccctgctgttccgatgccttgattacaattgatgtcagtgcagtggtatgcttatttgttcctccatataaaaannnnnnnnnnnnnnnnnnnnnnn

SEQ ID NO: 385977 - DNA, 617 bp, Oryza sativa
  unsure (1)..(617): unsure at all n locations
tttcgacaaaacttggactccaccgcggtggcggccgctctagactagtggatcccccgggctgcacgaattcggcacgagcactctcactcccaaatcacatcctcaaattcagattcagagtcgtccaaatcactactattcatcacgaatggagcggctgagctcatcggtgcactcgtgggtggaggaacacaagctcgccagcatcggacggctgtgggcgacgcggtgggcgcatcggtggcgtacgggcggaggaacaccccgcacatgcgctgatccacgccaggcttcacgcgcaggccctcaccctcgccgtcctccggcgggcgccgccctccgcgcaccactactacaaccccatcatccaagaaccaacaacagccagccagctttggacttaccaacttcttactcgccagcttgccccccggccaaccaacccgacaaacgggccacgaaccaaggttgaacttggtaattgctacccttccctttccctgcttgcaaaattccccaccccttttaaacgattaattaaccaatcccccaaatgaatccaatttnnttaattaaatcntnaattcccgctncccnatttnaatttaaatttt

SEQ ID NO: 385978 - DNA, 550 bp, Oryza sativa
  unsure (1)..(550): unsure at all n locations
agggagnnaagnangngnnnnggngggnnngnggggggngngggaanggnanagaaggnnanaaananncccnnctttnttggggggggnccnggngggnngnnnnnnnaaaccccntnatcccnngggccnaaaaaaagnagngggggggggggangaantttaanttgnggtgccgccgggccaccaccgangacgggcaggagnangagaggnggagctggtagtgctacccttccttcctgctgcaagatgcagacaaatgaagatgatgacgatcacgatgatcaattagtaataatctaatcggctccattagttaattttatctttatcttaataatagggtatgtcctcctaatccatccagctaggatggtcttatccactccatccgcatcctctgctctgtactatgcatgtaattatccattccatccggcccctgctgttccgatgccttgattacaattcccttgttcctccgtataaaaatgcactaaaaatgagtatatgctgaacctgtttattattatctgccaaaaaaaaa

SEQ ID NO: 385979 - DNA, 1792 bp, Oryza sativa
ttcatttcctcctccccctcctcctccgccgccgcctcctcctccctgcttgtcctcgccttgctgccgccccccgccgcggcgaccgagcacgcgcacgagcaggagccatggatgaggagtacgacgtgatcgtgctcgggacgggcctcaaggagtgcatcctcagcggcctcctctccgtcgacggcctcaaggtgttgcacatggatagaaatgactactatggaggggattccacctcgctcaaccttaaccagctgtggaagaggtttagaggggaagacaaacccccagctcatctgggtgcaagcagagattacaatgtagatatggtcccaaagtttatgatggcaaatggcacattggtaaggaccctgattcacactgatgtgacaaagtatttgtcattcaaagctgttgatgggagctacgtcttcagcaaagggaagattcacaaggtacctgctaccgatatggaggctctgaagtcccctttgatgggcctttttgagaaacgcagagcaagaaacttcttcatttacgtccaagattatgatgaagctgatccaaaaacacatcaagggttggatcttactacaatgacaactagagaactgatagcaaaatatggtttaagtgacgatactgtggatttcatcggccatgcacttgctcttcatagagatgatcgttacctaaatgaaccagcaattgatactgtaaaaaggatgaaattatatgcagagtcccttccacgctttcaaggaggttcaccttctatttatccattgtacggtctgggtgagctgccacagggttttgctcgcttacgtgctgtttatggtggcacttatatgttaaataagccagactgcaaggttgaatttgatatggaagggaaagtctgtggcgttacatcagaaggagaaactgcaaaatgcaagaaagttgtttgtgacccttcctacttacccaacaaggttaggaagataggaaaagttgcacgcgctattgctattatgagccacccgattgcaaacacaaatgactcgcactcagtccagattattttgccacagaaacaacttggacgcaagtcagacatgtatgtcttcggttgctcatacacacacaatgttgctccaaaagggaagttcattgcatttgtgtctacagaagcagagactgaccatccagagtctgagctaaagcctgggattgatctacttggtcaagtagatgagctattctttgatatctatgatagatatgaacccgtgaatgagccatctcttgataactgttttgtctcaactagctatgatgccaccacacattttgagacaacggtgacagacgttcttaatatgtatacactgatcactggaaagactgttgatctcagtgtcgatttgagtgctgccagtgctgctgaaagaatattagagttcacaatcaaaatccaatcattcacaaagatataatgctattccttggcgaacaccacaggtcagaccataatgaatgactgggatggttattcgagctccagattgtgtattcagtgttctggccaatggtctgtagcatgcttgttgttatcagtaatatgctgaactgttgcttcagatgactgaatgatggtggtttttatttgctactttcagtaatggttgaatgatgtaaacagtgtacacagtggagcgctttgcgactgatgtatcatatactgctcggtaattttacatgtctgtgcaatggctgtgttcttacaaaaaaaaaaaaaaaa

SEQ ID NO: 385980 - DNA, 1770 bp, Oryza sativa
  unsure (1)..(1770): unsure at all n locations
ctcatctcaccatcccatccacgcttctcgactcccagacgacgctgctgctgcctttcgtcaaccccccacttctccttccccgccgccgctcgccgccatggatgaggagtacgacgtgatcgtgctggggacgggcctcaaggagtgcatcctcagcggcctcctctccgtcgacggcctcaaggtcttgcacatggataggaatgactactatggaggagattccacctcgctcaaccttaaccagctgtggaagaggtttagaggggaagacaaacccccggctcatctgggctcaagcaaagattacaatgtagatatggtcccaaagtttatgatggcaaatgggacactggttaggaccctcattcacactgatgtgacaaagtatttgtcattcaaagctgtcgatggaagctatgtcttcagcaaagggaagattcacaaggtacctgctactgacatggaggctctgaagtcccctttgatgggtctttttgagaagcgcagagcaaggaacttcttcatttacgtccaagattacaatgaagctgatccaaaaacacatcaagggttggatcttactacaatgacaactagagaactgatagcaaaatatggtttaagtgacgataccgtggatttcatcggtcatgcacttgctcttcataaagatgatcgctaccttaatgaaccagcaattgatactgtaaaaaggatgaaagtatatgcagagtcccttgcaccttttcaaggaggctcaccttctatctatccactctatgggttgggtgagctgccacagggccatgctcgtttaagtgctgtttatggtggcacttacatattaaataagccggactgcaaggttgaatttgatatggaagggaaagtctgtggcgttacttcagaaggtgaaactgcaaaatgcaagaaagtggtttgtgatccttcatacttacctaacaaggttaggaaggataggaaagttgcacgagcaattgctataatgagccacccaattgcaagcacaaatgactctcactcagtccagattattttgccacagaaacaacttggacgcaagtcagacatgtatgtcttctgttgctcatacacacacaatgtcgctccaaaggggaagtttattgcatttgtatctacagaagcggaaactgacaatccacagtccgagctaaagcctggaattgatctacttggtcaagtagatgagctattttttgatatctatgatagatacgaacctgtgaatgaaccatctcttgataattgttttgtctcaactagctatgatgccaccacacattttgagacaacggtgacagatgttcttaacatgtatacattgatcaccggaaaggctgttgatctcagtgttgatttgagtgctgccagtgccgctgaagaatattagatttcacaaccaaagctcaatcatttcacaaagatatgctttttcttggtgggtaccgcaggacagatcgtaacgagtgactggtatagttattcaaactccacgttataccgagtgttctggccaatatggcttgttgctagcagtaatatgcacaactgttggccaagatgactgaaatgatggtggtttaatttgatacttcagtaatgcaatggtgtaaacagtgtacacactacacaatgacggtcgggcgttttgtgactgatgtatcataactgctggataattttgcatgtctacttctgcnnnnnnnnnnnnnnnnnnnnnnn

SEQ ID NO: 385981 - DNA, 923 bp, Oryza sativa
  unsure (1)..(923): unsure at all n locations
gtggtggagaggagaggagatcagggggaggaagggtggccggcgcagcagatcggggcgggcggatttaggggaggagcgcgctagccgggagcggcggcgatggatgaggagtacgacgtgatcgtgctggggacggggctcaaggagtgcatcatcagcggcctcctctccgtcgatggcctcaaggtccttcacatggacaggaacgattactatggaggagaatctacatcccttaatctcactaagctctggaagagattcaaaggcaacgagaccgctcctgaacatctgggtgtcagcaaggagtacaatgttgacatggttcccaagttcatgatggccaacggtgcactggtccgtgtactcatccacacgagtgtgacaaagtatctgaatttcaaggctgtcgacggcagcttcgtgtacaacaatggcaagatccacaaagttcctgcaactgatgtcgaggccttgaaatctaatctaatgggcctttttgaaaagcgccgtgctaggaaattcttcatatacgtgcaggattacgaagaggatgatccaaagtcacacgaaggcctggttctgcacaaggtcacgacgagagaagtcatctccaagtatggcctcgaggatgacacagtggactttattgggcatgcattggcacttcatcgagatgataactatctcgatgaacctgcaattgacactgtgaaaaggatgaagctttacgcagaatcactcgctcgttttcaaggaggatcaccttatatctaccctctgtatgggctagcagagctccctcaggcctttgctcgtttgagtgctgtttatggtggcacatacatgctaaacaaagcagaatgcaaggttgagtttgatgaaatgggaaagcatacggtgtcacttccgaggggggn

SEQ ID NO: 385982 - DNA, 882 bp, Oryza sativa
gattcggccgagggctacattctagctttgctcgcctgagttctttgcttgtcctcactagcggtgtttgacagtttgagttgttagcaatggcggccgctaccatggcgctgagcagctccttcgccgccgtcgcagccgccgctggtggcgcgccatggcgcgccgcggtacgcttcccgcctcgccggcgtgttgcgctcgtcgtcagggcccaggccgagccggaggtggagccgacgaaagaggagacggctacctcgtcgtcaccgactccgagccccgcagcggcggcgcccagggcgaagccggcggcgagcacggggctgtgggacgtgctggcgttcaacgggccggcgccggaacggatcaacgggcggctggcgatggtggggttcgtgtcggcgctcgccgtggaagcgtcccggggcggcgggctcctggacaggccggcagcggggacaggctcccgtggttcgccgccaccgccaccgtgctctccgcggcgtcgctggtgccgctgctccgcggcgaaagcgcggaggcgaggagcggcggcgtgatgagcgccgacgccgagctctggaacggccgcttcgccatgctcggcctcgtcgccctcgccttcaccgagttcctcaccggctcgcccttcgtcaacgtctaattaatcaattcaattaaattaattaagctgtgtacaagtacagtatgtatatactgggtagctagctagggttgtgtttgtgtgtgtatacattgtagcaagtagcaagcttatagtgcttggtgtactaccttggaatttgagaagggattaaaattttagaactcttacaaaaattggtgagaaaaaaaaataataaatattaaggggggtgg

SEQ ID NO: 385983 - DNA, 722 bp, Oryza sativa
  unsure (1)..(722): unsure at all n locations
ctgactctctttgatctcataaggggtgcaccagctccttcgccgccgtcgcagccgccgctggtggcgcgccatggcgcgccgcggtacgcttcccgcctcgccggcgtgttgcgctcgtcgtcagggcccaggccgagccggaggtggagccgacgaaggaggagacggctacgtcgtcgtcaccgactccgagccccgcggcggcggcgcccagggcgaagccggcggcgagcacggggctgtgggacgtgctggcgttcagcgggccggcgccggagcggatcaacgggcggctggcgatggtggggttcgtgtcggcgctcgccgtggaggcgtcgcggggcggcgggctcctggagcaggccggcagcggggacgggctcgcgtggttcgccgccaccgccgccgttgctctccgcggcgtccctggtgccgctgctccgcggcgagagcgcggaggcgaggagcggcggngtgatgagcgccgacgccgactctggaacggccgcttcgccatgctcggcctcgtcgccctcgccttcaccgagttcctcaccggctcgccttcgtcaacgtctaattaatcaattcaattaaattaattaagctgtgtacaagtacaagtatgtatatactgggtagctagctanggttgtgtttgngtgtgtatacattgtaacaagtancaagctttatagtgctttggggtactanctttg

SEQ ID NO: 385984 - DNA, 385 bp, Oryza sativa
cagcaccagccgaaagagtgatctagctagctcgcctgagttccgtgcttctccagatcgatcgtttcgcgcgcagtctccgccttcatctgctgtgtgatttgagttattattagcaacaatggcggttgctaccatggcgctgagctcctccttccccgccgccgccgctggtagcgcgccatggcgtggtgtcgtcgccgcctgcaccgccgtacgatctgggggtgtcttaccgacgcgtgcgacctcatccgcgctcaggcgtacaacccacacatataccgagaggccaacctctaatgatgaggtgctgacgctgtttctagcgcctccgacgacgaagtctacagggactacctatactacgacgagcccaacaagg

SEQ ID NO: 385985 - DNA, 516 bp, Oryza sativa
  unsure (1)..(516): unsure at all n locations
tttnggtgaggatgcccgttcgagatccggccggtgatctagctagctcgcctgagttctttgcttctccagatcgatcgtttcgcgcgcgtctccgcgttcatctgctgtgtaatttgagttattattagcaacaatggcggttgctaccatggcgctgagctcctccttcgccgccgccgccgctggtagcgcgccatggcgtggtgtcgtcgccgccggccgcgccgcggttggcttcccgcctcgccgtcgtgctgccgcgctcgtcgtcagggcccaggccgagccggaggtggagccgacgaaggaggaggcggcgacgtcgtcgtcaccgactccgactccgagccccgcggcggcggcgcccagggcgaagccggcggcgagcacggggctgtgggacgtgctggcgttcagcgggccggcgccggancggatcaacnggcggctggcgatggtggggttcgtgtccgcgctcgccgtggaagcgtcncgcggcggcgggctcctgga

SEQ ID NO: 385986 - DNA, 1656 bp, Oryza sativa
  unsure (1)..(1656): unsure at all n locations
ccacgcgtccgcccacgcgtccgcccacgcgtccgcccacgcgtccgccacggcctgcaaagaaaaggcctgtgtcaaggagagggtagtagcaccttgctctcctttgccttcagagaaaccggaagcaatggcgtctgctactctcctcaagtcatctttccttcccaagaagtctgaatggggtgccacccgccaggctgccgcccccaagccggtgactgtctccatggttgtccgcgctggtgcctacgacgatgagcttgtcaagaccgcgaaaaccattgcatcaccaggaaggggtatccttgccatggatgagtcgaacgcgacctgcggtaagaggcttgcgtcaattggccttgagaacaccgaggccaaccgccaggcttaccggaccctccttgtcaccgcaccgggcttgggacagtacatctccggtgctatcctcttcgaggagactctgtaccagtcaactgtagatggcaagaagattgtcgacatcctcactgagcagaaaatcgttccaggtatcaaggtcgacaagggtcttgtgccccttgctggctccaacaacgagtcatggtgccaaggtctcgacggccttgcctcgcgcgaggcggcatactaccagcagggcgctcgcttcgccaagtggcgcactgttgtcagcatccccaacggcccatctgaaacgggctggtgccgattgtcgagcctgagatcctcctcgacggtgagcatggcatcgacaggaccttcgaggtggcgcagaaggtgtgggcggagaccttcttctacatggccgagaacaatgtgatgttcgagggcatcctcctcaagccaagcatggtgacacccggtgccgagtgcaaggacagggccacccctgagcaagtatctgactacaccctcaagctcctccacagaaggatcccccctgccgtccccggcatcatgttcttgtcgggtgggcagtcggaggtggaggcgacgcagaacctgaacgcgatgaaccaggggcccaacccgtggcacgtgtcgttctcgtacgcgagggcgctgcagaacacgtgcctcaagacgtggggcgggcagccggagaacgtgaaggcggcgcaggacgcgctgctcctccgcgccaaggccaactcgctggcgcagctcggcaagtacaccagcgacggcgaggccgccgaggccaaggagggcatgttcgtcaagaactacgtctactaatccgatccaatccaatcaagacagtgaacctgctgctgctgctgctacgtactacagctactgctatactgctagtacctccaaggggggccggtgccgattcgccctatagtgagtctattacaattcactggccgtcgttttacaacgtcgtgactgggaaaaccctggcgttacccaacttaatcgccttgcancacatccccctttcgccagctggcgtaatancaaaaaagcccnccaccgatcncccttcccaanatttgcccncccttaatgggnaaatggcaaatttttacccttaatttttttttaaaatcccccttaaatttttnttaaancacctcattttttaaccaatangccnaaattcgggnaaaatcccttnttnnttcnnnanaaatanaccnagatttn

SEQ ID NO: 385987 - DNA, 1726 bp, Oryza sativa
  unsure (1)..(1726): unsure at all n locations
ggtaccgattcggggttcgacccacgcgtcacgcgtcccgtgacccgtcgcgtgggcggacgcgtgggctgacgcgtgggcggacgcgtgggtgcaaagaaaaggcctgtgtcaaggagagggtagtagcaccttgctctcctttgccttcagagaaaccggaagcaatggcgtctgctactctcctcaagtcatctttccttcccaagaagtctgaatggggtgccacccgccaggctgccgcccccaagccggtgactgtctccatggttgtccgcgctggtgcctacgacgatgagcttgtcaagaccgcgaaaaccattgcatcaccaggaaggggtatccttgccatggatgagtcgaacgcgacctgcggtaagaggcttgcgtcaattggccttgagaacaccgaggccaaccgccaggcttaccggaccctccttgtcaccgcaccgggcttgggacagtacatctccggtgctatcctcttcgaggagactctgtaccagtcaactgtagatggcaagaagattgtcgacatcctcactgagcagaaaatcgttccaggtatcaaggtcgacaagggtcttgtgccccttgctggctccaacaacgagtcatggtgccaaggtctcgacggccttgcctcgcgcgaggcggcatactaccagcagggcgctcgcttcgccaagtggcgcactgttgtcagcatccccaacggcccatctgaactcgccgtgaaggaggctgcctggggccttgcccgctacgccgccatttctcaggacaacgggctggtgccgattgtcgagcctgagatcctcctcgacggtgagcatggcatcgacaggaccttcgaggtggcgcagaaggtgtgggcggagaccttcttctacatggccgagaacaatgtgatgttcgagggcatcctcctcaagccaagcatggtgacacccggtgccgagtgcaaggacagggccacccctgagcaagtatctgactacaccctcaagctcctccacagaaggatcccccctgccgtccccggcatcatgttcttgtcgggtgggcagtcggaggtggaggcgacgcagaacctgaacgcgatgaaccaggggcccaacccgtggcacgtgtcgttctcgtacgcgagggcgctgcagaacacgtgcctcaagacgtggggcgggcagccggagaacgtgaaggcggcgcaggacgcgctgctcctccgcgccaaggccaactcgctggcgcagctcggcaagtacaccagcgacggcgaggccgccgaggccaaggagggcatgttcgtcaagaactacgtctactaatccgatccaatccaatcaagacagtgaacctgctgctgctgctgctacgtactacagctactgctatactgctagtacctcgagggcactgtagccagtgtgtcgtcacagttacaggttgagatcgatggacaaagttaaaactatactgcattaattaattttaccttgagaacatacgtggttcatcatgtatttcatcacatgaatcttttctagagcgtttgatatacatacctcgtgttttgcctctgcaataaccttgtgtgtagacgaatctgtatactacctgtatgtgtggcctgtgaatcgatttggttactgcaaagttttgcgtatatatacatgcttgtgattctggaattaaaaaaaaaaaaannnnnnnnnnnnnn

SEQ ID NO: 385988 - DNA, 714 bp, Oryza sativa
  unsure (1)..(714): unsure at all n locations
ngaaaaccttagtnttcaaagnagatcccccccttcccggaatattttttttgggggccttnggagnggggggaagcagactgaacggagaaccgggcccaacccgggaaggttttttttttaaggnggggntgcagaanantgccttcaagaagtgggggggcagcgggagaangtgaaggcggcgcaaggacgcgttgttcttccgcgccaaggcnaattcgctggggcagntcggcaagtaacaccagcgacgggcgaggccgccgaggccaaggagggcatgttcgtcaagaactacgtcctactaatccgatccaatccaatcaagacagtgaacctgctgctgctggctgctacgtactacagctactgctatactgctagtacctcgagggcactgtagccagtgtgtcgtcacagttacaggttgagatcgatggacaaagttaaaactatactgcattaattaatttttccccttgagaacatacgtggttcatcatgtatttcatcacatgaatcttttctagagcgtttgatatacatacctcgtgttttgcctctgcaataaccttgtgtgtagacgaatctgtatactacctgtatgtgtggcctgtgaatcgatttggttactgcaaagatttgcgtctttttgaaaaaaaaaaaaaacaacacagaaaaagaacaaattaaaataaaaaaaaagggcgg

SEQ ID NO: 385989 - DNA, 597 bp, Oryza sativa
ccacgcgtccgcggacgcgtgggcggacgcgtgggcggacgcgtgggcggacgcgtgggcgagtgcaaggacagggccacccctgagcaagtatctgactacaccctcaagctcctccacagaaggatcccccctgccgtccccggcatcatgttcttgtcgggtgggcagtcggaggtggaggcgacgcagaacctgaacgcgatgaaccaggggcccaacccgtggcacgtgtcgttctcgtacgcgagggcgctgcagaacacgtgcctcaagacgtggggcgggcagccggagaacgtgaaggcggcgcaggacgcgctgctcctccgcgccaaggccaactcgctggcgcagctcggcaagtacaccagcgacggcgaggccgccggaggccaaggagggcatgttcgcagactacttctatcgtcaatcataagacggacctgtgtgtgtgtcgctaagtacgttactgtgcctgggcctgagcagggcgacagtcaggtggatcgaggcaagtaaactatctgattattatttacctggacatacgggtcatatgttttatacatgatctttttaggcgttgattacatc

SEQ ID NO: 385990 - DNA, 1593 bp, Oryza sativa
  unsure (1)..(1593): unsure at all n locations
tctacttcttcactccgccgctggcttaataattcctgaaccggcgagcgaccttntcgacctccgtcatgcaggtgtccgcgtgcttcccttctgagcgttgggtagttgtgtggtttgtcactgtgtttgatgttggtgttggtatcatgttatcctgtgttgtgtagctgatgaaataaatgtgatgcattggtcattgttgctgcaagaggcttcaaatgcctgttttccaaaaaaaaaaaaaaagggcggccgctttttttttttttaataatagccaaaccagtttaatatattcatcacttcatctgtggatacaccattacaagcatagtacgtgaatagtgaaaccaataacatagcacatcgattaacccatcacacacacacacacaccccatatatattggtcaagcaccaacccaaatggccaagcttctttatttttctgcatcacaattcacacgcacacatgatagatggtagatgcaggcaggcatcttagcagttgcaagggttgcacctgcagctggaaccgcagctgcagccatgggcggtctcgccggactctgcgggccgccttggccttggccttctccatctccgtcgtggtctccagcgccggtggtgccgggagcggcttgggaacggaggaggaggagttgacggagaagcgaacctcgatgtcgagccaggagtcgaggccgacgaggttgttgaactcggtgaaggtggtgaggcggtggagctcgtcgcgggtggtctcggcgcgcttgagggcggcgaggacgtcgacgagggcgcgggcggcagcgtagacggtggtgaggggggacttgatgaggtggaaccccatctccatgagctcctgcctcgtgtgcagcggcgtcttcccgccctccagcatgttgcacacgcgataacccttggtcctcctgcagatctccatcagctcctcgtcctccgcggcgcctccacgaagcacgcgtctgctcccgcatctatgtagagattggcacgcctaatggcatcatcaagaccagtgacagatcgagcgtcagtccgggccacgataaagaagtcccgatcaccaacgaccctctcctcgctgcagctatcttcacagcgtgctccctctgctggtatcacctgcttgccatgcatgtgtccacacttctttggccatgcctggtcctcgaggaagcagcctgcagcacctgctgccatcaggtcctgaacagtacgcttcacattgcagagccattgccaccaccagtgtctggagggaaaaaaagaatacattttgcatcagacaacagaaaatcatattaatcatgtacagtaagtgatgctaattaaaatacaatttatttaaagttaaaaagggctaaagtacgtcatctcaacagtaatcatcgtcatggcatgcataattaaaaaaagctgtagcagtacttgtgtcaacattcttttagcactgaaggaaacagatcacctagcaaatgtctccaggagaacaaaaatataattttgtccttataaactactcttcttaaacagtttcatgcaccaacatatatactttttttt

SEQ ID NO: 385991 - DNA, 645 bp, Oryza sativa
  unsure (1)..(645): unsure at all n locations
ctgggctgagatncggttcgagctcgtgccgaattcggcacgagacaacctcagctcagctagcaaaagtacaatatcccttgtacggacgcctagctaagctaagctaattaagctctaatttctcttttcttttttcttcgatctccggcgaaaaagtaagtacaatggccgaggtgaacggagccaataacggcaacggccaccacggccacggcaacggcagcggcgctgcggcggcggcggggcggtcgacgagtgtgtcgaggaagatcgagtcggagggggcggtgctgatgcccggggtgtacgacgcgctgtcggcggcgatcgtccagaagaccgggttctacgccggcttcatctccggctacgccgtctccggctccttcctcggcacccccgacgtcggcctcctcacgccgccggagatggcggaagtggcgaggcggatctgcgcgtcggcgcccaacacactcttcatcgccgacgccgacactggtggtggcaatgctctgaatgtgaagcgtactgttcaggacctgatggcacaggtgctgcangctgcttcctccaagggggggccngtncccaattcncctatantgagtctattacaattcactggncgtcttttacaacgtn

SEQ ID NO: 385992 - DNA, 664 bp, Oryza sativa
  unsure (1)..(664): unsure at all n locations
ccacgcgtccgcccacgcgtccgcccacgcgtccgcccacgcgtccgcaaaagctcttcttcttctccttagttgatttcatcttcagttgcttgagcttaattacagactgagagaagatgtcttgcagctgtggatctagctgcagctgcggctcaaactgctcctgcggaaagaagtaccctgacctggaagagaagagcagcagcaccaaggccaccgtcgtgctgggtgtggcgccggagaagaaggcgcagcagtttgaggcggccgcagagtccggcgagaccgcccatggctgcagctgcggttccagctgcaggtgcaacccttgcaactgctaagatgcctgcctgcatctaccatctatcatgtgtgcgtgtgaattgtgatgcagaaaaataaagaagcttggccatttgggttggtgcttgaccaatatatatggggtgtgtgtgtgtgtgtgatgggttaatcgatgtgctatgttattggtttcactattcacgtactatgcttgtaatggtgtatccacagatgaagtgatgaatatattaaactggtttggctattatttcctatgtatatgtattttgtaccttcaatagtggctccctccgnnnnnnnnnnnnnnnnnnnnnnnnnnnnnnnnnnnnnnnnnnnn

SEQ ID NO: 385993 - DNA, 1412 bp, Oryza sativa
ccacgcgtccgcccacgcgtccggtcgagctgagagtgatcgatctttgttagctagagtgttgagcaatggcgtccaagctgggtatggttgtgctactgatctcgggcctctttgctgcccgttgcgcggccgtggtgaccaccggcgaacccgtcgtcgccggcctctcctgggggttctatgacacgtcgtgcccgtcggtggagggcatcgtgaggtggcacgtcaccgaggccctccgccgcgacatcggcatcgccgccggcctcgtccgcatcttcttccacgactgcttcccgcaggggtgcgacgcgtcggtcctcctgacgggttcccaaagcgagctgggtgagatacccaaccagacgctgcggccgtcggcgctgaagctcatcgaggacatccgcgccgccgtacaatccgcctgcggcgccaaggtttcttgcgccgacatcaccacgctcgccacgcgtgacgccatcgtcgcttccggcgggccctacttagacgtgcctctggggcggcgcgacgggctggcaccggcgtcgagcgacaaggtggggctcctgccggcgcccttcttcgacgtgcccacgctcatccaggcgttcaaggaccgaaacctggacaagacggacctggtggcgctgtccggcgcgcacaccatcggactaggccactgcggcagcttcaacgaccgcttcgatggctccaagcccatcatggaccctgtgttggtgaagaagctgcaggccaagtgcgccaaggacgtgccggtgaactcggtcacgcaggagctggacgtccgcacgcccaacgccttcgacaacaagtactacttcgacctcatcgccaagcaggggatcttcaagtccgaccagggcctcattgaggacgcgcagaccaaccgcaccgccgtccgcttcgccctcaaccaggccgccttcttcgaccagttcgcacgctccatggtcaagatgagccagatggacgtcctcaccggcaacgccggcgagatccgcaacaactgcgccgctcccaaccgccgctcctccgacctcctcaacgctgccgacgacgaccaaggcttcgccgccgacgcctaattaacttatggagtaattagtgatcgttttatgtttatgttttgtgctagtaataataattaagaggatgccatctgcgcgtggtgtttggtttccatgcattctctgcttagttagaatggttttgcttcataaaaagtaaagttactactcgattcctcggtcgggacagagtaactgcatgtcaaatgtatcatcatcatcagttagtgctacatcatcacaactgtctttgtcacagcataaacccaaaattaatgtttccatcgttcggcatagcaccacacttaatcagataaaaac

SEQ ID NO: 385994 - DNA, 1443 bp, Oryza sativa
aaaccccctccaaaccctaacgcacgagcgacctccccttcctccgccgccgccgccaccgccaccgccaccgccacgtccagcctccggtcgcctgttcggatcgaagcgatgtcgtcggacgatgaggtcagagaggagaaggagctcgacctctcctcctccgacgtcgtcaccaagtacaaggacgccgccgatatcatcaacaatgctcttaagttggtagtgtctttgtgcaagccgaaagccaagattgttgacatctgtgagaagggcgattcttacataagagagcaaactggcaacatctacaagaatgtgaagaggaagattgaaagaggtgttgcttttccaacatgtgtatctgtgaacaacacagtctgccatttctctccgctagccactgatgaggcagtcctggaggaaaatgatatggtcaaaattgatatgggatgtcatattgatggttttattgccgtggtggctcatacacatgttatccatgatggagcagtcactgggaaagcagcagatgttcttgctgctgccaacacagcggcagaagttgctctgaggtttgttagacctgggaagaagaacaaggatgtcaccgaagcgattcagaaagttgctgctgcctatgactccgtatctgttgaaggagttctcagccatcagctgaaacagtttgtcattgacggtaacaaagttgtacttagtgtgtccaatgctgatacgaaggtggatgatgctgaatttgaggaaaatgaagtgtatgcaattgatattgtcaccagcactggagaagggaagcccaagttattggatgagaagcagaccaccatctacaagagagctgtagacaagaattatcacttgaagatgaaagcatctaggttcattttcagtgagataagccagaagtttcctatcatgcccttcactgctagggcattggaagagaagcgtgcacgcttaggtttggtggaatgcatgaatcatgaattattgcagccgtaccctgtccttcacgagaagccaggcgaccttgttgcacacatcaagtttactgtgcttctgctgccatctggttcacagagggtaacatcgcattcacttcaggagttgcagcccactaaatccattgaagacaacgctgagatcaaggcatggcttgctttggggacaaaaacaaagaagaaaagtggtgcccaaaagaagaaaggtaagaaaggagatgcagcagaagcagtgcctatggaggagggttcaaatgatgcaaacaaagaataactgattgttcttttgaattgcttccgttagttttgtacttgctccactgcatctgatgctattatatcacattcagttgtggaaaatcgagtactttttcaaacttcctgggaaatgatccgtcctgctgcacactcattgtccaaaaaa

SEQ ID NO: 385995 - DNA, 886 bp, Oryza sativa
  unsure (1)..(886): unsure at all n locations
cggcacgagcacttctcactagctcgtagacagtgctgcacgtgggttagctacttagctctttctctgcattgctggcttaattttgcagctgcaggtgtgctcgatccccatggctgatcagcacagaggagtgatcggcggcggcggctacggtgaccgtggtggccaggagcagcaggagaagcagcccttcatgatgacggctctgaagacggtgaccgcggcgacggccgggggctcgatgctggtgctgtccgggctgatcctggccggcaccgtcatcgcgctcacggtggccaccccggtgctggtcatcttcagccccgtgctggtgccggcggccatcgcgctggcgctcatggcggccgggttcgtcacctcgggcgggctcggcgtggccgcgctctccgtgttctcgtggatgtacaagtacctcaccgggaagcacccgccgggcgccgaccagctggaccacgccaaggcgaggctcgcgtccaaggcccgcgacatcaaggaggcggcgcagcaccgcatcgaccaggcgcaggcgtcttagggcggcctgccgcggcgaggcgccgcttctgctagctagctcgatcgggcggcgcacgggacggcgccggccggcgcgcgtgcgttcgccgtggccacgcccacgctggctactcctcttatctgctgagctctgtaaatgcatgcgtacatgtttaattaagcttggtcgcgtagtactctcctatgtaatatgtcccctagattatctaagaggcgatcgtgcatgtcgggcgcctggtacgtgtggtctggtggatgtcgtgtttatggtcatgatgaataaaatgcagtgttccttcgataaaaaaaaaaaaaaaaaannnnn

SEQ ID NO: 385996 - DNA, 1666 bp, Oryza sativa
  unsure (1)..(1666): unsure at all n locations
ccacgcgtccgcggacgcgtgggcggacgcgtggcggacgcgtggcggctgcaggattcggcacgagtcttcttgatctgatcgtcggacatggcgtcgcccatgctctccgccgccaccgtgccactccagggaggcggcttgtcggagttctccggcctgaggagctcgtcgtcgctgccgctgcggcggaatgccacctccgacgacttcatgaacgcggtctccttcaggacccacgcggttggcacgagcggcggggcgcggcgggcgccgacggaggcgaagctgaaggtggcgatcaacgggttcggccgcatcgggcgcaacttcctgcggtgctggcacgggcgcggcgacagctcgcccctcgacgtcatcgccatcaacgacaccggaggcgtgaagcaggcgtcgcacctcctcaagtacgactccacgctcggcatcttcgacgccgacgtcaagcccgtgggcgacaacgccatctccgtcgacggcaaggtgatcaaggtcgtctccgaccgcaacccgtccaacctgccgtggggcgagctcggcatcgagctcctcatcgagggcaccggtttgttcttcaacgccaacggcgcgggcaagcacatccaggccggcgccaagaaggtgctcatcaccgcccccggcaagggtgacatccccacctacgtcgtcggcgtcaatgccgaccagtacagccccgacgagcccatcatcagcaacgcctcctgcaccaccaactgcctcgcccccttcgtgaagatcctcgaccagaagttcggcatcatcaaggggacgatgaccaccacccactcctacaccggcgaccagaggctgctcgacgcgagccaccgtgacctccggcgcgcgcgtgcggcggcgctgaacatcgtgccgacgtccaccggcgcggccaaggccgtggcgctggtgctcccgaacctcaaggggaagctcaacgggatcgcgctccgggtgccgacgccgaacgtgtccgtggtcgacctcgtggtgcaggtgtccaagaagaccctcgccgaggaggtgaaccaggcgttccgcgacagcgccgccaacgagctcaagggcatcctcgaggtctgcgacgtgccgctcgtgtccgtcgacttcaggtgctccgacgtgtcgtgcaccatcgacgcgtcgctcagcatggtcatgggcgacgacatggtgaaggtcatcgcctggtacgacaacgagtggggatactcgcagagggtcgtcgacctcgccgacatcgtcgccaaccagtggaagtgagaacgtagaagctgctgctgctgctgcctttgtaactccacctcgctccaaaaattttccccagacttcttccttcttcctctcgatcctttgtaatgagaatttcgaagtttcgagcgcccaacacagtttcttgtttctttctttgcttttcttccccacctcatctgacttttcactgtccggcacggattattatcgacttccggcaattggaaatcgcaatgctgtgtaatgttcatgtgtaataccgtatatactaccggacaccggttgccaggttctggtatagaatttcagcatgttgcttgggaccaaataaaaaaaanaaaanannnnnnnnnnnnnnnnnnnnnnnnnnnnnnnn

SEQ ID NO: 385997 - DNA, 902 bp, Oryza sativa
  unsure (1)..(902): unsure at all n locations
cgcgtccgcggacgcgtgggtcgcccaggcgtccgtgtgacggcacctgtcgactatactgccaccaccactgaccggccactactcatccagctaactaggagaaggaaaaaagaagaacacagatactttggtaacaagcaagaaattggcacagaaatggctctgaggctgtgggctagctcagctgccaatgccctcaagatctcatgcagtggagccaccagggctgcacctgcctactcaatctccagatacttctccactgttcttgatgggttgaagtacagctcctctcatgagtgggtcaagaatgatggctctgtggccacaattggaattacagaccatgctcagggccatctgggagaggtggtgttcgtggagctgccggaggcgggggcgaaggtgagccagggaggtgcattcggcaacgtggagagtgtgaaggccaccagcgacatcaactcccccatctccggtgaggtcgtcgaggttaacgacaagctctctgagacacccggcctgattaactcaagcccgtacgaggacgggtggatgatcaaggtgaagccgagcagcccgtcggagctggacgccctgctggacccggccaagtacaccaagcactgcgaggaggaagacgctcactaggctcttcctctctgttttttttcttcccattttgtcactccgacctaatttctccctgttgcaacaactgctctgtatccgtatacgattaataactgaatcttcaggctttgccatgtgttcagttggttctctgaacttctggtgggtctatctattcatctatgcttaattagtcacttcaagccagtggtctgtggnnnnnnnnnnnnnnnnnnnnnnnnnnnnnnnnnnnnnnnnnnnnnnnn

SEQ ID NO: 385998 - DNA, 1168 bp, Oryza sativa
  unsure (1)..(1168): unsure at all n locations
ccacgcgtccgcccacgcgtncgcggacgcgtgggtcgagactagactcgtgccgaattcgggagcgtcgtcctcttcgtttcgcttctcctcctcctcctccgcctccgctctcgcgagatctcctgatcgactcgctccgccatggctggagaagctgatggaaaagccccactgggatcaagatacccccctgctgctctcaacgagcgcatcctttcttccatgtctcaaaaacatgttgctgctcatccatggcacgatctggagataggtccaggagctccagcagttttcaactgtgtggttgaaattcctagaggcagcaaggttaagtatgagttggataaggcaactggtctaattaaggttgatcgtgttctttactcatctgttgtttacccacacaactatggtttcattccacgcacactttgtgaggacggtgaccccatggacgtcctcgtcctgatgcaggaacaagttgtccctggatgtttcctgcgagctcgtgctattgggctcatgcctatgattgatcagggtgagaaagatgacaagatcatagctgtttgtgctgatgaccctgaataccgccacttcagggacatcaaggaaatcccccttcaccgccttcaagagatccgccgcttctttgaagactacaagaagaatgagaacaaagaagttgctgtcaatgagtttctcccagcagaagatgccatcaacgcaatcaagtactcaatggacctctacggcgcctacatcattgagagcttgaggaagtgatctccagctgatcaactgcagaggctacatgattcactgaacagtttctcatcaatagtacgacatatgttaacatacatggtctaaaaccagtacttcggggatatataccttctactattcatgttaagacaagaagcagcaccttttctttccatgtatgccatgtcagatactcgggtcccaagcacctgacccctttgctgaactctctgctgcccaaaccgacagtttgctgaacggttacctaatagaaatcaaccatttacataaaggctcattggaatcctttttgacaaatcgtgtgattctgcctgtgtaagcatgatttactgcattctgattctgccttgtgttttcaaaaaaaaaaaaaaaaaaa

SEQ ID NO: 385999 - DNA, 1329 bp, Oryza sativa
ccacgcgtccgcggacgcgtgggcgcgagtcggcggcgacaacaaatcgaaaatcgaacgggagaaattctctctgattctctctcgcgggcggcggaagcaatcgtagttagcagaggccggcgagcgagccgccaccggcgatgggcgacagccagtactccttctccctcaccaccttcagcccgtcggggaagctggtgcagatcgagcacgcgctgacggcggtcgggtccggccagacctccctcgggatcaaagctgctaatggagtagttattgccaccgagaagaagttgccttctattttagtggatgaaacatctgtgcaaaagattcagtcgttgactccaaatattggtgttgtctacagtggcatggggccagacttccgtgttttagtgaggaaaagtcgaaagcaagcacaacagtattatcgtctgtacaaggaaactatacctgttacacagctagtccgagaaactgctgctgtcatgcaggaatttacacaatctggtggtgtaagaccatttggtgtatctttgttgattgctgggtatgatgacaatggtccccaattgtaccaggttgatccatccgggtcatacttctcctggaaagcatcggctatggggaaaaatgtgtctaatgcaaaaacatttcttgagaaaagacacacagaagatatggagctcgacgatgccattcatactggtattttaattctgaaagaaggatatgaaggacaaatctccgccaacaacatcgaaattgggataatccgatccgaccgtgaattcaaggttctgagccccgcagagatcaaggtttcttggaagaggtggaataatttgtctcaacaatctcatgtttcaaaccagtggacacccgagcagctgcctcgaagttatatcccctttcattcatgaactgattggcaccagtgacacgagacaaatgtttattcagattctcatgaacgaaaatgtgtttttaggaacgtatttgatttggcacggtgttttctgcatcctcttgtgcccatcctagtttcttgggccagtgcaacaactattcggcgtctcctaacttttgtagtctgtttcacttcttgccaaacgaagcacatgccatcttttgctcttgcaacggcaaaaaaaaaaaaaaaaaattaggacttggaagcccacccagttgttgcagctgttacactggtggtggtaaatcgctgtctggtgtaccatctgagccgtaattctggactgccatctcccaatctaactcatgtcctctttaaagcaaggaactgactaaaagctgattcatcgt

SEQ ID NO: 386000 - DNA, 933 bp, Oryza sativa
ccacgcgtccgcccatctcccgcacgagcttcttccctctcctcctccgccgccgccgccctcccctctcgccatggcgtcggagaagaagcagtcgaacccgatgcgggagatcaaggtgcagaagctcgtcctcaacatctccgtcggcgagagcggcgaccgcctcacccgcgcctccaaggtgctggagcagctgagtgggcagaccccggtgttctccaaggcgaggtacaccgtgaggtcgttcggtatccgtcgtaacgagaagatcgcgtgctacgtcaccgtcaggggcgagaaggccatgcagcttttggagagtggcctcaaggtcaaggagtacgagctgctgaggaggaacttcagcgagaccggatgcttcgggttcggtatccaggagcacattgatcttggcatcaagtacgacccgtcaactggtatttatggcatggacttctatgttgttcttgagcgtgctggataccgtgttgctcgccggcgcaggtgcaagtcccgtgttggaatccagcacagggtgaccaaggaagatgccatgaagtggttccaggtcaagtatgagggtgtcatcctcaacaaggcccaagcaaacacgtcgtaattggcaagggtttaaccagttatcctgtagaattaagcgagggttcatttgaatcatggaactgtctttcttgaaagccaaatgcactgtcaattttgcctctgttggagtcgacctgcgtctatatttccattaaacgcttaatgatatccttgttttaaatcttaatattaaggcagacttggaatcaatccacccgctttgtaacctgtatttctgccttatcctgtgtcaggcaaaagctaagtagcaacggtcaaattgttcattttagtgatgttctaaaaaaaaaaaaaaaaaaaaaaaaaaaa

SEQ ID NO: 386001 - DNA, 846 bp, Oryza sativa
  unsure (1)..(846): unsure at all n locations
ccacgcgtccgcccacgcgtccgctcctacaaagctccttccccgccgccgcccgagcaacactaaaccccccatctccgccgctcccgcctccccctcgccgccgccgcctcccagatctcgccatggcgtcggagaagaagcaggcgaacccgatgcgggagatcaaggtgcagaagcttgtcctcaacatctccgtcggcgagagcggagatcgcctcacccgcgcctcgaaggtgctggagcagctgagtgggcagtcaccggtgttctccaaggcgaggtacactgtgaggtcgttcggcatccggcgtaatgagaagatcgcgtgctacgtgacagtgcgtggtgagaaggcaatgcagctcctggagagtggcctgaaggtgaaggagtacgagctgctgaggaggaacttcagtgagactggatgctttggttttggtatccaggagcacattgatcttggcatcaagtatgacccatccactggtatttacggtatggacttctacgtcgttcttgagcgtgctgggtaccgtgttgcgcggcgccgtaggtgcaagtcccgtgttggtatccagcacagggtcaccaaggaggatgccatgaagtggttccaggtcaagtacgagggtgtcatcctcaacaaggcccaagccaacacctcctaagcgtcactagtgcctagttctctttagaacttgagttatttggatgttggatttgtatgcttcttaaaactaaagatgttttgttattttgtcaactttgagttggatcagttttggtggtatgtactttcccgggcggccgctcgnnnnnnnnnnnnnnnnnnnnnnnnnn

SEQ ID NO: 386002 - DNA, 403 bp, Oryza sativa
  unsure (1)..(403): unsure at all n locations
ccaggagcacatttgatncttggcatcaagtangacccttcaacaggtatcttatgggaatngactttctatgttgtgcttgagcgtgctggctacccgtgttgcccgtcgtcggaggtgcaagtctcgcgttgggatccagcaccgggtgaccaaggaggatgccatgaagtggttccaggtcaagtatgaaggagtcatcctcaacaaggcccaggcgaatacctcttaaaacattttcacctgtaggctcagctgttagaaaagcttttcccttgttgggcagaagttcaccttccaagttttatgttacttgatgaattttccggccagatgtttttgtcaattacctgaaagctaagagcatgatctgatcttaaaaaaaaaaaaaaaaaaannnnnn

SEQ ID NO: 386003 - DNA, 375 bp, Oryza sativa
ccacgcgtccggatcttggcatcaagtatgatccttcaacaggtatttatggcatggacttctatgttgtccttgagcgtgctggataccgtgttgctcgccgtcgcaggtgcaagtcccgtgttggcattcagcaccgggtgaccaaggaggatgccatgaagtggttccaggtcaagtacgaaggtgttatcctcaacaaggcccaggctaatacatcttaagacctgatttgataggttttaggtccagtcactgcttgttatgagcgcagacaagtttttatttcacctaatgcaatgccggagtatattattttgccaagtcgttttgtttgagttcgttttgcacttgggagcgtataacgccggtcac

SEQ ID NO: 386004 - DNA, 1656 bp, Oryza sativa
  unsure (1)..(1656): unsure at all n locations
tcgacccacgcgtccgcccacgcgtgcgcccacgcgtccgcccacgcgtccgcccacgcgtccggtcttagcgaatccagcagcagaagcagcagcagcagctcagccgccgccgatggcgtccacgatcatggccccaacctcccgcgtcctcgccgccaagacccccttcctcggccatccccgcccctccaatgcccccgtccgcgacatcgccgccgccgccaccggccgcatcaccatgagcaaggagctgtggtacgggccggatagggtgaagtacctggggccattctcggcgcagacgccgtcgtacctgaggggcgagttcccgggcgactacgggtgggacacggcggggctctccgcggacccggaggcgttcgcgaggaacagggcgctggaggtgatccacggccggtgggcgatgctcggcgcgctgggctgcatcacgccggaggtgctcgagaagtgggtgcgcgtcgacttcaaggagcccgtgtggttcaaggccggcgcccagatcttctccgacggcggcctcgactacctcggcaaccccaacctggtgcacgcccagagcatcctcgccgtgctgggattccaggtcgtcctcatgggcctcgtcgagggctaccgcatcaacggcctccccggcgtcggcgacggcaacgacctctaccccggcggccagtacttcgacccgctcggcctcgccgacgaccccgtcaccttcgccgagctcaaggtcaaggagatcaagaatggccgcctcgccatgttctccatgttcggcttcttcgtccaggccatcgtcaccggcaagggccccttggagaacctgctcgaccacctcgccgaccccgtcgccaacaacgcctgggtctacgccaccaagttcacgccgggctcgtgaatggcccagccgccattgtagactactctctctctccatcgctcgatgtaccaatgcttgcacagattgtacgatgctgtgatgaatctgatatgatccatccagaattcagaaactgaaaaaagttggggtttgcaacttatgtgtcagctgctgctttaagcttagttaactcttttgatgttttaatttgtacatttgtgtactttgtaatgatccatacgagacctagtgtttgattattgctaatttgctgtggcattttcttgcatcaagtactggatacagagttcatcattcagatttttgaagatacaaaccttgcagacttcagttgaagcagagacaaaaacatttgcagacaaaggcagagattggagtaaaaacgccttgcaaattcgatgatttccttgctgtacacatattacagagctggtgttgcattatctctattcgctcatggcggataatctgtatttaattacccttccatatctcaggttcatctctctacatacaagatggcatacatacactgacaacagagaactaatatacatgtacagacttcttgcttacacctatatgaatcttttctctgataagctggacaccggacgatcgagtgccancaccaccgccattgatgatggagctcancatcgtcatcaacaacancaccatcatctcgtcaggcttgcgatgaagaggaganaacctcgaagccttgtttttcacct

SEQ ID NO: 386005 - DNA, 635 bp, Oryza sativa
  unsure (1)..(635): unsure at all n locations
cggntcgacccacccgtccggtgctgcatcacgccggaggtgctctataagtgggtgcgcgtcgacttcaaggagcccgtgtggttcaaggccggctcccgacatcttattcctacaagacgtctaaactacctatggatctccaacctgacgcacacgcagagcatcctcgccgtgctgggattccaggtcgtcctcatgggcctcgtcgagggctaccgcatcaacggcctccccggcgttggcgacggcaacgacctctaccccggcggccagtacttcgacccgctcggcctcgccgacgaccccgtcaccttcgccgagctcaaggtcaaggagatcaagaatggccgtctcgccatgttctccatgttcggcttcttcgtccaggccatcgtcaccggcaagggccccttggagatcctgcccgacccccccgccggccccggtcgccaccaccgtatgggtgtacgcggccaaggtcccaccgggctggtgaatggtccagtcgcatttgaaacaaactctctctgcacatcgatgggtgtaccaatgcttgcacagattgtacgatgctgtgatgaatttgatacgatccatccagaattcagaaactgaaaaaagttggtgtttgc

SEQ ID NO: 386006 - DNA, 1676 bp, Oryza sativa
ttggtttccccccctatctttgtcttcatgtgcagaggctcaaagatctctctccctcacctatattacctgcaccaacaccactgaccactccgcccacgcgtccttgctccttcctcccagtgtctctcaagagcggtgcagggttcacaaggcaggagaaaatgggggagatcaccaatgtcatggagtaccaggccatcgcgaagcagaagcttccgaagatgatctacgactactacgcctctggagctgaggatgagtggactctcaaggagaacagggaggcattctccaggatcttgtttcgtccccgcatcctgatcgatgtctcaaagatcgacatgtccgcaactgttcttgggttcaagatatcaatgcccataatgattgctcccagtgccatgcagaagatggctcaccctgacggagagtatgcaacagccagggcagcttcagcagcaggaactataatgacactgtcatcttgggctacttcaagtgttgaggaggtcgcctcaactggaccaggaatccgtttcttccagctatacgtgtacaaggacaggaatgtggttgagcagcttgtcagaagagccgagagagctgggttcaaggcgatcgcactgaccgtggacactccgcgactgggacgcagggaagctgacatcaagaacaggttcgttctgccaccatacttgacactgaagaatttcgaaggcctggacctcgcagagatggacaagagcaacgattccgggctggcctcctacgtcgccgggcagatcgatcgcacgctcagctggaaggatgtgaagtggctgcagagcatcacgtcgctgccgatcctcgtcaagggcgtcatcaccgcggaggatgcgaggctggccgtgcactccggcgcggcggggatcatcgtgtcgaaccacggcgcgcggcagctggactacgtcccggcgaccatcagcgccctggaggaggtggtcacggcggcggcggggcgcatcccggtgtacctcgacggcggcgtccgccgcggcaccgacgtcttcaaggcgctcgccctcggcgccgccggcgtcttcatcgggaggccggtggtgttcgcgctggcggcggagggggaggccggggtgaggaacgtgctgcggatgatgcgggaggagttcgagctcaccatggcgctcagcggatgcacctcgctcgccgacatcacccgcgcccacatctacaccgacgccgaccgcctcgcccgccccttccccaggttgtgaggacctcgccgccgccgccgccggcgaactctagccaaacaataaacaatatcgacgacgccagagagcacgccgattaattaattaggtaatttttgcaaaagaatctcgtcgatccacacgcgcgcaagcaacacacgtactccgtgcacccctcgtaactgggtcgttcatgctcttaatcccaacgattaattatactggtataatctttgtaatttcgagtactgtacacctatttggcatctgtatatctcgccttaagatatttacggaaccggtttatatactcctttaatttttaattaacggagttcaacatatatataagttacttcatgaaaaaaaaaaaaaaaaaactcgactcgtgccgaattcggcacgagctcgtccgaatcctgc

SEQ ID NO: 386007 - DNA, 1211 bp, Oryza sativa
ttcttttctggggctggaagagcaggaatggaggtgcaggagaggatgaggaagcagtgtaggagagccatcctctctgcacacctccaatagctcatccaaacaacagctatctcactctccctccatgtctctacactctagcaattcaacaattattttcctttgttttgtcttcatctacaaatgcttggtcatcaccctcatctcttatattactctcacttccaccacaccctccatttcttgcttccatttgtcttgcttggctcttcactctccccctgttcctgcaggggtcaggcactgcctgctacaagagtggtgtaggtgattcggctagctcagcgcgaagatgggggagatcaccaatgtcacggagtaccaggccatcgcgaagcagaagcttccgaagatgatctacgactactatgcatctggggccgaggacgagtggactctccaggagaacagggaggccttcgccaggatcctgtttcgcccacgcatactgatcgacgtatccaagattgacatggccacaacagtcctggggttcaagatttcaatgcccattatgattgctccctctgccatgcagaagatggctcacccagatggagagtatgcaactgcgcgtgctgcatcagcagcgggcactataatgacattgtcatcatgggctacttcaagcgttgaggaggttgcctcaactggaccagggattcgtttcttccagctttatgtttacaaagacaggagggtggtggagcagcttgttaggagagctgaaagggctggattcaaggcgattgcgcttacggtggatactccgcgacttggcccgtaggaaggctgacatcaagaacaaggttggttctgccaccatttttgacactgaagaactttgaacgcctggagctggggaaaatggaccaggctagcgattcaggactggcttcttacgtcgccgggcaaatcgatcgcaccctgagctggaaggatgtgaagtggctgcagaccatcaccacgctgccgatcctggtgaagggagtgatcactgcagaagacacgaggctcgccgtggagaacggcgcggccggcatcatcgtgtccaaccacggcgcccgccagctggactacgtcccggccaccatcagcgccctcgaggaggttgtgaaggcggctcgcgggcagctccccgtcttcct

SEQ ID NO: 386008 - DNA, 989 bp, Oryza sativa
  unsure (1)..(989): unsure at all n locations
ttttnaaaaaactcnagccccnccccnttccggaaaatctctttttactgggacgcagggaagctgacatcaagaacaggttcgttctgccaccatacttgacactgaagaatttcgaaggcctggacctcgcagagatggacaagagcaacgattccgggctggcctcctacgtcnccgggcagatcnatcgcacgctcagctggaaagatgtgaantggctgcanancatcacgtcgctgccgatcctcgtcaagggcgtcntcaccgcngaagatncgaagctggccgtgcactccggcgcggcggggatcatcgtgtctaaccacgcgcgcggcagctggactacatcccggcgaccatcancgccctggaagaagtngtcnccgcngcggcggggcgcatccccgtgtnctcnacnggggcgtccgccgcggcaccgactcttcaangcgctcgccctcggcgccgccggcgtcttcatccggaagccggtggtgttccccctcgccgccgaaggggaagcccgggtcaagaaccttctgccgatatccccgacgagttcgagctcaccatggcgctcagcggctgcacctccctcgccgacatcacccgcaaccacgtcatcaccgaggccgacaagctcggcgtcatgccgtctcgcttgtaaacaacaacgacggcgaacttgtcgccgtcgatcgatcaccggccggccgccgcgacacgctttgccggccgacggatgatcggccgggaatgaagaagaaggtagtagctgccgaagaaaagattggaagatgcaaagttctataattttggatgatgctgcgtcatgtacttttgttaattgtcgagtgattgatcacctgtacctaattaaatggtttattggattattggcggtttatactaaacgaacaaattaataccatacggtctcttcgtgattgcaaatatttngnatgtgaattaaaaaaaannaaaaa

SEQ ID NO: 386009 - DNA, 474 bp, Oryza sativa
  unsure (1)..(474): unsure at all n locations
ccacgcgtccgcaggagagtatgcaacagccagggcagcttcagcagcaggaactataatgacactgtcatcttgggctacttcaagtgttgaggaggtcgcctcaactggaccaggaatccgtttcttccagctatacgtaaaccatatcatatcactctgctcatgtagcatactttggctacattttattttcgtatctcattttcttgtatgatcttgcatacatctacaggtgtacaaggacaggaatgtggttgagcagcttgtcagaagagccgagagagctgggttcaaggcgatcgcactgaccgtggacactccgcgactgggacgcagggaagctgacatcaagaacaggttcgttctgccaccatacttgacactgaagaatttcgaaagcctggacctcgcagagatggacaagagcaacgatttcgggctggccttctacgtcgncgggcagatcgatcg

SEQ ID NO: 386010 - DNA, 552 bp, Oryza sativa
  unsure (1)..(552): unsure at all n locations
ggtggcggccgctctagccttgttggatcactttcttcctctggcagtnaagatatataaatcctnnagatgtatcgtgacganctncgcttatcggtctagatgtcagtccaacacatcggcgatgtaggctttgctgtggtactcaaccagtcacagattttacagaagtgctctggttcagtcacagatcacatgcacgatgctgatcctgccacttgccctggtggacgcggtcgtctttgcggccgcgcactgcttcactaagcatatgcgcaacctgcagtgtgctaccgtcaccgtccgcgcgccgtgccaggccgatggccgccctcaccttctgacagcgcctcgacctcgtggatgagtcccccagctgttttgtccccgcatcctgatcgatgtctcgcaagatcgacatgtccgcaattgttcttgggttcgagatatcaatgcccgtaatgattgctcccagtgccatgcanaanatggntcaccctgacgganagtatgcaactgccatggcagcttcagcaggaggaactatnatga

SEQ ID NO: 386011 - DNA, 993 bp, Oryza sativa
cctcgccccacgcgtccgcccacgcgtccgctcatctgccgctgccgctgctgaagaaaaacgcacatccttccttcctagcaccaactcgccacccaattaggccattaccttccaaaattctcccatccaatggcgctacgcctctccgtctcctcctcgcacgggccggcttcctcgccggccatctccacatgccgccccgccgcctgcgggcgcttccccgccttgctcggcggcggtgtggcttctcagaggaggagcctgacggtggtgtctggccctgagacaagggcggtgatccccgtgaggtcgagcggctcggacaccgccactgttggggccgaggcggaggcggtggccgtgaccgggcaggtgacggaggtgaacaaggataccttctggccaattgtcaagtcggcagggcccaaggtcgtcgtcctcgacatgtacacccaatggtgcggcccttgcaaggtgatggcaccgaaattccaggagatgtccgagaaggaccaggacgttgtgttcctcaaactcgactgcaatcaagacaacaagtctcttgcaaaggagctgggcataaaggttgtgccaacattcaagattctcaaggacgggaaggtcgtcaaggaggtcacaggtgccaaactagatgaattaatccaagcgatcgagacggtgaagtcaagctgaggaatgccctgaaaatttgcatcagttagcttgttgtcactagtgtacgttatgggtgaaccaccagttattgaagtgggtattcgacatggagacaaacagttaatctagttcttctgcctatgatgatttatcaagcatccagaacaatatacggccatttatatggaatgcaccatgtaaataactatttccaacgtcatgatgatctgttttctaatcttactgatttgcaagtgaacattgtattcatggttagcaaaatttcaaaatatatcaacaaatttccagctgaaa

SEQ ID NO: 386012 - DNA, 2165 bp, Oryza sativa
tgctccactacgcggaccaccgcgcgcgagcagagcatctcctcactctctagcttgctccagtttcgcgtagtgcgtgacagttcaattgaactctctggattcgttggttacttcgtctgagctgctgcagcgttgaggaggaggaggagcaatggcgctcacgacgttctccatttcgagaggaggcttcgtcggcgcgctgccgcaggaggggcatttcgctccggcggcggcggagctcagtctccacaagctccagagcaggccacacaaggctaggcggaggtcgtcgtcgagcatctcggcgtcgctgtccacggagagggaggcggcggagtaccactcgcagcggccaccgacgccgctgctggacacggtcaactaccccatccacatgaagaacctgtccctcaaggagctccagcagctcgccgacgagctccgctccgacgtcatcttccacgtctccaagaccgggggacatctcgggtccagcctcggcgtcgtcgagctcaccgtcgcgctccactacgtgttcaacacgcctcaggacaagatcctctgggacgtcggccaccagtcgtaccctcacaagattctgaccgggcggcgcgacaagatgccgacgatgcgtcagaccaacggcttgtcgggattcaccaagcggtcggagagcgagtacgactccttcggcaccggccacagctccaccaccatctccgccgccctcgggatggcggtggggagggatctcaagggagggaagaacaacgtggtggcggtgatcggcgacggcgccatgacggccgggcaggcgtacgaggcgatgaataacgcggggtatctcgactccgatatgatcgtgattctcaacgacaacaagcaggtgtcgctgccgacggcgacgctcgacgggccggcgccgccggtgggcgcgctcagcagcgccctcagcaagctgcagtccagccgcccactcagggagctcagggaggtggcaaagggcgtgacgaagcaaatcggagggtcggtgcacgagctggcggcgaaggtggacgagtacgcccgcggcatgatcagcggctccggctcgacgctcttcgaggagctcggcctctactacatcggccccgtcgacggccacaacatcgacgacctcatcaccatcctccgcgaggtcaagagcaccaagaccacaggcccggtgctcatccacgtcgtcaccgagaaaggccgcggctacccctacgccgagcgcgccgccgacaagtaccacggcgtggcgaagttcgatccggcgacggggaagcagttcaagtcgccggcgaagacgctgtcgtacacgaactacttcgcggaggcgctcatcgccgaggcggagcaggacaacagggtcgtggccatccacgcggccatggggggaggcacggggctcaactacttcctccgccgcttcccgaaccggtgcttcgacgtcgggatcgccgagcagcacgccgtcacgttcgccgccggcctcgcctgcgagggcctcaagccgttctgcgccatctactcctccttcctgcagagaggctacgaccaggtggtgcacgacgtggacctccagaagctgccggtgaggttcgccatggacagggccgggctcgtgggcgccgacgggccgacgcactgcggcgcgttcgacgtcacctacatggcgtgcctgccgaacatggtcgtcatggccccgtccgacgaggcggagctctgccacatggtcgccaccgccgcggccatcgacgaccgcccctcctgcttccgctacccaagaggcaacggcatcggcgtcccgctaccacccaactacaaaggcgttcccctcgaggtaggcaaagggagggtactgctggagggcgagagggtggcgctgcttgggtacggttcggcggtgcagtactgcctcgccgcagcgtcgctggtggagcggcacggcctcaaggtgaccgtcgccgacgcgaggttctgcaagccgctggaccaaacgctcatcaggaggctggccagctcccacgaggtgctcctcaccgtcgaggaaggctccatcggcgggttcggctcccacgtcgcgcagttcatggccctcgacggcctcctcgacggcaaactcaagtggcggccgc

SEQ ID NO: 386013 - DNA, 2545 bp, Oryza sativa
  unsure (1)..(2545): unsure at all n locations
cgcgatctaggcttgccgcgcgcgcgcggatctgcgagctgcgtagccgtttctcgctgtgagtggaggaggaggaggaagggaggaggatggcggcgaacgcggggatggtggcgggatcccgcaaccggaacgagttcgtcatgatccgccccgacggcgacgcgccaccgccggctaagccagggaagagtgtgaatggtcaggtctgccagatttgtggcgacactgttggcgtctcggccaccggcgacgtctttgttgcctgcaatgagtgcgccttcccggtctgccgcccttgctacgagtacgagcgcaaggaagggaaccagtgctgcccccagtgcaagactagatacaagaggcacaaaggtagccctagagttcagggcgatgaggaggaggaagatgttgatgacctggacaatgaattcaattataagcatggcaatggcaaaggtccagagtggcagatacagagacagggggaagatgttgacctgtcttcatcttctcgccacgaacaacatcggattccccgtctgacaagtgggcaacagatctcaggagagatccctgatgcttcccccgatcgccattctatccgcagcggaacatcaagctatgttgatccaagtgttccagttcctgtgaggattgtggacccctccaaggacttgaattcctatgggattaacagtgttgactggcaagaaagagttgccagctggaggaacaagcaggacaaaaatatgatgcaggtagctaataaatatccagaggcaagagggggagacatggaagggactggttcaaatggtgaagatatccaaatggttgatgatgcacgtctacctctgagccgcatagtgcctatcccttcaaaccagctcaacctttaccggattgttatcattctccgtcttatcatcctgatgttcttcttccaatatcgtgtcactcatccagtgcgggatgcttatggattgtggctagtatctgttatctgtgaaatttggtttgccttatcctggctcctagatcaattcccaaagtggtacccgataaaccgtgaaacataccttgacaggcttgcattgagatatgatagggagggagagccatcacagcttgctcccattgatgtctttgtcagtacggtggatccactaaaggaacctcctctgatcacagcaaacactgttttgtccattctggctgtggattaccctgttgacaaagtgtcatgctatgtttctgacgatggttcagctatgttaacttttgaggctctgtcagaaactgcagaatttgctaggaagtgggttccgttttgcaagaagcacaatattgaaccacgagctccagagttttactttgctcaaaaaatagattacctgaaggacaaaatccaaccttcctttgttaaagaaaggcgggcaatgaagagagagtatgaagaattcaaggtacggatcaatgctcttgttgcgaaggcacaaaaagtacctgaagaggggtggaccatggctgatggcactgcttggcctgggaataacccaagggatcaccctggcatgattcaggtgttcttggggcacagtggtgggcttgacactgatggtaacgagttgccacggcttgtctacgtctctcgtgaaaagaggccaggattccagcatcacaagaaggctggtgcaatgaatgcattgattcgtgtatctgctgtgctgacaaatggtgcctatcttctcaatgtggattgtgatcattacttcaacaatagcaaagctcttagagaagcaatgtgcttcatgatggatcccgcactaggaagaaaaacttgttatgttcagttcccacaaagatttgatggcattgacttgcacgatcgatacgctaatcgcaacatagtcttctttgatattaacatgaaaggtttagatggcattcagggtccagtttatgtgggaacaggttgctgcttcaataggcaggccttgtatggctatgatcctgtactaactgaggctgatttggaacctaacattgttgttaagagctgctgtggtggcagaaagaaaaagagcaagagctacatggatagcaaaaaccgtatgatgaagagaacagagtcttcagctcctatctttaacatggaagatatagaagagggcattgaaggttatgaagatgaaaggtcagtgctgatgtcccagaagagattagagaaacgttttggtcaatcgccaatttttattgcgtccaccttcatgactcaaggaggcataccaccctcaacgaacccagcatctctactgaaggaagccatccatgttatcagttgtggatatgaggacaaaactgaatggggaaaagagattggctggatctatggttcagttactgaggatattctgactggatttaaaatgcacgcaagaggttggatatcaatctattgcatgccaccacggccatgcttcaaaggggttctgcgccaatcaatctgtctgatcgcttaacccagtcctacgtngggtct

SEQ ID NO: 386014 - DNA, 1258 bp, Oryza sativa
  unsure (1)..(1258): unsure at all n locations
cncgtgtgagatcggccggttcaggagcaccagttgggacttgggagtagctagctgggacaacaatggccaggaaacagggaattgcttctatgcttacaattgctctgatcattggagcatttgcttctgctccaacaactgtgcaatccatcggcgtgtgctatggcgttctcggcaacaacctcccgtcgcggagcgaggtggtgcagctgtacaagtccaagggcatcaacgggatgcgcatctactaccccgacaaggaggctctcaacgccctgcgcaactccggcatcgccctcatcctcgacgtcggcgaacaacaattgtcctatcttgccgctagctcctccaacgcggccgcgtgggtccgcgacaacgtcaagccctactacccggccgtcaacatcaaatacatcgccgtcggcaacgaagtggaaagcggcgccaccaataacatcctcccggccatccgcaacgtcaactccgccctggcctcgtccggcctcggcgccatcaaagtgtccaccgcggtgaaattcgacatcatctccaactcctacccaccctccgccggcgtcttcagggacgcctacatgaagaatcgcgcgctactggcgacaccggcgcgccgttgttctgccaacgtgtacccgtactttgcatacagggggaacccgcgggacatcagcttcaattacgccacgttccggccgggcaccacggtgagggacccaaacaacgggttcacctacaccaacctgtttgacgccatggtggacgccgtgtacgccgcgctggagaaggccggcgccgggaacgtgaaggtggtggtgtcggagagcgggtggccgtcggcgggagggttcggggcgagcgtggacaacgcgagggcgtacaaccaggggctgattgaccacgtcgggcgtggcacgcccaagaggccggggccactggaggcgtacatattcgccatgttcaacgagaaccagaagaacggggatcccaccgagagaaactttgggtttttttaccctaacaagtcgcccgtgtatcccatccggttctaagtcagatgcgacatcggatcgacgtagcagctgctgaaagctttagcacgtagacatccttaaaattaactgtaagccaaaaataagctagctgcaactgcaagcagagcagtagaaataatcaatcagtaataaagtgtgcagcacgtatggtgtgcctgcgattctcaaaaaaaaaaaaaaaaaaa

SEQ ID NO: 386015 - DNA, 655 bp, Oryza sativa
gtcgacccacgcgtccgcccacttaatctaatcaaaccctccaaaccaaaccgattcctcctcttctcctctcctctcctctcctctcctctgctcccaaccccacccttccttcctcgaccacagcagcggcggcggcggcaggagacggagagaggaatcgcgatggcggcggaaaaaggaagtccgttgccgaagtttggggaatgggatgtcaatgatcctgcttcagctgagggattcactgtaatctttaacaaagctagagacgagaagaagactggtggcaattcacagggacaagatttggccgcaaaaagtgaacagccatctggacaagggttgtatccagcaaaaccgaacagttccaagaaatggttctgctgcatgcaacctactgctgctgaatcttgaagatcatgggctgattggattgtggaagcgtctaccttgttaaaatcagaaaaaactccacgatatccatgggaacttgtttgtgggtttactgtgtggtgaagatgttatggcggaacatgtaatattacttctatggtgtgtacattatttacaacctatatatgtgggaaaacatcagtggtgtatattgatgcataaagttggtatttcgtcaaattgactcaaaaaaaaaaaaaaa

SEQ ID NO: 386016 - DNA, 892 bp, Oryza sativa
ccacgcgtccgcccacgcgtccgctcatagtagcttagctaattaacacgatggcctcctcttcttccttgtatctcctagctgctctgcttgcgctggcctcatggcaggccattgcttttgatcctagcccactccaagatttttgtgttgctgacatgaaatcacctgtgagggtaaatggattcccttgcaagaacccaatggaggtgaactcggacgactttttcaacgcggccaagtttgacatgcctaggagtaccatgaacaaggttggatccaacgtcaccaacctcaacgttctaaatttcccggggctcaacaccctcggcatctcgctggcccgcatcgactatgcgcctttaggtgtgaacccaccacacattcacccacgtgctaccgagctcctcactgtgcttgagggaacactctatgttggctttgtcacgtctaacccaaacaggctcttctctaaggtggttcataagggtgacacatttgtgtttcctaaggcaatgatccacttccaaatgaatttagaccacaataaaccagcagttgcccagtcatcactcaacagtcaaaaccctggagttattacaattgctagtgcggtgtttggatcaaagccaccaatctctgatgatgttctgaccaaggcatttcaagtggaaaagaaggtgattgattggctcaaatctcagttttgggagagcaactactgattatctcatactgattctccctaatcaattgatgcaagtatgatatatatgaaacctgtacttcattgtagtatgtagaataaatgggcttttgtcctatcaaaaatgtcataatatgttgtacgtgtgctttcttgctcatgtttaataaatgttatacaatggga

SEQ ID NO: 386017 - DNA, 972 bp, Oryza sativa
  unsure (1)..(972): unsure at all n locations
ccacgcgtccgcccacgcgtcaaaataacgataaacacagggagagagagagagaaagaaattcaatggcctcctcttccttatttctgctagcttctcttcttgttctggcctcatggcagcaggccatcgcctttgatcctagcccgctccaagatttctgcgtcgccgacatggcctcacctgtgcgagtaaatgggtttccttgcaagaacccaatgaatgtcacatcggacgacttcttcaacgcggccaagtttgacatgccaaggaatactatgaataaagtcgggtctaatgtcaccaacctcaacgtcatcaatttcccgggcctcaacactcttggcatctcactagctcgcatcgactacgcgccaatgggtgtcaacccaccacatgtgcatcctcgtgctactgagcttctcactgtgcttgagggaacactttatgttggttttgttacatccaaccctaacaggctcttctccaaggtggtgcataagggtgatgtgttcgtgttccctaaggcaatgattcactttcaaatgaacctagaccacaataagcctgcggttgcccaatcagcactcagcagtcaaaacccaggagttattactattgctagtgccatatttggatcaacgccaccaatctctgatgatgttttagtcaaggcatttcaagtggagaagaaggtgattgattggctgaagtctcaattctcggagaataaccactactgattatatcatgttttttgattgttcctttgtgcgttataatatgtataataaatgggcttttgcctagttgatgtcatggtatgctaaaacagtatgtttgattgtccatgtttaataaatgtaatgcaatatggacacagtacggcgtccttttcctaattatatattaatataaaagaatgattgttcatggannnnnnnnnnnnnnnnnnnnnnnnnnnnnnnnnnn

SEQ ID NO: 386018 - DNA, 487 bp, Oryza sativa
cggccccccccgtccccccactcgtccgcggacgcgtgggcggacgcgtgggtggcaccaggccatctcctttgatcctagcccgctccaagatttctgcgtcgccgacatggcctcacctgtgcgagtaaatgggtttccttgcatgaacccaatgaatgtcacatcggacgacttcttcaacgcggtcaaggtggacatgccaaggaatactatgaataaagtcgggtctaatgtcaccaacctcaacgtcatcaatttcccgggcctcaacactcttggcatctcactagctcgcatccactactcgccaatgggtgtcaacccaccacatgtgcatcctcgtgctactgagcttctcactgtgcttgatggaacactatatgttggttttgttacatccaaccctaacaagctcttctccaatgttggtcataaagggtgatgtgttcacgttcccttaggctatgtttcactttcaaattaa

SEQ ID NO: 386019 - DNA, 912 bp, Oryza sativa
  unsure (1)..(912): unsure at all n locations
tggtacgggcgagcagcatctgatgtcgagcaggcatctgattagagaaatctaatggcttcttcttccttttccttcctgcttgttgctgctcttcttgggttggcctcatggaaagccattgcctcagaccctagccctctccaagacttttgtgtcgctgatctgaattcgccagtgcgagtaaatggatttgtttgcaagaacccaatgaacgcgagtgccgacgacttcttcaaggcagccatgctcgataagcctagagacacaaacaataaggttgggtccaatgtcactttggtcaatgtcttgcagcttcctggtctcaatacccttggcatctcgatagcacgtcttgactttgcacccttgggtttgaacccaccacacacgcaccctcgtgcaaccgagatcttcacggtgcttgaaggaacactctacgttggctttgttacgtccaacccagataacaggctattgtccaaggtgctcaacaagggtgatgtgtttgtgttccctgaggggctcatccacttccagttcaatcctaacccacacaagccggcagttgccattgctgcactgagtagccaaaatcccggggttattactattgccaatgcggtgtttggatcgaacccacctatctcagatgatattttgatgaaggcgtttcaggtggataagaagatcatagatttgctccaagctcagttctagaagaacaactactgattgtcctgttggttgcaccatcaaggacagtatactacatgcacctgatgctatgtaactatcatatatgatacgtagaataagtggggttttatgtgctgaaattgttatcatgcatgatatgctaaagcagtatgttattggacatggnnnnnnnnnnnnnnnnnnnnnnnnnnn

SEQ ID NO: 386020 - DNA, 1138 bp, Oryza sativa
gcggtactcctaccaactcttctcgtcgtggcggtggctttgtccggtcaccggccgctgcatctccctttgtgtcttagttagtttaatcccatttacaaatcttacgtggtgaactgatcaattattagttgagctgagctgagcttataagtagcagctgctctgatctgctcagctcgcttcatcaccttccactcagtcaatcgcagcgagaagccaagaagcactcaaccacgcgctgttcgtcatggcgagggtacagctctgggtggccgccgcgtgcgccgtcgtgctcgcgctcgccgcgccctcgctcgccggcgaccccgacatgctccaggacgtctgcgtcgccgacttggcgtccccggtgaagctgaacgggttcccgtgcaaggcgaacgtgacggcggacgacttcttcttcgcggggctgaagaaccccggcaacaccaacaacccggcggggtcgaacgtgacggcggcgaacgtgcagtcgttcccgggggtgaacacgctgggcgtgtctatggcgaggatcgactacgcgccggggggacagaacccgccgcacacgcacccgcgcgccaccgagatcatcttcgtcctcgagggcgtcctcgaggtgggcttcatcaccactgccaacaagctcttcaccaagactgtcaccgccggcgaggtcttcgtcttcccgcgcggcctcgtccacttccagcagaaccgcggccacggccccgccgccgtcatcgccgccttcaacagccagctccagggcacccaggccatcgccgccacgctcttcgccgccgcgccgcccgtgccgtccgacgtcctcgccaaggccttccgcgtcgacgtcccgcaggtggacgccatcaaggccaagttcaagtgatcgtagccggcccgccgtcgatcttcccatcatttttctgcattttctttcatcaacaaaaccatctgatcaaactcatttgatttggttacggaataattttagtggatactgtctgtagcgtgcagttgatttcttccgtttgtaaatctgtttgcatttgttaatttgccttggaaataagacttgttccgttttgtgtggactatacaaaaaactaataattattttcacttg

SEQ ID NO: 386021 - DNA, 986 bp, Oryza sativa
ccacgcgtccgcacaagccacaacctgttagctagctagcttctcagccaccagagaaacagcaaataattcagtagagaagagaacagaaaaccaaagccaaatggcttcaccatcttccttctgcctcctcgctgttcttcttgcgttggtctcgtggcaggccatcgcttctgatcctagccctctgcaggacttctgcgttgccgataagcactcacctgtgcttgttaatggatttgcttgcctggacccaaagtacgtgaatgcagaccacttcttcaaggcagccatgctcgacactcctagaaaaacaaacaaggttggatcaaatgtcacactgatcaacgtcatgcagatccctggcacttaatacactcggcatctcaattgcacgcatcgactacgcacccttgggtgagaacccaccgcacacacacccccgtgcaactgagatcctcacagtcctggagggaaccctctatgtcggctttgtcacatctaatccaaacaacacactattctccaaggtgctcaacaagggtgatgtgtttgttttccctgaggggctcatccacttccaattcaaccctaacccccatcagcctgcggttgcacttgctgcacttagcagccaaaaccctggggctattaccattgcaaatgcagtgttcggatcaaagccaccgatctcagatgatattttggcaaaggcattccaggttgagaagggcaccattgattggctccaggctcagttttgggagaacaaccactactaaatctaaacaaagtatatgtgttgttatactatgtataagtttctattctgcaatatataaaataaatttgtatttctagtcggcttaattatgtgtgcttgcaagcacatcaacaatacattattttgttgggaaaaggctttgtatgttgttctagtgtggtatcccctgttataaaggtaataaaggaaaacattggtatta

SEQ ID NO: 386022 - DNA, 1224 bp, Oryza sativa
  unsure (1)..(1224): unsure at all n locations
gggtggagcaaggcggtggagctggacgcggcggcgaggcgggagatggcgatccggaggctgcaggaggaggcggggacggggagcagcaggagggagttcgccgtgttcgaaacggccaggggggacgctctcttcacgcagtcgtggaccccggtcgccgccgccgatcgcgtcaagggcatcgttgttctgttacatggactaaatgagcatagtgggaggtacaaccattttgcaaagctgttaaatgatcatgggcttaaagtttatgcaatggactggattggacatggtggaagtgatggggtgcatggctatgtttcatcgcttgatcatgctgttggtgacctgaaagaatttctaaaagatgttgtactggaggaaaactatggtttgccatgtttcttatttggccactccacaggtggagctattgttttgaaggcagtcctggatccttgtgttgaagttcatgttgaaggtgtgatcttgacatctccggctattcatgttcaaccatctcatccaattatcaaagttgttgcacctatcttctctgtgttagctccaaaataccgagttgctgctttgcacaggagaggacctcctgtttcccgtgatcctgaggctttgaagatcaagtatgcacatccacttgtgtatactggacccattagagttagaactggcaatgaaattcttcggatatcatcatatttgcaaagaaacttaagcagagtaactgtcccttttttagttctgcatggcacagctgacacaataactgaccccggagcatctcaacgactgtaccaatcatcagcatcagcacataaatctataaaactgtatgatggatatttacatgatcttctctttgaacctgaaagggatgatatagcaaatgacatcatcaattggttaagctcaagacttgatgttctccagagatggtgaagtgaatcagctatatggtgctcccacttatgtcagatattggaacatggtatagaagagaaaggctaattgtaaaacattttgttttagattgctgcctttgcctttgtgtagatggtttttgtttagttatttcaatcatggtgggaaattaacccacctgagatgtaagtagtgcaagattagagtcatgttgaaaatcatgtacttcattatggtattagtaaatactaattttaaaagaaaaaaaaaaaaaaannnnnn

SEQ ID NO: 386023 - DNA, 1089 bp, Oryza sativa
  unsure (1)..(1089): unsure at all n locations
cccgcatcgtctcctcctcctccacttgttgttcaattccccccccccctctctctctctctctctctccgtcgcagatctcggcaagggggcaacaaggtaggaggcggcgatgggttcggcgagccgcgcggtgtcgtgcctgtgctgcccgtgcaagtgcctggcgtgcggcctcttcagctgcctctgcagcatcctcatctccctcctcgtcaccctcggcgtcctcgccctcatcttctacctcatcttccgcccccacatgatcgccgccaccgtcgactccgccgccctcacccagttcaccctctccaccaactccgccctcgcctacagcctcaccgtcgacctcaccgtccgcaaccccaacaagcgcgtcggcctctactacgacaacgtcgagtccctcgccctcttcgacggccagcgcttcggctacgcccccctcgactccttctaccagtccaccgaggcatccaccaagctctcccccgccttcaagggccagcagccgctccaaggcgacatcaccgccgccaacttcaggtcgcaacagaccgccggcaagttcgacatcgaggtcaagctcaacgccaagctcagggtcaaggtctgggccttcaaggttcccggacccaagcccaagatcagctgccccatcaccgtcccagcgtccgcccccaacgcccccgcattccagcgcaccgactgcaaagtctggttctgatttcgatggttggttccgcttcgcatttggggattactattagccagcactgcttccagtatggacggatggattcttttgtttctttcgatttgttgatgagggattagctcgccggatgttgctgtacatcgctgtggtttaggtggttacatatcttctagcccttgtagctagcgcttgtcatgcacatattatcgatccatgtcttgttcttcttagttttttcccctttcttttgggtacggcttacttactgctgttcagatcatatatgactgtatgttggttgatacattcagagattttattcaggatcacctattacttttatgagtgccnnnnnnnnnnnnnnnnnn

SEQ ID NO: 386024 - DNA, 1161 bp, Oryza sativa
ccacgcgtccgagcaaaacgggtccgcccacgcgtccgagccacatcttattgtcacttccatctcattctcctaattgtcatcactagcttctagctagcttaattaattaattagccatggcggaggagaagcaccaccaccacctgttccaccacaagaaggacgacgagccggccaccggagtagactcctacggcgagggcgtctacacgtcggagacggtgaccaccgaggtggtcgccggcggccaggacgagtacgagaggtacaagaaggaggagaagcagcacaagcacaagcagcacctcggcgaggccggcgccctcgccgccggcgccttcgccctgtatgagaagcacgaggcgaagaaggacccggagaacgcgcacaggcacaagatcacggaggagatcgcggccacggcggcggtcggcgccggcggctacgccttccacgagcaccacgagaagaagaaggaccacaagagcgccgaggagtccaccggcgagaagaagcaccacctcttcggctgatcgacctcatcacaacgtcgccggcggcggcgacgacctcgccgtacgtcgccggccgccgtgtcgtcgatttgtgtgtgtaataatttgtcttcttctgcatgcgtggtgttgctgtttttcacaagagtctccggcctcgaccagtgagaggctgacaggtggggccgtgagttcagcttgtgttgcttgattttctctgcagccttgccctctgtgtgtccaaataagtggtgtgcatggctctctccgtgtcatgtatcaatgtatttttatctgtactttgtacaagtgaagcaatatttatcgaaccttgactttctccattctatttgaaaaaccaaaaaaaaaaaaaaaaaaaaataaaaacaaaagaaaaacatataaaataaaaaggcttaaaactaaagaaaaaaagaaaaaaaacaaaaaaaaagaaaaaaacaaaaaaaaaaaatgggggggggccgctttaaaggaccaaagcttactcccccgggcaggcaacgaaaaaatttttttataggggccccaaaatcaaatcaacgggccgcggtttaaaaacgccggaacgggaaaaaccctggggtaaccaaattaaatcgccttgaaaaaaatccccttt

SEQ ID NO: 386025 - DNA, 446 bp, Oryza sativa
ccacgcgtccggcagcacctcggcgaggccggcgccctcgccgccggcgccttcgccctgtatgagaagcacgaggcgaagaaggacccggagaacgcgcacaggcacaagatcacggaggagatcgcggccacggcggcggtcggcgccggcggctacgccttccacgagcaccacgagatgaagaaggaccacaagagcgccgaggagtccaccggcgagaagaagcaccacctcttcggctgatcgacctcatcacaacggtcgccggcggcggcgacgacctcgccgtacgtcgccggccgccgcgtcgtcgattggtgtgtgtaataatttgtcttcttctgcatgcgtggtgttgctgtttttcacatgagtctccggcctcgaccagggagaggctgacaggtggggccaagagttcaactggtgaagcttgattttct

SEQ ID NO: 386026 - DNA, 2850 bp, Oryza sativa
gtccctcttttctccccaaccctaaacctccttcgtctaccccatggcgtcgccgccgccgccgccgccgcctccgaagctgccggtccccggccgccgcaacatcctcgtcaccagcgcgctgccctacgtcaacaacgtccctcacctcgggaacatcatcggctgcgtgctcagcgccgacgtattcgcgcgctactgccggctgcggggctacaacgtcatctacatatgcggcaccgacgagtacgggacggccaccgagaccaaggccatggaggagaagtgctcgcccaaggagatctgcgacaagtatcatgctgtccatagtgaggtttacaaatggtttgacataaagtttgacaagtttggacggacatcctctccccaacagactgaagtctgccaagcaattttccaaaagttgatggaaaacaattggctcacagaaaacaccatgcagcagctgtactgtgatacttgccaacgatttttagcggataggctcgtggaggggaaatgtccaactgaaggctgtaattatgaggcggcgcgaggtgatcagtgtgaaaactgcagcaaattgttgaatccaactgagctaattgatcccaagtgtaaggtctgtaagaatactccacgtgtccgtgacacagatcacttattccttgagcttcctcttttgagcgacaagttggtaaactatatcaatgaaacttctgtagctggtatgtggagtcaaaatgctattcaggcaacaaacgcatggctgaaggaaggtttgaagccacgctgtatcacccgagatctcaagtggggtgttcctgttccacatgagaaatataaggacaaggtgttctatgtttggtttgatgcaccgattggctatgtatctatcacagcttcctatacacctgattgggagaaatggtggaaggatcctgataacgtagaattgtttcagttcatgggtaaagataatgtgccatttcacacggtcatgttcccttctacattacttggaactggcgaaaagtggacaatgatgaagaccataagtgtgactgaatatttgaactacgaagcaggaaaattctccaagagccatggtattggagtctttggtaatgacgcgaaggatacaaatatacctcctgaagtgtggcgttactacttgcttacaaatcgtcctgaggtatcagatacactatttacttgggctgatttgcaagccaaattaaacagtgagttgttgaacaacttggggaatttcatcaaccgtgtgctcagttttgttgcaaaaccagcaggagccggatatgattccatcgtacctgatgctcctaacgctgagtcgcatccactgacaaaggcacttgctgagaaaactaataaatgggttgaacaatatcttgaagcaatggaaaaggttaaattgaaacaaggactgaagagcgctatgggcatttctagtgatggaaatgcatatctgcaagagagccagttttggaaactttataaggaagatccagcagcctgtgctgttgtaatgaaaacttcagttggtgtggtctatctccttgcctgtttgctggagcctttcatgccttcattttccaatgaagtgttgctgcaattaaatatgacccctgaagaaagcttgtctttctgtgacgataaaggagaaatcgccaaggcaaaaagaccttgggattttgtatcagcaggccacaaaataggaaagccttcacctctatttaaagaactgaaagatgaagaagtagagtccttcaggaataaatttgcaggcagccaagctgagaggagctcaaaagcacaagctgatgctgaagctaagaaggttgctgacaagctcaagggcacaaaattatctgatggaggtcaaaagaaggaacagaaaaaacaatcaggtggttcaaaatcaaagaatgcagaggtggatgtcacggtggcaaagttggatattcgagtggggcttatcaggaaagcacagaagcatccagatgctgattcgctgtatgtagaggagattgatgttggagaggaagcaccaagaacagttgttagcggccttgtcaaattcatccctcttgaagaaatgcagaaccggaaagtgtgtgttctctgcaatctgaaaccagtggcgatgcgcggtataaaatcacatgcaatggttctggctgcatcaaatgaggaccatacaaaggttgagctggttgagccaccagaatccgcagcggttggggagagggtgacctttgctgggtactctggagagcctgaggcgtctctcaacgcaaagagcaagacgtgggagaagctatcagctgacctgcacagcaacggcgagctcgtggcgtgctacaaggatgtacccttcacaacttcagctggagtttgcaaggtgaagtcgatagcgagtggagaaattcgctagcttggcgacgccctaacggtggggatatactcgagtgacttgtttgactgatttttatcggaattgctgctgtttctttatgatgaaaattttgatcctgccatttgaaaggtcttgtatttgacaactgccagtatcaagtattgtccgcatttgtgtcatcgtgattatgaagacgcatggataaccgtttgtttcccttgtaatgttgtagacttcttgtagtaaccttttacaattcgtcgtacccctcatgtcttcaatcgtgtcgtcgtgtgcgttggacgtgtcaggagcacagttgggctgaatatgtgctgattggccacgttccaaaccaggccaggcctgtttattcccaaacaaaaattattcaccttgtcaaaaaaaaa

SEQ ID NO: 386027 - DNA, 1629 bp, Oryza sativa
cgcgtccgcccaccgtccgcggacgcgtgggtgcaaccccacgataaaacccacgcgagggagagaagccaccccatcctccccacctccctcctcgccggccggagttctcgtctccggcgaccgccgccgccgccgccctcaccgtccggtggagctccggtgatcgacgccgcgatgtcgaggtctggggccatggatcttgcatctggactcggggggaagatcaccaaggatgaggtcaagtcggctgtcgatgagtatgagaaataccatggatactatggaggaaaagaagaagcaagaaagtccaactacacagacatggttaataaatactatgatcttgccaccagcttctatgagtatggttggggtgaatccttccactttgctcacagatggaatggagaatccctacgtgaaagcattaagcgacatgagcactttcttgcccttcagcttggagtgaaaccaggaatgaaggttttggacgtcggttgtggaataggcggaccactaagagaaattgccaaatttagcttggcttcagtcactggattgaacaacaatgagtaccagataactaggggaaaggagcttaatcgggtagcaggagttagtggaacttgcgactttgtgaaggcagacttcatgaagatgccgttttctgataacacttttgatgctgtctatgccattgaggcaacatgccacgcacctgatccggttggctgctataaggagatctatcgtgtattgaagcctggccagtgttttgctgtgtatgagtggtgtattactgatcactatgaaccgaacaatgcaacacacaagaggatcaaggatgaaatcgagcttggcaatggcctgccagatatccgaagcactcaacaatgtcttcaagctgcaaaagatgctgggtttgaggttatttgggataaagaccttgctgaagattccccggttccttggtacctgcccttggatccaagccggttttccttgagtagcttccgtctgactactgtggggcgtgcaattactcgcacaatggtgaaggcattggaatacaaggcattggaatacgtcggccttgccccacaaggaagtgaaagggtatctaactttttagagaaggcagctgaaggtctcgtcgaaggtggcaagaaggaaatcttcacgccgatgtacttctttttggttcgcaagcctatctcagaatgagctcccagaaccacatttcagagataaggcgaggagtttgaaagaaacattatggcggtcaaagaaacacctgatgaagctcagaagcttgaagagttcttatgcgtacgaagagatgctgaaatgtgtttaactggtgaattttcgtctgttggtttgccgtgtaaaaaccgtttgatcaaggcacttgtctgcagggtgcctgttttagtctaagacgatgaactgactggtttttgtttgctcgtttctaagttgttagtgacacataagttaagtttgcagttcattcgccagtgtgtattgtaactttgcaataaggcacctgcttgatagctttcttttcatattgttcttcgacaaatataagtgatgattattacctgtaaaaaaaaaaaaaaa

SEQ ID NO: 386028 - DNA, 1698 bp, Oryza sativa
ccacgctccgcccacgcgtccgtcccctcttcccccgctccgctctcgtctccgctctgctctggtctgctctgctgcgagggtgggtgttgcttgtaccgggcggggatggaggcggcgacgatggcgtggacggcggcgggggtggggatggcgctggtgtactggttcgtgtgggtgatgggagcggcggaggtgaaggggaagcgggcggtggatctcaagatgggatccatcacgaacgacaaggtgaaggacaagtacacgcagtactggtcgttcttccgccgccccaaggagacggcgaccaccgaggcctccgccgagaaggtgccggccttcgtcgacaccttctacaacctcgtcaccgacatctacgagtggggttggggtcagtcgttccacttctccccttccctccccggccgctcccaccgcgaggccacgcgcgtccacgaggagcgcgtcgccgacctcctccaggccaagccgggacaccgcctcctcgacgtcggctgcggcgtcggcgggcccatgcgcgccatcgccgcccactccggctccaacgtcgtcggcatcaccatcaacgaataccaggtgaaccgcgcccgcgcgcacaaccgcaaggccggcctcgactcccgctgcgaagtcgtctgcggtaacttcctctccatgccgttctccgacgcctccttcgacggggcctactccatcgaagccacctgccacgcgcccaggctgcaggaagtctacggggaagtcttccgcgtgctcaagccgggcgggctctacgtctcctacgaatgggtcaccacctccctctaccgcgccgacaacccggaacacgtcgaagccatccacgggatcgagcgcggggacgcgctcccgggtctccgccgccaggacgaaatcgcgtccatcgccaaggaagtcggattcgaggtgctcaaggaagttgacctcgccctcccgcccggtttcccatggtggactcgcctcaagatggggcgcatcgcatactggcgcaactcccttgttgtccgcgtgctcaccatgctccggattgcacccaagggcgtttgcgaggtgcacgagatgctttacgagaccgcgcagcacctcacccgcggcggcgagaccggcatcttcacgccgatgcacatggtgctcctccgcaagcccgtcgagagcaaatagtgcaacaaagtcatcgacgacaacaacaacacctaccttcattcactcaccagcggaagaaacagagggaaaacaacaaaaaaaatctcgcagatcagcagctgaggtaagaagagcagactacctacctggtgaggaggagaggttgaagaagagagtgccttaaaattaagttaaatttgatcgtttagaggagaaataaggatgatgtttattgttactctttcttgttcgtagctaattttgctttcaattttttttggtggaggattttgggttggaaagacaaggtcgggatctcttttaaagtttgtttttcttttcttttccctcttgatcggtggatcgatctactatcagtatcagtaatcagccatgccatgttttgtcgagctcccaacattggaatctcccgctagggaatcaattttcaactgtaatttgccccccttttttcggtgaaatttgcaggtgcgcaatatgtaattccccattttc

SEQ ID NO: 386029 - DNA, 1569 bp, Oryza sativa
agctctcaaaggaatcaagcattctgccagcatcatatgttaacagggtagaaaccagaacatatccatcttacacaacgttggtacgaaagttgtgcacatgcatatttccagcgatgctctgtaagattattgaatcaggtccgcgtgtcacaatcattgcagcaacatcatctgtgggcacatttatagttctttcattaattgtggccactgcactctacatctccttgaagtcaaggtacaatgaagagatacatttgaaagtcgaaatgtttctgaagacatatggcacatcaaaacccacaaggtacacattctccgaagttaagaagatagcgaggcgattcaaggacaaattgggccatggtgcatttggaactgtatataaaggtgagctaccgaatggagttcctgtggctgttaagatgctagaaaactctgtaggagagggacaagagttcatcaatgaagtcgcaaccattgggcgaattcatcatgcaaacattgtccgcctcctaggcttttgctctgaaggaacacgacgggctttaatatatgaactcatgcccaatgaatcattggagaaatatatattcccacatggttctaatatttcaagagaactcctagtaccagacaaaatgctagatattgcattaggcatagcccgaggaatggagtacctgcaccaagggtgcaatcagcgcattctccattttgacatcaagcctcacaacatactgttggactacagcttcaatccaaagatttcagactttgggcttgccaagctatgtgcaagagatcaaagcattgtcacattgactgcagcaagaggcacaatgggctatattgcaccagaactatattctcggaattttggagcaatttcatataagtcggatgtctacagctttggcatgctggtgttagaaatggtgagtgggaggaggaacacagacccaaccgtcgagagccaaaatgagttctactttcctgagtggatatatgagagagttatcaatgggcaggacctggtgcttaccatggagacaacacaaggagagaaagaaatggtgagacagctagcaattgtagccctagccttatggtgcattcagtggaacccaaaagaccggccttcaatgacaaaggtggtaaacatgttgacggggaggttgcagaatctgcaggtgccccctaagccttttatatcgtctcaaaatcaacttgtgatttagatcatgagaccgcatcgccatggtttggactttggagaccagcaaagcaatggagcttggccagcatttcctataaaatggcatcaccatggttttgtgcctgagtgacagataatccacatatcataaaatagttcttagtgagctgaagcatgcacatatagtgtttaattattaaactaaactgcgcaaccaggtatatgatatatcaccatgtactcatgtaattctgatatccagcaaacatatgccaatggattttatttgcaatataataatagttgatgacaactaaattaccttattcaaaaaaaaaaaaaaaaaa

SEQ ID NO: 386030 - DNA, 1204 bp, Oryza sativa
cccgttcacaccaccaccgtctcgtcgcctcgtcggcggcgtctcctccgcgcgagggtccccccccaaaccctagccgccgccattgccacgcgcgcgccccccaccccacgaatggaaggaggcggaggcggaggcggaggcggtggcggaggtggaggtggaggaggcggaggcggggcaccgtacgccacgcgcacggcggaggaggtcttccgcgacctccggggccgccgcgccggcatgatcaaggccctcaccaccgatgtggagaagttttacaagctctgcgaccctgaaaaggagaacttgtgcctttatggatatcctaatgaaacatgggaggtgaccttgccagctgaggaagtgcccccagagatccctgaaccagcattgggaatcaacttcgctagggatggcatgaatgagaaagactggttggcgttagtcgcagttcacagtgattcctggttactgtctgttgcattctactttggagcccgatttggttttgacagagaagcaaggaggcgactctttaatatgataaacaatttgccaacaatatttgaggtagtgacaggagccgctaagaagcaggcgaaagaaaagactcccaacagtagtagcaagagcaacaagcctagttcgaaagtgcagtcaaaagctgagtctcgttcgaaatctaagctgtcagcccccaaggatgaagagggaagtggtgatgatgagggagaggaagaggaggatgaccatgacaacactttgtgtgggacctgtggaaccaacgatggcaaggacgagttctggatctgttgcgataactgcgagaagtggtatcatgggaagtgcgtcaagatcacacccgctcgtgccgagcatatcaagcagtacaagtgcccggactgcaccaacaagagggcccgggcatgagtaacaagaagctgtgtcgaactgtgttagagtggagttgtcaatctccggatgtcatgatctcttagatattatcttgccctagcttttctagtttgtaagcttgtctctaatttaattttaaactgtaactgttgattaacctacctgtgtttaaagcttcatctttcctgtgttaattctagcattcatagtgtgtaaacttgcaaaaaaaaaaaaaaaaaaagcctgaaggtacggcggctcccctgaccaaaaaaaaaaaaaaaaa

SEQ ID NO: 386031 - DNA, 1878 bp, Oryza sativa
  unsure (1)..(1878): unsure at all n locations
ctcgtgccgaattcggcacgagctccaccactccactccccaatccaaccaccccccgaacaaccggagaagagaggctgcactccactcgccgccggcgaccgatgctccgcgccgccctcctccgctcaggctccggcctccgccggcctcccatggccgcgccgctctccaccgccgccgccgcctcgtggctctccgacagcgcctcgtctccgcctagggtgcgcctcctcatcggcggggagttcgtcgagtcgcgggccgacgagcacgtcgacgtcaccaatccggcgacgcaggaagtggtgtcgcggatcccgctcaccaccgccgacgaattcagggccgccgtggacgccgccaggaccgccttccccgggtggcggaacacgccggtgaccacgcggcagcgcatcatgctcaagttccaggagctcatccgggccaacatggataaactggcagagaacattacaaccgaacaggggaagactgaaggatgcttggggcgatgtttccgtgggctagaagtggtggaacatgcttgtggaatggggacactgcagatgggtgaatatgtatcaaatgtttctaacgggattgacacctttagcattagggagccacttggtgtatgtgctggaatatgtccattcaattttccagctatgatccccctatggatgttcccaatagcggtcacttgtggcaatacttttgttctaaagccatcagaaaaagatccaggggctgctatgatgcttgcggagctagcaatggaggctggtttaccaaagggtgtgttgaacattgttcatggtacccatgatgttgtgaacaacatttgtgatgacgaggacatcaaggcagtttcctttgttggttccaatatagctggtatgcatatatattctagagcatcggcaaaggggaagcgtgttcagtctaatatgggtgcaaagaatcatgcaattatccttcctgatgctgaccgagatgccacactgaatgcccttattgctgctggttttggtgctgccgggcaaaggtgtatggcattgagcactgctgtttttgttggaggttcagagccatgggaggatgagctagtcaaacgtgcaagcagccttgtggttaattcaggaatggctagtgatgcagaccttggtccagtgatcagcaaacaggctaaggaacgtatctgcaaattaatacaaagtggtgctgataatggtgctcgtgtgctgcttgatggaagagatattgtggttcctaacttcgagaatggtaattttgttggtccaacactccttgctgatgttaaaagtgaaatggaatgttacaaggaggagatttttggtccagttcttctcttgatgaaggctgagagcctagatgatgctatccaaattgtgaacagaaacaaatatggcaatggagcatccatatttacaacatctggtgtgtctgcaaggaaatttcaaacagacattgaagctggccaggtgggcatcaacgtgccgattccagtacccctgccgttcttctccttcaccggcagcaaagcctcctttgcaggagacttgaatttctacggcaaggcgggcgtgcagttcttcacccagatcaagacggtcacgcagcagtggaaggagtcgccggctcagcgcgtctccctctccatgcccacctcgcagaagtgaggtgaaaaaaaagaaaggcatcttgtacgttcttcatttgcccatccatggaaatagacacatgcaccaatgcgaaatgaacagaagaataatcgataggcgcgggatgccatgccatgccaataaaggtagctggtcttgttaaaaaaaaaaaaaaaaaaaaanaaaaaaa

SEQ ID NO: 386032 - DNA, 1253 bp, Oryza sativa
  unsure (1)..(1253): unsure at all n locations
gggtggcagagctttattgaaagccaagtgaagaggagggcagagttgagaagatggtgtacataatctatcgcagtgagaggcgacgcctcctagccgccaccgcttcaccaaatcaaaagctctcgctgctcctcgagagggagttggtggagagagaaagagagagagagagatggcgtcgccgtcgtcgtcgtcgtcgctgtgctcgaccttcgcctcgccgcgcgccgcctccctcggccgccgcctcgccttctcctcgcccaggaaagcattccgagtgagggcatcatccagggttgacaagttctcgaagaatgacatcatcgtgtccccttccattctttctgcaaacttttccaagcttggcgagcaggtaaaagctgtggaggtggcaggatgtgactggattcatgttgatgtcatggatggacgttttgtgccaaatatcacaatcggacctttggttgttgatgctctgcggccagtcactgatcttccgttggatgtgcatctgatgattgtggaacctgagcaacgagttccagattttatcaaggcaggtgctgatattgttagcgttcactgtgagcaatcgtcaaccatccatctacaccgaacagtcaatcagatcaaaagtcttggagcaaaggctggagttgttttgaatcctgcaacccctctcactgcgatagattatgtacttgatgttgttgatctagtattgattatgtcggtgaatcctgggtttggtgggcagagctttattgaaagccaagtgaagaagattgcagagttgagaagattatgtgcagagaagggagtaaacccttggattgaggttgatggtggagttggtcccaaaaacgcctacaaggtcattgaagctggggccaacgccattgttgctggttcagccgttttcggggctccagactatgcagaagctatcaagggaatcaagaccagccaaaaacctgtggctgtaccagcatgaggatcctaaagtagtatgctgtgtacgttgtttttgtttaccagtaccgcggtttgtacagatatgtgccaagctgtacgttatattggagaaattgaaggaagaagaaaacgtggagggcgaccgtttttctcactgtccgcgaagatatactacatattctcagtgtcatgtgatactaccgtgctcacgaaattgttcataataaatatcgttctttagcaaaaaaaaaaaaaaaaannnnnnnnnnnnn

SEQ ID NO: 386033 - DNA, 1875 bp, Oryza sativa
acgcgtccgcccacgcgtccgcaatgtgcaaatggcgaacgcgacgaggctgtgcaacaccaagagcatggtgacggtgaacgggcagtgccccgggccggagctggtggcgagggaaggcgaccgcgtcgtcatccgcgtcaccaacaacgtcgcgcacaacatctcgttgcactggcacggcgtccggcaggtgcggaccgggtgggcggacgggccggcgtacatcacgcagtgcccgatccagacggggcagagctacgtgtacaacttcacggtggccgggcagcgcggcaccctgtggtggcacgcccacatctcctggctccgcgccaccgtctacggcgccctcgtcatcctccccaagctcggcgtcccctaccccttccccgccccgcacaaggaggtccccgtcatcttcggcgagtggtggaacgcggacacggaggaggtggtcaaccaggcggtccagaccggcggaggcccgaacgtctccgacgccttcaccatcaacggcctccccggccctctctacaactgctctgcccaagacacgttcaagctgaaggtgaaacccgggaaaacgtacatgctgcgcctcatcaacgccgcgctcaacgaggagctcttcttcgccgtcgccaaccacacgctcaccgtcgtcgaggtcgacgccgtctacgtcaagccgttcaccgtcgacaccctggtgatctcgccggggcagaccaccaacgtgctcctcaccgccaagccgtactaccccggcgccaacttctacatgtccgccgcgccctactccaccgccaggcctgggaccttcggcaacacgaccgtcgccggcatcctcgagtacgagaaccccgccatgtcgccctccgcggcgagcttcgtcaagggcttgccgctgttcaagccgacgctgccgcagctcaacgacaccgacttcgtcaccaacttcaccgacaagctccgtagcctcgcgacgccggagtacccggcggccgtgccgcagtcggttgacaagcgattcttcttcacggtcgggctgggcacgctgccgtgcccggcgaacatgacctgccagggccccaacaacacgcagatggcggcgtccatgaacaacgtctccttcgtgctcccggcgagggcgctgctgcagtcccacttcaccggactctccagcggcgtgtacgcgccggacttccccgtcgcgccgctgtcgccgttcaactacacggggacgccgccgaacaacaccaacgtgaagaccgggaccaagctgctggtgctgcggtacaacacgtcggtggagctggtgatgcaggacaccagcatcctgggcatcgagagccacccgctgcacctgcacggcttcaacttcttcgtgatcggccaagggttcggcaactacgacgccgtgaacgacccggccaagttcaacctcgtcgaccccgtcgagcgcaacaccgtcggcgtgccggccggcggatgggtggccatccgtttcctcgctgacaacccaggtgtatggttcatgcactgtcatttggaggcgcacacgacgtggggcctgaggatggcatggctagtgttggatgggagccatccgaaccagaagctgcttcctccgccgtccgatctgcccaaatgctagtcgggaccttaccacagatgccgttgattcttctttcctcatttcatttgttcgccaatttgcgattgctttctcctgaaggagattttagtgtgttagcccgttcttagctaacttttgtgacattattttgttcttttttcttttatttgtgtacaactatacaatgacactgttttgatgcttctttgaataaaaaaatgggcattaattgcatg

SEQ ID NO: 386034 - DNA, 1710 bp, Oryza sativa
  unsure (1)..(1710): unsure at all n locations
cacctgtcgacggcgtacgactactatctcggtgctttgttgctagcttcttccagctagccatgggtgtgaagtggaaaggtggtggcgcgctcctcctgctcgccgccgggctgctcctggtggccgtggcggcggcggcggcggaggaggagggtcggcgggacccgaaggaggagctccggtggtgcaagaagcagtgccggtgggaggccgggcaggaccagcggcagctgagggagtgcgaggagcagtgtctccagcggcagcaggaggacgacgacgacgacgagaacacgcacggcggcggcggcaaggagtgccgccgcgagtgccgtggctaccgcgacgagccgtggcggaagcaggagtgcatgaggcagtgcgagtggcgccgccacgagcagcaccaccacggcggcggccatggcggatccaggccggactgccgtgagcagtgcgagcaccagcaggactggtgggagaagcagcgctgcctcatggactgccgccaccggcgacaggaggtcgacgccgacgacgacaaccaccatggcagagacccctgctacaagcagtgccgccaccaccacgaccagtggaagaagcaacaatgcatggaggagtgcagataccaccagcgccaacaagacgccgccgtcgacgtcgacgaggaagacgacaaccacgccggcgatcgctgccgcaagcagtgccagcaccaccatgaccagtggaagaagcagcagtgcatccaagattgcaggtaccatcaccgccaagaagacgacgtcgtcgaggaagaagacggccatggcgatcagcaatgccgcaagcagtgccaacaccaccatgaccaatggaagaagcaacaatgcatgcaagactgcaggcagtggcggcgcaggaggaggaagaggccgccgtcgacgaggaagaagaccacaactacggcggcgagagagagcaacactgccgcaagcgatgccagcaccaccacgaccaatggaagaggcagcaatgcatgcaggactgcaggtacaggcgccaggaggaagacgacgtcgtcgacgatgacaaccaccacggcggcggcggcggccatggcggcgaccactgccggacgcaatgccagcaccaccgcgagtggcacgagaggcagcggtgcatgcgagactgccacgagcgccgccatggatgggccacggtggccgccgaagccatcctccaggcagtgtaattaaaggtaacgtaattaagatactgcttcgccgggtgtagggtatagctagctagggtttccatggtcgatcgacctagagctagtgctgtgctgctcgcgcgcgtgcacacacgaatgtgtacgcgagggaggggagaggaataaattgagcaggagatagatggccatggctctctccgataggagagcttctatatatctgggggagacttggaagctatatatactagctagtgtctactatgtctatgtatccggttgttgcagtacacttgtgcttggaagaggtgtatgtatgagataaataaagtggcgttcgcgaaaaagaagagataaataaagtgagagccctttgagtaaggtatttgtttgatttaagattaggaagtggattttgatccctcgagtggatatactctgttgtttgtatgtcacttaaatggttatnnnnnnnnnnnnnnnnnnnn

SEQ ID NO: 386035 - DNA, 2027 bp, Oryza sativa
  unsure (1)..(2027): unsure at all n locations
gtttatgacagcatctgccagatattttgcaggacaacttcctactcataggtgcttcgcaagtagcagcatccaagcactgaaaggtagtcagcatgtgagctttggagtgaaatctcttgtcttaaggaataaaggaaaaagattccgtcggaggctcggtgctctacaggttgtttgccaggactttccaagacctccactagaaaacacaataaactttttggaagctggacaactatcctcatttttcagaaacagtgaacaacccactaaaccattacaggtcgtgattgctggagcaggattagctggtttatcaacggcaaaatatctggcagatgctggtcataaacccatattgcttgaggcaagggatgttttgggtggaaagatagctgcttggaaggatgaagatggagattggtatgaaactgggcttcatatcttttttggagcttatcccaacatacagaacttgtttggcgagcttggtattaatgatcggttgcaatggaaggaacactccatgatatttgccatgccaaacaagccaggagaatccagccggtttgattttcctgaaacattgcctgcacccttaaatggaatatgggccatactaagaaacaatgaaatgctaacttggccagagaaggtgaagtttgctcttggacttttgccagcaatggttggtggccaagcttatgttgaagctcaagatggttttactgtttctgagtggatgaaaaagcagggtgttcctgatcgagtgaacgatgaagttttcattgcaatgtcaaaggcacttaatttcataaatcctgatgagttatccatgcagtgcattctgattgctttaaaccgatttcttcaggagaagcatggttctaagatggcattcttggatggtaatcctcctgaaaggttatgcatgcctattgttgaccatgttcgctctttgggtggtgaggttcggctgaattctcgtattcagaaaatagaacttaatcctgatggaacagtgaaacactttgcacttaccgatggaactcaaataactggagatgcttatgtttttgcaacaccagttgatatcttgaagcttcttgtacctcaagagtggaaagaaatatcttatttcaagaagctggagaagttggtgggagttcctgttataaatgttcatatatggtttgatagaaaactgaagaacacatatgaccaccttcttttcagcaggagttcacttttaagtgtttatgcggacatgtcagtaacttgcaaggaatactatgatccaagccgttcaatgctggagttggtctttgctcctgcagaggaatgggttggacggagtgacactgaaatcatcgaagcaactatgcaagagctagccaagctatttcctgatgaaattgctgctgatcagagtaaagcaaagattctgaagtatcatgttgtgaagacaccaagatctgtttacaagactatcccggactgtgaaccttgccgacctctgcaaagatcaccgattgaagggttctatctagctggtgactacacaaagcagaaatatttggcttcgatggagggtgcagttctatctgggaagctttgtgctcagtctgtagtggaggattataaaatgctatctcgtaggagcctgaaaagtctgcagtccgaagttcctgttgcctcctagttgtagtcaggactattcccaatggtgtgtgtgtcatcatcccctagtcagtttttttctatttagtgggtgcccaactctccaccaatttacacatgatggaacttgaaagatgcctattttggtcttatcatatttctgtaaagttgatttgtgactgagagctgatgccgatatgccacgctggagaaaaagaacattatgtaaaacgacctgcatagtaattcttagacttttgcaaaaggcaaaaggggtaaagcgaccttttttttctatgtgaagggattaagagaccttnnnnnnnnnnnnnnnnnnnnnnnnn

SEQ ID NO: 386036 - DNA, 1023 bp, Oryza sativa
ccaagctagcttctagtagttgagcaatggcggcgtcgtgccacgaggtggaggtgccggggaagccgacggagacggggacggcgctgctggaggcggcgacggggagcatccaggggttcggccccgtgaaccagatccaccagcacctgtgcgcgttccacttctacgccgacgacatgacgcggcaggtggaggcgcaccacttctgcgcccacctcaacgaggacatgcgccagtgcctcatcttcgacgggcccgacgccggcgcgcgcctcatcggcgtcgagtacatcgtcgccgagccgctgttcctcacgctccccgacgacgagaagccgctgtggcacacccacgagttcgaggtcaagggcggcgtcctcttcatgcccggcgtccccggcgtcgtcgagcgccgcgacctcgagagggtgtgcaagacctacggcaagaccatccacttctggcaggtcgaccgcggcgacgcgctcccgctcggcctgccccagatcatgatggctctcacccgcgacggacagctccgccaagaactcgccaaatgtgtggaggagaagttcagcgtgtcgttcgacaaggagagggagaaccgagcgtacatgagcggcccggatcacggcatccacccgctggcgaatgccgccggcaagggcttgaagaccgatctccgggaggttgatctgccggcgatgactacggcgcacgccgggagggttttcacctgatgacgacacactgatgagcgattgagcgacgactcgacggccttgctgcttctgcctgacgacggttaagtagtatgctagcatatcacgggatgctccgattagcttgtgtaccttcactcgtgttatgtatcgatctgttgtccctgagcgtttgttctgaaagaagcacactagagtatccgactgtagtacctgtagcctcttttctagcagcttgatgaacacaagaacaacagaacaggttgtgtatagctagttcaaaaaaaaaaaaaaaaaa

SEQ ID NO: 386037 - DNA, 1074 bp, Oryza sativa
  unsure (1)..(1074): unsure at all n locations
agtgataaaggcgcgatgcagtcgaatgctgaggaatccatccattgctacctataaaagcgaccaacccactgatcgccctccactaccaaagaacaacacacaactcggtctctagttgaaaagctatagccatggcggaggagaaggagctggtgctgctcgatttctgggtgagcccgttcgggcagcggtgccggatcgccatggcggagaaggggctggagttcgagtaccgcgaggaggacctcggcaacaagagcgacctcctcctccgctccaaccccgtccacaggaagatccccgtcctcctccacgccggccgccccgtctccgagtccctcgtcatcctccagtacctcgacgacgcgttccccggcaccccccacctcctccctccggcgaactccggcgacgccgacgccgcgtacgcgcgcgccacggcgaggttctgggcggactacgtcgacaggaagctctacgactgcgggtccaggctgtggaggctcaagggtgagccgcatgcggcggcggggcgcgagatggcggagatcctccgcacgctggaggcggagctcggcgaccgggagttcttcggcggcggcggcggcggcaggctcgggttcgtcgacgtcgcgctcgtgccgttcacggcgtgttccacagctactgagaggtgcggcgggttcagcgtggaggaggtggcgccgaggctggcggcgtgggcgcggcggcgcggccggatcgactccgtcgtcaagcacctcccctcgccggagaaggtctacgacttcgtcggcgtcctcaagaagaagtacggcgtcgagtagatcggtggatgcgaagttgcagggatcgattggcggttgcgttcgctacgtgaacgattcgtccgttgtttcagtggccaagtgtgtgtgagtttgttgttaccgttgagtgcttgtgtgtgggatggttggtggcagcagagagttgcctccgattctctgagatagtcactaaataaagtttgtcctttgaaactaaaaaaagttggctttggttnnnnnnnnnnnnnnnnnnnnnnnnnnn

SEQ ID NO: 386038 - DNA, 895 bp, Oryza sativa
acaagttgctggcagggtgctgcaggcccccaagctaaaagctggaaatggtgaagatctttttgcacgtaatgggcggtggaactttaataataagaggctcattaaggctagcagtatcgagaaatgggcagttgttaacttctctgcacggtgtaatattagggatcttgtccgagacatcatcaagtgtggtggcatgaaaggaattaaagtagaagatccatttgatgtcattgaggaggacccttcaatgcgacgagctcctgctgcaagaagggtagatggcatgattgacaagatgcaaaaaaagcttcctggacaaccaaagtttctgctctgtgttcttgctgagaggaagaattcagatatttatgggccctggaagcggaaatgtcttgctgaatttgggattattacacaatgtgtggcccctactagggtcaatgatcagtatattacaaatgtactgttaaagataaatgcaaagcttggtggcttgaactccctgcttcaaattgaaacatccccttccattcctcttgtatccaaggtcccgacaataatattgggaatggatgtttcccatggatcacctggacagtctgatataccttcaattgctgcggtcgttagttctcgtgaatggcctcttgtatcaaaatacagggcttcagtccgttctcagtcacctaagttagaaatgattgatggactatttaagccacaaggagctcaggaagatgatggcctcattcgggagttattagttgacttctataccagtactggtaaacgtaagcctgatcaagtcattatctttagggatggggtcagtgagagcccagtttacccaggtgctgaacattgagctgatcaaatattgaggcatgca

SEQ ID NO: 386039 - DNA, 882 bp, Oryza sativa
cagcagcgagagacgaacaaaaaacagaatccatcgccataatcgaaggttcgctcttgcttccaccccgcaatccacatggagaacgaattccaggatggtaagacggaggtgatagaagcatggtacatggatgatagcgaagaggaccagaggcttcctcatcaccgcgaacccaaagaattcattcatgttgataagcttacagaactaggagtaatcagctggcgcctaaatcctgataactgggagaattgcgagaacctgaagagaatccgcgaagccagaggttactcttatgtggacatttgtgatgtgtgcccagagaagctgccaaattatgaaactaagatcaagagtttctttgaagaacacctgcataccgatgaagaaatacgctattgtcttgaagggagtggatactttgatgtgagagaccaaaatgatcagtggattcgtatagcactgaagaaaggaggcatgattgttctgcctgcagggatgtaccaccgctttacgttggacaccgacaactatatcaaggcaatgcgactgtttgttggcgatcctgtttggacaccctacaaccgtccccatgaccatcttcctgcaagaaaggagtttttggctaaacttctcaagtcagaaggtgaaaatcaagcagttgaaggcttctgagggttttgttgggctcctgcactgcggttctatattcaacctgaataagatgtgctatagcaatgtaaatttagcacagtggctatggtcgccactcaccaacttgaagtgaaagatttaatgatttttgttaattcttatgtatcaatcggcatatagcatttccgaaatgtgttttcaataaacaggagtcatgaagctgaa

SEQ ID NO: 386040 - DNA, 974 bp, Oryza sativa
ccacgcgcgcgtccgctcgtcctcgcgactccgccgctgctcgagagcgcaatggcgtccatggcgttcacactggtgggagcattcaaggggatgtccctctcctccccgtgccattcctcctcctccgcctccttcctccgcgctgaccgtgtctcgctctccgtcggcggcggggtcgggatgggggtgccgatgacgatgccggtgcggcggctgacgatccagatggcgcacaagaagggggccgggagcaccaagaacgggagggactcccccgggcagcgcctcggtgtcaagatttacggcgaccaggtcgccaagcccggcgccatcatcatccgccagcgcggcaccagggtctatcctggaaataatgttggaatgggcaaggatcacaccctcttttctttgatcgatggcctcgtaaagttcgagaaatatggaccagacaagaaaaaggtaagtgtttacccatacgagaaacaacctgagaacccaaacagttacagagcaagaaagagagagtacttccgcatgcagcgtgaacgcaaaaaggcaagagcaaagggaattgtttaggtgcaattggtgttggcagctgcagattaaagtcctgaggtcaatgcagactgctgataagttctctgccccgtttttctccattttcgcaatccatgtttgataacaatgtttggaatgtaaatcatcaactatgagatgaatacaaggcccatcttcaactccttgtttagccatgttcggcttgctgtatcttttctgccagctaggctttaggaactagggcgggtctattccaactgaatcatcaacagtgagatgaatacaaggcccatgttcaactcattggttagtcctgttcgacttgttgtatgcatgtacctttcctggcagctaggctttagggcctcggatgggtctattccagtattccggtaccacaagttccacgt

SEQ ID NO: 386041 - DNA, 753 bp, Oryza sativa
  unsure (1)..(753): unsure at all n locations
ataaatgccaacctgtttgctttctcagctagaaaaacagagttcttggttacaaagatcttgacttgcttgggagaggaagagagaggagtttcttgctttcttcagagggaaattggcttcttggaatcctaattagagcaaatacatgatatcctaggagataaacacacacacaaaaatctaattgaggaaactgattgccactagcttcaccaagaaatggagagggagcagatgaggatggccatcctgaggcaagaacaaacattcagacaacaggttcatgagctgcacagactgtaccatgttcagaaacagctgatgaaacagatgcagatcgccaagctgaaccaagctcaggcaatcgctgccaacgccgaaaccaaaccgaaattcgagatcactttcgccgagaattcaaccaaccatcaccaccaccaccaattctacagcttccagagcagcaagatcatgtctccccctgcagcagcagcagcagcagcagatcaagaagaggaagaagaatgcgacctccagctgacgctggcgacggggagcagcggcggcggcgatggcacggcgagggggcacaaggggaagaaggaggtgaggtcatccaantcggactccggcacggcggcgtcgtcgacgtcgacggagtccgagctggcccagttcaagaatcatcatcaccatcagttggactgcgcggnggcggcgccggtggcgtcgcggcgggaggttccaggg

SEQ ID NO: 386042 - DNA, 1079 bp, Oryza sativa
  unsure (1)..(1079): unsure at all n locations
cttctccggacgtattgtgttagtggaccattagtagagctgatagttgagagaaaagtcctacaacaatgttctccttgttctatggtctatggcagcatgtcttcagcaaggcagagttccatgtagttatccttggagttcacaaggctgggaagacgaccttgctagaaaaggtgaagtcaatctatttgaaagagaaaggccttccacatgatcgtatcgttccaacagttgggcttaatattggacgtattgaagatgccaatgttaaacttgttttctgggatctgggaggccagcctggcctacgaacaatctgggagaaatattacgaagaggcacatgctgtcctatatgttattgactctgctgctgcatcatcatttgaagatgccaaatctgctctggagaaagttcttcatcacgaagatctgccaggagtgcctctactcatatttgcaaacaagcaggagtttccaccagctgtgacagaagaaaaactggctaggcatcttccccttaaagggttagacgagagcccatatatgttccagggtggatctgcctacgacgggacgggaatcaaaggtggtattgactggttggtggaagaaatggaaaggagtaaacgcaccgaggtgctgatggcgcgtacagaaacagctgagaagatttaacacaccataagccagaccccctgtcacagatgcatatgtcgtttgaggagtatggctcctataaatctcgcgaatataacaaattggcatcctcttgccttctccaggctacgcggtgagaagaaaaaatgtccttggttgtgcggtttcttgcaggctttgcagctgtacacttgggtaggaagcctgctgttgtaacgacagaggcggggtattccttggtttattgattctcataggctcatagcacacataaatgtacctaaagtcatgcgacttttttcttcatattgaacggaacaagaacgacaatgtagagcacagagaagttttgtacatctgtgagaagaaaaaaaatgcattttgtactttatcgttcnnnnnnnnnnnnnnnnnnnn

SEQ ID NO: 386043 - DNA, 1814 bp, Oryza sativa
  unsure (1)..(1814): unsure at all n locations
aacacaccaccatgaagacggcatcaatggcggcgtcgctgctcatcccgctctgcctctgcatcctcctcctgcgcggcgcctccgccgtgagcgaccagcaagaagccggccgtcgcgatagctgcgaccgcatcgaccgccgcatccgcgcgctggagccgacgcgccgcgtcactccgaggccggccacaccgagctctacgacgaccgcgacggccagctcccctgcgccggcgtcgcgccgcgcgatcaccatccagcgcaacggcctcctcctcccttcctattccaactccccccgcctcgcctacatcgtccacggccgtgcatcgtcggcgtcgtcatccccggctgccccgagacgtaccaggagacctcgtcgtcgtcgtcgcaggagcaggaggacgacgagcgccgccgccgtggccgccgtggtgatgaggagagacggcgatcgagcgagggagaggaggaggaggaagaggagaccagccgccgcagcttcgagcagtccatccgcgacgagcaccagaggatcaccaccgtccgccaggcgacgtcgtggccatccccgccggcgcgccgttctgggtccacaacgacggcgactccccgctcgtcgccatctccgttcacgacgtcagcaacaacgccaaccagctcgaccaaacctccaggcgtttcggctagccggcgggcaggcgaggagcgaggggaggcagaggtacggtgagggcgagtcgtcggagtcggagacggaacgcggcggcgaggagtcgtacaacatcctgagcggcttcgacaccgagctgctcgccgagtcgatgcgcgtcagcccggacatcgcgcgcaagctgcagggccgcagcgacaagcgcggcaacatcgtgcgcgtccgccgcggcggcctccgcatgctccgcccggcgacgagcgtgaccgacgaggagatgatgaggggcgccaacgcgccgccgccgccgggaacggatcgacgaggccgtctgcttgatgaagctccgcgagaacgtcgccgacccgatgaaggccgacctctacacccccaatggcggccgcatcaccgtcctcaacagccagaagctccccgtcctcaagctcatcaagatgagcgtcaaccgcggcgtcatgcgccggaacgcgatcctggcgccgcactggaacatcaacgcgcacgcggcggtgtacgcgacgagcgggagcgcgaggctgcaggtggtgagcagcgaggggcggcgggtgttcgacggcgagctccggcgcgggcagatggtggtggtgccgcagagcttcgcgtggcggggcgcgccggcgacgaggggttcgcgtgggtgtcgttccagacgagcgacggcgccatgaacgcgccggtggttggcaagtcgtcggcgctgcgcgggatgccggcggacgtgctggacaacgcgttcggcgtgtcgagggaggaggcgcgcatggtcaagttcgggagggggcaggagctcgccatcttctcccccaagtccggcgccgccgcccgccgccgccgctctcccggccacagggacgacggcgtgctcgccgccccggcctgaggcgtacgtagataccagcgtgagcgcacgtgcgcatgtacatgtagtactaataatgtgcacgttttccgttaagggtgccacgcactgcatgcaccgtatgttggcccgtacatgtacggtgtacccgatctagaataaatgaagtcgctgctgctaccaaagtgcagtgtgttaattaagagctcgtttcgctttatcaattaaaaannnnnnnnn

SEQ ID NO: 386044 - DNA, 1296 bp, Oryza sativa
  unsure (1)..(1296): unsure at all n locations
gtcgtnntgcgtnaggnagggcgacgccatggtcatccccgccggcgccatcgtctactccgccaacacacacagctccaagtggttccgcgtcgtcatgctgctcaaccccgtctccactcccggccacttcgaggaatacttccccgtcggcggcgaccggccggagtcgttcttcagcgcgtttaggacgacgttctgcaggcggcgttcaacactcgccgggaagaattggagaaggtgttcgagaggcagcgggagggcggcgagatcacgacggcgccggaggagcagatacgggagctgagcaagtcgtgctcccgcggcggcggcggcggctcgggttctgagtgggaaatcaagccgtccagcctcaccggcaagagtccgtacttctccaacaaccacggcaagctgttcgagctcaccggcgacgagtgccgccacctcaagaagctcgacctgcagatcggcctcgccaacatcacccgcggctcgatgattgcgccgaactacaacacccgcgccaccaagctcgccgtcgtcctgcagggcagcggctactttgagatggcgtgcccacacgtgtccggcggcggctcgtcggagcgccgggagcgcgagcgcgagcacgggaggaggagggaggaggaacagggagaggaggagcacggcgagcgcggggagaaggcgaggaggtaccacaaggtgagggcgcaggttcgggaggggtcggtgatcgtgatccccgcgtcgcacccggcgacgatcgtcgccagcgagggcgagagcctcgccgtcgtctgcttcttcgtcggcgccaaccacgacgagaaggtgttcctcgccggcaggaacagcccgctgaggcagctcgacgacccggccaagaagctcgtgttcggcggtccgcggcgagggaagcggaccgcgtgctcgccgcgcagccggagcagatcttgtgcgcggcccgcacggccgcggcagctctccgacatgtaacgcgacgcgacgacgtcccctgcacccggcgcgcgtacgccgagcagctgtgtgatcgagaggaataagttggtacacgtaggccacgcgtcgtgtacagtacaaaatacggtaccgtactgcgtgtacgtgtagccaaggggacgtacgctttatgtatatatcgtatctatgtattaacgtatgcgtattagctgaggtatgtatcgatggaactgtatgaacccaagtacggagtgctatattactaatgcagagtacgttctgctnnnnnnnnnnnnnnnnnnnnnnnnn

SEQ ID NO: 386045 - DNA, 1075 bp, Oryza sativa
cccacgcgtccgcggacgcgtgggtgcgccgccgccactcactcccaaaccctaaccccggaggagagggaggagcagccatggccgtgggcaagaacaagaggatctccaagggcaggaagggcagcaagaagaagaccgtcgatcccttttccaagaaggattggtacgacatcaaggcgccgaccgtgttctccgtccgcaacatcggcaagaccctcgtctccaggacccaggggaccaagattgcatctgagggtctcaagcatcgtgtctttgaagtctccttggcggatcttcagaatgacgaggatcaggcttacaggaaggttagacttcgtgctgaggatgttcaggggaggaatgtcctcacgaatttctggggcatgagttttaccacggacaaacttaggtccttggtcaagaaatggcaaacattgattgaagcccatgtggatgttaagaccacagataactacatgctccgcctgttttgcattggtttcaccaagcgccgcccaaatcaggtgaagcgtacctgttacgctcaggctagccagatccggcagatccgccggaagatggttgagatcatggccaaccaggcatcaacatgtgacttgaaagaactggtttcaaaattcatccctgaagtcattggaaaggagatcgagaagtcaacttcaagtatattccctctccaaaatgtgttcatccgcaaggtgaagatcttgaaggcaccgaagtttgatcttgggaagttgatggaggtacacggtgactacaaggaagatgtcggtatgaagctggacaggcctgctgagactgacgaggcggtggcaggggaggttgcagcagctgagtagagatggtgttgctagttgctttaccttttaggagatttgggctgttactaaattatggatgatcaaaacttaatgtcagttccgatacccttttttgtctgccgagttggtttctctgattaaaaccatggaaaattgtgagactgatttcatggccagctcattttgaatgcagttgaatgattagtactaaaaaaaaaaaaaaaaaa

SEQ ID NO: 386046 - DNA, 2394 bp, Oryza sativa
ccacgcgtccgcacacccaatcaaatgctcctcctccgccgcctcctctcgctgagctgagctgagctgtgaaatagtgccaccgagtgagcgctgagctgagctcgaagcaagagaggaagaggaggaggagggaagagggggggcgaagatgattacggcggcggacttctaccacgtgatgacggcgatggtgccgttgtacgtggcgatgatactggcgtacgggtcggtgaagtggtggcgcatcttcacgccggaccagtgctccgggatcaaccgcttcgtggcgctcttcgccgtgccgctgctgtcgttccacttcatctccaccaacaacccgtacacgatgaacctccggttcatcgccgccgacacgctgcagaagctgatggtgctggccatgctcacggcgtggagccacctcagccgccgggggagcctcgagtggaccatcacgctcttctccctctccacgctgcccaacacgctcgtcatggggatccctttgctcaagggcatgtacggggagttctccggcagcctcatggtgcagatcgtcgtgctgcagtgcatcatctggtacacgctcatgctcttcatgttcgagtaccgcggcgcccggatgctcatcaccgagcagttcccggacaccgccgccaacatcgcctccatcgtcgtcgacccggacgtcgtgtcgctggacggcaggagggacgccatcgagacggagacggaggtgaaggaggacggcaggatacacgtcaccgtgcgccgctccaacgcgtctcgctcggacatctactcccgccgctccatgggcttctccagcaccacgccgcggccgagcaacctcaccaacgccgagatctactcgctgcagtcgtcgcggaacccgacgccgaggggttcaagcttcaaccacaccgacttctactccatggtgggccgcagctccaacttcggcgcggccgacgcgttcggcgtccgcaccggcgccacgccgcgcccgtccaactacgaggacgacgcgtccaagcccaagtacccgctcccggcgtcgaatgcggcgcccatggcgggccactacccggcgccgaacccggccgtgtcgtcggcgcccaagggcgccaagaaggcggccacgaacgggcaggccaagggcgaggacctccacatgttcgtctggagctccagcgcgtcgcccgtgtccgacgtcttcggcggcggcgcgccagactacaacgacgccgcggcagtcaagtccccccgcaaaatggatggagcgaaggacagggaggactacgtggagcgggacgatttcagcttcgggaacaggggcgtcatggacagggacgcggaggcaggggacgagaaggcggcggcggcggcgggcgccgaccccagcaaggccatggcggcgccgacggcgatgccgccgacgagcgtgatgacccgcctcatcctgatcatggtgtggcgcaagctcatccgcaacccgaacacctactccagcctcatcggcctcatctggtccctcgtctgcttcaggtggaacttcgagatgccggccatcgtcctgaaatccatctcgatcctgtcggacgcggggctcggcatggccatgttcagtctcggtctgttcatggcgctgcagccgcacatcatcgcgtgcgggaacaaggtggcgacgtacgccatggcggtgcggttcctggccgggccggccgtgatggcggcggcgtccttcgccgtcggactccgtggcacgctcctgcacgtcgccattgtccaggcagctctgccccagggcattgtccccttcgtcttcgccaaggagtacagcgtgcaccctagcattctcagcacagctgtcatctttggcatgctcatcgccttgcctatcaccctcgtctactacatcttgcttgggctgtaatcgagttgcatgcatgtaaattcctgctcctgacaaccagccatgttaagaagaggggagaagaagacagagctggtacactgtttgcaaagtcaggactctttgatttttcttttcttttctgtatttcttgaagtagaatttgggaggagggggattggaagggagtcaaacgagtcaaggggaggacaggatggtagctagcttagctaggacaatggtgagtcacaaaagagcaccaaaagcaagtacaagtacaaagcttggggggacacaggatccagttcaggtcacagaaacggttcggttttgggaggggattgtgggagttttggttggctgcgctgcgctgacccttgtaaaacggacgccgattctgacaagagatcgaccttgttttaaaaaaaaaaaaaaaaaaatgactactactttggaatgattaatctcctactact

SEQ ID NO: 386047 - DNA, 1384 bp, Oryza sativa
ccacgcgtccgcccacgcgtccgcacctcccacacattctcgaagaaggagaagaaggagaggagcagccatggcgtcgtcggtggcagcggcggcgagcacgttcctggggacgaggctggcggacccggcgccgcagagcgggaggatcgtggcgaggttcgggttcggcggcgggaagaaggcggcggcgaagaaggcggcgaggccgtcggcgccgacgacggacaggccgctgtggttccccggcgcggtggcgccggactacctggacgggtcgctcgtcggcgactacggcttcgacccgttcggcctcgggaagccggcggagtacctgcagttcgagctggactcgctggaccagaacctggccaagaacaacgccggcgagatcatcggcacccggttcgagaccggcgaggtgaagtccaccccgttccagccctacaccgaggtgttcggcctccagcgcttccgcgagtgcgagctcatccacggccgctgggccatgctcgccaccctcggcgccctctccgtcgagtggctcaccggcgtcacctggcaagacgccggcaaggtggagctggtggatgggtcgtcgtacctggggcagccgctgccgttctcgatctcgacgctgatctggatcgaggtgctcgtcatcggctacatcgagttccagcgcaacgcggagctggacccggagaagaggctgtacccgggggggtcctacttcgacccgctcgggttggcgtcggacccggagaagaaggagcggctgcagctggcggagatcaagcacgcccgcctcgccatggtcgccttcctcggcttcgccgtgcaggccgccgccaccggcaaggggcccctcaacaactgggccacccacctcagcgacccgctccacaccaccatcttcgacaccttctcctcatcctcttaatttaagctctttcgcgcgcaattcaaacgggatcgatgcgttggtgtgcgttcgcgcgcgctgtttagttttgtgatgacgagcgagctgggagggtatggagagaggagaggtcatccttttgttgattactacttaaattaggaaagctgggttggtggttaatggcgacttgcatggtggtgatttgtaatataagaacacccaagatgatgaattaatgcatccacttgtacatcgatcgatcgatcttggtatttgactaagtgagtgtgactgtgaatgcacatatgcacactgcatagactttacctgacatgtattgatattaataaagttataacaggtgtctcgctatcaaaaaaaaaattgtttatcactgaaaaaaaataattagttataaataagaatgccctgctacctgagctccgttaggttcac

SEQ ID NO: 386048 - DNA, 758 bp, Oryza sativa
  unsure (1)..(758): unsure at all n locations
taaaaanaaaaaaacccnnganntnccccntnnnccngaanncnccccnttacccaaaangttcccccaacncnccannnnnatnccncnctngnanntcnnccnnncctcnnatttccnntnttaaacccaatgattggagncttnntgncacctccttnnatngacttnttgacanttcctnacggtaanngattcngcnacggaattgcccngaaaaagtttnncgggggntcttatttnacccctcggtttgcttcgnacccgaaaanaagnaccnctncatttgcgnanatcaagcaccccgcttcgcnatggtcgcctttccnttgtcgccctacagcccccccccacggccgagggccccctcaacaactgggccacccacctcagcgacccgctccacaccaccatcttcgacaccttctcctcatcctcttaatttaagctctttcgcgcgcaattcaaacgggatcgatgcgttggtgtgcgttcgcgcgcgctgtttagttttgtgatgacgagcggaagctgggagggtatggagagaggagaggtcatccttttgttgattactacttaaattaggaaagctgggttggtggttaatggcgacttgcatggtggtgatttgtaatataagaacacccaagatgatgaattaatgcatccacttgtnnaaaaaaaataaaaataaaaaaaatataaaaaaataatatataaaattataatattatttataaaaatattatttataa

SEQ ID NO: 386049 - DNA, 503 bp, Oryza sativa
aaaacgcgggcaaggtggagctggtggatgggtcgtcgtacctggggcagccgctgccgttctcgatctagacgctgatttggatcgaggtgctcgtcaccggcaaggggcccctcaacaagtgggccacccacctaagggacccgctccacaccaccatcttcgacaccttctcctcatcctcttaatttaagctctttcgcgcgcaattcaaacgggatcgatgcgttggtgtgcgttcgcgcgcgctgtttagttttgtgatgacgagcgagctgggagggtatggagagaggagaggtcatccttttgttgattactacttaaattaggaaagctgggttggtggttaatggcgacttgcatggtggtgatttgtaatataagaacacccaagatgatgaattaatgcatccacttgtacatcgatcgatcgatcttggtatttgactaaaaaaaaaatattattatatattattatttaatataattttaattttttt

SEQ ID NO: 386050 - DNA, 537 bp, Oryza sativa
ggtggggttgggaagacaacgcttgcccaggtcatctacaatcatgccagagtgaagcaacactttcagcatagagcttgggtctatgtttctgaggatttcaccatcaaaagaactttgcgagaaatcctgcattcattccaaggacacgatggcgctattttcaatggcgatgaaagcatggaagctaccatcaccaagctccgtatcaagatcagtggaggatgtaaattctttttggtgctagacgacatgtgggaagagatgtgccaggaatggagcacgctgctgacagcattatctgatgaggcacgtcagcatggcagtgttctccttatcaccacacagagccaaagagttgcacaaattgttgccacgatttatcccataaatctgaaagcattgccgtgggagatcttctggcagctttttcagaaccacgcgtttgggggcgtggagattgccgatgacaaccaaaacaggttactgatcgctgaagagattgcaaataagcttgatggattgccactagcgttg

SEQ ID NO: 386051 - DNA, 1275 bp, Oryza sativa
  unsure (1)..(1275): unsure at all n locations
ctctcccgccgccgccgccgccgcacccgccgatctccatcctgcgagcagcggcggcgctccacctttccctccccaaatttcaaaactcgattcgaaatctgccacgctttattcccgccatctcattctcacctacccaattgtctcctcctcctcaaatttaggttgaaaaagatattcccggcgcctccccacaatcagctagctctacaaatacctcccgcatgagctccatttgcgccatgagatccctcctcgccgcctccaccttcctccgctccggcgcttcccctctgctgcggcccctttcccgtcctctcccttcccgcctgaatctttcccgattcggtccggtgaggccggtctctgcggcggcggcggcggcggacaagtctcgaggcggaggcggctccgcgatggaggcccagccgtcgtatcccggtgagattcacgtcatcgtgggccccatgttcgccgggaagaccactgcccttctccgacgcgtgcaggtcgaggccggcactggcaggaacgtggcactcatcaagtctgacaaggacaataggtatggattggattctgtcgtaactcatgatggcacaaagatgccatgctgggctctacctgagctttcaagtttccaagataaattaggaacagaggcttacgataaggttgatgtcataggtattgatgaagcacagttttttgacgatcttcatgatttctgctgcaaagctgctgaccgtgatggaaaaattgttgtagtcgcagggctagatggtgactacaaaaggaacaaatttgggtcagttctggacattatacccttggctgactcggtcaccaagctcaccgcacgctgtgagttgtgcggtcgccgtgcattcttcacgctgaggaagacacgggaaactaagaccgagctcattggaggagctgatgtgtacatgcctgtatgtaggcaacactacctggatggtcagattgtcattgaggccacaaggattgtgctggatcttgaaaaatccaaggttatccatgctttcaagtgagtgaatagctcattgtatcctttttacttgcaaggcttaccatgtgtaacactatcatcatcaaccatgcaatccatctagttatcgtagaagatgatggaaagaccacaatattcagagactctccattaaacgattgtaaatatgtatcagtccagattctgttgggaatgaattttatcttggtttgtggnnnnnnnnnnnnnnnnnnnnnnnn

SEQ ID NO: 386052 - DNA, 1367 bp, Oryza sativa
  unsure (1)..(1367): unsure at all n locations
cccaacttgggaagcccttcctccgctccgcctcctacctcaaggaggccctcctcctcgcactcgccgacagccaccatggctcctccggcgtcacctcgccgctcgacgttgccctcaagcttgcagcatacaagtctttctctgacctgtcacctgtgctccagttcactaactttaccgcaacaaggcgcttcttgatgagattggtggcatggcaacttcctgcatccatgtcattgactttgatctcggtgttggtggtcagtgggcttccttcttgcaggagcttgcccaccgccggggagctggaggtatggccttgccgttgttgaagctcacggctttcatgtcgactgcttctcaccatccactggagctgcaccttacccaggataacctctctcagtttgccgcagagctcagaattcctttcgaattcaatgccgtcagtcttgatgcattcaatcctgcggaatctatttcttcctctggtgatgaagttgttgctgttagcctccctgttggctgctctgctcgtgcaccaccgctgccagcgattcttcggttggtgaaacagctttgtcctaaggttgtcgtggctattgatcatggaggtgatcgtgcagaccttccattctcgcagcatttcctgaattgtttccagtcctgtgtgttccttgactcgcttgatgctgctggtattgatgctgattctgcctgcaagatcgagaggttcctaattcaaccaagagttgaggatgcagtgattgggcggcacaaggcgcagaaagctatagcatggaggagcgtttttgcagcaactgggtttaagcccgttcagctcagcaacctcgccgaggcgcaggcagactgcctcctgaagcgggtgcaggtccgaggattccatgtggagaaacgcggagctgctcttacgctctactggcagcgtggggagcttgtatccatatcatcttggcggtgctgatcagccataagcttcactccaccaaggttccaccaccgtttgcaagcatcgaccactccagtaatgtccatttattcttgcaattaaatgttgcaaatgaaattgttgtcttgagctgttgaactcttcatattgcttttcgttgcagcttattagctagcctagtggatttaggaatattggtgtcagtctctatagctaatgatgttgctttaggttgttgccatgctctgctcaattagccatgatcatctcattggaaacactgcttatgagtagagactagagggtaatttaacctatcaaatggttgtgtggtacagaattaatattatactgctgttgctctgtnnnnnnnnnnnnnnnnnnnnnnnnnnnn

SEQ ID NO: 386053 - DNA, 1060 bp, Oryza sativa
  unsure (1)..(1060): unsure at all n locations
cggacgcgtgggcagattgcgttgagctgaagctgttcgtgtgactcttctacaccttccaggctatccggaatcgggagggtttcccaataggaaagcaactcaggactcaggagcggcgtctgagaggtttcagagatggagaaccagttccaggatggcaaggaggaggtcatcgaagcttggtacatggatgacagtgaagaggaccagaggcttcctcatcatcgtgagcccaaagaattcattcctcttagcaaactttcagagttaggaatattaagctggcgcctgaatgctgatgactgggagaatgatgagaacctcaagaaaatccgtgaggccaggggatactcttacatggatatttgtgatgtgtgtccagaaaagctgccaaactatgaggctaagctgaaaaatttctttgaagaacacttgcatactgatgaagagatacgctattgtcttgagggaagtggatacttcgatgtcagggaccaaaatgatcagtggatccgtgtagcagtgaagaaagggggcatgattgttttgcctgcgggaatgtatcaccgcttcacattggacagtgacaactacatcaaggcaatgcggctctttgtgggagagcctgtctggacgccgtacaaccgtccccatgaccatctgccagctagaaaggagtatgtcgaaaaaattatcaacaggggtggaactcaagctgtcgaagctcgttaaaggcatatcaagatgtgcttcctagttcggtgttctgttacactctacagatactgaataaactgtgctatcagctgttgcaatgggctcctaccgacatcttacatcatttggcagtattttgcacaaacccgcttaaaatctccctgaaaatacgcacgtcaccatgtcagagtgtttatatacaataatgacacttcagtccacagtcagcaagggactaatgacaaaaaaaaaaaaaaaaatgtgtgtgatgaaaccacaatgatcaaaccgagtgtctgaatctctgcactgttttttttacnaccatgacttgtgtacc

SEQ ID NO: 386054 - DNA, 819 bp, Oryza sativa
  unsure (1)..(819): unsure at all n locations
cacacaaacccaaaaacccaaagcttagccaagctactagctagctcctcacttcttccagcttcttacactaatacagctcgagccacttcgtcttctcctctcttncagcatagtttaagtttgagataggattggcgatagatatgaggccgactggtcgtcgttcttctccgccggtggctgctgctcttgccctgcttctcctcctcgtcctcttcttcttctcccactgcgcctcagctgctcgcccactgccagcatcagcagcagcagagctagtgcttcaggatggcgccaccggcaatggcgacgaggtttccgagttgatgggagcagctgaggaggaagcagcaggattatgcgaggaggggaacgaggagtgcgttgagaggaggatgcttcgcgacgcccacctcgactacatctacacgcagaagaggaacaggccttgaaatcttgaatcataatctccaagtcgatacaaggaggaattaatcagtagtaaacctacataaattaatctactatctgcagcctgttttcaactgcatgtatcagtgtattagtcgatctaggataatattttgcatgtgtactcaaggaaactgtcgtctgtataaccccgttatgtacatggttgtatttctttctccaaagtgttatcgaactctctgttgatctctgatacatctgtatgtgtagcatcagagaaaagatcgagcacttgtgggttatgatctgacgatcgagtgtatgaacagtgctaatggtgtagtaagtttttgcttnnnnnnnnnnnnnnnnnnnnnnnnnnnn

SEQ ID NO: 386055 - DNA, 856 bp, Oryza sativa
gcatcatcatcaatggagtgcaccggaaacatgtcggcggcgccattgctcgtcttgacggtggcggtgctcgccgtgctagcctccacctgcgccgccgacccagagccgatacaagacttctgcgtggccgtgccccgtgccggcggcgaggcgtcgccggcatacccgggcttcccgtgcaagccggcgtccgcggtcgtctccgacgacttcttcttcgccgggctcgccgccgccggcagcacggacaacccgttcggggccagcctgaagccgggcaacgtggaggcgttcccggcgctgaacacgctcggcgtcgccatcaaccgcgtcgacctcgcccccggcggcgtcaacccgctgcacagccacccgcgcgccgccgagctggtgcacgtcatcaccggccggatgctcgtcgggttcgtgagcacggcggggaagtactactccaaggtggtcggcgagggggagacgttcgccatcccgcgcgggctgatgcacttccagtacaaccctgggaacgcctccgcccgcgccatgacggtgttcaacagccagctccccggcgtcgtgcccgccgcgacggcgctgttcggcgccgacccggagatccccgacgccgtcctcgccaagagcttccaggtggacgccgagatcatcaaactgctcaagtccaagttcaagaagtgacactgacgtctcatccgccatggctacagcatatctgttttgctttagctgtcctagatacagtaaatagagttgtttcacgtttgatattttggtccgatatttgcccatttggcacatcaataaagtaaatttgaattgtcctaaaaaaaaaaaaaaa

SEQ ID NO: 386056 - DNA, 635 bp, Oryza sativa
  unsure (1)..(635): unsure at all n locations
gagggctccctcgacgtcggcttcgtcaccaccgccaacaagctcttcacccgcaccgtctgcaagggggaggtgttcgtcttcccgcgggggctcgtccacttccagaagaacaacggcaacacgccggcgttcgccatcgccgccttgaacagccagctccccgggacgcagtccttcgccgccgcgctcttcggcgccgcgccgccgctgccgtcggacacgctggccagggcgttccaggtcgacggcggcatggtcgagttcatcaagtccaagttcgtcccgcccaaatactagaattgcattgcatgcatgcatactgcaggaagaacaagatggcagctgagctagctagccctatcgcgataataataattaagaggacgtacgtacgtaccgttaaaaagtttgtgatttgaattggtaggatttgtgtcagtgtgtgtttgtgtttgtgagtcctttgatctgtaatgtttagttttgtttttgagtcctcgtcgatcgatcgggtcgtgtctcgtaccacatgtgtgtggtacctggccggacctgatcgttactgtattattaacgtcctggtttaaatactaccaccgttacttcgtnnnnnnnnnnnnnnnnnnnnnnnn

SEQ ID NO: 386057 - DNA, 498 bp, Oryza sativa
tctctctctcgcctcaccaccgccgtcgtcgtcgccgccgccgcaaccctcgccgccggcgctaggctcgcgacgccgacgttgtcggcgccatccgaccccgccgtggccacccacccgcaggcgggcgccgccgcggcggcgtcctccagcagcggcctcaccttcaagctccaccccctcgtcatcgtgaacgtctccgaccaccacacccgcgtgaaggcccaggcggcgtgctccggcgacggggcctcgtctgcggcggcgggggggcaagccgccgagggtgttcgggtgcgtgatcggggtgcagcgcgggcggacggtggagatcttcaacagcttcgagctcgtcctcgaccctgtctccgggaccctcgaccgcgcctttctcgagaaaaagcaggagctctttaagaagggtttccccgacttctatgtgctgggttggtactccactggaagcgatgtgcgggacactgatatgcaaatccacaa

SEQ ID NO: 386058 - DNA, 1379 bp, Oryza sativa
  unsure (1)..(1379): unsure at all n locations
tcctcctgcgttctagggttttgcctcccagcggcgactcggcgagcgagaccaccggcaagctcgtcggcgatggagcccacctcgtcggcggcgatggcgaggcagacgtgggagctggagaacaacatcccggcggcggcctccgacccggacgccctggacgcgatctaccgctacgacgaggcggcgcaggcgcgggtgcagcaggagaagccctgggcgaacgacccccaccccttccgccgcgccaagatctccgccctcgcgctcctcaagatggtcgtccacgcccgcgccggcggcactatcgaggtcatgggcctcatgcagggcaagtgcgagggcgacgccatcgtcgtcatggacgccttcgcgctccccgtcgagggcaccgagaccagggtcaatgcccaggccgacgcctacgagtatatggtcgagtactccaccatcaacaagcaggctggaaggttggagaatgtggttggctggtatcactcacaccctggttatggatgctggttatcaggcattgatgtgtctactcagatgcttaatcagcaatttcaagagccattcttggctgttgtgatagaccctacaaggactgtttctgctggtaaagtggaaattggagcttttaggacatatccaaaagattacaagccaccagatgaacctgtgtcagagtatcagacgataccactcaacaagatagaagattttggtgtccactgcaaacagtactatgctctggatataacttatttcaaatcatccctggattctcatctccttgatctactttggaataagtactgggtcaatacgttatcttcatcacctctcctgggcaacagggattatgttgctggccagatatttgatttagctgataaactagagcaagctgagggtcaactggcacacagtcgatatggcatgcttatgccatcgcaacgaaagaaagagcaagaggagtctccactggctaaggtaactcgggatagctcaaaaattactgctgaacaggtccatggtctcatgtcacaggtcattaaggatatcctcttcaactctgtgcacccgtcaaacaaggcaagcacaagcgcaccagattcatccgggcctgagcctatggttgaagcatgagtgttctacagaattccttcattagttagccttttgttgatgctggattcacatacactgggtgcctagttgtttcatgactaaaagctgtgtccagcataactacccgattcaaaatgcgttagctgcgttttatcgtcaaatcataactgatatgtaattatgagttgccttctgaatctttcggctgccattgtgnnnnnnnnnnnnnnnnnnnnnnnnnn

SEQ ID NO: 386059 - DNA, 1566 bp, Oryza sativa
gggcaattacgccacagctcactgaattcgatcgcctctctctctcgttgctgccttctggcaaaccatggccgtccaggttcaacgaacgcccctcccccggtccacgtacaccggccatcgggtctatctcctgcgggccccacctgcagtgacacggtgcaccgtggaccgcgcctttccgcgcagtcatggacctccccttcctcctctcctgtataaaacctcgcgtcctgatgcttcctcctccaactccacgagccgccatttcccaaggaggagcaaggattgttgttgtttcgctgtcagatcgattcctgacgggataatgggtgagaccatcgccaaggatgtcaccgagttgattgggaacacgccgttggtgtacctcaaccgggtgacggatgggtgcgtcgggcgcgtcgcggccaagctcgagtccatggagccatgctccagcgtcaaggataggattggatacagtatgatcactgatgcagaggagaaggggctgatcactccaggcaagagtgtgctgattgagccaactagtggcaacacaggcattggactggccttcatggctgctgcaaagggttacaggcttgtactcacgatgccggcctccatgagcatggagaggagaatcatattgaaggcttttggtgctgaattgatacttactgacccactcttgggaatgaaaggagctgtccaaaaggcagaagaactggcagcgaagacaaacaactcatttatcctccaacaattcgagaaccctgctaacccaaagatccattacgagaccactggacctgaaatctggaaaggaacaggaggtaaagttgatggtttagtttctggtattgggacaggtggcactattactggagctggacgatacctcagagagcaaaatcctgatatcaagatctatggtgtggagccagtcgagagcgctgtcttatctggtggaaagcctgggccacacaagattcaaggaattggagctggttttgttcctggggtcctggatgttgacctcatcaatgaaactgtacaagtttcaagtgatgaagctatcgagatggcaaaggctcttgcattgaaagaagggttgctggttggaatatcttcaggtgcagctgcagcagcagctgttaggctcgctcagaggccggaaaatgaaggaaaactttttgttgttgtcttcccaagctttggtgagcggtacctttcgtcggtgctcttccagtccatcaagaaggaagctgaaaacatggtggttgaatgaaatgcacaatatccgggaatccacaggaataaaagtttggtatctctgcttgtgtgattaaacatacattgtcctgccattttcaagttgttctgcttgtgtagcaatggggaacacagtgtgttagccttgtagtgttaaacagtttacattttatcttccctgtatatcagaaccctttacatgggcatttgtcagccagtgtgaatgaaataaagcatcatatgatttgtctcaaaaaaaaaaaaaaaaaaaaaaaaacggacgcgtgg

SEQ ID NO: 386060 - DNA, 1547 bp, Oryza sativa
  unsure (1)..(1547): unsure at all n locations
gggagtcacagaccagcggagagagactctctctctctccatcaggcgttaactgagctcgtacggccggcgctggcgaagaaggcgacggaagaagatatcaccgaattccacaagataaatgccgctttctgcagcagctgggttgagatgggggaagaaatcaagaacggagaggagggaccagacatggctgcaccgggcgaggaggagcaggagcaggggaggaaaggcatcccgtctctgctctcctccagggaggagaacatcgcctctaacatcactcagctgattggatggacaccgcttgttgagatgaagaacatcgcgaagaacgaaggcgtacaggctcgattggttgggaagatggaagcataccagccactctgctctgtcaaggacaggagtgccctcagaatgattgaagatgcagaggagaaagggttgatcacacctggtgttaccacgctgattgagccaacgagtggtaatctcggtatcggtttggtgctggttgctgttcagaaaggctacaggtttattgctgtcatgcctgctaaatattcgcttgacaagcagatgctactgaggtttttgggtgctgaattgatattgacagatcctgcaattgggtttaatggtatgatggacaaggtggaagagctcatgaagagcataccaaattctcattgtctcaatcaagtaacaaacccagcaaatccagaggcacactttatgtggactggacctgaaatatggaaagacacagccggcaaagtggatgtgtttgtggcctctgttggttcaggtggcacattgacaggtgtagggaggtatctgaagatgaaaaatccatctataaatattgtgtgcgtggaaccttcagaaagccctgtaatttcaggtggttcaccagggccacacaagattcaaggcactggggcaggtttcatacctgaaattttggacaaatctgtcatcgatgaagtagtgacagtaaacacagaggaatccatggcaatggcgaggaggctggcgaaggaggaaggattgcttgttggcatatcttctggtgcaaatgtagctgcttgcatcaagattgcagacagagaggagaacaaggggaaaatgattgtgacaatgttcccgagcggcggtgaaagatacatgaactctgatctctttgcacctgttagagaggaatgtgataatatgaccttctgatgatgtcttggagctgctctccttttcaggcactgtacacatgtgttttccacttttcctccatattgttacttaagatatgcttcatagttcagagcacactatacatttttcttgttgcttctttgttgaggaagagcaagaatttcagcataatgtgatgtgctcctttgtgcatgtgttgtaaatttattgtatatcctaatatgccggcaaagtggttgtctatgacctacacaagttgaaataaaaaaaaatgggaccaatctaggaaggactagattgattttgnnnnnnnnnnnnnnnnnnnnnnnnnnnnnnnn

SEQ ID NO: 386061 - DNA, 1369 bp, Oryza sativa
  unsure (1)..(1369): unsure at all n locations
ccacgcgacccacgcgtccggcctcgttcgtcctccggttttctccgcagtttcttgatccatccgcctttcctctcgcagccgtcggcggggggagtggttagttggttactggcttgcagagttttcagagagatttaggcaatggcggaatcaggccaatcgattgcgagtgatgtgactgcactgatcggcaatactcccctggtgtacctgaacaaggtggtggatggatgtgaggcccaaatcgctgccaagcttgagatcatggagccctgctccagtgtcaaggataggattggttatagcatgattacagatgcagaagagaagggtctcattactccaggaaagagtgttttgattgagcctactagtggaaatactggtattggccttgctttcatggctgctgccaagggttataagctaatcctgacaatgccagcatccatgagcatggaaaggaggatcattcttaaggccttcggtgccgagttggtccttaccgatccacttctgggcatgaaaggtgcaatccagaaggcagatgagctggcagcaaagatgcctaactcttacattctccagcagtttgagaaccctgcaaacccaaagatccactatgagacaactggacctgagatttggaaggccactgctgggaaagttgatatccttgtctctggcattggaaccggtggtacagtaaccggaacaggaaagtacctcaaggagcagaaccctgagatcaagatctatggtgttgaaccgacagaaagtgcaattttatctggaggaagacctggtccacacaaaatccaaggtataggtgctggttttgttcctggtgtacttgatgtcaatctcctggatgaagtggtccaagtctcaagtgatgaagccatcagcatggcgaagcagctagcgttgaaagaagggctgctggttgggatctcatctggtgctgctgcagtcgctgccatcagggtcgcgcagcggcccgagaacaaagggaagctcgtagttgtggtcttcccgagcttcggtgagcgctacctgtcgtctgtcctcttcgaatcgatcaagagggaggccgaaaacatggtgttcgagccatgaacggctccagcattgtgcaaattgtgcttccatggtttagggggcttggagagaatggcgtcccgagtgcatttcttcatgttggtcgcacttgccatcatgtagtcgcttgatctgaataaagaacttacatacatcaatcaaagtctggggattcgatcagctttcctggtgttatatgagcagttcatatgtgtactttcttccatactgaaatgtgtatcttagctactgaagcttccatggn

SEQ ID NO: 386062 - DNA, 1310 bp, Oryza sativa
tagaattcagcggccactgaattctagaagtggatccagctgatggaaatatatatactgagatagttctctgctccttgctccgagcaagtgaacagcatggaggaaggaggcaggagagggatcccttctctgctaaattcatcgtcatcagatgaacatatcgccactgatatcactcagcttgtaggatggacgccactgatagagctgaaccggatcgtccgaaaagacggggtaaatgcccggattgttggcaaattggagtcataccaacccctctgctctgtcaaggatcgcagtgctctgagaatgattgaggatgcagaggagaaaggtctgatctcaccaggcgttacgacgctagtcgagccgacaagtggtaatcttggaataggtgtggcatacaatgctctgctcaaaggttacaggttcgttgcagtcatgcctgctgagtattcacttgataagcaaatgttgttgacgtatctaggggccgaggttattttaactgatcctacacttggttttcagggacaattagacaaagttgaacagatcaagaatgatatgcctaacgtacatcatcttgatcagtttaaaaatgcagcaaatcctgaagcacactttgtatggacagggcctgagatttggaaggatacggcaggcaaagtagatatctttgtggctggttctggcacaggaggaacaatttcaggtgtagggaaatatttgaagatgaaaaacccagcagttaaagtaatttgtgttgagcctgcggaaagccctgtaatttcaggtggtaagccttcgcggcataaaattcagggaatgggtccaggctttgtaccaaaaaacctggatatctcaatcgtcgatgagatcatcacagtaactgcacaagatgcaatggctaatgcaaagaggctggcaagagaagagggtttacttgtgggcatatcatccggagctaatttggcagcttgtctgaaggtggcatcgaggaaagaatatgagggaaagatgattgtaaccattttccctagtggtggtgaaagatacatgaactctgacctctttgcacaagcaagggaggagtgcagcgccatgaccttttgatctcatggctttttcagttctattctactctgtatggaagccaaggtggcttgtacactgatcagtgagcagagtgtgggggaaaataaagaaaagccggatgtgttgtacttgtttgttgtatgaaaatatgaaataagaggacaagccatttattattttttgtaaagaagactaaaaaaaaaaaaaaa

SEQ ID NO: 386063 - DNA, 2136 bp, Oryza sativa
  unsure (1)..(2136): unsure at all n locations
atggaccccttctccaagtcccccgacgacgacgacctccgccccgaggcggaggcggcgaggcggccgcagccgcagccacagccgcagccgcgggagtggcggttcgcgcaggtcttcggggagcgcgcggcgggggaggacgtgcaggaagttgacatcatctctgcaattgagtttgacaaatccggtgaccatcttgccactggagatagaggtggtcgtgtagttttatttgaaaggactgactccagggatagcgccagtcggagtgaacttgagagacaagattacccgattgccaggcatcctgaattccgttacaagactgaatttcagagtcatgaacctgagttcgactacctaaaaagtttggaaatagaggagaagattaacaagatcaagtggtgccaaacagccaacaacgccctctttctcttatctacaaatgataaaacaatcaagtattggaaggtgcaagagaggaaagtaaaacgaatttcagtgatgaatttgaatacctctcaaagttcaggcaatggcacaacttctagttcaagcagcagtagttctagagcgattcttccaaatggtggatgctcagagaagttatacaacttcccaaacaacgacctattatttcctcctggaggatgcacatcattgcgtctgcctgtggtagtcactggccaagatttgaaccttgtaccaagatgccggcgtgtatattcacatgctcatgattaccatattaattccatttcaaataatagtgacggggagacatacatatcagcagatgatctgcgaataaatctttggaacctggaaattagcaaccaaagctttaatattgttgatgtgaagcctgcaaacatggaggacctaactgaggtgatcacatgcgcggagttccacccaactcattgtaatacattagcctatagtagctcgaagggctctatcaggcttattgatctgcggcaatcagcactatgtgacaaccatgctaagttatttgaggagcatgaggcacctggatcgagatccttttttacagagataattgcatcggtttcagatataaaatttgcaagggatggaaggcacattcttagtcgtgattatatgactctcaagttatgggatataaacatggattcaggcccagttgcaactttccaagttcatgaatatttaagacctaagctctgtgatctatatgaaaatgattcaatatttgacaaatttgaatgttgtctgagtggggatggacttcgtgttgcaactggctcttacagcaatttatttcgtgtttttggttgtactcctggaagtgcggaggcaaccaccttggaagcaagcagaaatcctatgaggcgccaggttgctaatccaacaaggcctgcacggaccctgacctcattgacccgtgccgtgaggagaggtggggaaaatccgggagtcgatgctaatggaaattcttacgatctttcaacaaagttgctccatcttgcatggcacccaactgagaattccatcgcgtgtgctgctgcaaatagcttgtacatgtactatgcgtatataacaggctagagagaaaattgttttttggtttggtgacgtgaaagccttctactttcacatgcaaccagggagatggtgcaaaggacattgttgtcaatttcatgactggggccaaaagaggcagtcggtttccacgagaccactcccgatgctcacttgcgacagtagcaggctgctccgttccgattctttagtaaatgttaaatatatctaatcatatcaacatttttggtcccaagatatgattgtagctgccttgtagccagaatcagcagttgaaagataaagcaggagataggcgatgctgatgctaatttcaccgaaggtcacagaaaaatatctgcttaacagggctgtaagatttttttttcttttctttttcatttcttcacatgtaatgccacctagccagggctaacaaccatctcttgtcatggacatccaaatctttggacataaaattttactacagttattgtagctaatctttcctcccctgttcattcaataatctacacgtgatccnnnnnnnnnnnnnnnnnnnnnnnn

SEQ ID NO: 386064 - DNA, 807 bp, Oryza sativa
  unsure (1)..(807): unsure at all n locations
caaattgttcgctaataagcatcgatcgaaggcgaggccagccagccagccggggcgccgggggagctggggaagatggtgcaggggacgctcgaggtgctgctcgtcggagccaagggcctcgagaacaccgactacctgtgcaacatggacccgtacgcggttctcaaatgccgctcgcaggagcagaagagcagcgttgcgtcaggtaaaggatctgaccctgaatggaacgaaacctttatgttcagcgtcactcacaacgctacagagctcatcatcaagttgatggacagtgacagtggcacggatgatgattttgttggagaagcaacgatttctttggaagcaatctatacagaaggaagcatacccccaactgtttataatgttgtgaaagaagaagaataccgtggagaaatcaaagtgggcctgacgttcactccagaggatgatcgcgatcggggtttatctgaggaagacattggtggatggaagcagtcatcttgaggaagaagcagatactttgatgtcgcactgcatcgctatggtaagtcgtgtgctggaagcctggaacaaagcctattgaaaagagcagtcttgtagaaatacttctcatgattttctaaaagttgtaataatagtgttcgccaatatgctctatatgtaaggaccttgctttgatgcccactaaactgtaataactatggcaagttatgatgcaacagaagtgctataatcctttatgtgatcgtaatttcattgacctgcttttcgaaaaanaaaaaaaaaannnnnnnnnnnnnn

SEQ ID NO: 386065 - DNA, 1220 bp, Oryza sativa
  unsure (1)..(1220): unsure at all n locations
caaccattcttcccgattaaacacacatctcctatagctcatcacatctctacatacaagtgaccagtgagagtaatttggcgccatccatggcggcattaagccagctggtactagttacagcctttttggccgctgcattgctcccactgggcatggcggcgacgacgtatcccatcggcagcttctgctcggagtccgggatgaactacggcgatctcaacagcagcgaggccgtcgtcaggcggcgcaggtcaacttcgtcgtctccgacctcgtcgccaaggcgcgcaccggcggcggattcgccacctccagagccggcagggggtacgacgccttctacggcctcgcgcagtgccgcggcgacgtctccggcggcgactgcgacgcctgcctcgctcaagccgccaagcagattgtctccaactgcaactacacatcagactccagaatatggtacgaatactgcttcatgcggtactacaactacgacttcatcggggaagtggatacgagggaggatgcaagcgtgaccatgataaattggcagaacatggacaaccccaaggcattccagaaggcagcggggaaagctatgggaaaggcgacagcacaagctgttgcagtgggtaggagtgggctaggcagggcgaaggagcagtacacgccgtttgtgagtgtttacgcgttagcacagtgcacgcgagacctagcgccgccagcgtgcgcacggtgcctatcggagatagtgtccaagtttgacaaaacttgcaacagcgctcaaggatgccagattgattacagcagctgttgggcgcgctacgagatctaccccttctacttcccactcgaggcaggcagtcgtgccactatcgacatgtccaagtacaccaaggtcaccatgcactaaataaatctagcatatacataggctatgcgtacaatgcgataatgcatacatacatatatacgtcgtaccgtgtagcagtatatgcagatgtgagatcaatcccaataatagtatttatgtttatgtttaatttcaggaatatgtatgcaacgaataaatcatatgtaaaaggttatatatgtataaagttgtatcacccttatttatcatgctagctgcagtttgtttggaataaattaataaagatgtgtattgggcatgttgtacnatatnnnnnnnnnnnnnnnnnnnnnnnnnnnnnnnnnnn

SEQ ID NO: 386066 - DNA, 569 bp, Oryza sativa
  unsure (1)..(569): unsure at all n locations
cggacgtgncngngacgcgtggggcctttataagctccagccattgctcccgatcgaacacacaacccagctatagccacctacatctgctgatcgacatcgatcgatctctactactccagtagctagcaagaattgaatctaggtgaagtgagagtgtgagagtacataattggcgccatccatggcggcattaagccagctggtactggtcgccgtcgtctcattggttgccttgctcccactgggcatggcggcgacgacgtatgatcccatcggcagcttctgctcggagacgtggatgaactacggcgatctcaacagcagcgaggccgtcaccaggcggcgcgccgtcaacttcgtcgtctccgacctcgtcgccaaggcgcgcaccggcggcggattcgcacctccaaggccggcaggggctccgaggtcttctacggcctcgcgcagtgccgcgggcgacgtcttcggcggcgacttcgacgcttccttcgcccaagccgccaagcagatggtctncaactgcaactacacatcagacttcagaatttggtacgagtact

SEQ ID NO: 386067 - DNA, 475 bp, Oryza sativa
  unsure (1)..(475): unsure at all n locations
ggagcgangactccattccatcctctactgaaatctctagctactactactgctactccagtagcaacaagaggctgaattgagagcaattggcgccatccatggcggcattaagccagctgctacttacagtcttcttggccgctgcattgctcccactggccatggcggcgacgacgacgacgtatcccatcggcagcttctgctgggagccggggatgaactacggcgatctcaacggcagcgatgccgtcgtcaggcggcggagatcaacttcgtcgtctccgaccttgtcgccaaggcgcgcaccggcggcggattcgccacctccaaggccggcagggggtacgacggcttctacggcctcgcgcagtgccgcggcgacgtcttccggcggcgactgcgacgcctgccttggcccaagccgccaaagcagatggtcttctactncaactatacataagattcagggtat

SEQ ID NO: 386068 - DNA, 1094 bp, Oryza sativa
catcttccccgagctctccaccctccacccgccaccgccgccgctcgccttcgccgccgccgccgccgccgacgacgatggggagagggccggtgcagctgcggcggatcgagaacaagataaacaggcaggtgaccttctccaagcggaggaacgggctgctgaagaaggcgcacgagatctccgtgctctgtgacgccgacgtcgcgctcatcgtcttctccaccaagggcaagctctacgagttctccagccactccagtatggaagggatccttgaacgctaccagcgttactcgtttgatgaaagagccgtactggagccaaatactgaggaccaggaaaactggggtgatgaatatggaattttgaagtccaaactggatgcacttcagaagagccaaaggcaactcttaggtgaacaattggacacactaacaacaaaagaactccagcaattggaacatcaactggaatattctctgaagcatataagatcaaaaaagaatcagcttctgtttgaatcaatttctgagcttcagaagaaggaaaagtcacttaaaaaccagaataatgttctgcaaaagctcatggagacagaaaaggagaaaaacaatgctataataaacactaaccgggaggagcaaaatggagcaacaccaagcacatcatcaccaacaccagtgacggctccagatcccatcccgacaacaaataacagtcaaagccaaccaagaggatcaggggagtcagaagctcaaccgtctccggcacaagcaggcaacagcaagcttccgccatggatgctccggacaagtcacacatgaaggcatctgttgatctcaaacgtcactccactcaatggccaacatcaacatgtttcttccaactaaggcagccactgttgtgcaatccatcttccagcgatattgatatatcggcattcggcatagccaatatatattaatgtaatgtatcttgtcaaagcttcatagggttaatgacgccttgagcttctctgttctataaaaaaaaaaaaaaaaaatttgcatatctgctgcatttttttttctctctaaaaaaaaacacaaaaa

SEQ ID NO: 386069 - DNA, 1297 bp, Oryza sativa
atcgccgccagcaacctctccaacccgctcgagcttcccccgctcgacggcgtctccttcgtcgtcaccggcgccaccagcggcatcggcctcgagatcgccagacaacttgcactggcaggaggtcatgttgtgatggctgttaggagaaccaaattggcgcaggagctcattcagaaatggcagaatgataattcagagataggaaagccccttaatgctgaggtgatggagcttgacctactctctctagattcagttgtaaaatttgccgatgcctggaatgctcgtatggcacccctacacgtattgatcaacaacgctggcattttctctataggagaaccccagcgtttctcaaaggatgggtatgaagaacacatgcaagtgaaccatcttgcaccggctttattggcagtgttgcttctaccttcccttcttcgtggttctcctagcagaattgtaaacgttaattcagttatgcacacagtaggttttgtagatgctgaagatatgaacttgacatctggaaaacggaaatttacaagtttgatgggatactcaaatagcaagttagcacagataaaatttagcagcatgcttcacaggaggattccggcagaggctgaaattaatgttatttgtgcctctcctgggattgttcatacaaatgttgcaagggatctccccaagcttgttgtagctgcatatcatttgattccgtacttcatattcgatgctcaagaaggttcaagaagtacactgttcgcagcttctgatccccaagttccagattactgcgagatgctcaagtctgaagactggcctgtttgtgcttgcatctcatatgactgtaatccaatgaatgcatctgaagaatcacataacctcgagacgtcgcagctagtatgggagaagacattagagatgattggcctcccaccagatgccgtggacaagttcatcgaaggggaatcggttcagtgtcgttatggacaacagaaggcagaataggctatttcgtagacagcaaatatgtgataatttcgaatgttcgatccatttcatcatgcgattagtttgccagtggttttgttccagtactttgtaatagtacatctgtcatacccttttttttgtttcatatggttggtaaaaaaaaaaaaaaaaaatagaagtatgacaaaacaaagttcgttacaatttatctttgccccttgttaaatggcaaaacgtttgtagagttttgagttgtaaaagcatagtcccttcattctttggggataatcaagatatt

SEQ ID NO: 386070 - DNA, 775 bp, Oryza sativa
  unsure (1)..(775): unsure at all n locations
ccacgcgtccgcccacgcgtccgtaccgacgccgccgccaccaccgccaccgccgcagcagaagcagcgcagccgcaggagggaagatgccggcggggcacgggctgcgggcgcggacgcgcgacctcttcgcgcggccgttccgcaagaagggttacatcccgctcaccacctacctgaggacgtacaagatcggcgattacgtcgacgtcaaggtgaacggcgccgtgcacaagggcatgccgcacaagttctaccacggccgcaccggccgcgtctggaacgtcaccaagcgcgccatcggcgtcgagatcaacaagcaggtcggtaaccgcatcatcaggaagaggatccatgtccgtgtggagcatgtccagccatccaggtgcaccgaggagctccgcctgaggaaaatcaagaacgatcagctcaaggctgatgccaaggcccgtggtgaggttatcagcaccaagagacagcccgagggacccaaacctggtttcatggttgagggtgctacgctggagactgttacccccattccgtatgatgtggtcaatgatctcaagggtggttactagaatgcttgtttcttgaactggagaatccaattagcgtctatgcttatcggaatgttttggtactgattagccctttttgttgtctggaatctgaacctctatgtggttaacattaaagatttgctatggttgaattcatcctcgttatggtattgcctaattcgcgnnnnnnnnnnnnnnnnnnnnnnnnnnnn

SEQ ID NO: 386071 - DNA, 836 bp, Oryza sativa
  unsure (1)..(836): unsure at all n locations
ttgctcaccccacctcttgacccgccgccgccgccgccgccgcgcgaagggaagcaggaggaggagccgccaggatgccggcgggccacgggctgcgtgcgcggacgcgcgacctgttcgcgcggccgttcaggaagaaggggtacatcccgctcaccacctacctccgcacctacaagatcggcgagcacgtcgacgtcaaggtgaacggcgccgtgcacaaggggatgccgcacaagttctaccacggccgcaccggccgcgtctggaacgtcaccaagcgcgccatcggcgtcgagatcaacaagcaggttgggaaccgcattatcaggaagaggatccatgtccgtgtggagcatgtgcagccatccaggtgcactgaggagttccgcctgaggaagatcaagaacgaccagctcaaggcagatgccaaggctcgtggtgaggtcatcagcacgaagaggcagccgcagggtcctaagcccggcttcatggttgagggtgcaacactggagactgtcacccccatcccgtacgatgtggtcaatgatctcaagggtggttactaggattttcaatctatctgcctgcgctaccaattctatatccctgtcactctaatgagtagaagtttgctcgctctgagcattattagtctggacctttgttctgtgtggttcctgtcaaaaaattattcgtcgcagatcactgtgctgagttttgcagaatgctttatactgtgctactatttgcttttaagaatgaagatatgctctgttgaaaaaaaaaaaaaaaaaaaangggnggccgcaacccggtngaggctccaacttttt

SEQ ID NO: 386072 - DNA, 1253 bp, Oryza sativa
  unsure (1)..(1253): unsure at all n locations
ccacgcgtccgccacgcgtccgccacgcgtccgccacgcgtccgcggacgcccgcgtgcgctgcagccgaacgaccgagctaccgagctaatccagccatggcctccaccgcgctctccaccgcctccaaccctactcagctgtgcaggtctcgcgcctcgctgggcaagcccgtcaagggcctgggcttcggccgggagcgcgtgccgaggacggcgacgaccatcacatgccaggccgcgagcagcatcccggccgaccgcgtcccggacatgggcaagcgccagctgatgaacctcctcctgctcggcgccatctcgctccccaccgtcggcatgctcgtcccctacggcgccttcttcatccccgccgggtccgggaacgccggcggcgggcaggtcgccaaggacaagctcggcaacgacgtgctcgccgaggagtggctcaagacacacggccccaacgaccgcaccctcacccaggggctcaagggtgacccgacgtacctcgtcgtggaggccgacaagacgctggccacgtacgggatcaacgccgtgtgcacgcaccttgggtgcgtcgtgccgtggaacgccgccgagaacaagttcatctgcccctgccacggctcgcagtacaacaaccagggcagggtcgtccgtggacctgctcccctgtcgctggcattggtgcacgccgacgtcgacgacggcaaggttctcttcgtgccgtgggtggagaccgacttcaggaccggcgacaacccgtggtgggcgtaagctataacaacatgatccatatcatcatcagcagcaaagttcacttgtgtgatcagcttgtagctataagtccgctgtatctgagaaacgctgctgtaaatccatcttcactttgtttttccaaattatatgtacacacactgtcacactgtatgaaagagcataaaacccttttcactgcataagtaaccctttttgagggttatgaatctgtgagatggatactcttttatagcagatcataccttagatgtcttcctgaatatgggcatttctgcatctgcactacactctgaaactgaaagactgaagaattcagggcataagatagcatatatagagaattgtttcagagcaattgcatgactctgatttgttttgaccttgagaaacaaaaaaaaaaaaaaaaannnnnnnnnnnnnnnnnnnnnnnnnnnnnnnnnnnnnnnnnnnnnnnnnnnnnnnnnnnnnnnnnnn

SEQ ID NO: 386073 - DNA, 472 bp, Oryza sativa
aagatcctccaactgcttactgacctaatgttgactctgaattgttgcttacttaactgaactcagctgagctgcattgttgtgtctgacacagtccttggcattggtgcactccgaagtagaggacggcaaggttctcttcgtcccgtgggtggagagcgacttcaggactgccgacaatccgtggtgggcgtcagctatagcagcatgatccatatcatcatcagcagcagagttcacttgtgtgatcagcttgtagctataagtccgctgtatctcagcaacgctgctgtaaatccatcttcgctttgtttttccagattatatgtacacacactgtcacacgtgtatgaaagagcataacacccttttcactgcataagtaaccctttttgacggttatgaatctctccgatgcaccctctcttatagaagataatcctttaaaaaaaaaaaaaaaggcgggcggttt

SEQ ID NO: 386074 - DNA, 1027 bp, Oryza sativa
  unsure (1)..(1027): unsure at all n locations
cccacggttccgcccacggtccgcccacgcgtccgctcttctcttctctggtggtgtgggtgtgtccctgtctcccctctccttcctcctctcctttcccctcctctcttcccccctctcacaagagagagagcgccagactctccccaggtgaggattcagccatgaagggggccaaatccaagggcgccgccaagcccgacgccaagttggctgtgaagagtaagggcgcggagaagcccgccgccaagggcaggaaggggaaggccggcaaggaccccaacaagcccaagagggctccctccgctttcttcgtttttatggaggagttccgtaaggagttcaaggagaagaaccccaagaataaatctgtcgctgctgtaggaaaagcagccggtgataggtggaaatccctgaccgaagcggacaaggctccctatgtagccaaggccaacaagctcaaggccgagtacaacaaggccattgctgcctacaacaagggcgagagcactgccaagaaggcacccgccaaggaggaagaggaggacgacgaggaggaatctgacaagtccaagtccgaggtcaatgatgaggatgacgacgagggcagcgaagaggatgaagacgatgacgagtgagccttccagtggacaagatgggagcagcaagacgctaagggcggcgggcgtcctaaggagcctatccatcatcatcatcgtctactagaattattcagtttcacttcacatcgtgatgttttactttttctctcgtcctataacggatagcgctccttgttggcgccactggtgggtgttgtggtgcagccaatgtcttgtctccaccgtcaatgatccgcttgtacctagattactctttccattgtcatcggctaacattgtgataatatcagtttgcgtatgttagattaaattgtttctaaaaaaaaaaaaaaaaaactcgagggggggcccggtacccaattcgccctatagtgagtcgtattacnnnnnnnnnnnnnnnnnnn

SEQ ID NO: 386075 - DNA, 600 bp, Oryza sativa
ccacgcgtccgcccacgcgtccgtccgctgtcgctccggtaggaaaagcagccggtgataggtggaaatccctgaccgaagcggacaaggctccctatgtagccaaggccaacaagctcaaggccgagtacaacaaggccattgctgcctacaacaagggcgagagcactgccaagaaggcacccgccaaggaggaagaggaggacgacgaggaggaatctgacaagtccaagtccgaggtcaatgatgaggatgacgacgagggcagcgaagaggatgaagacgatgacgagtgagccttccagtggacaagatgggagcagcaagacgctaagggcggcgggcgtcctaaggagcctatccatcatcatcatcgtctactagaattattcagtttcacttcacatcgtgatgttttactttttctctcgtcctataacggatagcgataggctcttgtgcgcactgtggtttggggagcaagttgtcacgagacgtgctatatttatgatgtctggtattagtgggtataaaaaaaaggcttagtcagtacccgtcagtattttggactatatatgcctacacgacgaactgtcatat

SEQ ID NO: 386076 - DNA, 540 bp, Oryza sativa
tctttctccatggtagtctagcgagggtgctctctctctctccaaaattccaaggcgctgcagcagcagacagcaggtttgagagagagagaagaaaaaaaaaaacggacaccgaaacggtccgagacgcgacaccaaccggcttttctctctccccttccaccgccaccgccaaccccttctagaatcttctggaatccagtcggtggcggagggcggaggcttctggaaggcagcgcggggatctcggcggcgccggaggcgtccatggcgaggccgtgaagccctcgctcgcccggaggccacgcgacgcgcgggttaggaggaggaggcagggatccgggtgggtgaggtgggactgtctctctcgtcctataacggatagcgctccttgttggcgccactggtgggtgttgtggcgcaaccaatgtcttgtctccaccggcaatgatccgcttgtacctagattactctttccattgtcatcggctaacattgtgataatatcagtttgcgtatgttagattaaattggttctaa

SEQ ID NO: 386077 - DNA, 690 bp, Oryza sativa
  unsure (1)..(690): unsure at all n locations
ccacgcgtccgccacgcgtccgcgccgcctcgcgcggatctgaccgcttccctcgcccttctcgcaggattcagccatgaagggggccaaatccaagggcgccgccaagcccgacgccaagttggctgtgaagagtaagggcgcggagaagcccgccgccaagggcaggaaggggaaggccggcaaggaccccaacaagcccaagagggctccctccgctttcttcgtttttatggaggagttccgtaaggagttcaaggagaagaaccccaagaataaatctgtcgctgctgtaggaaaagcagccggtgataggtggaaatccctgaccgaagcggacaaggctccctatgtagccaaggccaacaagctcaaggccgagtacaacaaggccattgctgcctacaacaagggcgagagcactgccaagaaggcacccgccaaggaggaagaggaggcgcgaggaggatctacaagtccaagtccgggtaatatgaggttacgcgaggcangagagatgagcgtncgagtnaccttcagtgncaagatgggagcagaagcgtaagggcgcgggcgtctaaggagctatccatcatcatcatcgctactagattattcagttacttacatcgnatgtttctttttctctcgtctataacgntagcgtcttgttgngcactggtgggtgtt

SEQ ID NO: 386078 - DNA, 1078 bp, Oryza sativa
  unsure (1)..(1078): unsure at all n locations
ggaggaagaggtggacgagacagggatacccacgcgtccgcccactccgatcgcaaatactctctctcgccgatagcagcagcagcagcaatggccgccctcgccgccgcatccaccgccttcgccgccaagccgcgcctggcgcgcgcgccgtcgtccccggccgcgcggttctccgtgtcgtgctccgcgtcgggcaacaacggcggcgccggcgagatggcgcagtcgctggcggcgtcggccaagacgttctccgcggcgctggcgctgtcctcggtgctgctctcctcggcggcgacgtcgccgccccccgccgccgccgacatcgccgggctgacgccgtgcaaggagtccaaggcgttcgcgaagcgggagaagcagtccatcaagaagctccagtcgtcgctcaagaagtacgcgccggactccgcgccggcgctcgccatcaacgccaccatcgagaagacgaagcgccgcttcgagaactacggcaagttcggcctgctctgcggcgccgacggcctcccgcacctcatcgtcagcggcgaccagcggcactggggcgagttcatcaccccgggcttgctcttcctctacatcgccggctggatcggctgggtcggcaggagctacctcatcgccatcagcggcgagaagaagccggccatgagggagatcatcatcgacgtcgagctcgccgtcaagctcctcccgagggggttcatctggcccgtcgccgcctaccgtgagctcatcaccggcaacctcgtcgtcgacgacgctgacatcggctactgatcaccacatggatgcttggctactcaagccccagtagttgatttggcagtggaggaagagggctcgtgcatggtgatttgtgtggtttgggtgtagaagctgataggatcatggaggaatggaagatctgttgtacttaagaaaaactaagtcttgtataccgtacctctctcttgtgtgtatttaccatcttaagattcttgagaacaattccttcgtgcaaaaaaaaaaaaaaaaaannnnnnnnnnnnnnnnnnnnnnnnnnnnnnnnnnnnnn

SEQ ID NO: 386079 - DNA, 1306 bp, Oryza sativa
ccacgcgtccgcccacgcgtccgcccacgcgtccgcccacgcgtccggcccacacctctggaaccccattccacccacccgcagccgcagcgaggagaggagaaacgagagagagagaaaaagaagaaaaagaaaaatgcggcgccacgccggccagcggcggcgggagcgggaggagcaagacggcgaggttcttgaggaggcggcggcgcggcggcgcggtgagggcggcggtgtccgccgccgcgcgggcgccggagacgacgaagaagaagggcggcggcggcggcggcggggacgagcgggtggtgcaggtgcacagcgcggaggagctcgacggcgcgctgcgggcggcgaaggagcggctggtggtggtggagttcgcggcgagccacagcgtgaacagcagccgcatctacccgtgcatggtggagctgagccgcacctgcggcgacgtcgacttcctcctcgtcatgggcgacgagtcggacgccacccgggagctgtgccgccgggaggggatcaccgccgtgccccacttcaccttctacaagggcgccgagaaggtccacgaggaggaggggatcggccccgaccagctcgccggcgacgtcctctactacggcgaccaccactccgccgtcgtccagctccactcccgcgccgacgtcgagtccctcatctccgaccaccgcggcgagggcggcaagctggtggtgctcgacgtggggctcaagcgatgcgggccctgcgtgaaggtgtaccccaccgtcgtgaagctgtcgcgcaccatggccgacaccaccgtcttcgcccgcatgaacggcgacgagaacgacagctgcatggagttcctccgcgacatggacgtcgtcgaggtgcccaccttcctcttcatcagggacggcgacatcgtcggccgctacgtcggctccggcaggggggagctcatcggcgagatcctcagatacaacggcgtcaaggtcacctagacatatacagattcatcactacgcagctcagctgcatgcagcaaccgtaattaaattaattactgtactactctcttgatcatgattgtaattttacaccaccacactagcttgagaagatcaagcttgttttatactggggacgatttgatcaaacctatctcgttgatttggtcccgtgtaatactagaattttggaacgtcaattgcaagttcgagacttgattttgcctatgattgtatctgtatccatccatctatcataggtggtgttcttatctctaaagatcaagattaagttttttctcgccgac

SEQ ID NO: 386080 - DNA, 550 bp, Oryza sativa
ttgaactagtggctgtgtggatgaactctgattggattccagctactatttgccatccatttcttgctgaattctctcttctttaattcatcctctcttctcctcttctccttcatcactaggcagtagccacagtagccagtagctagctagcttgtcaagctaggagctagcagctgtgtgtcgtcgatggcatccaccgccgccttcctgtccacgctcgccggctcgaccagcctgggcggcgccacgccggccagcggcggcgggagcgggaggagcaagacggcgaggttcttgaggaggcggcggcgcggcggcgcggtgagggcggcggtgtccggcacggagcaggcgccggagacgacgaagaagaagggcggcggcggcggcggcggggacgagcgggtggtgcaggtgcacagcgcggaggagctcgacggcgcgctgcgggcggcgaaggagcggctggtggtggtggagttcgcggcgagccacagcgtgcacagcagccgcatctacccgtgcatggtggggctgagccgcacct

SEQ ID NO: 386081 - DNA, 431 bp, Oryza sativa
ccacgcgtccgcccacgcgttcggtgagctcatcaccggcaacctcgtcgtcgacgacgctgacatcggctactgatcaccacatggatgcttggctactcaagccccaggtgagttgatttggcagtggaggaagagggctcgtgcatggtgatttgtgtggtttgggtgtagaagctgataggatcatggaggaatggaagatctgttgtacttaagaaaaactaagtcttgtataccgtacctctctcttgtgtgtatttaccatcttaagattcttgagaacaattccttcgtgcaattctcgtgctgttgtcgctgcagctgcagagagattttcaatcgtatgtactccagcataaagttgattgtgcagtcttgcctttaagctactttatacataacatgttgtgttcttgggagccagtcct

SEQ ID NO: 386082 - DNA, 399 bp, Oryza sativa
  unsure (1)..(399): unsure at all n locations
ccacgcgtccgcccacgcgtccgcctaggtacccagagacgaggaagggcgtagcaagcgacgaaatgcttcggggagttgatttggcagtggaggaagagggctcgtgcatggtgatttgtgtggtttgggtgtagaagctgataggatcatggaggaatggaagatctgttgtacttaagaaaaactaagtcttgtataccgtacctctctcttgtgtgtatttaccatcttaagattcttgagaacaattccttcgtgcaattctcgtgctgttgtcgctgcagctgcagagagattttcaatcgtatgtactccagcataaagtagatagaaactcatctgaccgggacaaactagattaattgaattgaattaggcgtagtgcatcaatatcan

SEQ ID NO: 386083 - DNA, 1049 bp, Oryza sativa
ccacgcgtccgcccacgcgtccgccccacgcgtccgcccacgcgtccggcggccgccgccgcagatagtacaccggctatctatccatctatctactcagctttgcgtcctcccgcgaattcaccgcagcaatggcgtccctcgtcgccgtccagcctgtcgccgtgaagggcctcgccggcagctccatctccggcaggaagctcgccgtcaggccgtcgccccgggcgctctgccgcaccacccgcaggccgcgcgccgccgtggtggccaagtacggcgagaagagcgtctacttcgacctcgaggacatcggcaacaccaccgggcagtgggacctgtacggctccgacgcgccgtcgccgtacaaccctctccagagcaagttcttcgagacgttcgcggggcccttcaccaagagggggctcctgctcaagttcctgctgctcggcggcggatcgctggtggcctacgtcagcgcgtcggcgtcgccagacctgcttccgatcaagaagggcccgcagctgccgccgacgcccggcccacgcggcaagatctaaattaaattcctcgtctctgcctcaccttcttcttgatccgatccatccatgcaaatcctctgtactgtactgctagtcccccatggccggatcgccatggattaattccccctgtttatgatgttgatataattgtactattcctatggctatataagttgtaaaggatccaattcgatgctgcatgcgacgtactgcgatcccatgtgttcggttttaaaaaaaaaaaaaaaaaaggaaaaaaaaaaaaaaaaaaaaaaaaaaaaaaaaaaaaaaaaaaaaaaaaataaaaaaaaaaaaaaaaaaaaaaaaaaaaaaaaaataaaaaaaaaaaaaaaaaaaaaaaaaaaaaaaaatgggggggggcccttttaggggatccaagtttactaccccgggcttgcaaggtaatagtttttttttggggcccccaaaattaaattcacgggccgcggtttaaaaccgctgggacgggaaaaacccgggggt

SEQ ID NO: 386084 - DNA, 1256 bp, Oryza sativa
gcgccaccggtaccggaccggacgcgtccgcccacgcgtccgcccacgcgtccgcttgtgactacacccgcttcgcttcctcccctctctaagccggggaagctaagccatggcgtccgtcaccgcccgcaccccggtcgcagccctccgctcgtcggcgtcgctcaagtctaccttcctagggcaatcctccacccgcctcgcccgcgcaccgactacgaggcgtaatgttcgggcggaggccaagggagagtggctccccggcctcccttctcccacctacctcaacggcagcttgccaggcgataacgggttcgacccgttgggtctggcggaggacccggagaacctgcggtggttcgtgcaggcggagctggtgaacgggcggtgggcgatgctgggggtggccgggatgctgctgcctgaggtgctgacgaagatcgggttgatcgacgcgccgcagtggtacgacgccggcaaggccacctacttcgcgtcgtcgtcgacgctgttcgtcatcgagttcatcctgttccactacgtggagatccggcggtggcaggacatcaagaaccctggctgcgtcaaccaggaccccatcttcaagagctacagcctcccgccgcacgagtgcggctaccccggcagcgtcttcaaccccctcaacttcgagcccaccctcgaggccaaggagaaggagctcgccaacgggaggctggcgatgctggcgttcttggggttcctggtgcagcacaacgtgacgcagaaggggcccttcgacaacctgctgcagcacctgtctgacccgtggcacaacaccatcatccagacgctgtcaggctgagcgtgtgatcgatttcatcagggccagggcatctcaaggagcttgatgagttcaggctggtgaaaccgatgattgggcgatggaagatgttctcttcttgtttcttctttttttttttgtggagtatgcatgtataagatgttaatgaattggggggaggagagagagagagatggatgtgatgagattcagacttactgtgtgtgttgtggtaattgtttcctgcatgcatggatctggatgcatgggtgagggggtgagttgagtggtgaatttctgatgtacagtactacagggggataaactatctcatggtagcagcagtgttctagctatctcatggtctcgatcttaattatggtggataaactacgcttaattgctaaaaaaaaaaatcaaaaaaaaaaaaaaa

SEQ ID NO: 386085 - DNA, 806 bp, Oryza sativa
ccacgcgtccgcttgtgactacacccgcttcgcttcctcccctctctaagccggggaagctaagccatggcggccgtcaccgcccgcaccccggtcgcatccctccactcatttgcttttttcaagtctaccttcctagggcaatcctccacccggctcgcccgcgcaccgactacgaggcgtaatgttcgggcggaggccaagggagagtggctccccggcctcccttcttccacctacctcaacggcagcttgccaggcgataacgggttcgacccgttgggtctggcggaggacccggagaacctgcggtggttcgtgcacgcggagctggtgaacgggcggtgggcgatgctgggggtggccgggatgctgctgcagcacctgtctgacccgtggcacaacaccatcatccagacgctgtcaggctgagcgtgtgatcgatttcatcagggccagggcatctcaaggagcttgatgagttcaggctggtgaaaccgatgattgggcgatggaagatgttctcttcttgtttcatctttttttttttgtggagtatgcatgtataagatgttaataaattggggggagtatagaaagatagatggatgttatgagattcagactgactgtgtgtgttgtggtaattgtttccagcatgcatggatctgtatgcatgggtcagggggtaagttgagtggtcaatttctgatgtccagtacaccagggggataacttatctcatggtagaaccagtgtttgtgctcacccatcatgtaattgtaaagcacaccgaacgcgtaggt

SEQ ID NO: 386086 - DNA, 1240 bp, Oryza sativa
cgcctgcggtaccgtccggatcccggtcgaccacgcgtccgcccacgcgtccgctttcttcctacttcgtcttcttgctggtgtgttcgaggaggaggaggaggaggagaagctagcggcggcggcggcaatggcgacgagcgggctgaggagctgcagcgcggtgggcgtgccgagcctgctggcgccgtcgtcgaacaggagccgcctgccggtctgcgcctacgccaccacctccgggcgcgtcaccatgtccgccgagtggatgccgggccagccacgccccgcccacctcgacggctcctctcccggtgacttcgggttcgacccgctgggcctcgccaccgtgccggagaacttcgagcggttcaaggagtcggaggtgtaccactgccggtgggccatgctcgctgtgcctggggtgttggtgccggaggcgctggggctgggcaactgggtgcaggcgcaggagtgggcggcggagcccggcggccaggccacgtacctcggcaacccggtgccatggggcacgctgccgacgatcctggtcatcgagttcgtcgccatcgccttcgccgagcaccagcgcaccatggagaaggaccccgagaagaagaagtaccccggcggcgccttcgaccccctcggcttctccaaggaccccgtcaagttcgaggagtacaagctcaaggagatcaagaacgggcgattggccatgctggcttttgtgggtttctgcgtccaacagtcggcgtacccgggcaccggcccactggagaacctggccagccacctctcggacccgtggcacaacaacatcggcgacatcatcatcccgagaaccatctacccttgagcttggcacgaaccggtgcgtgcgtccgggcgtacgtgaaggctatgggtggtttttatgtgcgtgcgtactgtgtgtgattggttgattattgcgcgcgcgtgcgcacgcagtggtcggccggcaggcagctgctggttggccttgtaatgtaaagcttaagtagagggtgctctcttgtgaatccgtccatcttaatttttgtatcaaacacgaaatcaaactggtcttagttaaactcgatctggtatggtacgtcgatttggtcatattgattgatgacaagagtaccagcacgcacgttcatgtactctcaagccgaaaactcgattacttaagggctgtttgcgttcagtaccaattaccaaactctcttagcctgcc

SEQ ID NO: 386087 - DNA, 942 bp, Oryza sativa
ccacgcgtccgcccacgcgtccactcgaatcgaatccaccacacggtaccctcctctctcctcctccgaccaccatggccatggccacgcaagcctccgccgccaagtgccacctcctcgccgcctgggcaccggcgaagccgcgctcatccaccctctccatgcccacctcgagggcacccacctccctcagagcggcggcggaggatcagcccgccgcggcggcgacggaggagaagaagccagcccccgcggggttcgtgccgccgcagctggaccccaacacgccgtccccgatcttcggcgggagcacggggggactcctccggaaggcgcaggtggaggagttctacgtcatcacatggacgtcgcccaaggagcaggtgttcgagatgcccacgggcggcgccgccatcatgcgcgagggccccaacctgctgaagctggccaggaaggagcagtgcctggccctgggcaccaggctccgctccaagtacaagatcaactaccagttctaccgcgtcttccccaatggcgaggtgcagtacctccaccccaaggacggcgtctacccggagaaggtcaacgccggcaggcagggcgtcggccagaacttccgcagcatcggcaagaacgtcagccccatcgaggtcaagttcaccggcaagaacgtcttcgacatctagacttcttcttcttcttcttcttctctcataatcgacctattaattacttgtgttttgggtggatggacatgtaattttaatcatctgtcaggctgctcttcagttattgatgatggtgtaatcgatcgatggtgggatataatctcttcttataatattgtagtatatgtttggtgaattttgatgcgtgttcattaacgtgttaattattgtgacttaacccacatgatcaaacaatcggaattcatcataaaaa

SEQ ID NO: 386088 - DNA, 1033 bp, Oryza sativa
  unsure (1)..(1033): unsure at all n locations
cagggtccatcctgatgcagttgagggacggcggcttgtatcgcaggggaaggattctcagcatattggtaccaggtttccatcgcgttgaaacacgcagtagcgggtaacgctcataagcgaatggtacggccccctgaggtgcgtatcaatagctgaagcgtgtcgcgccgaggtcaatcaggtgttgttctctgttctatgggtcatgggtggggacatgaacggcgganattgatatcgccaacatgacggcgctacataaacatgtttcgttcttcgaccggaacaagggatggcattattactccgtcggagaccattgaagggattgttgcaatcggttgtgactatgcatttgctagagactttgccgcccctgtgcatgctggtctcggtcataaaacaagccccaaggacgcaccattacctcacttgtcgatatacataaagaacatctataaaggaatgcacgggagtgacacaggtgcactagatgctaaaggaaggtttgttcctgcaaagtttgaggaaattttctcgaaacacgcaaaaagtagaccagatgcattaacgtccttggaggtcgaagagatgattctagcaaatcgagatccagatgacccacaatcatgggctgcacctatacaggagtgggggctaatttatggtcttgcaagtgataagaacggatattttcccaaggatagtgtgagaggtatatacgatggtagtgtgttcgtcaagttggaggaagagagggcatcttcccaaagtacagtttgccggagcttatcatttcggagttctgtataaagtaattgggaaatgaagttataatcccaaatacattgtattgcatcataggtattgttcgtgtacatgcaaaatgccatatttggagaagccctggtatggtagtagagttatggttgcatgcctttaatcgttatgattcaaatctcgatttatatgaacattatgtatacatgggtgccctcttaataagatttgagaaaactaattttatccc

SEQ ID NO: 386089 - DNA, 1217 bp, Oryza sativa
ccacgcgtccgcgagaagaagaagtaccccggcggcgccttcgaccccctcggcttctccaaggaccccgtcaagttcgaggagtacaagctcaaggagatcaagaacggtcgattggccatgctggcttttgtgggtttgtgcgtacaacagtcggcgtacccgggcaccggcccactggagaacctggccaggcacctctcggacccgtggcacaacaacatcggcggctcctatatggctgaaaactacgatgcccatgttcttggtattgatctttcaatcaacatggtttcatttgcaatcgaacgtgccattggacgcacgtgttcggttgagtttgaagtagctgattgcaccacaaagacctacgcaccaaatacatttgatgtgatctacagccgtgacaccattcttcacatacatgataaacctgctttgttcagaagtttcttcaagtggctgaaacctgggggcaaagtcctcatcagtgattactgtaggaatcctgggaaaccatcagaagaatttgctgcttacattaagcagagaggctatgacctccacgatgtgaagacttacggaaagatgcttgaggatgctggtttccatcatgtcattgctgaagaccgcacggaccagttcctgcgtgttcttcaaagggagcttgctgaagttgagaagaacaaagaagccttcatggcagacttcacccaggaggactacgatgacattgtgaacggctggaacgcgaagctgaagcggagctctgccggtgagcagaggtgggggctgttcattgcaaccaaatgattcagaagcagagagggttcagaataaaacgggtgctgctgttgttggctgtgttaactagtactcctactagatctgttgttgcagatttatttgtgcgccccaattggtagtttgtttgtgtgtgatgtagtattccagttttagaggacggccaatgttccatgtgacgtgatgtacgttaaactcagtctgtttaaagtatgtattatcgtgcgtatttggtatggaactgtgttattgtttgcagataaataaacacagatgtgttcctcttttgcacaacataagaacatctataaaggaatgcacgggagtgacacaagtgcactagatgctaaaggaaggtttgttcctgcaaagtttgaggaatttatctcgaaacacgcggggcggccgtttta

SEQ ID NO: 386090 - DNA, 446 bp, Oryza sativa
ctaccgccctccgtgggcagctgctggcaatccggtacttgctcttctgtttctatgggttcttagctggggacatgtaacggcggaaattgatatcgccaacatgacggcgctacagaaacatgtttcgttcttcgaccggaacaaggatggcattattactccgtcggagaccattgaaggggttgttgcaatcggttgtgacttcgcatttgctagagacctagccgccagtgtgcatgctggtcttggtcctaaaacaagccccgtactctctcattccctcccataactctaatccaaaatcatataaaaataatgacttgtttattatgaatttggtccaaaatagagtaactagatatgctatttaatttattgtacacacgggaaaaattcacccggtattggttccgcattcaaatgcgcagaaggatgcaccatta

SEQ ID NO: 386091 - DNA, 1354 bp, Oryza sativa
ccacgcgtccgctccactccactccactctccgttgctcgcgcggttggcgttgcgttttttcccctcgaatcgcgggggggaatccgccggttgatgcagcagaggggcctcgcgcacaaccgccgctcccgcggcttctcccgatcccgccgcgccgtcgagggcgcctaaaccacacgcctttttttttccttaaaaacgaatagatctctctcaatttcctgaaacttataataatttcaaaaacgccctagacgaggacgaggagacgatcgagatggacgccgtcgcggcgaatgggatcggggaggtggagaggaaggcgcagcggagctactgggaggagcactccaaggacctcaccgtcgaggccatgatgctcgactcccgcgccgccgacctcgacaaggaggagcgccccgaggtcctgtctgtactcccttcttacaaagggaaatcagtactggagcttggtgctggaataggacgctttactggggaactggcaaaagaagctggccatgttttagccctagacttcattgaaagtgtgattaagaagaatgagaacataaatgggcatcacaagaacataacctttatgtgcgctgatgtcacgtctccggacctgacgatcgaagataactctattgatctcatattctcaaactggctactaatgtacctttcagatgaggaggtcgagaagctagtaggaagaatggtgaaatggctgaaggtaggtggccatatattctttagggagtcatgctttcaccaatctggagattccaaaaggaaggtgaatccaacacattaccgggagccaaggttctatacaaagatatttaaagaatgccattcctatgataaagatgggggttcttatgaactttctctagaaacatgcaagtgcattggggcttatgtgaaaagcaagaaaaatcaaaatcagttatgttggctatgggaaaaggttaagtcaacagaagacagaggattccaaagattcctggacaatgtgcagtacaaaaccactggaatcttacgctatgagcgtgtctccggagagggttatgtcagcactggtgggattggaaccacaaaggaatttgtcggataagctggatcttaaccctggacagaaagcgcttgactgcgggtgccgaattggaggcggcgacttctatatggctgaaaactccgatgcccatgtccttggtattgaccttccaatcaacatggtttcatttgcaatcgaacgtgccattggacgcaagtgttcggtcgagtccgaagctgctgattgcaccacacagacctacgcaccaaatacatttgatgtgatctac

SEQ ID NO: 386092 - DNA, 582 bp, Oryza sativa
ccacgcgtccgcggacgcgtgggcgccaccgtgccggagaacttcgagcggttcaaggagtcggaggtgtaccactgccggtgggccacgctgccgacgatcctggtcatcgagttcgtcgcccgcgccttcgccgagcaccagcgcaccatggagaaggaccccgagaagaagaagtaccccggcggcgccttcgaccccctcggcttctccaaggaccccgtcaagttcgaggagtacaagctcaaggagatcaagaacgggcgattggccatgctggcttttgtgggtttctgcggccaacagtcggcgtacccgggcaccggcccactggagaacctggcccgccacctctcggacccgtggcacaacaacatcggcgacatcatcatcccgagaaccatctacccttgagcttggcacgaaccggtgcgtgcgtccgggcgtacgtgaaggctatgggtggttttatgtgcgtgcgtactgtgtggattggaagtttttgaatttgttttctcttgttttgatattttgaagtattttctagttttctcgaatatatatctttttttttgggatttt

SEQ ID NO: 386093 - DNA, 663 bp, Oryza sativa
  unsure (1)..(663): unsure at all n locations
ccacgcgtccgaaagagagagagagagatggcgtcnccgtcttcgtcgtcttcgctgtgcttgacctgcgcggcgccgcgcgccggcttcgtcggccgccatctcaccttctcctcgcccaggaaagcattccgagtgagggcatcatccacggttgacatgttgtggacaaatgacatgatatcaagcacttgcattctttcttgctactttttcaggctttgcgcgcacgacaaacctggtaccgtggcaccgtgccactggataacctggccagccacctgattgacccgtggcacaacaacatcggcgacatcatcatcccgagaaccatctacccttgagcttggcacgaaccggtgcgtgcgtccgggcgtacgtgaaggctatgggtggtttttatgtgcgtgcgtactgtgtgtgattggttgatgattgcgcgcgcgtgcgcactcattggtcggccggcaggcagctgctggttggccttgtaatgtaaagcttaagtagagggtgctctcttgtgaatccgtccatcttaatttttgtatcaaacacgaaatcaaactggtcttagttaaactcgaaattaaaaaatttaaaataatttattaatttacaaaaataattataaatataaaattttttaaatatttttttaat

SEQ ID NO: 386094 - DNA, 793 bp, Oryza sativa
  unsure (1)..(793): unsure at all n locations
ccacgcgtccgcccacgcgtccggatttgccatgcgtgcgtgcagtgacttcgggttcgacccgctgggcctcgccaccgtgccggagaacttcgagcggttcaaggagtcggaggtgtaccactgccggtgggccatgctcgctgtgcctggggtgttggtgccggaggcgctggggctgggcaactgggtgcaggcgcaggagtgggcggcggagcccggcggccaggccacgtacctcggcaacccggtgccatggggcacgctgccgacgatcctggtcatcgagttcgtcgccatcgccttcgccgagcaccagcgcaccatggagaaggaccccgagaagaagaagtaccccggcggcgccttcgaccccctcggctttttcaaggaccccgtcaaggtcgaggagtacaagctcaaggagatcaagaacgggcgattgnccatgctggcttttgtgggtttctgcgtccaacagtcggcgtacccgggcacaacaacatcggcgacatcatcatcccgagaaccatctacccttgagcttggcacgaaccggtgcgtgcgtccgggcgtacgtgaaggctatgggtggtttttatgtgcgtgcgtactgtgtgtgattggttgattattgcgcgcgcgtgcgcacgcngtggtcggccggcaggcagctgctggttggccttgtaatgtaaagcttaagtagagggtgctctcttgtgaatccgtccatcttaatttttgtatcaaacacgaaatcaaactggtcttagttaaaaaaaaaaaaaaa

SEQ ID NO: 386095 - DNA, 966 bp, Oryza sativa
  unsure (1)..(966): unsure at all n locations
cgaggtggagaggcagccaaggatacgatagcaaggaagagagagcgttgaagatgctgctgaccaccccgttcgtgtcgtcccctgtgagggtccagggcaatgggggcagcggcgcctcgccgtgggcgggcgcggcgacggcgctgaggatccaggcggcgaagcagctgacggggcgtgtggtgacgacgaaggcggacaagacggtgggggtggaggtggtgcggctggctcctcacccaaagtacaagcggcgggagcgcatcaagaagaagtaccaggcgcacgacccggacaaccagttcaaggtcggcgacgtcgtcgagctccgccgctcccgccccatctccaagaccaagcacttcctcgccgtccccctccccccgcgcgacacccgccgcaagtcccagctcctcccgcctctccagtcccagtcccagtcccaagaccaggaccagccacccacgcctcctccttcctccgattgatggatttttcttctcccgtaatcgtaaattcgtaatgtaataatctgtgctgtactatgtactccattgatttttatttgctctggatttcgaacttccccagcagcaatgctatgttcccttttcatttcatctgctcatatgcatgttgttactcagtgaaaccatactaccaatataatgctactagagtagaatgtgcttgtgtaattctgttatcctagcccccatcccatcgaagaaattatttagggcttctatagcatcgaaagactaaaagaactcaataaccttcgactagtgatacaacacctccgaactacgttcccggtcttcagcaagcttcccggtttcattgtgatggttcctaatatgattcgagaatttcaatttgatatttgttttaaaccatccgggaaacttgtttatacatgatactggtagaattctactnnnnnnnnnnnnnnnnnnnnnn

SEQ ID NO: 386096 - DNA, 1038 bp, Oryza sativa
  unsure (1)..(1038): unsure at all n locations
ccacgcgtccggcccacgaggcggtcacggctgtgaccctgccgtcctcgccggcccccttccccgtcaccaccaccgcctcctcctcccgtaacgtccgcctcctcctccgctccccgcctcctcgccgagccctccgcgtcgccgcctccgccgcggccgacgcgccacccaagccggcgccgccgccgacctcgccttcgggcatcgtcctcgtcgaccccaccgaggcacagaaggtgcaccgcctcaaggctgtatacgaccagaaggtggtccccctcatcaccgaggagttcggctacaccaatgtccaccaggtgcccaaggttgagaagattgtagtgaattgcgggttgggggctgaagccggtaactccaaggggctcgaatccgccatgaaggacctcgccatgatcaccggccagtggcccgtcaagacgaaggccaagaagtccgtcgccagtttcaagatccgcgaggggaacaccattggtattgccgttacgctccgcggcagggtaatgttcaacttcctggataggctcatcaaccttgggcttcctaggaccatggacttccttggtgtcaaccccaacagctttgatggccatggcaacttcaccataggccttcgtgatcagggcgtgttcccggagatcccgtacgaggtcggtgggaagaagaatggaatggacgtctgcatcgtcaccaccgcgaagacggacaacgaggctctcaggctgctcaccctccttggcatgccgttcgcggagcacatcaagtcctccgtggtgatccggaagaagaggttgaagcgccaccacttcatgagcaagggcaggggaagacggtgattgcaaaccgctgcctaggcacgttgagctttgcttctcactttgtcaattgtcattgtttttgcaaagtttcgtttagaagtttgatgattttgttatcttgtcacgtgctgtatttactgtcagaagacaaaatgaaaaggctttgctttggtcnnnnnnnnnnnnnnnnnnnnnnnnn

SEQ ID NO: 386097 - DNA, 821 bp, Oryza sativa
  unsure (1)..(821): unsure at all n locations
agctcccggcctccgaagatggagacctcctccttcctccgcaccaccctccccaccgcgaagcccctcccggcgttccagaccctcgcaccccgcccccgcccccgcccgctccgccgctccaccatcagcgcggccatcacccgaggccgcaaggaggacacggtggccgccgtccgcgagcagctggagggctgctacctcctcgccgggatccgctacgagggcctcacggtgaagcagctgcagggcatccgcgacaccctcccggagacctgccggctgctggtggcgaagaacacgctggtggggaaggccatcgagggcacgccgtgggaggcgctcaagccgtgcatgaaggggatgaacgcgtggctgttcgtccacaccgaggaggtccccgccgcgctcaagccctaccgcgccttccagaaggaggagcgcctcgaggagaccaacgacttcgtcggcgcggtgttcgagggcaagttctacgcccccggggacttcaaggcgctcgagacaatgcccagccgcgccgaggtgtacgccaagctgctcggctcgctgcaggggcccgcgacctccgtcgtcaccacgctgcaggcgccggccagggacgtcgtctccgtgctctcggcgtacgtgcgcaagctcgagcaggaggtcggcgccgcctgatggctgttgagagatggttttgtggcttcgtttctctcatctcactcatttcttgtagaattcctgtacttttactgcctcacgtttgaattgaatcacaaaagttttacctctttnnnnnnnnnnnnnnnnnnnnnnnn

SEQ ID NO: 386098 - DNA, 1240 bp, Oryza sativa
  unsure (1)..(1240): unsure at all n locations
tttatagacagccaaaagggtcaagaggaaattgggtttgtgctctccccaaaatcctccatatatagtgcacaggaggcatcattctgttcatacatatctctcccttgcttgctttgctcctggatatatagctagcttctttctttcttcctctctccctgtgtggcacgcgcctccaatcgatctcttcggtgagtagacgcatcgagatcggggggaaatgtcggtccagtttacatcggagcatgtttgctatgtcaactgcaactattgcaacactatccttgtggtgaatgtgccaaacaattgttcctacaacattgtgactgttagatgtgggcattgcacaatggtgctctccatggatcttgctccttttcaccaagcacgcactgttcaagatcaccaggtacagaacagaggatttcaaggtaataactttggaagctatgacatagcttccagaaatcagaggacatcgacagccatgtacccaatgccaaccagtcagcagcaagtgtcacctatacgtccccctgagaaaagacagcgtgtcccatctgcatacaacagattcatcaaggaggagatacagaggattaaaaccagcaatcctgagattagccacagggaggcattcagtgctgctgcaaagaactgggctcatcttccccggctccattttggcctcaacgtcgccgacggcggcggcggcggcggcagcaactaatcgcggcggcgcggcctgccggccggccaccgatcgccggcgtgcacgccggcgcgcggcggcggccggtcgagaatgcgcgcgcaggagggacgacgacgatatattattatcgcgtgtgcccctctctcttcgccgcgtaattaattaatcagttaattaattacgtacgacctactgtgttatgctatcgatccgtgttaattaattacctacgtatcttgattaattagtctcgtattatacgtactattatacgtacgtgctgtgctatgtacgtagacaacaaaaaaaaatgtgcgtgatgagttctactacgtacgtacgtactgtgttctagtgttttaatttgtatccgaaccaaggagttgtttaattaactgcatgcacatgcactggacttgaatctggagtattatgtaagtgtgcatgcatgctggattatgcaaaataaacgaattaatgaatagaactgtttttgttnnnnnnnnnnnnnnnnnnnnnnnn

SEQ ID NO: 386099 - DNA, 738 bp, Oryza sativa
cccacgcgtccgaattaagttcttgatttctaagctagcaattgagcacacatcgatcgcgagagacgcagcggcgcccgtctaccgcggggctagaggaatgtcggcacagatcgtgccggcgccggagcatgtgtgctacgtgcactgcaacttctgcaacacaattttcgcggtcagtgttccaagcaatagcatgctaaacatcgtgaccgtccgttgtggccattgcactagcctgttgtcagtgaacttgcgaggattggtccaagcactcccagcagaagatcatttacaggacaatttgaagatgcacaatatgagcttccgcgaaaactactctgaatatggctcatcttccagatatggccgagtgccaatgatgttctcaaaaaatgacacagagcatatgctgcacgtgcgacctccagagaagaggcagcgggttccttcagcttataacagatttatcaaggaagagatccggaggataaaagcaaacaatcctgacataagccacagagaagccttcagtactgcagcaaagaattgggcgcatttcccgaacatccatttcgggttaggctcccatgagagcagcaagaagctcgatgaggccattggagctcctagtccccaaaaggttcaaaggctgtattgatcgagtacacatgatgatcgatggatcctacgtgcttgttgatctcatgttgtaagtaacttaaaaaaaaaaaaaaa

SEQ ID NO: 386100 - DNA, 798 bp, Oryza sativa
tttgcagtgataaaacaggaactttgaccttgaataagctcaccgtggacaagaacctcattgatgtctttgaaagaggaatcactcaggaccaagtgattctcatggctgctagagcatcacgaacagaaaaccaggatgctattgatactgcaatagttgggatgctagctgatccaaaagaggcccgtgctggtattcaagaagttcatttcctgccattcaatcctactgacaaaagaacagcattgacatacattgatggtgatggcaaaatgtatcgtgttagtaagggtgcacctgagcagattctccaccttgctcataacaaaccggagatagagcggagggtccatgctgtgattgacaaatttgcagaacgtggacttagatcgcttgctgtagcataccaggaagtaccagaggggacgaaagaaacccctggtgccccatggcattttgttggtctcatgccactttttgatcctccaaggcacgacagtgctgaaacaattcggcgggcacttaatcttggtgtcaatgtcaagatgatcacaggtgatcagctggcaattggaaaagaaacagggcgtcgcctgggaactggtacaaacatgtacccttcactccctttgctgggacagaacaaggatgagtccattgccgctttaccagttgatgatctcattgagaaagctgatggctttgctggtgtattcccagagcacaagtatgagattgtgaaacgtctgcaagcaagaaagcacatatgtggaatgactggtgatggtgtaaacg

SEQ ID NO: 386101 - DNA, 1609 bp, Oryza sativa
gcgcggacgcgtgggcgctgcccaccccaatccggcagcacagcagcagcagaagcagctcggatccctcctgcaatggcgaccgcgtgcccgccgctctcgctgcagccggcctacctctcggggaggtccgcgcgcgcgcgccgcccgccgcccgccgtccgctgcagcgccgtcggagaggttatggcggagacggcggcggtcgggacggcggaggagccgctgctggtgagcgcgatcaaggggaggaaggtcgagagaccgccggtctggctcatgaggcaggccgggaggtacatgaagagctatcaattgctctgcgagcgacatccttcattccgtgaaagatcagaaaatgttgaccttgttgttgagatctctctacaaccatggaaggttttcaagcccgatggagttatcctgttctcagatatccttacaccgcttcctgggatgaacataccttttgacattgtgaaaggaaaaggtccagtgatatttgatcccttgagaacagcagctgctgcgaatgaggtcagagaatttgttccagaggagtgggtcccatatgttgggcaggctttaaacattttgcgggaagaggttaacaatgaagctgccgtgttgggctttgttggagctccctttacattggcatcctattgtgttgaaggaggttcatcaaaaaacttttcaaagattaagaaaatggccttctcagaaccagagattctgcataatttgctacagaaatttactacgtccatggctaactacattaaataccaagctgacaacggagcacaagctgtccaaatttttgactcatgggctaccagaactcagccccagttgatcttgaggagtttagcttgccttatctgaagcagattgtggatagtgtcaaaggaaacacatcctgaattgcctctgatactatatgcaagtggatctggtggactgctggagaggcttccactgacaggtgttgatgttgttagcttggactggacggttgatatggctgaggggaggaaaagattgggatctaacatagcggttcaagggaatgttgaccctggcgttctttttgggtcaaaagagttcataagcaagcggatttttgacactgtgcagaaagctggtaatagtggacatgtattgaaccttggtcatggcattaaggtaggcactcctgaggaaaatgttgcccatttctttgaggttgcaaaagggatcagatactgaaatacctaggctattcgatgcattcctttctccctagtccccaccggcagaagttgtagattctgctgcttgaggatagatgcaggaagccatgtctagcgtagaatacctgaagagcacatcttttgcgatttctgtgttttgcgatcaaatttttattttattgttagtcttgtaaggttatcacttgaggtgtaagaaagttcctacttgtttatagcaagtatatattctaatcaaatctgtaaccccgagattatcaatttgtatcggtaagaaataaatattgtatttgaaaatgttttttttcctaaaaaagaagcaggatgtaatgttaccttcaaaaaaaaaaaaaaaa

SEQ ID NO: 386102 - DNA, 1402 bp, Oryza sativa
gcccggttttatgctgctgaaattgttgatattctggagtatttgcatagtttaggcctaattcatcgggatgttaagccagaaaatttactgcttacttctgatgggcacatcaagattgccgattttggtagtgtgaagcctacaaaggacaccccgatcaaagtccttccaaattccactaacgagagggcctgtacatttgttgggacagctgcatatgtaccacctgaggtcctgaactctgccccaccaacctttggaaatgacttatgggcattggggtgtactctatatcaattgctttctggctcttcaccatttaaagatgccagtgagtggttaattttccagagaattatagcacgcgatctcaaaattcctgagtacttctcagatgatgcaagggatctcattgacaagctgctggatgtcgacccaagcaaacgtccaggtgcaggacctgatggttatgtgtcattgaagaaacatcctttttttagaggcattgattggaaaaatataaggagcacacgggcaccgaagcttgcaatggaggcaaatgcaaatgaggatgaagatagtcaggattcaagttggttgtcacacatgggaagtgctccagtcaaccaacatgtcagtcctgttgggaatgatggtgcctcatcatcttctgaagtacgctcccatatatctagattagcttccatcgactccttcgactctagatggcaggacttcctggagcctggcgaatctgtcgttctaatatcaaaactgaagaagataaacaagctaacgaacaagaaggttcagttgatcctcaccgacaaaccacagctgatctgtgtagatcctggaaaaatggtgactaaagggaacatcatgtggtctgatgacccaagtgaactcaatgtgcaagtatcaaactcttcgcatttcaggatatgcacgccaaagaaggtgtcatcgtttgaggatgcaaaacagcgcgcctggcaatggaagaaggcgatcgaagacctacaacgctgccagaagaactgaccatgaccaactcaagacgtcaaaatggtgatattaagcattgtgtatacaccatagccatccttttcgcctggaggaacatgggggagactattgttcctggtctcctgcatctgtgcccgattgcaacgaagtctcaacagttggcacatcgatggatgttcctacatttttttgttttcttttccggccctgctaaattctcttatagcaaacaattttgctcgtttgttttgtaatttggtgcagcagatagcatcaggaattcaggatgattgaaaacgtttgcacttgaaacatttaacacaggaaactacatgagattgccagtttaaaaaaaaaaaaaaaaaaaagg

SEQ ID NO: 386103 - DNA, 1196 bp, Oryza sativa
cttccagtttgagaaaatggtgatctcatccaagggcaaagtgtgtgtaactggtgcttcaggcttcgtcgcctcttggctcatcaagaggcttcttgaggcgggctatcatgtgataggaactgtgagagacccaagcaatcgcgagaaagtgtcacacctttggagattaccaagtgcaaaggagaggctgcaacttgtgagagctgatctgatggaagaagggagctttgacgatgctgtgatggcttgcgaaggcgtcttccacactgcatctcctgtccttgccaaatctgattccaattgcaaggaagaaatgcttgttcctgcgataaatggtactctgaatgtgctgaaatcttgcaagaagaatccatttctgaaaagggttgttcttacatcctcatcatccacggtaagaatcatggatgagagtaaacatccagaaatctcactggatgaaacaatatggagctctgtggcactctgtgaaaagctacagctatggtatgccctggcaaagatatctgcagagaaagcggcatgggagtttgccaaggagaacaacattgaccttgtaactgttcttccatcatttgtgattgggcccagtttatcacatgaactgtctgtcactgcttcagacatccttggcttacttcaaggtgacacagatagattcatctcgtatgggagaatgggatatgttcacatcgacgatgtggcgagctgccacattctggtgtacgaagcacctcaggctactgggagatatctctgcaactccgttgttcttgacaacaacgaattagtcgccttgcttgcgaagcaatttccaatttttcccatcccaaggagcttgaggaacccatatgagaaacagtcatatgagctaaacacatccaagatccagcagctgggtttcaagttcaaaggggtgcaagagatgtttggtgattgtgtcgagtcgctgaaagatcagggacacttgctggagtgcccgttgtaacgaaaaaaagggatctttggcacggtaccaacaagctcatggccaagcacacacttgaattgttctgactttgattcgacacttcgcaagccactgcgtttctcttgtaataattcgcatgtcaattccctcaacaaaactacaaataaattgtcaatttgttgcctcaaaaaaaaaaaaaaaaaaa

SEQ ID NO: 386104 - DNA, 399 bp, Oryza sativa
ccgcaactcgtcttcgcaccaatcaacaacaccaacagctaaatactcatcagaaaccccaaggagacaaggagacaacaacacaaattctgctggctggggagactctctcggaaacacgagctggcattcaccctcaggcaatgcgagcagccgaggcagccattctagccaccaccatgaccggcacattcagagcagcgaaccatggcgtggtggctcaaatcattccaggagatcagatcatcgtcaagaacatggcaacggtggctcgtcgagatcatcgtcgtcgagggggcaatctcaaagggggatctgtagatactacgagaatggctactgcaggaagggcacttcctgccagttcctccaccgttgaaaacgccctcacatttttgt

SEQ ID NO: 386105 - DNA, 527 bp, Oryza sativa
  unsure (1)..(527): unsure at all n locations
ccacgcgtccgccttgtcccgcacgaggcgtcacgtgactgcatggtcgctggacacgtcatcgcacgcgggacgatggtgttggtcgacgtgtactccatgcagcgggatccccgtgtttgggaggacccggacaagttcatacccgagaggttcaagggtttcaaagtcgatggaagtgggtggatgatgcccttcggtatggggaggcggaagtgccccggtgaaggccttgctcttaggacggtagggatggcgctaggggttatgatacaatgctttcagtgggagcgcgtcggaaagaagaaggttgatatgagtgaaggttctgggctcaccatgcctatggccgtgcctctcatggccatgtgcctaccacgtgtggagatggagtctgtgctcaaaagtctctagaaatttttttttctttcatacgttataggatctgtcacgccaaataattgttctgtgtaattgatttcaaccaaatagtcaaatattcggtcnnnnnnnnnnnnnnnnnnnnn

SEQ ID NO: 386106 - DNA, 609 bp, Oryza sativa
  unsure (1)..(609): unsure at all n locations
gngccctcctctggcaagaagcgcgcccggcgccggcaagctctccgacctcaacctcgtcgacgagcaggtgctgcgagcatccctcgctgagatccccccgaagcacgagagagaggtggaggctctgacgagaagctacaaggagcagtaccgcaactggctgttcgagctcaggtgcggatttgggctcctgatgtatggatttggatctaagaagatgttgcttgaggattttgcgtccacgaccttgagcgatttcaccgtcattgtggttaatggctatctcccttccatcaacttgaagcaagtcatagtgacaatagctgaaatattttgggaacaaacaaaacttaagagaaaacgccagacagcaacaaggtcccagttgcagccatttgcatcccaatcaatagatgatattatctcctttctaaataaccagacatctgacaatggggatgacaatgtatgccttcttattcacaacatcgacggaccttgccttgcgtgacgctgaatcacagcagtacctagctcaagttcgtgctgcccgaagtccatgtgtcgcataagtgacatgtaatgcaccttgtatggacaagaaat

SEQ ID NO: 386107 - DNA, 319 bp, Oryza sativa
aatattcacattttgtcaggtgtacaagacgctggtggaaaagacgaaatctacacctggagccaaggtggagaacaacaagttctgcctgtccgtccacttcagatgtgtagatgaaaagagatggaatgctttgggggagcaggtcaaggccgtgatcaaggaatacccaaagttgaagctcacccaaggaaggaaggttttggagatcaggccgagcattgagtgggacaagggcaaggctctggagttcttgcttgaatcgctgggattcgccaactgcggcgacggtcatgccggtgtacatcggtgacgaccg

SEQ ID NO: 386108 - DNA, 2376 bp, Oryza sativa
cttcgatccccttcctccacctccaccccccacccgccgagcgccccccgcgagctcgtcccgtcgcggcgggcgatcgctccacccacccatccacctccaccttcccgcgcgattccccgagaggcgaggcgaggcgaggccgctatagctccgctccgctccccgaccaccacgacgcggctggcggcggatcctccactccacccacccaccccgcttccgccgatcggatcgcgtgctccccccgaggtagaggtgatgataaatcatagttagtgacttagcttgcagcagttctttcttgcagctaagacaaataataattggcgttatggcatatagaaatacggtatgcactccccaagtaattgatctagaaactgaacaagggcactctcatattcattctgaaagttttaatcgcactgggaatgattcatctgaccaaggtgcacaacatgctgccagaggggtaggaaatgcttcaaacattggtctatctgatatgcgaagttactatgatgcgggcatgaaccatccacatcaacctgttcataacttgcctccaaatttaggagttgattcaggttttgtcttcccatccagggtggacaacccctgcatgtcgacaacatctatgaaccaatatgtttctcacactcagagcttcggattgccatcaaaccaagttgttctaggaagcatggatgaaggtagcagaaatgaaaatgctggtgaaagtgctagaggattcattaaaaggaaaaatgctgcagttgcaggaagttaccactgtgctaatggatttgcaaggtcaagctcttctcatgcatctctgaatcctacacataggccatgggatccttcttttgagtcaaatgttttgcctaacactgcatcatataacccatcagagtaccatagccagaccagttggccatctatggaaggatcttccattcccagtaatggctttaatttgatgggtgctcacccagaatcagcacagcatggtaattatgcatttccaactagtcacatcagccagtgctttcaacctactagcaatacatggatttcccagtctgcaaatggtattgctgatggaataccacagtgggaatatgtcaatggaatgaataatgctccagcaggcagattttcccgttcaggtatgacagaaacagtgaatggaagcttccgtgaatatcagaatggcccttcaaccttatgtcgagggcctttaccctattttcatcagcatgctggcatgcatgctcataatctgcttgatcatacacaagtgcaagctccttaccaacaatgccacaataatcctgtctttacatggtgtaaatcattctggcaaccggttccatttggggtccaaggattccagttcttttctctaattcttgacgtacttttgggcctccacatcatccactcttggcaaatccagtggaccacaggaatatacggatcctgccacctgagcatgctacaataatggatttttcaagattgtatgaagtgtcaaatgttgtagatgagcatagagatatgcggctagatatagacagcatgacatatgaggagcttttagcattagaagagcagattggagatgtaaatactggtctggcaaaaagctacattgtagagaaattgaagactagcttatttgtgccaggatcatcctgcatgtctaataagtcttctgaatcttccatggagaatgatgcttgcataatatgccaggaagagtatcaggttaaagaatgcattggaacccttgactgtggccacaggtaccacgaagattgcataaaacaatggttgatggtaaagaatttatgccccatctgcaagacgacagctttgtcaaccggaagaagaagtggataacgaacaggaataatcttattagttatttacttccgacaaatattcagctcaattttgtatataagaaacggtagaccattctgctacctgtatttgttgctcactttgttgtgatccgggagtaactcagcttcctaaactgtacagccataacattgatcattttcttcggtgtagaatattttaaattactcagttcgcccccatctgtatcataaggcggaccgacaaaaaaactcacaatgtcatttctaggcaaacattgtatctaccatcagattaaaaatcagaacagaacatgtgctcttctgtacattttgttttctcctaattccgtaactcgggaggaccaaaaagattcttatggtcgtcggagcgtgattgcatcgattcgccttttgtttgtttatgcattgttcgccccaaattatctgtcgcacgtccatttgattgccttgattcgtc

SEQ ID NO: 386109 - DNA, 709 bp, Oryza sativa
  unsure (1)..(709): unsure at all n locations
cggacgcgtcttcttcccccaaattcgtcgctccgcttccctctccgatccgaagagatggcggtgccgctgctgacgaagaagatcgtgaagaagagggtcaagcagttcaagaggccccatagtgaccgctacctatgcctcaagccaagctggcgcaggcccaagggtattgactcccgtgtcaggagaaagttcaagggatgcaccttgatgcccaacattggttacggctcagacaagaagaccaggcactacctccccaacaagttcaagaagtttgtggtgcacaatgtctctgagctggagttgcttatgatgcacaacaggacatactgtgctgagattgctcacaacgtctccacgaggaagcgcaaggagatcgtcgagcgcgctgcgcagctggacatcgtggtcaccaacaagcttgccaggctccgcagccaggaggacgagtgaaattttctgcagtttttcgtgcttatggctgcattgttcgtagggcagtgccttggtaccttaaaattatccattttgtgttgctgttagatttgcccgtatggacatcattttgctgtgagtgacctgtctagttttagcaacaatgagataaaaagactttcagcttttcatcatcataaacttatgtggtttctcttgggcgcgccgggttttctgaataatgagaaannnnnnnnnnnnnnnnnnn

SEQ ID NO: 386110 - DNA, 552 bp, Oryza sativa
caggcccaagggtattgactcccacgcgtccgcccacgcgtccggatgcaccttgatgcccaacattggttacggctcagacaagaagaccaggcactacctccccaacaagttcaagaagtttgtggtgcacaatgtctctgagctggagttgctcatgatgcacaacaggacctactgtgccgagattgcccacaacgtctctacgaagaagcgcaaggagatcgttgagcgtgctgcgcagctcgacatcgtggtcaccaacaagcttgcaaggctccgtagccaggaggacgagtaggctgttttatcagtataatgttttggtctggtttgattgtaggaaactgtcgcgcctccaagtattctcctttcaatcgatgtggtactgtgaaagataactattatgtcaacctttttgctaccagcagctactctaatgtggccaaattactatcgcatcattagcctacatgtcctgcattttgcgtttttgctctggatgaatgctgtattgtatctgttgaatttattgtgttgaggtatcgtcct

SEQ ID NO: 386111 - DNA, 606 bp, Oryza sativa
cctaattcgtcgctccgcttccctctccgatccgaagagatggcggtgccgctgctgacgaagaagatcgtgaagaagagggtcaagcagttcaagaggccccatagtgaccgctacctatgcctcaagccaagctggcgcaggcccaagggtattgactcccgtgtcaggagaaagttcaagggatgcaccttgatgcccaacattggttacggctcagacaagaagaccaggcactacctccccaacaagttcaagaagtttgtggtgcacaatgtctctgagctggagttgctcatgatgcacaacaggacctactgtgccgagattgcccacaacgtctctacgaagaagcgcaaggagatcgttgagcgtgctgcgcagctcgacatcgtggtcaccaacaagcttgcaaggctccgtagccaggaggacgagtaggctgttttatcagtataatgttttggtctggtttgattgtaggaaactgtcgcgcctccaagtattctcctttcaatcgatgtggtactgtgaaagataactattatgtcagcctttttgctaccagcagctactctaatgtggccaaattactatcgcatcatt

SEQ ID NO: 386112 - DNA, 502 bp, Oryza sativa
ccacgcgtccgcggacgcgtgggcggacgcgtgggcggactcgtgggttacaactcagcgcgcctatggactccaccattctagggttcctggatataagaaaaccttctctcctcccgaactccttcacgccgccgccggcgccgccacctcgccgctgctccgaccggtcgaagatggcggttccattgctgacgaagaagatcgtgaagaagcgggtgaagcagttcaagaggccgcacagcgaccgctacattggcctcaagacaagctggcgcagaccaaagggtattgactcacgtgtcaggaggaagttcaagggatgcacattgatgcccaatattggatatggttcggacaagaagaccaggcattacctgcccaacaagttcaagaagtttggggtgcacaacgtctcagaagctggagcttcttatgatgcacaacaggatgtactgtgctgaaattgctcataatgtgtccacgaggaaacgcaaggggg

SEQ ID NO: 386113 - DNA, 802 bp, Oryza sativa
cataatgaggatattgaaggactacaatcagtatgtcatgaggaatttagcacgtggatactcaaggaaagatttaggcgtagcttatgttaaggaaaagcaactccaggtcaacatgaagataaataaactgcgagagactgtaaaggcgcatcaagaaaagttgcaaacggtggcgaagacagctggaataaatcatgaagaatggttggccaatgcagatcgctgggttgctggtttcttggagaagtttgaggaacactgccacaacatggaaactgccatcaaggggcgtatccaggagaaattgaggaggcaaacaagcagagggataattgggggtctaatgcagcaaccggtggcagcgtaataagttgtagaggagagatgacgttgagttggagtaagctgccctggggtcaccacggacgagaaatgtagtgaagatgccttcttggttggcggttatagtgtgagtgtgtgcttgtgtcatggaatgtgatgcttgtacgagttgttacagcttaattacatgggagaggctttgtttcttgtttattttttttgcgggggtgggggtgttggtttccttgtatacaaatgtctatagcagaggcgtttggtgcataatccagagtgtgtagtaggtgttggacagatgaagttgagtggtactgtagtgttgttgttctcttcccttgggttttgtctgtaacgtcgagagggagagatgttgacgctggctgaaagcacaacacaagcagagtgatattatactactactagtaatttacttattagt

SEQ ID NO: 386114 - DNA, 793 bp, Oryza sativa
acagctgctttctttgtccgatggggagagaataacctccatcgttcctgtaaatgaatttggtgaagatcagtatcttgtgatgctgaccgttaacggttatatcaagaaagttcctcttaatgctttctcagcaatcaggacttctgggatcatttcaattcaactggctcctggtgatgagctgaagtgggttcgtcgttgtggggatgatgaccttgttgctttggcttcacaaaatgggatggttatagttaatacatgcaacaagcttcgtgcccttggaaggaaaacaaggggcgtcctggcaatgaagctaaaggaaggtgacaagatggcatccatggatataatcccagcaacgtcgcataacatgcctgaaacttacagcagagtcagagatttgagtccgccatggctgcttttcatagctgataatggtattgggaagccgtgtgcccctaaatgcattccggcaaggaaatttcaacagagtgggcttgcaaggctacaagcttccaccagactgtagcttagctgctgtatttgttgttggattttcacttactgatgacggtgaaagtgacgaacaggtggttttagttagccagagtggtactgtaaacagaatcaaagtcaaagatatatccatccggtctcgttccgcaaggggagtcattctgatgaggctggaacatgctgggaagatccagtcagcctcactaatatcagcagcagaagaggaggaagaacaggacccggagtcagcctcactaatatcagaagcaagaag

SEQ ID NO: 386115 - DNA, 1965 bp, Oryza sativa
ggtggaggagagtgaggacggcccacgcggacgagcagagagtggcgggctcagtgtcgggctcgccggagtccgcgcaatccggccgttcatgcttcattctctcggacattaacctggtttacttgtaagaaagtagagccatggactcctcataccagcatgacaagcctctgctggatgaagagaactcctcgcaagtgacccttgaatatacaggtgatggatctgtttgcatccgtgggcatcctgctttaaggaaacatacagggaactggaagggttcctcattagccatcgttttttcattctgctcttatctggcctttacttcaattgtaaaaaacctagtcagttatctcacaaaagttctacatgaaacaaacgtggccgctgcaagagatgttgcaacttggtcaggaacaagttatcttgcacctctggttggagccttcttagctgattcatatctggggaagtactgtacaattctgatcttctgcacgatcttcattatcggattgatgatgttgcttctgtcagcagcagttccattaatctctactggtcctcactcatggatcatatggacagatccagtctcttctcagaacatcatattctttgtcggtttgtacatggttgctttagggtatggtgcacagtgcccctgcatatcatcatttggtgctgatcaatttgatgacactgatgaaaatgagagaacaaaaaagagttcttttttcaattggacctatttcgtagccaatgcgggctcattgatctcggggactgttattgtgtgggtgcaagatcacaaaggttggatctggggttttaccatttctgcactatttgtgtatttaggttttggtacttttatctttggctcctctatgtatgatttcagaaacctggaggaagcccctcttgcgagaatatgccaggttgttgttgctgctattcacaaacgcgataaagatttgccatgtgattcctcagttctttatgagtttctggggcagagttcagcaatcgaaggcagccgaaaattggagcatacaactggacttaagttctttgatagagctgcaatggtgacaccatctgattttgaatctgatggcctactaaacacatggaagatttgcacagtcactcaagtggaggaactgaagattttgatcaggatgttccccgtttgggcaacgatgatattatttgctgcagttctggacaacatgttttcgacattcatagaacaggggatggtgatggagaaacacatcggctctttcgaaatacctgcggcgtccttccaatccattgatgtcattgctgtccttatactagttccagtctatgaaagagtccttgttccagtgttcagaaaattcactggcagagcaaatggcattactccactgcagcgaatggggatcggcctgttcttttccatgctctccatggtatcagcagcattggtggagagtaatcggttgcggattgcgcaggatgaaggtttggtgcacaggaaggtggctgttccaatgagcatcctgtggcagggaccccagtacttcctgataggcgtgggagaggtgttctcaaacattgggttaactgaatttttctaccaggaatcaccggacgccatgagaagcttatgtctcgcattctcacttgctaacgtttcggcaggaagttacctcagctcgtttatcgtttctcttgtgccagtgttcacagccagagaaggcagtcctggatggatacctgataacttgaacgaagggcatttggatcggttcttctggatgatggctggcttgtgtttcttgaatatgctggcctttgtgttctgtgccatgaggtacaaatgtaagaaggcttcctgaaccttgttaacattagcaatataatggtggtggaaaaggacaattgtgttgcaaaaaaaaaaaaaaa

SEQ ID NO: 386116 - DNA, 958 bp, Oryza sativa
  unsure (1)..(958): unsure at all n locations
catctcaaacacaccacctgaattaacaagcaggtatatataagctactagctaattaagaagggcattagaatggcttcgtcttccttcctgctcctcgccactcttcttgccatggcctcatggcaaggcatggcttcggatcccagccctctgcaggacttctgcgttgccgacatgcactcacctgtgcttgtcaatggatttgcttgcctgaacccaaaggacgtgaacgcggatcacttcttcaaggcagcaatgttggacactcctcggaagacgaacaaagttgggtctaacgtcacactgatcaacgtcatgcagatccctggcctcaacacactcggcatctcaattgcacgtattgactatgcaccgttaggtcaaaaccctccccacactcatcctcgtgccaccgaaatcctcacggtgcttgaaggaacactctatgtcggcttcgtcacgtctaacccagataacaagtttttctccaaagtgctcaataagggtgatgtgttcgtattccctgtggggctcatccacttccaatttaaccctaacccctacaagcccgcggtcgcaattgccgcacttagcagccagaaccctggtgccatcaccattgcaaatgcggtgtttgggtcgaagccaccaatctccgatgatgttttggccaaggcattccaggtcgaaaaggggacaatagattggctccaagcccagttctgggagaacaaccattactgatcatcttactgattgcatttaagaaaaagttatgtgcagttacagagatcctgcataattaactttatatactacaataaaatgacttctatttcgtgtaccactactagctatattctgtgatgtaattccaatacatgtgtatggttttcctgtttaattaatgaaatacagtgttctttgtgacnnnnnnnnnnnnnnnnnnnnnnnn

SEQ ID NO: 386117 - DNA, 1086 bp, Oryza sativa
  unsure (1)..(1086): unsure at all n locations
gagtcgacccaagngtccgcggaaatccgnaacccttaaccggcccatagggagtggtttggcactgtgactccggtgggggcctccgccgcttaccagtctgcttcccgcaattcgccgaagagaagcgccgccgtggtgtggcctcctctgcctcacctgctagttcggcgacccctactccgatgcgtcctcgtcgtcctcgacttctgccgcgccattcgcccacccttcgccgtcgtctgtgctcgaagccaccaagccagctccaaagccagagtcgccgccgctgccggagcaagctgcaactcccctcctggtggaggctaccaacgagaccgccgagctgccggatgacccagagttctacaaggatatactgcgcggtctacagctgccggacattgacccgatggatttccgagctgggctggatgctctggatatctccgatgtgccggcttacatgaatggcgaacaagacgtactcttcactgaggacatgctgcttggagacttcgctgaagaagatgacctcgacctcgacgacatcggtgatgacttctgcgaggatttcccagagatacccagcggctacgacttcggccgtggtgatatgttccggcaggtggatttctgcgtgtgaattaagagcttgctaaagttattcatgttggtgtgatgggcctgtgagtgtgggtgcttgggaggagatttcttgggttttttccccgagcaaaatcaatctgctcgtgcccttgagatttcagttccgcccataagaactccaacgcacatttagcattcggagagtaattttgttaggttaaaagtatggtaagttataggtggtatgttatgtttttctttttcttttctcaatgttatctggtacctaagtttgtcaagaaaatcatagtggacaagtcaagtatttggggctgtcgtctctgttatggaaagaaaaataagttttgattacattacatatcttttgctctcgagatctggtcatgtcgtcgcattgcaactcgtctcgtctgtatgcattttactctgctggtttaatgttgagattgtgtagtt

SEQ ID NO: 386118 - DNA, 1406 bp, Oryza sativa
catttcggggggggtagtttataagggcttgcgcgaggagggggaggagtagcgggtagcggcgggctcgagtcgagtcgagtcgccgtcgtcgtcgggcggcggcggccgagagagatcgggatcgatggtgcgggggaggacggagctgaagcggattgagaacccgacgagccggcaggtgaccttctccaagcgccggaatggcctcctcaagaaggcgttcgagctctccgtcctctgcgacgccgaggtcgccctcatcgtcttctccccccgcggccgcctctacgagttcgccagcgcccccagcctacagaaaaccatcgaccgctataaagcatacacaaaggatcatgtcaacaataagacaattcaacaagatatccagcaagtcaaagatgatactttaggtttggccaagaaacttgaagctcttgatgagtccagacggaaaatattgggagaaaatttagaaggatgctctattgaagaactgcgtggtctagaaatgaaacttgagaagagcctccacaacataagactaaagaagaccgagcttctggagcggcagatagccaagctgaaagagaaggagcggactttgcttaaagacaacgaaaatttacgcggaaagcatcgcaaccttgaggctgcggcgctggtggctaaccacatgacgacgacgacggcgccggcggcgtggccgcgggacgtgcctatgacgagcagcacagccggcgccgccgacgccatggacgtggagactgatctgtacattggattgcccggcactgagcgctcctccaaccggtcggagacaggttgaagaaggccagccacagcaacagctgctatatagcatgcagtagcagcaacgacgccagtgacatcctgttcatctcacaagaataaccagagctctacgcatgcgcacatgaaacccaggcatgcagttctcggtgggtaaattattatctcgcattattagctatatgcgtgtccttgtctttttctttaggcaatggaataaaatttccggtaagtacaaacacaaacggaaacaaagaattaacaaagctgtagcagaccagatcggcaaattgaaatgccaggtaatccagtatatatttcgctaaagttattcatgttggtgtgatgggcctgtgagtgtgggtgcttgggaggagatttcttgggttttttccccgagcaaaatcaatctgctcgtgcccttgagatttcagttccgcccataagaactccgacgcacatttagcattcggagagtaattttgttaggttaaaagtatggtaagttataggtggtatgttatgtttttctttttcttttctcaatgttatctggtacctaagtttgtcaagaaaatcatagtggacaagtc

SEQ ID NO: 386119 - DNA, 1030 bp, Oryza sativa
aagactgcaagggagagggagagagagggaagcttgcaggctgcagctaactagctaggcaaggagagagaggagatagatcaagaagagattttgagaccgagagagagctagagagagatcgatggggcgagggaaagtagagctgaagcggatcgagaacaagatgagccggcaggtgacgttcgcgaagaggaggaacgggctgctgaagaaggcgtacgagctgtccgtgctctgcgacgccgaggtcgccctcatcatcttctccacccgcggccgcctcttcgagttctccacctcctcctgtatgtacaagacactggagcgataccgcagttgcaactacaaccttaactcatgtgaagcatctgctgcactggaaactgaactaagcaattaccaagagtacttaaagttaaagacaagagttgagttcctacaaacaactcagagaaatcttcttggcgaggacttggttccacttagcttgaaggagctcgagcaacttgagaaccagatcgagatatccctcatgaatatcaggtcatcaaagaatcaacagttgcttgatcaagtatttgagctcaaacgtaaggaacaacaacttcaagatgctaataaagacttaaaaaggaagatacaagaaactagtggagaaaatatgcttcatatatcttgccaagatgtagggcccagtggccatgctagtgaagctaaccaagagtttctccatcatgcaatttgtgacccttccctgcatatagggtatcaagcttacatggatcacctcaaccaatgaatgaattgcttatcacattaatggacatctcctatgttggatgtggtgtttgacgtaatgctctcttttacatgcgggttttaccttaagtgtgtgtgctaaatttagtgcgtttgtttatgctcttttgaactgaacaaaggaatgatcccggtttgattgatgaatgctgcaagaacataatctatatgttagtctgaattcagtatgtaatgaagatgttttgtt

SEQ ID NO: 386120 - DNA, 2245 bp, Oryza sativa
gcaagactcttgccgtgttgagactgcagaaacgagagctagctagccagaggctgcaagaagattctgcacccatagatcgtctaccatggccacaaacccaggactcttcacggagtggccatggaagaagcttggcagcttcaagtacgtgttgctggcgccgtgggtagcgcacgggtggtatgaggtggcgaccaaggggtggcgggaggtggatctcgggtacatcgccatcctcccgtcgttgctgctgcggatgctgcacaaccaagcctggatcaccatctcccgcctccaaaacgcccgtggccgccgccagattgttcgccgcggcatcgagttcgaccaggttgaccgcgagaggaactgggacgaccagatcatcctgagcggtatcctactatacctcggcgcactgtacgtaccgggcgggcaacacttaccgctgtggaggacggatggcgcggggctgatcgccttgctgcatgcggggccagtggagttcctctactactggttccatcgtgcgttgcaccaccactttctctacacccgctaccactcgcaccaccactcctcaatcgtcactgagcccatcacatccgtcatccatccgtttgctgagctcgttgcctacgaattgctcttctcgatcccactgatcgcctgtgccttgactggaactgcttccataattgcattcgagatgtatttgatttacattgatttcatgaacaacatggggcactgcaacttcgagttggtacccagctggctcttcacatggttccctcctctcaagtatctcatgtacacgccatcgtttcattctctgcaccacactcagtttcggacaaactactcccttttcatgccgttctacgattatatctacaacaccatggacaagtcatcagacactctgtatgagaactcactgaagaacaatgacgaagaagaagcagtggatgtggttcaccttacacacctgaccaccctgcattccatctaccacatgaggcccggtttcgccgaatttgcgtccaggccctacgtttccaggtggtacatgaggatgatgtggcctctgtcatggctctccatggtgctgacatggacgtacggttcttcattcactgttgagaggaatgtcatgagagatcaggatgcagtcatgggccattaccaggataccagtttccattatggattggattgggagaaggaagctatcaatgatcttatcgaaaaggcggtatgtgaagctgacaagaatggggctaaagttgtaagccttggactcctgaatcaggcacataccctgaataaaagtggagaacaatatctgctgaaatacccaaagttgggagcacgaattgtcgatggaaccagcttagctgctgcagtggttgtcaacagtatcccccaaggcacagaccaagtaattcttgcaggaaatgtttccaaggtggcgcgtgctgtagcgcaagcattatgcaagaaaaatatcaaagtcacgatgacaaacaagcaagattatcatttactcaagccagaaataccagaaactgtagctgacaatctttcgttttcgaaaacaggcaccgcaaaggtttggttaattggtgatggtctagattctgctgaacaattcagagcacagaaaggaactctgtttatcccatactcacaatttcctccaaagatggtacgcaaggacagctgcagctactcgacaactcctgcaattggctgtaccaaaaacgctgcagaatgtgcattcatgcgagaattggctgccaaggagggttatgagcgcatggcgaatcgcgggaattcttcatgcgttggagggatggaatgagcatgaatgtggtgacaaggtgcttgatatggacaaagtttggtctgctgcaattatgcatgggttctgcccagttgctcaaggttgatgattcagttgcaaagtatcagaataagttttagctggattatgctatgtggtcaccgtatcagaaagagagatgttctgttggcaagaagagatatagtatctgagtaatttcatctgccatggtttttaaaacattgttcatcatctcctttgaacaaagactggccatggctactttctgtataagtatctgtcctttttagtccatagtgtaattcagcaacaaaacactcttggcattgttatgcagtctcatgaatgtttttccagcatacggaattacggatc

SEQ ID NO: 386121 - DNA, 1206 bp, Oryza sativa
tattttgaatctctagcttacacactagtttttgttctacgggggcgtctaccttggcaaggttatcagggtgaaaacaagggtttccttgtgtgcaaaaagaaaatggctacgtctccagaatcattgagctgcttttgcccacaaccctttagggagtttgtagagtatgtggtcaacttgaagattgatgaacatcctaacatatgcaaagtgtatattccttttcgatactgcggtgggcccaaatgcccatatcaggccaattaacaccgatggtgctcagaagcttatacatctagttggccaaaagagaggtcgcttattgattggaagagacagatgaacatccaaagaagaagatcaggatggttcttcctgcaacacagtggattagtgtttataatgccagacggcctatgaaacataggtatcactacaacgttgcagattcaaggcttgtacaacacatgggattaactcatcactcacttagctaattaaatcttcgaacatgtcggacaagtgcggcaactgcgactgtgctgacaagagccagtgcgtgtaagtacttaattactagctgcctcctcgatctagatcagtcaataattattttgtttcgatcttaacatgttgatttctttgaattttgcgaaacactgatcggtttgattcgattgacgtggtgattaatttgcaggaagaaaggtacccagctatggcgttcgtcatagttgaaaagccgagaagaaagccacttcgaggaaggttcgccgcccggcgagggaggaaccggcgggcttgcaagtgcgggcaaccagctgggctccctgcaccgacttgcaagtgcgggcaaagtgaagtccacgaagcccaaccgaacatctctgccgtccggcgatgtcatcctatccttaattatgttccacatataataaaccaaacccatattgaagtgtggtttgtgtgtgtgctgatttatttgctggaattaaaccccggggggttatcgattaaatttaagcagcttggtcgctttcgggcggactatggcgtgtatcaacggtatgaaatttgtgtggatgtggatggtaccccgtggctattctcagtgaaatttaatcaatcgcgtatctcgccgtgggtttgcctaagtaaaaaggtctatccatactcaatcgaacttcaacaatttcttggtct

SEQ ID NO: 386122 - DNA, 1763 bp, Oryza sativa
  unsure (1)..(1763): unsure at all n locations
atcgcatcgccggcaacaagtactgcttgctgcggcgatccacacatggaggagaagccgcagcacggcagcttgggcggcttggtggccggcgtgagggaggagtacgagagcgggaggaccaaggagctggagtggaggaaggcgcagctcgggggcctcatcaggatgatcacggaggaggaggacgccatcttcgacgcgctccacgacgacctcggcaagcaccgcgtcgagtccttccgagacgagcttggggttcttgccaagtccgtcaggaacacgctgcaaaacctcaagaaatgggcttcgcccgagaaggttgatgtgccgcttatttcatttccatgcaacgctcgggtcgtgccggaaccaatcggggttgtgctcattttctcatgctggaatctcccaataggcttagctctagagccactctccggggccatagcggccggcaacgccgttgttctgaagccctccgagtttgcaccgtcaaccgccgcgttcctcgccgccaacataccgaagtatctggacgccaaggccgtgaaggtcgtacagggcggggcggagttaggagaggagctcatgagcacagatggacaagtccttttcaccgggaatgctcgtgtagggcgcatcattatgacgaaagcagcgaaacacctgacgccggtcgcgcttgagcttggctcgaaatgcccgtgcatcgttgactgccttgacagtaagagggagtgtcaggtcgccgtgaatcggataatcggagcgaaatggtctacttgtgcaggacaagcttgcgttgccatcgattacatacttgtcgaggaacagtttgcaccattcctgattgaactgcttaaatctacactcaagaggttctttaccgaaccagagtacatggcgcgcatcctgaacgagaagcatttccataggttgacaaaccttatagaggatgatcaagtgaaatcctccattgtgcacggcggcaacgctgaccccaagacactgtggatcgagcccaccatcgtgctgaatccaccgctcgactccgacatcatgatggaggagatattcgggcctctgctcccaatcataacggtaaagaagacagaggattgcatcgcgttcttgaaatcgaagcccaaaccgcttgccatctacgccttcaccaacaacgagaagttaaaacagcggatcgtcgcagaaacgtcctccgggagcgtcttgttcaacgacgcgattgtgcagtacgggctggacagcgtcccgttcggcgggatcggggagagcgggttcgggcagtaccacggcaagtacacgttcgagctgttcagccacaggaaggcggtggtcaggaggagcctcctggtcgagttcatgttcagatacccgccttgggacgagtacaagatggggatgttgcgccgcgtcttcaggttcgactacgtctcgctcgtgcttgcgctgctcgccttttggctgctcggcataaggcgatgaaggatcgatcaatcgtctgcagtgttggttcataaaatgtgcgatcgtcgtgccatgcggccaatgcacatgccggggacactattttatgtgatatttatgtatttatttccaagaaacgtgcttgcagttactaaataaactcaaaaaatataactacctgttagtgcattgcaaattgtatcaaacagtttgatcatccaatacattccgattcatgtctgtcnnnnnnnnnnnnnnnnnnnnnnnnnnnnnnn

SEQ ID NO: 386123 - DNA, 645 bp, Oryza sativa
  unsure (1)..(645): unsure at all n locations
ccgggtgaccattcggcacgagctagggttttattactccgctctgcccgcctcctccgcttcgcacaccccgccgcgccggagaatcgtcgttgctggagagcgctcttcaacaaccggtcgccgacgaaggcttgggaatcaagaaggtgggaagccggcatggactccttctcgtcgtcgtccgggtcgccccccaatacggaggcgctcatggaccagatcaaggcgcagctcgctcaggcctacgcccaggagttccttgagactgttggaaacaagtgctttgccaagtgcgtgacaaagccaggatcaagcttgagcgggagcgagagcagttgcatatcacgctgtgttgatcgttacattgaggcaactggtattgtcagccgagctctgttcagttccacacgctgagcgacgatgttgtagccttcagttgctgcttaaatcagaattggggaaaaatgtttttcctagactcgttatttttgcctttcttatctgtgagaaagaaaaccacccttatttttatttanttggcactatttncttaaaaaaaaaaagggggggncggtacccattcccccnatantgagtcctattanattccctggggcgtcctttttcaacgtcttgantggg

SEQ ID NO: 386124 - DNA, 458 bp, Oryza sativa
ctcttcctccaaaaccctagccttcctcctcctctcccggcggcggcggcggcgatggacaagagcatgctcggcgacctcgacggtctcccggaggaggacaagatgcgcatggcggccatggtcgaccagctccagatccgcgatagtttgagaatgtacaactccctcgtggaacgatgcttcacagactgcgtggacactttccgccggaagaccctcgacaagcaagaggaatcctgcgtccgccgctgcgctgagaagttcctgaagcactccatgagggttggcatgagatttgctgagcttaaccagggtgttgccacaactgactaatcaattgggtttggtttctaacgttggcaattttgtcagcataaaatctgtaatccttaaatatttgagtacttgaggatacgagagacataatgtttttcctcttaaaccgatgggcgact

SEQ ID NO: 386125 - DNA, 1193 bp, Oryza sativa
gaagaagctagtttcctgcggccgacctcttgcttctcactttttgagagcaagaagacatggggaggggcaggattgagatcaagaggatcgagaacacgacaagccgccaggtgaccttctgcaagcgccgcaacgggcttctcaagaaggcgtatgagctctccgtcctctgcgatgccgaggtggctctcatcgtcttctccagccgtggccgcctctacgagtactccaacaacaacaatgtgaaggctacaattgacaggtacaagaaggcgcatgcttgtggctcaacttctggtgcacctctcatagaggtcaatgctcagcaatactaccagcaggagtctgccaaactgcgccaccagattcagatgctgcaaaacaccaacaagcacctggttggcgataatgtgagcaacctgtcactgaaggagctgaagcaacttgaaagccgcctggagaaaggcattgcaaagatcagagccaggaagaatgaactgctggcttcagagatcaattacatggccaaaagggagattgagcttcagaacgacaacatggacctcagaaccaagattgctgaggaggagcagcagctgcagcaggtgacggtggcccggtcggccgccatggagctgcaggctgcggcggcggcgcagcagcagcagcagaatccgttcgcggtggcggcggcgcagttggacatgaagtgcttcttcccgttgaacctgttcgaggcggcggcgcaggtgcaggccgtggcggcgcagcgccagcagatcatccccaccgagctcaacctcggctaccaccaccacctcgccattcccggcgccaccgccgccgacgcgccgcctcctcacttctgaacctcatgaacttcattttgcaccggcctgctgccatggatatgatgatcagctcatcttctatatcttatgctgttatgcagacagacactgatgtggctatatatatagtatttgtgtgctgctgcattttgttaatcccttataaattgctacttaattatctcatggagaattggagagaccaaatgggcagagctagctagttagctgtgcccaattaagaagctaaatctatcagaagtgtgtactgatgagtgatgagtatttttcttcatttgggatcaaattaaactaagtaaaacatatatattgactaaa

SEQ ID NO: 386126 - DNA, 950 bp, Oryza sativa
aatcagcccacagctcaccgaagtgcattagctcaccacgactagctagagcactcattggtgtgcaaaatattactgtctgctcctctaaacatgtctaggtctgtggagcctcttgttgtagggcgcgtgattggggaagttcttgatacctttaacccatgcatgaagatgatagtgacctataactccaacaagcttgtatttaatggtcatgagctctacccatcagcagttgtgtctaaaccaagagttgaggtccaagggggtgacctgcgatctttcttcacattggttatgacagacccagatgtgccaggaccaagtgatccttatctaagggagcaccttcattggattgttactgatatacctgggacaacggatgcttcttttgggcgcgaggtcataagctatgagagtccaaagccgaacattggcatccataggttcatttttgtgctcttcaagcagaagcgcaggcaaactgtaattgtgccatccttcagggaccatttcaacacccgccggttcgccgaggagaatgatcttggccttcctgtggctgctgtctacttcaatgcccagagagagactgcagccaggaggcgctgagaaatgcagctccaattgtcccaaaattacgactctctgaaatcaaaccttttctgccatattactttctcatgaatcaacgttcttctgctacatcagcagccagtatatctgcgaataaaccagatgcattttgcagcatgtattagtattagatttctttccgtatcaagaacatattagtggattattttgtaagcagtaagattgatagccatgttggcaaattccagtgcactaatatgtaaaccacgttattattaatgtttttaagtcatgtataagccaattcatgctggtggacaaacccaactggcagaaagggctttttatct

SEQ ID NO: 386127 - DNA, 643 bp, Oryza sativa
  unsure (1)..(643): unsure at all n locations
atgcttgcatgtatttgtcctaatatgcatctttntggcatttgaattgcaggncgggaaatcataagctatgagagcccaaagcccagcattggtatccacaggttcgtttttgtgctcttcaagcagaagcgtaggcaggctgtagttgtgccatcctctagggatcatttcaatacacgccagtttgctgaggagaacgaacttggccttcctgtcgctgctgtctacttcaatgctcagagagagactgctgccgggcggcgcgttaaaattccagctgtcattatccccgctgtgataattaaaaaccatccaatagtttctcctgtcgtctacattatctgccacatcactagattgtggatcaaaggcttcatcaattacgtcaatttgcctcaaagaaaatcaagtgcattcacatgcaaatattagcaatctataactgatacaggggctagctggcaaaaaaagctttatccaccaaatgcactttctggctccacaagatgtgcacttttgttgacacgcgatctgccgcttcacctggctcgccgtggaagtcgtcccgggccggcggagacgatcaccgtgtggtcatctacaggggatnantncncccgcgggcggcggcgtgctcgcc

SEQ ID NO: 386128 - DNA, 2491 bp, Oryza sativa
gcggctgagggtggcggagggcgggggggacccgtggctgcgcacgaaaaacggccacgtggggcgccaggtctgggagttcgaccccgccgcgggcgaccccgacgagctcgccgccgtcgaggccgcccgccgcggtttcgccgcccgccgccacgagctcaagcacagctccgacctcctcatgcgcatgcagtttgctaaagcaaatcctcttaagctggacattccagctatcaagctagaggagcatgaagctgttacaggcgaagctgtattatcctctctaaaaagggcaattgctcgttattctacttttcaagcacatgatggacactggcctggggattatggtggtcccatgttccttatgccaggcttgattataacattatatgtgagcggagcgctgaacactgctttgtcatctgaacatcagaaggagatacggcggtatctctacaatcatcagaatgaagatggaggatggggtttgcacattgagggccacagcaccatgtttggctcagcgttgacatatgtttctttgagattgcttggggaggggccagatagcggcgatggagctatggagaaaggacgaaaatggattttagaccatgggggagcaacttatattacatcatggggcaagttttggctttcggtgcttggtgtatttgactggtctggcaacaacccagtgccaccagaaatatggttgttgccatatttcctgccgattcatccagggcgaatgtggtgtcattgccggatggtttatttgcctatgtgttacatttatggaaagaggtttgtgggcccagttacaccaattatattggaattaagaaaggaactctacgaagtaccctacaatgaagttgattgggacaaggctcgcaatctatgtgctaaggaagatctgtactatccacatccattcgtgcaggatgtattatgggccactctccacaaatttgttgaaccagctatgttgcgttggcctgggaacaaattgagggagaaagctttggacactgtcatgcagcatattcattatgaagatgagaacacccgatatatttgcattggtccagtaaacaaggtattaaatatgcttgcttgctggattgaagatccaaactcagaggcattcaaactccacattccaagagtccacgattacctatggattgcagaagatggcatgaaaatgcagggttataatggaagccagctgtgggacacagctttcacagttcaagctatagtggctactggcctcattgaagaatttggtcctactcttaaactagcacatggctacataaagaaaacgcaggttatcgatgactgccctggagatcttagtcagtggtaccgccacatatctaaaggtgcatggcccttttctactgctgatcatggttggcctatatcagattgcactgcagaaggacttaaggcggcattattgctatcgaagatttctccagatattgttggcgaagcagtggaagttaatagactgtatgattctgtcaattgtttgatgtcatacatgaatgataatggtggatttgcaacatatgaactcacaaggtcttatgcctggctggagcttatcaatcctgctgagacctttggggacattgtgattgattatccttatgtggaatgcacttcagcagcaattcaggccctgacagcatttaaaaagctctaccctggacaccgcaagagtgaaatagacaactgtataagcaaagctgctagctttattgagggtattcaaaaaagcgatggttcatggtatggttcttgggctgtttgttttacctatggcacatggtttggtgtaaagggattagttgctgctggtaggacattcaaaaacagtcctgcaatcagaaaggcatgtgactttttgttgtcaaaagagcttccttctggaggctggggagaaagctatttgtcatcccaagatcaggtttataccaatctcgaagggaagcgacctcatgcggtgaacactggttgggccatgctagccctaatcgatgcagggcaggctgagagagatccaattcctttgcatcgagcagcgaaggttttgatcaacttacaatcggaagatggtgaatttccccagcaagagatcattggagtcttcaacaaaaactgcatgatcagctactccgagtatagaaacatcttccctatttgggcccttggggagtaccgtcgccgcgtcttggccgcagacaagtagttcagcacgagcagagcagcagcaccaacaatgtgcatgtatttatacgtgaaataatgtagctatgtttcagttgtaataatgtggctatatgtattctcccgttagtgatgccacgcgagcgtagtcaaatagaaacgcattttgacacaagttcgagatgaatggattcctgaatcgaatgtttgtgttcagataaaaaaaaaaaaaaaaaaa

SEQ ID NO: 386129 - DNA, 1326 bp, Oryza sativa
  unsure (1)..(1326): unsure at all n locations
caaatagcccaactcgtgatcgcgccgccgccgtgctctccaccggagagagcggcggaggagagcaagtggggataggggccggtcggggttgcgacgggcgggagcgggaggaggcgcacgctgcctgaatgccggcgccgtcgacgacctcgccggtgattggttcgcgctccggcgatcgtcgagggccgcccgggcaggcggaggagcggaggaggcaaagcgagtggccgcgagacctccgcttccatcgcgcggctcgcagtcgcaaaccctaccaaatttgctccagctagaaaggctaagatcagaacagagcatctccgcgcctccacagcacaccctggattcgcaattattgggggcaactccactataaaaagcgaaccatccacaagaagtaagaacacaccaagaaaggaggctcacaacaaggacaagacaggaactgaaagccctagtactaagaacagcaaccacctctgaaagctttacaagttcgcaggggcttaactgcgaatgaacatccagaggaagccaggagactggaactgcaaatcgtgccagcatctcaacttcagccgccgggactactgccagcgctgccataccccacgccaggacctgccgcttggcgatggttatgtcccaggtggtgtgctgacctccctggacattcgcccgggcgactggtactgcaactgcggctatcacaactttgctagccgagcaagctgcttcaaatgtggcgccattgtgaaggaccttccagcaggccaaggtggtggtgttgccaacggtgactttgcccgtgccctcgacagcagcgcagttcgtgctgggtggaaggcgggtgactggatttgcacaaggcctggttgcaacgtccacaactttgcaagtaggattgagtgctataggtgcaatgcacctagggaagcaggtaatgtgaagtaagaaaaggactgacgcgaccaaagatcgtgagacgtgacgagctggccgaggatgaataaagtgactgctgtcagttgtcacattcacaggctgcgatccagaaactatggatgggactatgtagtaacgtgctgatatattattgctaagtgttactactgcatggttgcaagggtggtagaagtaccttagcttccaagatcgttgtaatgtgtgagtttaattttggcgttttaagtaataagtctagtgattgcaggattgtacggggtaatgtacttgcattatccattataatcttaagcatccaatataattatgcaaaaaaaaaaaacttaaaaaaaaaaaaaaaaannnnnnnnnnnn

SEQ ID NO: 386130 - DNA, 2196 bp, Oryza sativa
  unsure (1)..(2196): unsure at all n locations
ccgacctcgaggtcgccgacgacccggatctcgtcgccctccgctccatccgcatccgcgtgcccaagcgcaagatgcctctccccgtcgagagccacaagaagaacacagtggaaatggagttcttcactgagtatggagaagcaagccagtaccagatccaggaagtcattggcaaaggaagttatggagtagttgctgctgcagtagatacccgcacgggtgagcgggttgcgatcaagaagatcaatgatgtgtttgagcatgtatcagacgctacgcgcatattgcgtgagatcaagctccttcgtctgctccgtcacccagacatagttgagatcaaacacattatgcttcccccttctcgaagggagttccaagatatttatgttgtttttgagctcatggaatcagatctccatcaagtcatcagagcgaacgatgacctcaccccggagcactaccagtttttcctgtaccaacttctccgtgctctcaagtacatccatgcagctaatgtatttcatcgcgatctaaagcccaagaatatactggcaaactcagactgcaaattgaaaatatgtgatttcggacttgcccgagcatcattcaatgatgccccttcagcaatattttggacggattatgttgcaacgaggtggtaccgagcacctgaattatgtggctcatttttctccaaatacactcctgcaattgatatttggagtattgggtgcatatttgctgaacttctcactgggagaccactatttcctgggaagaatgttgtgcaccaattagatattataacagatcttcttggaactccatcatcagaaaccttatccaggattcgaaatgagaaggccaggagatacttgagcaccatgcggaaaaaacatgctgtccccttctctcagaagttccgcaatactgaccccttggctcttcgtctgctagagcgtttactggcatttgatcctaaagatcggtcttcagctgaagaagctttggctgatccgtacttcgcaagtcttgctaatgtggaacgtgagccctcaagacatccaatctcaaaacttgagtttgaattcgagagacggaagctgacaaaagatgatgttagagaattaatttatcgagagattttggagtatcacccacagatgctgcaagagtatatgaaaggtggagagcagattagcttcctctatccaagtggggttgatcgcttcaaacgacagtttgcacaccttgaggagaactacagcaaaggagaaagaggttctccactgcagaggaagcatgcttctttaccgagggagagagtaggtgtatcaaaggatggttataaccaacaaaacaccaatgaccaagagaggagtgcagattccgttgcccgcactacagtaagccctccaatgtcacaagatgcacaacaacatggatctgctggccaaaatggtgtgacatccacagacttgagttcgaggagctatctgaagagtgcaagcattagtgcttccaagtgtgtcgctgtcaaggacaataaagaaccagaggatgattacatctctgaagaaatggaagggtcggtcgatggattgtctgaacaagtctccaggatgcactcctagtgcacaacgatgacgatgatcagtgcaagattctgtgaggcgcaccagatgctgataatttccaagcagaatgctgcactgcaagtttggactttggacaatgcaagtatgcaacagccagcccgagatgattggcatcttcttatgctcatccatgttcacatattcttcttgccattgtgctgtctgtcactacaggacccctgcatggattaatgtattatccctctgatgtaacactagattagtccatctgtccatggaggaatgaatagcaagcagccagcttgtgcatcatgtgggcatgttcattttccagtgagatctagtcatatccatgctttttttgtaatggtatatgaaacagtttatcagtgagactgtggtccattcctctttgaagaactgctgagacagtgatccattcctctttgaagaactgttcattttcggtacattaagcctagtaaagttcagatgtttgagttcggtgcttnnnnnnnnnnnnnnnnnnnnnnnnnnnnnnnnnnnnnnnnnnnnnnnnnnnnnnnnnnnnnnn

SEQ ID NO: 386131 - DNA, 1030 bp, Oryza sativa
cggaattggttcgggagcaggtcaagcaggaggcatggcggcggcggcggcggcgaagatagcgccgtcgatgctctcgtcggacttcgccaacctcgccgcggaggccgaccgcatggtccgcctcggcgccgactggctccacatggacatcatggacgggcactttgttcctaatcttactattggagctccagtgattcagagcttgaggaagcacaccaaggcatatttggactgccatcttatggtgaccaatccttcggattatgtagaaccattagcaaaagctggtgcctcaggtttcacattccatatagaagtatccagagacaattggcaagaactcatccaaagtatcaaagcaaagggtatgcgaccgggtgtatcattgaggccaggcactcctgtggaggaagtttttcccctggtggaggcagaaaatcctgttgaattggttcttgttatgacagttgaacctggctttggtggtcagaagtttatgccagaaatgatggaaaaggtgcgtgccctgagaaagaagtacccatcccttgacatcgaggttgatggtggtctgggtccttccaccattgatgtggctgcatctgctggggctaactgcattgtcgctggaagctcaatatttggagcagctgaaccaggagaggtcatatcggcactaaggaagagcgttgaaggatctcagaacaaaagctgatctgtggttttgtactcggtttctattgtaaactagggccactctgcacgtcttctttacagagatccccagattgcactacgtgagctgttgagagataataaaatgtgcccttggcagttggcactgattccagtgttactaaatgttaaaactcttgggtccgtttttgatggacaagtcacaagtaaagcttaatgatactttgcatgatttgcatcctgccctgaatttgtcagtctttgtcttcatatgtggtcgctgggtgtttcggtttggatccgatcctaacacgaggtttacatgaat

SEQ ID NO: 386132 - DNA, 1708 bp, Oryza sativa
tgtaatcaagcaaacaaagaaagaaaagcatcacaaatctcacgcactgtctctcgttcgcgcaaagcacgctgcttttctccgctttgcgagcaccatagcctagcccaccatgtgcggcggcgccatcctctccgacctcatcccgccgccgcggcgggtcaccgccggcgacctctggctggagaagaccaagaagcagcagcagcagaagaagaagaacaagggcgcgaggaggctgccactgcgccaagaggaggaggatgatttcgaggccgacttcgaggagttcgaggtggattccggcgagtgggaggtggagtccgacgccgacgaggccaagccgctcgccgcgccccggagcggcttcgctaaaggtggattgaaaaacactactgttgctggtgctgatgggcctgcagcaaggtctgctaaaaggaagagaaagaaccaattcaggggtatccgccagcggccatggggcaaatgggctgcggaaatcagagatcctcgcaaaggtgtccgcgtctggcttggcaccttcaactctcctgaggaagctgccagagcttatgatgctgaagcacgaaggattcgaggcaagaaggccaaggtcaatttcccagatggggctccagtggcttctcagaggagtcatgctgagccctcctccatgaacatgcctgctttcagcatcgaagagaagccggccgtcatgtcagcaggcaacaaaaccatgtacaacacaaatgcttatgcctaccctgctgttgagtacaccttacaggagccatttgtgcagattcagaatgtctcatttgttcctgcaatgaacgcgattgaggatactttcgtgaacctgtcctctgatcaagggagcaactcctttggttgctcggactttagccaggagaatgatatcaagacccctgacataacttccatgcttgcaccgaccatgacaggtgttgatgactccgcattcctccagaacaatgccagtgatgcaatggtacctcctgtgatggggaatgctagcattgatcttgctgacctggagccgtacatgaaatttctgatcgatggtggttcggatgagtcgattgacacccttctgagctctgatggatctcaggatgtggccagtagcatggacctttggagcttcgatgacatgcccgtgtcggccgagttctactgaggggtttggggtgtagcaactggtgcctgtatatataaggacaaatggaataaacattctggacatccaagaagcggcatgtgtctgtcgggcgcttctagttgcgctatatagctatgttagtatgttagtatgtgctgtgtctagcttagatgctgaagtctcaagtactatttggcagtgaaactatctatctgtaactgctatatgaggctggaacaagttacttagcttctaccttatctgtacttgctatagtggctgtgaaccttgtggatctgaactctgaagccaatgtttactatataatgtggttggttttataaactctagttgatttggacccctgtcaatggtcatgctatggctggggattagaaccattgatgatcatatttgactagaaacgctgcttccaaaatatcccataaagtaaagctgaacttgtactaatgttcttgcacaagttgcaataatgttgccttatggaaaaacagtttccggacc

SEQ ID NO: 386133 - DNA, 948 bp, Oryza sativa
tcctcgccgcgcggtggaattcgaaattcgcccaaaacccccgcgtcgcccgcgaaaatttccctccaaaacctccgcgcgctcctcccaaaccgacataaattctacagcgaggaagggggagagagagggagagagagcggacgcgaggcagccgaaccaccaacgcgagcgagagagggagagggagaggaggaggaggagcaatggcggggaagggagggaaggggctgctcgcggcgaagacgacggcggcgaaggccgccgccgacaaggacaaggaccgcaagaaggcgcccctctccccctcctcccgcgccgggatccagttcccggtggggcgtatccacaggcagctgaaggggagggtgtcggcgaacggccccgtgggggcgacggcggcggtgtacacggcggcgatcctcgagtacctgacgggggaggtcctggagctcgccggcaacgccagcaaggacctcaaggtgaagcgcatcaccccgcgccacctgcagctcgccatccgcggggacgaggagctcgacaccctcatcaagggcaccatagccggcggcggcgtcatcccgcacatccacaagtccctcatcaacaagaccgccaaggagtaggagaggcagcggcggctatgtgttcttggaagttttctatgacctctctgctaggggattagtgagaaaaaaatcccagttatcttttcactagtagtcttaatcatttaggacttgttgttatggtgattacctgaattaggtgttcctgaatctgtgtaatggctggctaaacctttggtaatttggtggtagggctgaagacttgacttgcagcagcttggtgtagttgtgatgtgaaactgcttatatttttctctctgttgggtgactagctaatgcttggttgttacttgttgatgacaaaaaaaaaaaaaaaaaa

SEQ ID NO: 386134 - DNA, 3400 bp, Oryza sativa
cggaatgtagcagcacatctgatcaggcctcatcatgtgagtctatggagaaaagggctaacggttctccaagaaatgaacctgaccggaagccattgaggccactatctccttggatcacagacatattgcttgctgcacctctgggtattagaagtgactattttagatggtgtggtggagtcatgggaaaatacgcagctggtggagaattgaagcctccaacaactgcttacagccgaggatctgggaagcacccacaacttatgccatccacgcccagatgggctgttgccaatggagctggagttatactaagtgtctgtgatgaggaagtagctcgttatgagacagcaaatttgactgcggcagctgttcctgcacttctattacctccaccgaccacaccattggacgaacatttggttgcggggctccctcctcttgaaccatatgctcgcttgtttcatagatactatgcaattgctactccaagtgctacccaaaggttgctttttggtcttctcgaggcaccaccatcatgggccccagatgcacttgatgcagcagtacagcttgttgaactccttagagcagcggaagattacgattctggcatgcggcttccaaagaactggatgcatcttcatttcctgcgtgctattggaactgcaatgtcaatgagagctggtatcgctgctgatacgtctgctgctttacttttccgaatactctcccaaccgacattactttttcctccactgagacatgccgaaggagttgaactccatcatgagccactaggtggctatgtatcatcgtacaaaaggcagctggaagttcctgcatctgaagccactattgatgccactgcgcaaggcattgcttccatgctatgtgctcatggtcccgatgttgagtggagaatatgtaccatctgggaggctgcgtatggtttgctacccttgagttcatcagcagttgatttgcctgaaattgttgtagctgctccacttcagccacctactttgtcatggagcctatacttgccattgttgaaagtatttgagtatttacctcgtgggagtccatctgaagcatgccttatgagaatttttgtggcaacagttgaagctatactgagaagaacttttccatcagaaacctctgaacaatccaggaaaccaagaagtcaatctaagaaccttgctgttgctgaactccgaacaatgatacattcactctttgtggagtcctgtgcttcaatggaccttgcgtccagattactatttgtagtattaactgtttgcgtcagtcatcaagctttgcctgggggaagtaaaaggccaactggtagtgataatcattcctctgaggaggtcacaaatgattcgagattaaccaatggaagaaacagatgtaagaagagacaaggaccagttgctacattcgactcatacgttctagcagccgtttgtgccttatcttgtgagctccagctgttcccttttatttccaagaatgggaaccattcaaatctgaaggactccataaagatagtcatacctggaaaaaccactggtatcagtaacgagctacacaatagcattagctcagcgattcttcatactcgtagaatacttggcatcttggaagctctgttctccttgaagccatcatctgttggtacttcatggagttatagttcaaatgagattgttgcagcagctatggttgctgctcatgtttctgagttatttcgtcgatccaggccatgcttaaatgcactgtctgcgctgaagcaatgcaagtgggatgctgagatttctaccagggcatcatccctttaccatttgattgacttgcatggtaaaacagtgacctccattgtgaacaaagctgagcctctagaagctcacctgacccttacaccagtaaaaaaggatgaacctcccattgaggaaaagaacattaactcatcagatggtggtgcattggaaaaaaaggatgcttcaagatcacacaggaaaaatggttttgcaagaccactcttgaaatgtgcagaagatgttatactaaatggtgatgtcgcaagtacttctgggaaagccattgcaagtttacaggtggaagcttctgatttggcaaacttcctcaccatggaccgaaatgggggttacagaggttctcaaactctcctaagatctgtactgtcagagaagcaggagctatgcttctctgttgtctcattgctctggcagaagctcattgcatctcccgaaatgcagatgtctgcagaaagtacatcagctcatcagggttggagaaaggttgtggatgcgctttgtgacattgtttcagcctcaccgaccaaggcttcagctgctatcgttctgcaggccgagaaggacttgcagccctggattgctcgagatgatgagcaaggtcagaagatgtggagagtcaaccagcgaatagttaagctgatagcagagcttatgaggaaccacgatagcccagaagcattggtgatccttgctagtgcttcagatcttcttcttcgagcaactgatggaatgcttgttgatggtgaagcttgtactttaccacaattagagctattggaagtaaccgccagagcagtccatctcatcgtcgaatggggagattcaggtgtatccgtcgctgatggcctctccaatctgctgaagtgccgtctatcaaccaccatccgctgtctttcgcaccccagcgcgcatgtccgtgcactcagcatgtccgtccttcgcgacatcttgaacagcggacaaataaactccagtaagctcatccaaggggaacaccggaatggcatccagagcccaacctaccagtgcttggcagcaagcatcatcaactggcaagccgatgtggagagatgcatagagtgggaagcccacagccgccgcgccaccgggctgacgctcgccttcctcaccgcggcggcgaaggagctcggctgcccactcacttgctgacaaggccacaccatgactgtcactgcaagcagctgctgtaggatcagcgagtaggaaaggatgacttgccggccagtttcctgagatgtgatttaagactgatattagctgatgttcccaagcatgatacggggcttgctcccaagatgtgatttttactttacttttggttaatgtgctaccgctgacattagatgttcaagcatatgaaaactgcttgtgctgtaacttgtatgtctgtaacgtaaaaatctttccatatggtaaccggggaagcagaggtatatccttttctgctgttgtatctatttccagtttcctgctgaacttgcaaatgaatattcagcaatttccgttttgctcgtaaaaaaaaaaaaaaaaaa

SEQ ID NO: 386135 - DNA, 555 bp, Oryza sativa
ccacgcgtacgcccacgcgttcgcccacgcgttcgtccacgcgttcgcccacgcgtccgcccacgcgtccgggatgcgctttgtgacattgttcctccccccccgcccccggcttcagctgctatcgttctgcaggtcaagatattgggattggtatatctacatacttgttatcatatttaaaagcttcatattgtatgtacctttgaaagacaaagttccatactgtagcttcttttgttctcatttcttggtttcaaagcatcagcatcattaccgatataaaatatacccatttcctcagtcatcttccccgactcttgtatctttcacaggccgagaaggacttgcagccctggattgctcgagatgatgagcaaggtcagaagatgtggagagtcaaccagcgaatagttaagctgatagcagagcttatgaggaacccccatagcccagaagcattggtgatccttgctagtgcttcagatcttcttcttcgagcaactgatggaatgcttgttgatggtgaagcttgtactttaccacaattagagc

SEQ ID NO: 386136 - DNA, 629 bp, Oryza sativa
  unsure (1)..(629): unsure at all n locations
ctttataccagggacaatgttgctgtgctgggtctgggagatttgtgcatgagcgtatgtatgatgagttcctggagaaggccaatgctagggctactaagcgtggggatggagagcccaacctaccagtgcttgggcagaagcatcatcaactggcaagccgatgtggagagatgcatagagtgggaagcccacagccgccgcgccaccgggctgacgcttcgcttccctcaccgaggcgggcgaaggagcatcggctgcccactcacttgctgtcaaggggcccacccatgacctgtcactgcaagcaggctgcctgtaaaggatcagccgcgagttagggaaagggttgaccctggccggtcccagtttcctctggaggtggtgatttttaggactcggctattcacgcctgatgggttcccaagcgccatgatacggggcccttgctcccccaagatgtgatttttactttnnacttttggttannattgtgcctaccgctgcacattagagtgttcaagccatatgaaaactgcttgtgctgtaacttgtatgtctgtaacgtaaaaatctttccatatggtaaccggggaagcagaggtatatccttttctgctgttgtatct

SEQ ID NO: 386137 - DNA, 601 bp, Oryza sativa
  unsure (1)..(601): unsure at all n locations
cgaccacgcgtccgcccacgcgtccgcccacgcgtccgcccacgcgtccggctgagcctctagaagctcacctgacccttacaccagtaaaaaaggatgaacctcccattgaggaaaagaacattaactcatcagatggtggtgcattggaaaaaaaggatgcttcaagatcacacaggaaaaatggttttgcaagaccactcttgaaatgtgcagaagatgttatactaaatggtgatgtcgcaagtacttctgggaaagccattgcaagtttacaggtggaagcttctgatttggcaaacttcctcaccatggaccgaaatgggggttacagaggttctcaaactctcctaagatctgtactgtcagagaagcaggagctatgcttctctgttggctcattgctctggcagaagctcattgcatctcccgaaatgcagatgtctgcagaaagtacatcagctcatcagggttggagaaaggttgtggatgcgctttgtgacgttgtttcagcctcaccgaccaaagcttcagctgctatcgttctgcaagtcaagatattgatattgtatacttacatactngttatcatatttaaaag

SEQ ID NO: 386138 - DNA, 596 bp, Oryza sativa
  unsure (1)..(596): unsure at all n locations
tgactattttagatggtgtggtggagtcatgggaaaatacgcagctggtggagaattgaagcctccaacaactgcttacagccgaggatctgggaagcacccacaacttatgccatccacgnccagatgggctgttgccaatggagctggagttatactaagtgtctgtgatgaggaagtagctcgttatgagacagcaaatttgacttgcagccctggattgctcgagatgatgagcaaggtcagaagatgtggagagtcaaccagcgaatagttaagctgatagcagagcttatgaggaaccacgatagcccagaagcattggtgatccttgctagtgcttcagatcttcttcttcgagcaactgatggaatgctttgttgatggtgaagcttgtactttaccacaattagagctattggaagtaaccgccagagcagtccatctcatcgtcgaatggggagattcaggtgtatccgtcgctgatggcctctccaattgctgaatgccgttataaccacatccgtgttttcgcacccacgccattcggcctagaagtcgtcttggacattgacgcgcaataactcatagtatca

SEQ ID NO: 386139 - DNA, 1301 bp, Oryza sativa
cccacgcgtccgcccacgcgtccgcccaactcggcgtcgcgccgcctcaaccgaagcaaggagcaaagcggggattcagaacgggaaggagaaggtccggttcgtccgctctcgagctcaagtgtcagttgaagtgttttgaaagtcatggcggagcatttggcttcaatatttgggactgagaaggatagggttaactgccccttttacttcaagattggggcttgccgtcatggggatcgttgctcccgtctgcacaacaggccaactgtgtcgccgacaattgtgcttgctaacatgtatcagcgccctgatatgatcacaccaggagtcgatgctcaaggccaacctattgatcctgaaaagatgcaggagcactttgaggatttctatgaggatatctatgaggagctgagcaagtttggtgaggttgagaccctcaatgtctgtgataaccttgctgaccacatgataggcaatgtgtatgtccagttcagggaggaagaacaggcagtcgctgcgcataatgcccttcaaggtcgcttctactcagggcgcccaataattgttgagtattcccctgtgactgatttccgtgaggcgacctgtaggcagtttgaggagaacagctgcaaccgtgggggctactgtaattttatgcatgtaaagcagattggcagggagctcaggaggaagctttatggggggcgatccaggaggagccatgggagaagccgcagcccaagcccacgccacaggaggggcaatcgtgaccgtgatgatttccgccgtgaacgtgatggttatcgtggtggtggtgatggttaccgtggcggcggcggtggcggtggtggtgacggttaccgcggcggtgatagttaccgtggtggtggtggtggtggacgcaggggtgggggcagcaggtatgacaggtatgatgatggaggaaggcgcaggcatggcagccccccaaggcgtgcaaggagcccagtcagggaaagcagcgaggaacgcagggcgaagattgaacagtggaaccgtgaacgggagtaaaagccttgaacgaaagcagtgatatctctatggatggccggttcatgccttcatggcaatcactatccgctggagtcgtggtgtgctgctatgttctaagtggatatttagtgtgtcgtttggtagtcatgcttggctgagtaacccttttaaatgcaggattctggattctatttacattgtgtttcgtttgacgtgtaaaccgccgtttgtttttaaatatgcaatattggtcttttgtcagtcta

SEQ ID NO: 386140 - DNA, 1520 bp, Oryza sativa
caccaccgaattcgtccgtactcctcctcctgcttcccctccggcgacggcggcgcagatctccggttggaagttagggtgttcatcttgacacaaaatcatgccgaaatcaaactgtaccgaagcgaaaataagatatggattagctctccttccaattgatttatcgttctgtcaatattgatccgaatacgaaaattttaagtgctgttattttgaaggtttcggaaccggaattcggaattgcagtagcagtggatgcctttataaatcaagttcttgtccttggcttcaaatactcgatgtgtttcttggctaatcctaatccctagctgcttgtgtgttgcgtgtgcaatttctgacccttttgtggtggtgtatatcaacagagaaatctctagctttttcagcggcgaagcgaatccatggccgagcacctcgcttccatctttggcacggagaaggaccgcgtgaactgccccttctacttcaagatcggcgcgtgccgccatggcgaccgatgctcccgcctgcacaacaagccgtcggtctcgccgacgctgctgctctccaacatgtacctgcgtccggacatgatcacccctggaattgatgctcagggcaaccccatcgaccctgagaagatccaggccgacttcgaggatttctacgaggacatctttgaggaactcagcaagtacggcgagatcgagagcctccacgtgtgtgacaacttcgccgaccacatgatcggcaatgtgtatgttcaattcagggaggaggatcaggccgccagagcgctgcaggcgctgacggggcggtactactccggccgtcctatcattgtcgagttctcgccggtgtccgatttccgggaggccacctgccggcaatatgaagagaacagctgcaaccgtggtgggtactgcaacttcatgcacgtcaaggagatcggcagagacctgaggaagaggttgtttgggcacctgcataggtcccggagaagccatagccatggccggagccgcagcccgagcccgtaccattaccggagggactatgatcggaggagctcatcgcggtccagggaccacgacgattactaccgtggaggtagccacgattactaccgtggaggtagccggaggagcagcgagaggcaccgcagcagctacgacagcgatggcagcaggcggcggcacaggtccaggactaggagtcctgtcagggatggtagcgaggagaggagagctcaaattgagcagtggaaccgtgaaagggaggctgcacaagtgtgatctctggattagttgctgtttgcaatggcccatgtttctcatcttgtactggtagccctagattaaattagcatcatatcttatcttaatgatctgagcttggatgtactcgagattttccttactgaacttgaattttctgtcagatgcatgtgttaactgaacctatttggtgttaaattatatttgtacagatggttgtgtgcaaaaaaaaaaaaaaaa

SEQ ID NO: 386141 - DNA, 2229 bp, Oryza sativa
ctcccatcccctcgtgccgctccccgctccctttcctcctaaacttcagcggcgacacccctcgcgagccgctcctcctcatcctcctccgccgccgccgccgcgtcccctcggtgcccccctctccgccggccgccgatccggccccgcgagttgtaggaatccttgataaggctgatggcttcgatggatgagcctctttatcccatcgctatactgatagatgagctcaaaaacgaagatattcaattgcgtctgaactccattaggaggctctccacaattgcacgagcacttggagaagaaagaacccggaaggagttaattccttttctcagtgaaaataatgacgatgaagatgaggtgcttcttgctatggctgaagaattgggcgtgttcattccttacgttgggggtgtagaacatgctcatgttttgctaccaccattggagacattgtgtacagtggaggaaacctgtgtccgagacaaggcagttgaatctctgtgccgtattggagcacagatgaaggaaagtgacattgtagactggttcgttccagtagtaaagaggctagcagctggtgagtggtttacagctcgagtatcgtcttgtggacttttccatatagcatatccaagtgctcctgatcaattgaaggcagaattgaggaccatttatggtcagctatgccaagatgacatgcctatggtccgaagggcagctgcatcaaatctcggaaagtttgcagccacagttgaacagaactatctaaagacagaagtcatgtcgatatttgatgatctaacccaagatgatcaagattccgtacgcttgttggcagttgaaggctgtgctgctcttgggaaattgttggaaccacaagattgtgtagcacatatccttccagttattgtcaatttctcccaggacaaatcatggcgagttcgttatatggttgccaatcaattgtatgagctctgcgaggcagttggtcctgaacattctagggagcagttggtgccggcatatgttcgtctccttcgtgacaatgaggcggaagtgcggatagcggctgcagggaaagttactaagttctgtaggattttaagtcctcagcttgcaattcagcatattcttccttgtgtcaaggaattgtcatcagattcatctcagcatgttcgttcagctttggcttcagttattatgggaatggccccggtcttgggaaaggaggctacaatcgaacaacttcttcctattttcctttctttgctcaaggatgaatttcctgatgttcggctcaatataatcagcaagctcgatcaagttaatcaggttattggaattgatttgctgtcacaatcactgttaccggcgatcgtagaacttgcagaggataggcactggagggttcggcttgcaataattgagtacattcctttattggctagtcaattaggcgttggatttttcgatgacaagctgggggcactttgcatgcaatggttggaagataaggtcttctcaatcagagatgctgctgcaaacaacttgaagcgcctagctgaggagtttggtccagaatgggcgatgcagcatataatccctcaggtgctggagaagataaacaacccgcattatctctaccgcatgaccatcctgcaagctatttcattgctggcccctgtcatgggtgccgaaatcacttgtcaacagctgctccctgttgtgattaattcctcaaaggacagagtgccaaacatcaaattcaatgttgcgaaggttctgcaggcacttataccgatccttgatcaatctgttgtggagaagaacgtgaaaccatgcctcgttgaactcagtgaggaccctgatgtggatgtaagatactatgcaaaccaggcccttcaggcatgcgatcaaatcatgatgtcaagctaactgtcttcctgtccagtatttagaacttgattctcttagtccaaattttggaatatttgtaatttgcactttagtttgaagagttcctttctagccccagtaacagaccaaacacttcccatgatgataatgtatggctccgacccctcgttctctgtgtttgatgttgatgatgttgtaattgagcaagatcggacacattattatgtttgtttacatggtagttttgggccttggtttcaaaaaaaaaaaaaaaaaaaaaaaaaaaaaaaaaaaaaaaagctcgtg

SEQ ID NO: 386142 - DNA, 1417 bp, Oryza sativa
ccacgcgtccggaagagagacaggggagaaaaccctaatctcaaggccgcggctgtgagcgctcctcccgtctctcccccaacccgccgccagccaccgagctcgccaccgtctccgttgcctcgccgtgctctaggttctcggatggaggccgaggcggcggcgaagagggcgcgggagagcggtgacgcggcggcggccggtgccggcgagcaggcgggtatctctgccgtcatccctggatggttctccgagattagccccatgtggcctggtgaggcacactcattgaaggtcgaaaaggtactattccaaggaaagtcggactaccaaaatgtgatggtgtttcagtcctccacgtacggcaaggtgcttgtgctggatggagtgattcaggtcactgagagggatgagtgtgcttaccaagagatgattacccacctccccctttgctctatcaaagatcccaagaaggtgttagttattggaggtggagatggtggtgttttgcgtgaagtttcacgacattcctcggtggagcaaattgacatatgtgaaattgataagatggtggtagatgtctccaaacaattttttcctcatctggctgttggatttgaagacccccgtgtgtcattacacattggagatggcgtggcctttttgaaaaatgctccagagggtacttatgatgcagttattgtggattcctctgatccaataggaccggctcaagagcttttcgagaagcctttcttccagtcagttgccagagctttgcgtcctggtggtgttgtatgtacccaggcagagagcatatggttgcatatgcatattattgaagatattgtagctaattgtcgccaagtttttaaaggctcagtgaattatgcttggacaacagtaccaacataccctagtggtgttattggttttatgctttgctccaccgaggggcctactgttgatttccagcatcctatttttaacattgaggataatgagttctcaacaaaatcgaaaggaccacttaagttctacaattccgagatccactcagcatcattttgtttgccgtcttttgcgaagagagtcattggatccaaggccaactagatcaaagatcactgagcccaaggccaactggactggaatccctccgacaagagatttggttgtagcagaaagagcaatgaccccttttttcccatttaaataaaaattggagatgtaaacggttatccaagtgcttttgaattttgtctcagtatgagaacgttttgtatttggtaactgttttcccgcatctcccttaccatttaccaaaatgagtattgctgtagttttcatctgaggtgcttcttgaattcttgcagtcagtctcattttcagctcgagtgaaacggtggtttctttg

SEQ ID NO: 386143 - DNA, 898 bp, Oryza sativa
  unsure (1)..(898): unsure at all n locations
cgacccacgcgttcgcccgtgttcaacttcatgttggtgacgctgtggatttcttgagaaatgcccctgaagggaaatatgatgctatcattgttgattcatctgacccaattgggccagctcaggagcttgtggagaagcccttttttcagacaattgctagagctctaaagcctgctggagttctatgcaatcaagctgagagtatgtggctgcacacacatctaattcaagatatgctctctatctgtcgtgaaacattcaagggagctgtgcattatgcctggacaagcgttcctacctatcctagtggtgtcattggttttttgctatgtgcgaaagaaggtccagcagtgaacttcctttctcctgtgaatccaattgagaaactggaaggagctatggaagctggaagggaaatcagattttacaattcagaggttcatcgggctgcttttgttctgccaacatttgtaaggagagaactggaatcacacaatacttgtgctgaaaaggataaatcagaaaccaagccagtcgcgaaaccaaagaagatgaaaataatgccgaatagtgccattccgactgcttcctagattcgggcggccatatgcgacaaccatgttcgacgtccttagctacagtatatgccaactataagaggagaatgtcgctgtaactcttctgtcttaagtatggtatgttatgcctgactgaataaaagggaggaacagatgagatgtgaaccaaaataatgttcttcctgatccgtgagcactgttgtagtgttgcctgttgtacaaatgtatattgtcacagcactgatgtgtttattatatggatgtggagtgaatcgcatggataatgtgcctttttatcccctnnnnnnnnnnnnnnn

SEQ ID NO: 386144 - DNA, 1720 bp, Oryza sativa
ttattccacccccttcccttctctcgtcctcctcctcctcctcctcgcccgtcgaggtcagctcagctcttcaaaataggtgggcggtgctctcgcctcccctccccgccggcttccgcctccagatccgcgccgcccgccgccgccgcgctcgctcgagcgggagctatagctgccgccttcgattcgacgctgcatgtactggcgagaggcgtagcgcgtggcgtgctctccccgacgcgcgcctcgcctcctccccgttcattacaagatggcgatgatggtggaccctcctaatggcatgggaaaccaagggaagcattactacacaatgtggcaaacgctatttgagattgacaccaagtatgtgccaatcaagcccatcggaagaggggcttatggaatagtttgctcctctataaaccgtgcaaccaacgaaaaagttgcaataaagaagatcaacaatgtctttgacaaccgtgtggatgcactgaggaccctaagggagctgaaactactgcgacacttgcgccatgaaaatgttattgccttgaaagatataatgatgccagtacacagaaggagtttcaaagatgtatacttggtttatgaactcatggacacagatctacaccagataattaaatcatctcaacctctttctaatgaccactgtcaatatttcctttttcagctactccgaggtctgaagtacctccattcagcagggatactccatcgagacctgaaaccagggaacctcctggttaatgcaaactgcgatctgaagatctgcgactttggtttggctcgcacaaacaacactaaaggccagtttatgactgaatatgtcgtgacccggtggtatagggctcctgagctgctgctctgctgcgacaattacggaacctccatagatgtctggtctgttggctgcatctttgctgagcttcttggccgcaagccaatatttccaggaactgagtgcctcaatcagctcaagctcatagtcaacgttctcggcaccatgagtgaagctgacattgagttcattgacaacccaaaggcccgcaagtatatcaagacccttccatacactcctggcatccccctcaccagtatgtacccgcaagcacatcctcttgccattgatctgttgcagaagatgctcgtctttgatccctccaaaaggattagtgtcactgaagctctggagcacccttacatgtctccactgtatgatccaagcgcaaaccctcctgttcaagtgcccatcgatctcgacatcgatgaaaatcttggcgtggatatgatccgggagatgatgtggcaggagatgctccactatcacccagaggttgttgcaggagtgaatatgtgacaggcaagaacgaacatgtgaaggcaacgtgctacactaagatcttcacatgttggttttttgtataaatcttattcgcgattgtcgcgcctatcaagcttaagctatggcgatgtcgcccaggtgacctcttatgtaaatatgtgcgaataagacagcattctggagttgttcttcctgtggacctctacttgtagtatatggactaatgtgttgtatgagtacgtgaagcagaattcggtattatcaaggcttgtaatgttagatgctcttatattacactatgaagtgtcaactttcaagtggccacgtttacacataaaaaaaaaaaaaaaaaaa

SEQ ID NO: 386145 - DNA, 1115 bp, Oryza sativa
ggcacgagctcgtgccgaattcggcacgagcacaatggacagtacagaatttgtaagttgttgatttgcgccatgagaaggcttctcccgctcgccggcgccacgctgctgatcgcggcggccggcggcgccagcgggcaacaagcgggtgttgggtcgatcatcacgcgggcgatgttcgagtcgatgctgaaccaccgtggggaccaaggttgccaaggcgccttctacacctacgacgcgttcatcaaggccgccggagatttccctagattcggcacgaccggcaacgacgaaacgcgccggcgcgagctcgccgctttctttggccagacctcccacgaaactacaggtggatgggcaactgctcctgatggaccctttgcttggggatactgccgggtgaacgaaatcacgccgtcggaaccgccctactacgggcgaagaccatacaccttactcataagtacaactaccagctaccggggacccttgggtctggaactggtgaacaaccccgacctggtgtcaaggaccccgtggtgggtgttcaggacgcccatttgtttttggatgacggcgcagtcacccaagccgttgtgccaggatgtaatcaccaaccagtggaccccttccggcgatgaccgtctccgggaggtccccgggtacggcatgcccaccaacatcatcaacggcggtgaagagtgcggcaagggttattccaccgacaacgccaaggaccgggtcggttactacaagaggtactgcgacatgttccgcgtaggatacggagataacatagcctgcagggaccagaagccctacggaggaggttaagcactggagacgatcgactgggagtacgtcgtcataagcggattctcctagtgctagtacagctgctggttgcttgctaatggctagcttagccttcgcgtacatacgtatatgtacgtgatactagtacgaataaagctagcagagagcgttcgcggatatcatgtaacagatatgagtatatgacacatggtcgcttatctcacatgttattgtgaaataatattattactggtggaacgatgcccctagttaaactgaaaaaaaaaaaaaaaaaa

SEQ ID NO: 386146 - DNA, 2238 bp, Oryza sativa
ttgacaagcttgagctccaccgcggtggcggacgctctaaactactggatcccccgggctgcaggaattcacggcgagatcctcgccatctgcggcctcgtcgcctcgctcatctacctcctcagcttcttcggcatcgcgttcgtgcagtccgtcgtctccaacagcgacgacgaggaggaggaggaggacttcctgatcgactcccgcgccgcgggccccgtcgccgcgcaggctaccccgccgccggcgccggcgccgtgctcgctgctggggagcgcctgcgccgccccgaagaaaatgccggaggaggacgaggaaatcgtggccgaggtcgtggcggggaagatcccgtcgtacgtgctggagaccaggctgggcgactgccgccgcgccgccgggatccggcgcgaggccgtgcggcggaccacggggagggagatcaggggcctccccctcgacggcttcgactacgcctccatcctcggccagtgctgcgagctccccgtgggctacgtgcagctgccggtgggcgtcgccggcccgctcgtgctcgacggcgagcggttctacgtcccgatggccaccaccgagggctgcctcgtcgccagcacgaaccgcgggtgcaaggccatcgccgagtccggcggcgccaccagcgtcgtgctccaggacgggatgacgcgcgcccccgtcgcccgcttcccctccgcgcgccgcgccgccgagctcaagggcttcttggagaacccggccaacgtcgatactcttgccatggtcttcaatagatcgagcagattcgctaggctgcagagagtgaagtgcgcggtggccgggaggaacctctacatgcggttcagctgcagcacaggggatgccatggggatgaacatggtgtccaagggcgtccagaacgtgctggactaccttcaggatgacttccctgacatggatgtcatcagcatatcaggtaacttctgttctgacaaaaagtcagctgctgtaaattggattgagggacgtggaaagtctgtggtttgtgaggcagtaatcaaagaggaagttgtgaaaaaggttctcaagaccaacgttcagtcattagtagaattgaacgtcatcaagaaccttgctggttcagctgttgctggagctttgggtggcttcaatgcccatgctagcaacattgtaacagccatctttattgccaccggtcaggatcctgcacagaatgtggaaagctcccagtgcatcacaatgttggaagctgtaaatgatggcaaagatcttcatatctccgttactatgccatcaattgaggtgggcacggttggtggaggcacacagctggcctcacagtctgcttgcttggacctacttggcgtgaagggcgcaaacagggaatccccaggatcaaatgcgaggctcctggccgccgttgtggctggcgctgtccttgctggggagttgtccctcatctctgctcaagctgcaggccatttggtccagagccacatgaaatacaacagatccagcaaagatatgtccaaggtcgcctcttgagcgtatcatttggatcattgccgaggaaatggacaaaaccccgtaatgttaactactgtctaattgtcttcttgtacccgctggagagagactggaagtggacacccaagagcttcacatgctgattccatgtggcatgctcgaggtaaaaaaaaaaaaggaagaaaaaaaagagacaaacccatcaggctaacgggtgtctactcagtagagttgagtggccatatttaccaggcggaggatgccgttggtggtgtatgtggcctattcgtttattgatgtttattattgctcttctacaaagtcgctaactccggacgatgggcattcttctatcactgggttctgtgtccaaagcaagcttgcattacagttcacaacccttccttgggcgcgtcgtcggcagctgctggatctttctgtctgctggatctttctgtcagttactgcctcgagatgcttgtattacagtttcagctttgtaactagctaattcgttttttcgtctaatctttttttattttaatcttgccctggtgatagtcggtgatgttcctgtaaaaaaatgttgtggttcagggtggttatttataattcgtgttggtggtgatgcaactgtatgggtagagttttatgttgtttcccttaataaattttcttttaccaaaaaaaaaaaag

SEQ ID NO: 386147 - DNA, 1264 bp, Oryza sativa
gtcgacccacgcgtccggtttctccctgtccacttctgtccgattcctcctcacctcttatcgattggacgaccatggcggcgccgcgcgagccggaggtgatccgcgacaaggcggcgatgcgcgcatggtcgcgccgccgtcgcgccgagggcaagaccgtcgcggtcgtacccaccatgggctacctccaccaaggccacctctccctcatctccgccgccgccgccgccgcctccgctgatcccgtcgccatcgtcgtcaccatctacgtcaaccccagccagttcgcgccctcagaggacctcgccacctacccttccgacttcgccggtgacctccgcaagctcgcctccaccggcgtcgtggatgccgtcttcaacccccctgacctctacgtccgtggcgccggtcgccgcggggccggctccggaggcgcgatctcctgcctggaggaggcggccggggatgggcacgagacgtgggttcgggtggagcgattggagaagggattgtgcggggccagccgtcccgtgttcttccgaggcgtggccaccatagtctccaagctgtttaacatcatcgagccggatgttcctgtgttcgggaagaaggattatcagcagtggcgcgtcatcttgccgtattggtcgggacttgattttggcatagagataatgggatcaagaaattgtgcgagaactgatggtcttgccatgaactcccggaatgtgcacctatcacgcgaggaagggaaaaaggcattatccatcagtagatcactggttgatgctagaactggcgccttgaagggaaacactgattccaaacaaatcaaaaacaaaatagtacagacactaactgaaactggcggtcaggttgactatgttgagatcgtggagcaagaaagtttggtccctgtagaacagatcgacggccctgtggtcatttgcgttgcggcgtggtttggaaaggtcaggctgatcgataatatcgaaatcgatacacgatcctgaggttttggggggattcacttgctgtctgctgtgaccttggcattgcgtttgaaataccttttgtttcgcgtgatgattcgcgtcatgttgtacgctgtaacaatcacagagagaaaatatgcaggagtacactgactgaaggcaaatttataagtacaaactgtagaggcctgatgctgtaacaggggaaatcatgcttgttgattacagattccgctgaaaaaaaaaaaaaaaaaaagggcggccgc

SEQ ID NO: 386148 - DNA, 1778 bp, Oryza sativa
ttgtcgcgtgggctcgcctcgcctcgctgcccctagcctaggcgtgcgctaccagccagcacaggtggtgatctcatcatcccccgcccgcccgcgcgcgcgttcgcgctcccccgcccccaccaccccagatcccgaggccccgctccgccgcccgcgggatcgcgggccccgacacaagattttgcttaatgctactttatgcgtgtgtggataatggagtaatcactgctctgtgtatctgagctcacaccatgggtagcagtggcgcagacgcaccgactaagacaagcaaggcatctgcacctcaggagcaacagccacctgctagttcaagcactgcaacaccggctgtttacccagattgggccaactttcagggatatcctccaattccaccacatggcttctttccatcacctgtggcgtcaagcccacagggtcatccttacatgtggggagctcagcctatgataccaccatatggaaccccaccaccaccatatgtcatgtatcctccaggagtatatgctcacccatctatgcctccgggcgcacacccatttactccatatgccatggcctctccaaatggcaatgctgatcctactggaactacaactactgctgctgctgctgctgctggtgagacggatggcaaatcctctgaaggaaaagaaaaaagtcccattaaaagatctaaaggaagtttaggtagcttgaatatgattacagggaagaactctactgaacatggtaaaacctctggggcatcagctaatggagccatttctcaaagtggggaaagtggaagtgaaagttctagtgaaggaagtgaagcaaattctcagaatgattcacatcacaaggaaagtggacaagagcaagatggagaggttcgaagttcccagaatggtgtatcacgttcaccatcccaggcaaagttgaatcaaactatggcaatcatgccaatgacatcaagtggtccagtacctgctccaactacaaacttgaacataggaatggactactgggccaacacagctagctccactccagcaatacatggtaaagcaaccccaactgcagctccagggtctatggttccaggagagcagtgggtgcaggatgaacgggaactcaaaaggcagagaagaaaacaatccaacagggagtctgctcgcagatctaggttgcgtaagcaggctgaatgtgaggagttggctcaacgtgctgaagttttaaagcaagaaaatacttcacttagagatgaagtgaaccggatcagaaaggagtatgatgagcttctatcaaagaatagctcattaaaggaaaaacttgaggacaaacaacacaaaactgatgaggcaggagttgacaataagctgcaacattctggtgatgacagccagaaaaaaggaaactaattgagctatcgtgcaatgctcctgagcataaccctaactagattattggcaggcgcaactgtagtatgtgtattaacttcatacttattgcagttaattgttaccaggttgtgataatgttaatgccaactttgtgtggctggttcctgtttcagatctgtcttggcttatcttttagaagtcaagatatgactggcaatgtaggttgtgacccagttcactgtatctgttagaaatagtttataaactcatgtttacaaatctgtattgttgactactattgttatgtacacctgaagatgaaccagtattttatatataagatgcagtcaggttgaacagttggtttta

SEQ ID NO: 386149 - DNA, 696 bp, Oryza sativa
ccacgcgtccgcggacgcgtgggttcgaacattcctcctccaagactccacaagtccagagggagaaagtgtgagaagaatgtggcggaaggggaacaagcggttcggcggcggcggcgagccggcggccaagcgccgtgccgccggggacgacgggccctccgagagcgccgacgacgatatcgtcgtcgcccagatatcgaagaacaggagggtggcggtgcggacctggaacggcaaggtcgtcgtcgacatccgcgagttctacgagaaggacggcaagaccctccccggccgcaaaggtatacagctcccgatggatcagtggaagatactgagggacaatatcaaagctatagatgaggccatcaaggagaatgcgtgatcggagcccattctcttgtgatgcaagtagactaagcctacgtctgtcttttatgactccgaggaatattgcacttttggtatggtaatcttcattaccctgtctagtaatatcaagtaatgttttagtttggtcatgcgcggaaaatgtggccttgtctggtattgtgccaaagaagcagctatgtgcctaatgtgctctcctcattttgtacgttgggtaaggaggtccatctgttaatggttggttggtttctgcgtgtacttatgttttactttaaatctctaatgccgctttgtatttgcttgtga

SEQ ID NO: 386150 - DNA, 575 bp, Oryza sativa
  unsure (1)..(575): unsure at all n locations
tctataagcagtattccaaatgtgcaatcagaccatgtccttttgagcattcacagcatcagagtaatggaaaggtgtagcagtttacgattgctagcatgcagttagcagtgtgcccactaccaccaacgttttggtacatgatggaagggggaatcaacaatcactgcccaaacatatgtggggagtatattcattcatataacaattatttcttaatagctacggtcacaaacattaacactgttgtttgaaacgttcgccgctgctcgacaacattaatcctctttcttatcttctgctgtggtagtagtagtactagcgctttggggttcaactagaggttttgattcacttgcaccttcattgttctttgccgcaggcttaaacgggcaagcaggcggggctctttcaggcctcctgtattcccatccaaatagtcgataaatcttgctgaggatgaggtggaagagcggacgcgngggtcgacctcggagggggggcccggtacccaattcgccctatagtgagtcgtattangcgcgctcactggccgtcgttttacaacgtcgtga

SEQ ID NO: 386151 - DNA, 955 bp, Oryza sativa
  unsure (1)..(955): unsure at all n locations
ccacgcgtccgtgtctatagaccctcgagccctaatccggggacgagattcatccctccgcgaccaaagaaaccgaattaacctccgagtcctctgctccctctttgcttcttggaccaggatctgatctgcgcggcgctcgaccggaatcgcgcggagatggacggcggcgacctgaggagcagcatcaagaagtggaacgtcatctacccggtgtacctcaactccaagaagacggtcgccgagggccgccgcatcgcctccggcaaggcctgccccgaccccacctgcgtcgagatcgccgattgctgctcccacctcaagatccctcacgccatcgaattggataaggcgtatccacgagatttcttccaggtgggaagggtgagagtgcagctcaagaaggatgacggctccccagtcaatcctgcaatcaaaacaaagaagcagctgatgatccaaatcgcggagctagtccccaagcatcatggcaggactaagaagcaggaaccagcagcttcttcaactgcagggacttcaaaggggaaaggtggcaagaaaaagaagtgatgatagtacaccatcttgtgtcgttcttctgtccataggaagttccctgagattcgtcgatgtctgttttgaggcctgaaattctgcgtctcttctgtgctctgaatttctaatttctcgggaaacatcaatcaatgcccgtatttcttgtgatttggactattggaaagaggaagattgcactgttgtttgcaatggatagcttccaagttatgtttttgaatagagctcaccttgaacatgcttatgctactaaaccccttgcaacagtgggctagcagaggttatgacttatgaggctaacagtggccatcggatgattaatcgttcatgtgtcaattgggccttggcctacgtttctttannnnnnnnnnnnnnnnnnnnn

SEQ ID NO: 386152 - DNA, 1200 bp, Oryza sativa
aggagatcctccgcggcatctacgccgacatgccgacgccggcgctgcccctcgtcggcggtgacaggccgatgtcgccgctcccggcgccggatgtcgccgccgcgccgcggacggcggaggaggtctggaaggagataactggtgcgggcgtcgccgccgccgccggcggcgtggtgccccctgctgctgctgctgctgctgccccggccgtcgtcgctggcgctggcgctggcaccggcgcggagatgacgctggaggactttctggcgagggagggcgcggtgaaggaagacgaggctgtggtcaccgatccctcggcggccaaggggcaggtggtgatggggttcctgaacggggcagaggtcaccggaggcgtcaccggcggcaggagcaggaagaggcacctgatggatccgatggaccgcgccgcgatgcagcggcagaagcgaatgatcaaaaatcgcgagtcggcggcgaggtcacgggagaggaagcaggcctatattgctgagctcgagtcgctggtcacgcaactcgaggaggagaacgccaagatgttcaaagaacaggaggagcaacatcagaaacgacttaaagagctcaaggaaatggttgttccagtcatcattaggaaaacgtcagcacgagatcttagaagaacaaactcgatggagtggtagacgtgagccaagctcagttgccatccccatacagtttatgtagcatttgctcctgttttgtcaattcttctgttttatcggcagtagcctagttgcggtgaatacatgagtatttaggtgacacgaagcttaaatgtctggagtcatatgctacggaggggagagtgcgtacgagctacaaaagcaatcatatgtgtagggaggggagagtgcatatgagctataaaagccatgttccaatttgtcgcgggagtgtattctgtcccatttgttgtctgtttcattttcagtttaacaattaggtgtagtgaggaagaattacgagtactgagtagtactaaacagggtgactctaggtatgctgatatgatatctagttaggcattacttctgattctctgtttggtgccacgactcaaattgtctgtacatacacgttggatgtaaagtcacattatcaagtgaaatcatgatgtatttcctccagaattttttttaactgaaaaaaaaacaaaaa

SEQ ID NO: 386153 - DNA, 482 bp, Oryza sativa
cacagacacgtactacgacaccgagtttgagctttgagctttgaggagtgtgtctgagagtttggtcatggcggacatcgcgttgctggtgacggaggagttcgagaggaagctcaagaggggggcgccgggcgaggagggcgcggcggcggagtccaggaggaacttcggcgccgtcatcaaggtgtgcagctcgtgggtcgacgccgccgccgccgccgccgccgccggggtgacggtcaacgtcgcgctgctcaacgtcgaccccaagtccgggcccgccgtcgccgccatggacggcgccttctccgcctagtcgcttcacagttttttcttttttgttcttcttcttttttactcaaaaaaaaagataagttaattaggaggaggaactagtctattatgtatctctcctcctttgatacagctcggtcaccgtgttgatgtaaatatagccgcttaatttttgtcttttgatttga

SEQ ID NO: 386154 - DNA, 1345 bp, Oryza sativa
gcatccatcgattcgatcctagcttaagccgagtgaagtagctagcaggacattgttggtagtgtgatcttctccctgttttgcaacaatggcctcacgcagtagtgccctgctcctcctcttctcggccttctgcttcctcgcccggcgagccgccgccgactacggctcctggcagagcgcccacgccacgttctacggcggcggcgatgcgtccggcacgatgggcggggcgtgtgggtatgggaacctgtacagcaccgggtacggcaccaacacggcggcgctgagcacggtgctgttcaacgacggcgcggcgtgcgggtcgtgctacgagctgcggtgcgacaacgatgggcagtggtgcctgccgggcagcgtcaccgtcaccgccaccaacctgtgcccgccgaactacgcgctccccaacgacgacggcggctggtgcaacccgccgcgcccccacttcgacatggccgagccggccttcctccagatcggcgtgtaccgcgccggcatcgtgcccgtctcctacagaagggtgccgtgcgtgaagaagggcgggatcaggttcaccatcaacgggcactcctacttcaacctggttcttgtgaccaacgtggccggcccaggcgacgtgcagtccgtgtcgatcaaggggtccagcaccgggtggcagcccatgtcccgcaactggggccagaactggcagagcaactcctacctcgacggccagagcctctccttccaggtcgccgtcagcgacggccgcaccgtcaccagcaacaacgtcgtgccggccggctggcagttcggccagaccttcgagggcggccagttctgatcgagtactcggctaattccgtttttcagttcacttttctgcagaaatgtcagtgtgagattgagattgaggtggaggaggagggaggcctctttgctatagtaaaagagaagaggctttggctattctgaggctgcttattaattagcacccgcttaggcctttgctttctcccataggtccagtagacataaataagttatcatggagttgggcattttttttttctgcattgttgtagccttggtttaaaatttggcaaggcaatttaaggattatattgtagaacagcagggaggtggtgtcttgtaacttttgttgttacattgtaaccccccgaatcaggccacatgggccggaggagtttgtgggggagcaccggagcactcttgtgcttttgggaccatgaactatgctagtttatgggtctatgtatatgatatgtttgtgatttgattatactttcttttgtcgccttatcaagtaccaatcattattaag

SEQ ID NO: 386155 - DNA, 1219 bp, Oryza sativa
acctccgcttcaagtgagctagtctagccagcgtttagacaccatcaccagccatggcgatcgctggcgttctcttcctcctcttcttggcacggcaagcctccgccgccgggtacggcggttggcagagcgcccacgccacgttctacggcggcggcgatgcttccggaaccatgggcggggcttgcggttacggcaacctgtacagccaagggtatggcacgaacacggcggcgctgagcacggcgctgttcaacgacggcgcggcgtgcgggtcgtgctacgagctgcggtgcgacaacgccgggagttcgtgcctgccgggctccatcaccgtgacggccaccaacttctgcccgcccaactacggcctccccagcgacgacggcggctggtgcaacccgccccgccctcacttcgacatggccgagccggccttcctccacatcgcccagtaccgcgccggcatcgtccccgtctccttccgcagggtgccgtgcgtgaagaagggtgggatcaggttcaccgtgaacgggcactcctacttcaacctggtgctggtgaccaacgtggccggcgccggcgacgtccgctccgtctccatcaaggggtcgcgcaccgggtggcagcccatgtcgcggaactggggtcagaactggcagagcaacgcgttcctcgacggccagagcctctccttccaggtcaccgccagcgacggccgcaccgtcaccagcaacaacgtcgcccaccccggctggcagttcggccagaccttcgagggcggccagttctagccgccaccgacatcgccgtctccgacacccacatataatagcacggtgtccttcttcgtcttcgttctcgtcgtcgtctttcttccttgagagattatttattttgagcaagagagaaagaaaagcctcttcgttatagtggagaagaggttttgggctatgctgaggctgctaattagcacccgcttagacgttttccttctctggacttcgtccaataatgactggaccggtccaccatcatcaagtgtagtggtagtagtaaaggggagtactaagcttagtactacttgaagaaaaaatcaataataattgtattgattaaatttctacttttgagcgttttcttgtaccggagtgatggccttgcaacggaattaaaaaccgcgaggccgtgttttatttatcaaggggactattgatgt

SEQ ID NO: 386156 - DNA, 1105 bp, Oryza sativa
ttgtaagaatcaccagccttgcaaaccaatcaacctgtctagattaatttttgcatgctctctggaatggagaaacaacctgcaatgcttctcgttcttgtgacactctgcgccttcgcatgcaagcgatccgtcgcacagtctgcctttgccacgttctacggtggcaaggacgggtcgtgcaccatgggtggcgcgtgtgggtacggtaacctgtacaacgccgggtacgggctgtacaacgcggcgctgagctcggcgctgttcaacgacggcgccatgtgcggcgcgtgctacaccatcacctgcgacaccagccagaccaagtggtgcaagcccggcggcaactccatcaccatcacggccaccaacttatgcccgcctaactgggcgctgcccagcaacagcggcgggtggtgcaacccaccgctgcagcacttcgacatgtcacagccggcctgggagaacatcgccgtctatcaagccggcattgtccccgtcaactacaagagggttccgtgccagaggagcggggggatccggttcgcgatcagcggtcacgactactttgagcttgtgaccgtgacgaacgtgggcggcagcggcgtggtggcgcagatgtcgatcaaggggtccaacacgggctggatggcgatgagcaggaattggggcgccaattggcagagcaacgcgtacctcgccgggcagagcctgtccttcattgtgcagctcgacgacggccgcaaggtcacggcctggaacgtcgccccgtccaactggttcttcggtgccacctactctacctcttgggtgcagttctgaagtactgcaacgtacgtacaggtttagttgataaattatacacatgctgttcatggacataattaattaattactagccatcccggccgtttgtgcatgttctgctaggttgtgtgttgcgtggcattaacttgtttttctctgttaccagtcgtttttgtcaaacgcgttggttgtggcaagcgcgattgaatgttttgcccaccaattaatgtaactgatcgtatgggtgttgagttaataaattatgtttaattatgcggatgccaaaaaaaaaaaaaaa

SEQ ID NO: 386157 - DNA, 834 bp, Oryza sativa
ccacgcgtccgcggacgcgtgggcggacgcgtgggcggacgcgtgggcggacgcgtgggcggacgcgtccgggcgacgagagacactctcactgaacgaagctacctagcttaattacctagctactcgatcgatcatcagtctagatatggcggctttgaacggtaaggtggtggtggcggtgatggtggtggcgatggtggtggcggcgccgggggcgtcggcggcgatcacgtgcgggcaggtggggtcggcgatcgcgccgtgcatctcgtacgtgacggggaggggcggcctcacccagggatgctgcaacggcgtcaaggggctgaacaacgccgcccgcaccaccgccgaccgccaggccgcctgccggtgcctcaagaccctcgccggcaccatcaagtctctcaacctcggcgccgccgccggcatccccggcaagtgcggcgtcaacgtcggcttccccatcagcctctccactgactgcagcaaggtcagctagatcgattaatcctgcttggaccgaccgatcgatatatcgatcgatgctggctcgcagttgatcaactagccaaaataatagctacagtaaaaataacagctggggcatatcaatgcagcgctggtcatctctctctctatctctgtatactttatgttgcacgctccgtgcgtgcatgctatcttaattttcttgactctgtacaccgctctgtgtacgtgtaatcctacgttgatgaattgcatcttgtccagacttggacctagctaactacgtactccagcttggcagcttcttgccgaggcaatctgtagtaatttccttgttac

SEQ ID NO: 386158 - DNA, 903 bp, Oryza sativa
gcctatttataccctccacccatcgaccgacgatccatcaccggcgacgaggagacactcactgatataatcaagctagctagcttaatcacctagctatccgtcagtttagctagatatggctgcagttaactgcaaggtggtggtcgccgtgattgtggtggcgatggtggttgcggcgccgggggcgtcggcggcgataacgtgcgggcaggtgggatcggcgatcgcgccgtgcatctcgtacgtgacggggaggagcggcctcacgcagggatgctgcaacggagtgaaggggctgaacaacgccgcccgcaccaccgccgaccgccaggcggcctgccgctgcctcaagagcctcgccggcagcatcaagtcgctcaacctcggcaccgtcgccggcgtccccggcaagtgcggcgtcaacgtcggcttccccatcagcctctccaccgactgcaacaaggtcagctaaatcaataatcctgcttggatcgatcgatcgagcttaacatgctagctcaatcggagttgatcagctagtaattaagcacgtacttgctacagcatatatgaacaaagtaattaaaataacagctgcggcagacatgcagcgctccattctctctctgtatcagctgtatactttatgttgcacgctccctgtgtgcatgttctatcttaattttcttcagtatgtacacgatctgtgcgtaccgtgtaatcctatacgttttatgaattgcatgttgtccaaatgtctttgtcctagctactagctactccagcttcttgctgaggaaatctgcagtagtagtaatccctcgttgtgatacgcaacaaaattgtttaatgtgatcctgctatatatatagaaaatcatctctattattttacaggcat

SEQ ID NO: 386159 - DNA, 778 bp, Oryza sativa
tctcgattagctatctagcttagctactcggtcatctgatcatcgatcatccgacgatcaaatcagtaatcttgaatatggcggctttgaacggtaaggcggcggcggcggtgatggtggtggcgatggtggtggcggcgccgggagcgtcggcggcgatcacgtgcggtcaggtgggatcggcgatcgcgccgtgcatctcgtacgtgacggggaggagcgggctgacgcagggatgctgcaacggcgtcaaggggctgaacaacgccgcccgcaccaccgccgaccgccaggcggcctgccgctgcctcaagagcctcgccggcagcatcaagtcgctcaacctcggcaccgtcgccggcgtccccggcaaatgcggcgtcaacgttggcttccccatcagcctctccaccgactgcaacaaggtcagttaaatcaatcctgcttggatcgatcgatcgagcttaacatgctagctccatcggagttgatcagctagtaattaagcacgtacttgctacagcatatatgaacaaagtaattaaaataacacctgcggcagacatgccggcgctccattctctctctgtatcagctgtatactttatgttgcacgctccctgtgtgcatgttctatcttaattttcttcagtatgtacacgatctgtgtgtactacgtgtaatcctatacgttttatgaaaaaaaaaaaaaaaaaaaaaataaataataaattaattatttattaaataatttatttttaatattttattatttttt

SEQ ID NO: 386160 - DNA, 1656 bp, Oryza sativa
gacccacgcgtccggcgtcctgttgactgaacgaagcttacctagcctactcgatcgatcatccatcagtctagatagatgtggcggctttgaacttcaaggcggtggccgccgtgatggtgatggcgatggtggtggcggcgccgggggcgtcggcggcgataacgtgcgggcaggtggaattccggtcgcgccgtgcatctcgtacgtgacggggaggggcggcctcacccagggatgctgcaacggcgtcaaggggctgaacaacgccgcccgcaccaccgccgaccgccaggccgcctgccgctgccgcgagactccgcgccagcgccaccatgtcgcaggccgccgggaacccctacgccgctgagctcgccgccgccaagaaggccgtcaccctcgccgcccgcctctgccaggcggtgcaaaaggacattctgcagtctggtgttcagtctaaggcggatcaaagtccggtgacagttgctgattatgggtctcaaatattggtaagccttgtcttgaaaatggaagcaccagcttcttcttccttctctatggtggctgaggaggactcggaagaattgaggaaagaaggcgcggaagaaattttagaaaatatcaccgagctcgtaaacgaaactatcgtagatgatggtacatacagcatttacttctctaaggaaggtatcctctctgcaattgacgacggcaagtctgagggaggtccatctgggcaacactgggtgctagatccaattgatgggactaaaggtttcttaaggggagaccaatatgctattgccctggctctgcttgatgagggtaaagttgttttgggtgtattggcttgtcccaacctttctttgggatcaataggcaaccttaatggtggctcctcgggagatcaagttggtgctctcttttctgctactattggttgtggagctgaagtagagtctttacagggctctccagcacaaaacattagtctctgctccatcgacaatccagtcgaagcttcattctttgagtcctacgaaggggcacactccttgcgtgatttaacaggctccattgcggagaaacttggtgtccaagctcctccagttagaattgatagccaagcaaaatacggtgccctagcccgaggtgacggtgccatttacttgcgttttccacacaaaggttacagagagaagatctgggatcatgcagctgggtcaatcgtcgtgacagaagctggaggtctggtgacagatgcatcaggaaacgatttggatttctccaaagggagatttcttgatctcgacacagggatcatcgcgacgaacaagcagctgatgccttcactcctgaaggctgtgcaagatgccatcaaggagcaaaaccaggctgcttccccgttgtagtagctgtctcaatccacaatccacaaatatcataatgtttccatataataataattgcagtgctgcttccccatcaacattactttaaatgtgtgtacagcaccactttgttgttgttgctgctgcaaattcagtatcttattgttgcagcatttctgcatctaattggtgggtgaactggcaccacatgaatgttctttcatctggattcagaagaaataattaaattggcctgattctccct

SEQ ID NO: 386161 - DNA, 950 bp, Oryza sativa
agaagcgagaggggaagagcaccccacgcgtccgagctaattaaggcgcaacacagaaaccctcaccgccgcccgcatccatggcggaggagcacgagacgaggccgccgtccgccggaaggcgccgtcgtccggccgcggcagggccgacgacgctgacgagagggaggagggggagatcgccgacgacgactccggccacgcgccgccgcaggcaaaccccgccgcgccgcacccgctcgagcacgcctggaccttctggttcgacaacccgcaggaaaagtccaagcaggcaacctggggaagctccatccgccccatccacaccttctccaccgtcgaggacttctggagcctttataacaatatccatcacccaagcaagttggttgtgggagctgacttccattgctttaagaataaaatcgagccaaaatgggaagatcctatctgtgctaatggaggtaaatggaccttcagctgtggcagaggaaagtccgacacaatgtggttgcatactttattggcaatgattggcgaacaattcgattatggggatgaaatttgtggagcagttgttagtgtgcgtggcaagcaggaaagaatagctatctggactaaaaatgctgccaatgaagctgctcagataagcattgggaagcagtggaaagaatttctggattacaaggactcgattgggttcattgttcatgacgatgcaaaaaagatggacaaaggtctcaagaaccgctacacagtttgatctgagcactcctgtccagatatccaagagagtagtatatccacatgtaggatgggttttcttcgatgctttagtgtttgtcattcgcttgtagcgagcgcttgaaggctataatattgccgtgaactgtttaaacttgaaacgtaatataatgacgtatcagaggtgtctctgtactctataaatc

SEQ ID NO: 386162 - DNA, 1037 bp, Oryza sativa
  unsure (1)..(1037): unsure at all n locations
gtcgacccacgcgtccgtccccttctccttctctttcccctcggcggcggcggcggcttctcccttctcttctctctctcgcatcgcctactcgttcgttttccctcgaggaggagcagaggcggcggcggcggcggcggagcggacatggctgaggtggaggcagcgccgattgcggcggcggagaccccggaggtggcggcggcggagggagcggcggcggcgaaggcgccgaacaagctgcataggcagtgggcgttctggtacgacatccagtccaagcccaagcccggcgccgcgtgggggacctcgctccgcaaggcctacaccttcgacaccgtcgaggagttctggggcttgtatgatcagattttccgtccaagcaaggtgacagtaaatgctgattttacatttattcaaggttggtgtagaaccaaagtgggaagacccagagtgtgcaaatgggggcaaatggactgtgccatgtagcaggaagaccacccttgagaacatgtggcttgaaacgctgatggctctgattggagagcagtttgatgaaagtgaggaaatttgtggagttgttgctagtgtccgccagagaggagacaagcttgcattgtggactaggactgccagcaatgaagccgttcaggtaaacattggcaagaaatggaaggagattgttgactacaatgataagatggtctacagcttccatgatgacgccaagagggagaaaccaagcagaggtggacggtacaacgtgtaagtcaccgcaaaacgttgcagcttggatagtggccatcgagtggtgtgccgataccggcgcctgttctttacagcctcagctagtgttgttgtccgaggcaatttttccgacctattgtgttgctttcctctctgatagcttatggtaaaagatacaaagatgttgaggagtttgtacgccacttaattttgctcgtaacatacattgacaatcaagaggagccatggcattgcgatctgcttaaaaaaaaaaaaaaaaaannanaana

SEQ ID NO: 386163 - DNA, 946 bp, Oryza sativa
ccacgcgtccgcagcccgcgcacctccacagcattagccatcaacgaccagcatctcagctttgctcgccttctcgaagcttctgctgccatggcggaccagctctccgaagagcagattggagagttcagggaggccttcagcctcttcgacaaggacggcgacggttctatcaccaccaaggagctaggaaccgtgatgcgaagtctagggcagaacccaacggaggcggagctgcaggacatgatcagcgaggtggacacggacagcaacggcaacatcgaattcaaggagttcctgggcctgatggcgcgcaagctgagggacaaggactccgaggaggagctgaaggaggcattccgcgtcttcgacaaggaccagaacggtttcatctctgccaccgagctccgccacgtgatggccaacatcggggagcggctcaccgacgaggaggtcggcgagatgatcagcgaggccgacgtcgacggcgacgggcagatcaactacgaggagttcgtcaagtgcatgatggccaagaagaggaggaagaggatagaggagaagagggaccacgacggcggcagcaggacgaagagtgcagggccctccgccgcgccggcgagcaagcgtggccagaagtgcgtgatcctgtaataattgagccagcactgagattctcatgagtcaatgagctacacgaatgatgtgtgttgttgtaaaatggcaaaacaattgtgtgggcgtgtagtatgatgctccactgaaagatcgagaaataacactggccagtgcaagttcacagccgtagtccgtagtccgtacgctgtgggcccgtgccggcccatgggcaacagaccaaaacttactctttctatcctcgtgtttcctaaatttggcagtgctaaatttcatacctttaaaggggccaaaaaaaaaaaaaaaaaaa

SEQ ID NO: 386164 - DNA, 1021 bp, Oryza sativa
  unsure (1)..(1021): unsure at all n locations
tcgtccgcgtcaaccacacattctgttcttccagtgccggtaccagcagtaccatatgctgccccctcaccttcatacgcactaccccctgcaggataccctgcagtaccgccatatcaatcctatcctgctagccatgtcccggcgccatatcctacttcagcatacccacatccaccaccatctctgctagctcgcgatgttgagcatgcggcataccctcctacaagtacaacatatcctccacagccgtacccaccacagccgcagggacaaacatacccaccgcagccgcagggagaaacataccaaccgcagccgcagcgagaaacatacccaccgcagcctcaagtacaaccatacccaccaaagccacagggacaaccatacccaccgcagccgcagggacaaccatatccaccgcaaccatttggacaaacttacccaccacctccaaaaggacagcccacatatccacctgcgccctatccttcaacttatccaccagcaccatattgatatggcacacttggtggactgaagttgtccacatacaaaagcaagtaagcaacaagtgatgatcagttcttatatttatccagggtatccagccttcatcatccagttaattgaaacaaatgaaatcattcctgaagcgattcatgtcaacatcttagcaaccaatggtagtagttaccatctggtatgtatcatatatcatagcttgcagaatgtcacgaatggaatttgttcgattatgttgtatgttttgggcttgttgtaacagtgatccacctttgttctgttttgaggtcatgtttggctgttctgtgactgtaactactgctttttacaaaggggggaaagcagtaattctagttctacctgcaactgcctgataagtgttaactgtgaaaagttgcagtagcttgtcgactttgtaccatgttgtttgagatgctcaataaattgctttgtactctaaanaaaaaaatataaaaaaaataaaaaaattaaaata

SEQ ID NO: 386165 - DNA, 1560 bp, Oryza sativa
agcgcgcctcagcctcagtacccaccacctccacgctcgcgccgtcggcttcgtgctcctgcgccgccgcaccgatctgcaccgtacgcgggcgtcgatccatccaaggaactcataaaaagtcatgggaaatgacgaagctgtagttactcagaagatggggaaagcaccatcgccccctaaggatcatccagcccttagtccataccttgattggtcaaatatgcaggcatattacggcccagggatcttgccaccaacattttttagccctggaatagccgctggtcatacccctcctccatttatcttgggtcctcagcctctggtgccatccgcttttgggaagccatatgccgcaatttatcctcctggtggagctttttcacatccgttcatgcccctaatggtgagcccattgagcatggagccagcaaagtctgtcaacagcaaggatagctgttcaaataagaaaatgaaggaaattgatggtgcgactgtgtcaactggcagtggcaacagtgaaaaaacaagtggagattgcagcttagaaggatccagtgatggaaacaaccagaaggcaagtggaactcccaagaaaaggagcatagatgataggcctaaatcaggcgtggaaactggtggagctttaacacctaatgatagacctagcgaacaagcagctttgccaaatctatgcattccggttacagcaatcaaaccagacgtgagcactgctagtgacttcagagttattgccaccccagtaactgaagtgccaactaaggatgataaggaatcgaagcgcgagagaaggaagcaatcaaacagggagtctgctcggaggtcaaggttgaggaagcaggccgagactgaggaactggctagaaaagttgagctattgactgcggagaacacatcccttagacgtgaaataagcaggctaacggaaagctccaagaaacttagattagagaattctgctctaatggagaaactaacggaaaccgggcctgatgaagcacaagaagtgcctccagtcaaaacaaaagcacagcaagctcgaggcgtcgaaaatttcctgtcaatgatagacaagactggcacgccgagaagcagcgggcacatggatcatgccattgccacgcccaagcttcgtcaactcctgggctctggtctggcgactgatgctgtagccgcaaggtaatcttaacgacttgaccctcccgccgttcgtgctcaaacgcagcatgtggcctggtgaattttataagctcaacctgcccgcacgattaacatcgaagtattaggtacgattttgtcactgtattcgcccttgtaaattactagtagctgccttttagacgagcattccaaccgctccaccgggatatgaatgcccccctggccgtcagttcttccctgagtttttactctactctcgtagatctgtaacatcagtgctggctcgcgttgttcatatcaaactgatctctgtaaatactgtaacactgacagaaagccttctaactttgatcttttacctttaaaaaaaaaaaa

SEQ ID NO: 386166 - DNA, 742 bp, Oryza sativa
ccacgcgtccgcccacgcgtccgcgcacgcgtcggttcaggtgctgaaggtgatattcagattttcagagtgagtgctcgtgtgttgtgcgatcagtgcccgcagttcgatcgatccgtgttgatctttgaaagaaagatgtcgtgctgcggaggaaactgcggctgcggatccggctgccagtgcggcagcggctgcggaggatgcaagatgtacccggagatggctgaggaggtgaccactacccagactgtcatcatgggtgttgcaccttccaagggtcatgccgaggggttggaggccggcgccgccgccggagcaggagcagagaacgggtgcaagtgcggcgacaactgcacctgcaacccctgcaactgcggcaagtgaagcaagcaacctcctgacgaaaccaaggagatggaagggcctagtactgctaagctagtagtttgatccagttacaagtgatgagttgttgtcactgtaactttgtgtttcctctgagtttgtgatctaagacctgagactgaagaaatgcatcctagttaaataagtgctaagaataaagatgttttgagacatctatggcgtgtgtacgatgatgtagtccttcctctccagtcttgtggtgtgtacgtaattaagaatgcagtgctgtgtcatgtggtatgctttctatctagtgaaactgaactagtgagttggtatactaaaaaaaaacccaaaaaaaaaaaaacacaaa

SEQ ID NO: 386167 - DNA, 1015 bp, Oryza sativa
  unsure (1)..(1015): unsure at all n locations
ccgatacgcttcttcttcttcttcttcgttgcattcatcttgctagctagcttagcaatggcggatcgcgaccgcgccgggcagtactaccagcagcagagagggcaggtgggggagacggtgaaggggatcctgccggagaaggcgccgtcggcgtcgcaggcgctgacggtggcgacgctgttcccgctgggtgggctgctgctcgtgctgtccgggctggcgctggcggcgtccgtggtggggctcgccgtcgccacgccggtgttcctgatcttcagcccggtgctcgtcccggccgcgctgctcatcgggctcgccgtcgccggcttcctcacctccggcgcgctgggcctcggcgggctgtcgtcgctcaccttcctcgccaacacggcgcgccaggcgttccagcgcacgcccgactacgtcgagcaggcgcggcgcaggatggccgaggccgccgcgcacgccggccacaagacggcgcaggccggccacgccatccagggcagggccgaccaggccggcaccggcgccggcgccggcggtggcgccggcaccaagacatcctcgtaagcacgcgccgcgcgcgcgagtggctcgcgtcgcgtacgggctgggtttagcctgctgggtttcgcttcgcttcgtagtagtctcgcccccgaccgaccgagtcaagagtgtgtcccgaacgtgaccgtgcctacgtgtcgtgtgatcctaaagtctaatgttgtaccagctgctgcgtactactgctactaggtaagatcgatgtagttttcgatttagagttgtgaatgataataagcgaggtcggggggagcaagcgatctggggagtttgtgcttgatttgagttgatgatgaacatatgtatgcattccgtgttcctctgtaagaaaagaattggtgaatgaacccatgtntctttgctcaaaaaaaaaaaaaaaaaaaaaactcgagggggggcccggtacccaattcgccctatagtgagtcgtattacaant

SEQ ID NO: 386168 - DNA, 1595 bp, Oryza sativa
cttccggcaagtcgtccgcagcgaccagggctccgtcaggctcctcccgccgttccaccaggcgtccagcctcctgcgcggcatcaagaactaccgcgtcgcggtgctcgaggcgaacccgcgctccttcgtcatgccgacccacacggacgcgcactgcatctgctacgtcgcccaagggcagggagtggtggcgatcatcgagaacggcgagaagtggtcgtacgccatccggcaaggcgacgtcttcgtggcgccggcggggacgatcaattacttggccaacaccgacggccggaggaagctgatcgttaccaagattctccataccatctccgtccctggccagatccagttcttcttcgccccaggcgggaggaacccggagtcattcttgtcgagcttcagcaagggcgtgcagagagctgctttcaagatttcggaggagaagctggagaagctgctggggaagcaggacaagggggtgatcatccgcgcgtcggaggagcaggtgcgggagctgcggcgccacgcgtcggagggcgccacggcccgcactggccgctgcgcgttcggcgagtcgtcgcgcggccccttcaacatcctggagcagaggcccaggttcgccaaccgccacggcctgctacgaggccgacgcccgcagcttccacgacctcgccgagcacgacatccgcgtcgccgtcgtcaacatcaccgcgggatccatgaacgcgccgttctacaacacccggtcggtcaaggtcgcctacgtcctggacggcgagggggaggccgagatcgtgtgcccgcacctgtcgcgcggcggccgcgcggcgagagcgaggagcgccggcgcgagcgcggcaagggcaagtggcgtgaggaggaagaggaggaggaggagcagcagaaggggcaggaggaggaagaggaagaacaagtcggccaggggtacgagacgatccgtgcgcggctgtcgcgcggcacggtgttcgtcgtcccctccggccacccgatcgtggtgacgtcgtcccgcgacagcaccctccagatcgtctacttcgacgtccacgccaacaacaacgagaggatatacctcgccgggatgaacagcgtgctgaagaagctagacccgcaggccaaggagctggcgttcgcagagaacgcgatggaggtggacgaacttgatcaacgcgcagcaggagtccgcgttcctcgccggcccggagaagagcggccgccgcggcgaagaatcggaggacgaagtccttctcctcctcctcaaccaccgtggactcggcgacgaggcggtggagacgctcctgaggatggcagccgctgcggtgtgacgcgctccgcggcgacgagcggcgtggcgagtgcgtgagcggtgagccatccaagctgccgggcgagcgagatgcgggagtttggcctcgacgcgtgtgttgtagcttttgtaattaggcgggaacgagtgaaataagtgggtggctccctctgtgcgactatctccatataagtaaatactgctacataagtaagagtttgcaaatgtcgtttttaaatttctccccaaaaaaaaaaaaaaaaaa

SEQ ID NO: 386169 - DNA, 1326 bp, Oryza sativa
gatctctctctcgctgcagatccaaaccaacctcaccgtcgacgaggaagaaggcggcggcggcggcggaggcgaaggcggcgaagatgcagtacaagaacctggggaggtcggggctgcgggtgagccagctgtcgtacggggcgtgggtgacgttcggcaaccagctggacgtgaaggaggcgaaggcgctgctccaggcgtgccgcgacgccggcgtgaacttcttcgacaacgccgaggtgtacgcgaacgggcgcgccgaggagatcatggggcaggcgatgcgggacctcgggtggcgccgctccgacgtcgtcgtctccaccaagctcttctggggagggcagggccccaacgacaagggcctctcccggaagcacatcgtcgagggcctccgcggctcgctcaagcgcctcgacatggactacgtcgacgtcgtctactgccaccgccccgacgccaccacccccgtcgaggagaccgtgcgcgccatgaactgggtcatcgacacggcatggcttctactggggcacctccgagtggtcgcccagcagatcaccgaggcgtggagcgtcgccaaccgcctcgacctcgtcggacccatcgtcgaacagcctgagtacaacctcttctcgcgccacaaggtggaatctgagttcttacctctttacagcacgtatggcctgggtttgactacatggagccctctagcttcgggagttctcactggaaagtatgccaaaggaaatatacctgctgatagtaggtttgccctagaaaattacaagaacctggccaacagatctctggttgacgacacactgagaaaggtgaatgggctaaaaccaattgcttctgagcttggtgtttcgttagcccaacttgctatcgcgtggtgcgcatcgaacccaaacgtctcatctgtgatcactggagccacaaaagaaaaccagattgttgaaaacatgaaggccctcgatgtcattccgctgctaaccccagaagtcgtcgacaagatcgaagcggtggtccaaagcaagccgaagcgcaccgagtcatacagatgaagcggtacagggggtgtgcagagtgtgctccagggatttcaggatttacccggtgggattcttttagacgatattattatcttccattgtcttatgtttggaagctgctttatgtgcctgggtttgtgtagttgggaaatggtgtccagtggtactctgctctatatacattttgtcatgtggaccactcacttgttgctgtcggtgatatatataccttggtcttttccgtgtgcaaaaaaaaaaaaaaaaaaaa

SEQ ID NO: 386170 - DNA, 777 bp, Oryza sativa
  unsure (1)..(777): unsure at all n locations
ccacgcgtccgcccacgcgtccgcccacgcgtccgcggagcccactcttccgcttctcctcccaatctcgccgcccaagaaaaacactgaaccttcgccttcctctctcgtccgatcgacctttgcatggcagcagtagctagctccaaggggcgggtgatcgctggaagcttcgtcgcccgcgtcctggccggcaaggccgcctccccgaggagatttgtgagcgcttcagcctacgacaagaacgtggaagagcaggtgcgcccggcggtggtgccggacgatgtgatcggcagcgtcgggagccctgacaagtactggggccctcacccgaccaccggcgtgttcgggccagcggcggtggacgccaaggcggcggcggccgttggcgcggcgaaggccggcgcgaatggtggcgcctccgtgctcgaccagaaggtttggttccgccccctcgaggacgttgagaagcctcccgtcgcctgatcgacaggcctaatacgagccttggctctgtgccacctaccattctcttcagctggggctccttgattattattactgtactagtagtgtggttctgctaatatagtatcagcagatcgacatggcgtgcatcggtagttacagtgaggcgatgctgatgcctaaaataagaacaagcaaaagacgtgtgctcatgttgcttgtggctgtaatgtacttctgtcctaatccgtactataagtatttggttaccggtgaatcaaaaaaaaaaaaaaaaaaaaaannnnnnnn

SEQ ID NO: 386171 - DNA, 1748 bp, Oryza sativa
cgcgcccgcgtcgacgagatggcggcatgagcacctcctcctgcatcgccacctcccccgatcccccgcaaaccctagcgaccgcgccccccaccgccacctcccctgcggcggcgccctggtgaggagggaggaggaggagggggaggtggggaggggggaggcgacgatgccgtcgcacgcggatctggaccggcagatctcgcagctgcgggagtgcaagttcctgggggaggcggaggtgagggcgctgtgcgagcaggcgaaggcgatcctcatggaggagtggaacgtgcagccggtgcggagccccgtcaccgtctgcggcgacatccacggccagttctacgacctcatcgagctcttccgcatcggcggggactcccccgacaccaactacctcttcatgggtgactacgtcgaccgtggttactattcagtggagactgttacattactagtggctcttaaagtccgttatagagagagaatcacaatattgagaggaaatcacgagagcagacaaatcacccaagtgtatggcttctatgacgaatgcttacggaagtatggaaatgcaaatgtttggaagtacttcgcggacttgtttgattatttgcctctcacagctcttgtagaaaaccaggtcttttgcctccatggcggtctctcgccgtcattggatacattggataacattcgtgccctcgatcgcatacaggaggtccctcatgaagggcccatgtgtgatcttttgtggtctgacccggacgatcgatgtgggtggggaatttctccaagaggggcaggatacacaaatggacaagatattgcacaacaattcaaccatactaatggccttacccttatttcaagggcccatcaacttgtgatggaaggcttcaattggtgccaggacaagaacgttgtcacggtgttcagcgccccaaactactgttaccgctgtggtaacatggcagcaattctagaaatcggggagaacatggatcagaacttcctacagttcgatccagccccacgacaaatagacccggacacaacgcgcaagacccccgactattttttgtaatcgtggcgttgacctttttttttttaactcccgctgttgatgttcctctctcctgcgtctggttttatgtagatcttcgtccttagaaaatgggttccctcctcgacccaagctgtaccccccactctttgtttggaaattttgttgcagctcctcagaacttccatagaacatggtaaaacgtacatggcgttgttttttcctttttccttttttatgtacctcccattttgtattattctgagacaggagagatgggaagctgcaatagagttgtctcgtgacataaatttttggtctccaaaaaaccaaagtcgacgcgcccgcgattcgcggccgcgtcgacgagatggcgtgcatcggtagttacagtgaggcgatgctgatgcctaaaataagaacaagcaaaagacgtgtgctcatgttgcttgtggctgtaatgtactagtagtgtgggtctgctaatatagtatcagcagatcgacatggcgtgcatcggtagttacagtgaggcgatgctgatgcctaaaataagaacaagcaaaagacgtgtgctcatgttgcttgtggctgtaatgtacttctgtcctaatccgtgctataagtatgtgggtaccggtaaaaaaaaaaaaaaaaaaaaaaagtcggcggggccgtg

SEQ ID NO: 386172 - DNA, 1600 bp, Oryza sativa
gttggtcgatccagcggctggggatgagtacttagttagctcggagctagctactaatggatgatatacttatgctagttagttaaatacagttattagttagttgtaggttgcatctatcatatctccatcggttaattaattgattgatagctagattatcaacaattaatgagcatggtggtgcagcaggagcaggaggtggtgttcgacgcggcggtgctgagcgggcagacggagatcccgtcgcagttcatatggccggcggaggagagccccgggtcggtggcggtggaggagctggaggtggcgctgatcgacgtgggggcgggggcggagaggtcgtcggtggtccggcaggtgggggaggcgtgcgagaggcacggcttcttcctggtggttaaccacggcatcgaggcggcgctgctggaggaggcgcaccggtgcatggacgccttcttcacgctgccgctgggggagaagcagcggcgcagcggcgcgcgggggagaactgcgtacgccagcagcttcacggggcgcttcgcgtccaagctgccgtggaaggagacgctgtcgttccggtactcatcggctggagatgaagagggcgaggagggcgtgggtgagtacctggtgcggaagctcggggcggagcacgggcggcggctgggcgaggtgtactcgcgctactgccacgagatgagccgcctgtcgctggagctgatggaggtgctcggggagagcctgggcatcgtcggagaccggcgccactacttccggcgattcttccagcgcaacgactccatcatgcgcctcaactactacccggcgtgccagaggccactcgacacgctgggcaccggtccgcactgcgaccccacctcgctcaccatcctccaccaggaccacgtcggcggcctggaggtgtgggcggaggggcggtggcgcgccatccgccctcgccccggggcgctcgtcgtcaacgtcggcgacaccttcatggcgctctccaacgccaggtaccgcagctgcctgcaccgggcggtcgtcaacagcacggcgcctcgccgctcgctggccttcttcctctgcccggagatggacacggtggtgcgcccgccggaggagctggtcgacgaccaccacccgagggtgtacccggacttcacgtggcgggcgctgctggacttcacgcagcgccactacagggccgacatgcgcacgtttcaggccttctccgactggcttaatcatcatcgtcacctgcaaccaacaatatactcctagctcctagtcctagctatatactcctattatccatccatccatccatcttacactactataccattagcatcgatcgatcatccattaattaattaattaattactagttccggcttagatatatatctggcgattatttcagttcctagctactcctacatgcatgctttgcttaattagatctatctatctaatctatcccggccggcctgttttaattccatatatcatttggtttgcacgtacccatctatgatctatatatacatgcatgtcgactattgttggtcgtacgatattatattatatataa

SEQ ID NO: 386173 - DNA, 2003 bp, Oryza sativa
  unsure (1)..(2003): unsure at all n locations
ggagcaagggaggttgccgctggggacgtcgtggtgcctccacctcatcctcctcctcgcgctccggtcgctcacctaccagctatggttctcctacggcaacatgctcttcttcacccgccgccgccgcgtcgtcgacgacggcgtcgacttccgccagatcgacaccgagtgggactgggataacatggtgatcatgcaaaccctaatcgcggcggtgctggtcaccagccgtgtcttccctgccacgtcggatctctcggcgtgggacctacgtgggtgggccatcgctgtggtgctgcacgtggccgtttcagagccggccttctactgggcccaccgggccctccatctgggcccactcttcagccggtaccactccttgcaccactccttccaagccacccaagctctcacagctgggttcgtgacgccattgganancctgatcctgacgctggtggcgtggccccacttgcagggccttcatggcgggacacggctccgtgagctggtctatggacacatctcctcttcgactactccggtccatggggtacagcaacgtcgaggtcatctcacacaagacttccaggattttccctttctcagatacctcatctacacaccatcgtatcttagcctacaccacagggagaaggactccaatttctgcctgttcatgcctctctttgatgccctgggagggaccctcaaccccaagtcttggcagcttcagaaggaggttgacctaggaaagaaccatcgggtgccggactttgtgttcctggtgcacgtggtggacgtggtgtcgtcgatgcacgtgccattcgcgttccgagcgtgcagctcgctgccgttcgcgacgcacctcgtccttctcccgctctggcccatcgccttcggcttcatgctcctccagtggttctgctccaagaccttcactgtcagcttctataagctccgcggcttcctccaccagacctggagcgtgccccgctacggcttccagtatttcatcccttcggcgaagaagggcatcaatgagatgatcgagctcgcgatcctgagggcggacaagatgggcgtcaaagtgctcagccttgctgcactcaacaagaatgaggcgctcaatgggggtggcacgctgttcgtccgcaagcatcccgacctgcgggtgagggtggtgcacggcaacaccctgacggcggcggtgatcctcaacgagatccccggcgacgtcgcggaggtgttcctcaccggtgcgacgtcgaagctcggcagagccatcgctctctacttctgtaggaagaagatcagagtcttgatgctgacactgtcaacggagaggttcatgaatattcagagggaggcccctgcggagttccagcagtatctggtccaggtcaccaagtaccaggctgcacagaattgcaagacgtggatcgtggggaagtggctgtcgccgagggagcagcggtgggcgccggcggggacgcacttccaccagttcgtggtgccgccgatcatcgggttccggcgggactgcacgtacgggaagctcgccgcgatgaggctgccggaggacgtggaggggctggggacgtgcgagtacaccatgggccgcggcgtcgtgcacgcgtgccacgccggcggcgtcgtccacttcctggaggggtgggaccaccacgaggtcggcgccatcgacgtcgaccggatcgacgccgtctggaacgccgcgctcaggcacggcctcacgccggcgtgaacgccggcgacggcgacggcggctagtagtaactacgtacagcacggggacgccgaataactttcgtgttgtgcgtgtgtgtcgatcgattgtacgttgcattgttcgctcgcccggctagcttaattaattatcgggcgtgcttgtgttgtgtgttgatagctagcgtcgtacgtaagaataccgcagaaatgacaagaaagaatggatgattcctcgtaaaaaaaaaaaaaaa

SEQ ID NO: 386174 - DNA, 672 bp, Oryza sativa
  unsure (1)..(672): unsure at all n locations
accggcgcaacttcaaagctcggcagagccatcgcccttctacttcttgcagaaaaaagatcagagtcctgatgttgacattgtcgtcggagaggtttctgaagattcagagggaagcaccggcagagttccagcagtacctcgtgcaggtcaccaagtaccagcctgcacaaaactgcaagacgtggctggtggggaagttgctgtcgccgagggagcagaggtgggcgccggcggggacacacttccaccagttcgtggtgccgccgatcatcgggttccggcgagactgcactacggcaagctcgccgcnatgaggctccccaaggacgtccagggcctcggctactgcgagtacacgatggaacgcggggtggtgcacgcgtngccacgccggcggcgtggtgcacttcctggaagggtgggagcaccacgaggtgggcgccatcgacgtcgaccggatcgacgtcgtctggaaggcggcgctcaagcacggcctcacgcccgcgtgaccgccgccgccggaggccagcggcgaagccaccgagaacggccggcgatcttgtgggatttggtgtgctgtaagatagaagaaatgtacgagaaaaaaacgatttgccgtgggatttaaattaattaaaatttaatcaaactccctataaaaaaaaaaaa

SEQ ID NO: 386175 - DNA, 1061 bp, Oryza sativa
  unsure (1)..(1061): unsure at all n locations
ccgtcgtccttctagctagtgttgcccaccttgatttgctcgtactttgattctttctgcctctgcgtacgtgcgtgagagagctaagcatagagctagtggagtggaccggcctcactcgatctcagttctcgatcgatctcttcttcgtcttctgcgtcgtcgtcgtcgtccagcggtgagctatcagggtagcagccatggccggagtcgggaggaacatgctggcgccgctcttggtgctcaacctcatcatgtacctcatcgtcatcggcttcgcgagctggaacctcaaccacttcatcaatggccagaccaactacccaggcgtggcgggcaacggcgcgacgttctacttcctggtgttcgccatcctggccggggtggtgggcgcggcgtccaagctggcgggcgtccaccacgtgcgcgcgtggcgccacgacagcctcgccaccaacgcggcctcctccctcatcgcgtgggccatcaccgcgctcgccttcggcctcgcctgcaaggagatccacatcggcggccaccgcgggtggcgcctccgcgtgctcgaggctttcgtcatcatcctcgccttcacgcagctgctctacgtgctcatgctccacacgggcctcttcggtggcggcgacggcgcctaccgggaccacgactacggcgttggcgccggtgctgccgccggcgagcccaaggggacagcgagggtctgatcgatgatctccccgacacggggtcacgcaagaataaacgataatacatacttgatggtcattttgtgtgtgtgacagtgtgactgtgaggctctgcctctgtgtgcagcagtgcagtgtaagctctgtgctctcgcctttaattacactactagttgtttagcgttgtgtgttgggtttgtgtagcttgtacatgtgtgtatgtgaccgtacctagtacgtactttgatcgtagtagctaggtgtgcacgtcatggcctgtattttgctcgcatggaagtgccgtcctcaattaattactccttgtcaccgnnnnnnnnnnnnnnnnnnnnnnnnnnn

SEQ ID NO: 386176 - DNA, 1118 bp, Oryza sativa
  unsure (1)..(1118): unsure at all n locations
ataaatattaaccactcgacccatcactaacacccacaccccccagtacaaccaagatgagcaacaccaccatggctatttccaccatccttctcttcctcctcgccggcctcgtcgccgcccacgggacggacaccatgatccgtctcccaagcgacggcgccgaagcaccaccacgcccggccaaaccatgggactgctgcgacaacatcgagatctcccggctaaagatctacccgccactgtaccgctgcaacgacgaggtgaagcagtgcgccgccgcctgcaaggagtgcgtggaggcgcccggcggcgacttcaacggcggcgccttcgtctgcagtgactggttctcgacggtggaccccggccccaagtgcacggcggcgctggatgggctgtcgatggagaggccgtggaagtgctgcgacaacatcgagcggctgccgacgaagacctacccgccgctctggcgctgcaacgacgagctggagcccagcaagtgcaccgccgcgtgcaagtcgtgcagggaggcgccggggccgttcccggggccgctcatctgcgaggacgtctactggggcgccgacccgggccccttctgcacgccgcggccatggggagattgctgcgacaaggccttctgcaacaagatgaacccgccgacctgccgctgcatggacgaggtgaaggagtgcgccgacgcgtgcaaggattgccagcgcgtggagtcgtcggagccgcctcgctacgtctgcaaggaccgcttcaccggccagcccgggcccatgtgcaaaccccgagcggagaactagctagctacagatgatcgatgatcgatctgtgtgtccatcaataaaactcgccctagcttgcagctagctgatcgttcgttcgatcattcagagttggtatagctagaggctagagcttagctccatccagatttttcagtgctctgcagcttttgtgcatcttgcatgctttgttagtttgtgtgctccatgtgtgtgggtgtgtttgtctctgttcgcttgtgtggaccatgaggaaaaataaaataaatatgcaatgcaagcgtggatatgtaccccaaaaaaaannnnnnnnnnnnnnnn

SEQ ID NO: 386177 - DNA, 882 bp, Oryza sativa
  unsure (1)..(882): unsure at all n locations
ccacgcgtccgctcgaagaagatgaagaccgccatgactacttccacccttctcttcctcctcctcgccggcctcaccgccgccgccctcggcacggcggacgacgacaccaccaccaacaccatacgcctcccgaccgacggaggatcagcacagcaggcgccgacgatggagaagccgtggaagtgctgcgacaacatcgagcggctgccgacgaagaccaacccgccgcagtggcgctgcaacgacgagctggagcccagccagtgcaccgccgcgtgcaagtcgtgccgggaggcgccggggccattcccggggaagctcatctgcgaggacatctactggggcgccgacccgggccccttctgcacgccgcggacatggggagattgctgcgacaaggccttctgcaacaagatgaacccgccgacctgccgctgcatggacgaggtgaaggagtgcgccgacgcgtgcaaggattgccagcgcgtggagtcgtcggagccgcctcgctacgtctgcaaggaccgcttcaccggccatcccggccccgtgtgcaaaccccgagcggagaactagctagctacagatgatcgatgatcgatctgtgtgtccatcaataaaactcgccctagcttgcagctagctgatcgttcgttcgatcattcagagttggtatagctagaggctagagcttagctccatccagatttttcagtgctctgcagcttttgtgcatcttgcatgctttgttagtttgtgtgctccatgtgtgtgggtgtgtttgtctctgttcgcttgtgtggaccatgaggaaaaataaaataaatatgcaatgcaagcgtggatatgtaccccnnnnnnnnnnnnnnnnnnnnnnnn

SEQ ID NO: 386178 - DNA, 581 bp, Oryza sativa
gccacgcgtccgcccacgcgtccgcccacgcgtccgcccacgcgtccgatctgcgaggacgtctactggggcgccgacccgggccccttgtgcacgccgcggccatgggggaaatgctgcgacaaggccttctgcaacaagatgaacccgccgacctgccgctgcatggacgaggtgaacaagtgcgccgccgcgtgcaaggattgccagcgtgtggagtcgtcagagccgcctcgctacgtctgcaaggaccgcttcaccggccagcccgggcccatgtgcaaaccccgagcggagaactagctagctacagatgatcgatgatcgatctgtgtgtccatcaataaaactcgccctagcttgcagctagctgatcgttcgttcgatcattcagagttggtatagctagaggctagagcttagctccatccagatttttcagtgctctgcagcttttgtgcatcttgcatgctttgttagtttgtgtgctccatgtgtgtgggtggtgtttaattgggccctgttcgcttgtgtggaccaagagggaaaataaaatatatatgcaacgcaggcatgcaccc

SEQ ID NO: 386179 - DNA, 446 bp, Oryza sativa
  unsure (1)..(446): unsure at all n locations
aagatgagcaacaccaccatggctatttccaccatccttctcttcctcctcgccggcctcgtcgccgcccacgggaggtcgacaccatgatccgtctcccaagcgacggcgccgaagcaccaccacgcccgcccaaaccctgggactgctgcgacaacatcgagatgtccccgctcgagatcttcccgccgctgtaccgctgcaacgacgaggtgaagcagtgctccgccgcctgcaaggagtgcgtggaggcgcccggcgacttcccccgcggcgccttcgtgtgccgcgactggtactcgacggttggacccggggccacatgtgcacggggccggatcagccgacgacggagaggccgtggaagttctgttacagcatcgtgcagttccgcagaggatctttccgccgttttggggttcgaagacgagttgagnccggaaagt

SEQ ID NO: 386180 - DNA, 1561 bp, Oryza sativa
ttcgtttctcttctcctagccgacgcgacgacgacgacgacgtcgtcggtgtcgcctccgcgcgcgcggcgcgctgctcccctgcacgccgccgccgacccacggagaggactccccacccatcccaggtacggcgcctcgccgcgttctcttctccaggttcgctttgcagaactccctaacaagaaccagatccaacccgaccaccgctccaagtcttgagggttcttgcattgggagagggggagatgagcggcccaatgcaacgctcgtcgcagccacagtttatctctagcgtcgagcggaacaatcaatcgaatggtcctggcactcctcttattgacagcatagatgttgatcagattgttattccagagaaaaatagttggaagaacctattttcatacatagggcccggatttcttgtctctattgcgtatattgatcctggaaattttgagacagacctacaggctggagcacagtacaaatatgagcttctttggatcatacttattgcgtcatgtgctgctcttataattcaatcacttgcagctaggctaggagtcgtgactgggaagccacctggcccgagcattgcagaggtggaatatccaaaggctacaaatttcatattatggattcttgcggaactagctgtagttgcatgcgacattcctgaagtaattggaactgcttttgctttgaacatgctctttaaatccctgtgtggtgtggtgattctgataactggactcagcactctgatgctactgttactacaacaatatggggtccgtaaactggaatttctgatagctattctggtgtcattaatagcaacttgtttcttagttgagcttgggtattctaaaccaaattcttcagtggttgtgaggggcctttttgttcctgaacttaaagggaatggagccacaggtcttgctatctcactacttggtgctatggtgatgccgcataatctttttctccactcagaattggtactatcaagaaaagaaaaaaggtcagttcatgggatcaaagaggcatgtagattctatatgattgaaagtgcatttttggccctcacgatagcgttcctcattaacatatctatcatatctgttaataatactgtctgcgggtcagataatttgagtcctgaagaccagatgaattgcagtgatcttgatcttaacaaagcttcgtttttgttaaagaatgtcctcggaaactggagctcaaagttatttgcagtagccttgttggcgtctggccagagttctacaattacaggaacttatgcgggacaatatgtcatgcaggggtttctagatcttcggatgacaccctggatacggaaccttctaactaggtccttggcaattctgccaagtctgattgtttcgataattggaggttcctcagcagctggacagttgattatcattgcatcgatgatactgacatttgagccttcctttgcctctagttccactcctaaaattcacaagcagcaggacaaaaatggggcagcacacaaattcaaaacccggaa

SEQ ID NO: 386181 - DNA, 1600 bp, Oryza sativa
  unsure (1)..(1600): unsure at all n locations
nnccntncaccnacnnacnnntnntntgcnnaaccaccnncccaggntcntnggaccggccccnccngaattcggcacgagctccgccctagagctcgacggcggcggcaacaagggctgggggatgaagatatccgtgaagacactcaagggatccaccttccagatcgaggtggactccgcgcagaaggttgctgatgtgaaaaggataatcgagactactcaaggacagcacatttacccagctgagcaacagatgctcattcatcaggggaaggtgctcaaggatgacaccacattggatgaaaacaaagttcttgaaaacagcttccttgttataatgcttagacagggtaagggctcatcaagttcagctcctgctacatctaaggcaccctcaaatcaggctccccctactcaaacagtgcctgcagctcctgcatctcaagcaccagttgcaccagcaactactgtacctgtcactgtcagtgctcctaccccaactgccacagcttccccagctcctgctgttgctgtatcctctgaagctgataactacggtcaggccacctcaaaccttgttgctggcagcaatctagaggcaacaattcaatcaattcttgaaatgggtggtggaatatgggatagagacattgtgctgcatgctctaagcgctgcattcaacaacccggagagggctgttgaatatctgtactctggtgttcctgagcagatggacattccagttccacctccgagtatacagccagccaatcctacccaggcttcacaggcaactcaaccagcagctccatcaattctttcgtctggaccaaacgctagtcccttggacctctttcctcaagcccttccaaatgcttccaccgatgctgctggtctaggaaatcttgatgctttgcgcaataatgcacaattccgaaccttgctttctttagtgcaagccaatcctcaaattttacagccattgcttcaagaattggggaaacaaaatccccagattttgcagctgattcaggaaaaccaagctgagttcctccacttaatcaatgaaccagctgagggtgatgatgaagagaatttgctagaccagtttccagaggcaatgccacagaccatagcagttactccagaggaggatgaagccatacttcgtcttgaaccaatgggctttgaccgcgcgcttgttctggacgtgttcttcgcttgcaacaaggacgagcagctggcggcaaactatctcctagatcacatgaacgagttcgccgacgaggggccaccataagacacgcggatgggaaacttgtcaagctccaacctggtatcattggagccaagggtttgtgacccgtagtccgtagagccaaaggcttagtaaaacctttttattttattttatttttttgtggaatcgtctccttctgttccttcttttctttcattagtctgtaattcttttcagtttggcttttactttcttgcgtacatactctagattaccttttttacagacttgataacggagggaaaaaaaggttcagaacccgtcttcattccaaaaaaaaaaaaaaaaaaactcgag

SEQ ID NO: 386182 - DNA, 1882 bp, Oryza sativa
ggcattagatccacaagaacacttgggcagttgcaggtttgtctgggactttgagtacccatgcaattcatgatgccattggatacgaatgcttgtgcacaaccaatgagaagggctggtgagggtgctgggactgagaggttgatggaaagattgaatattgggggcatgactcaggagaaagcactgaggaagaggtgctttggtgatggagttactggaactgcacgacgtgtgttcacatctgatgctgatagagacactcctcatcttcggacacaattctcccgaaagaattatgctgatgcaagccacgtttctgctgtcattttgggtggaggcactggagttcaactctttcctctcacaaggacaagggctacgcccgctgttcctgttggaggatgttacaggcttattgacatccctatgagcaattgcttcaatagcggaataaataaaaatatttttgtgatgactcagttcaatctcacttcgcttaaccgcaatattcatcatacataccttgtgggggggatcaacttaactgatgggtctgtacaggtattggcggctacacaaatgcctgacgaaccggctggatggttccagggtacagcagatgctatcagaaaatttatgtggatacttgaggatcatatccacaaatccattgacaacattgtaatcttgtgtggcgatcagctttacaggatgaattacatggagcttgtgcagaaacatgtcgatacaaatgctgacattaccatatcatgtgctcccatcgacgggagccgagcttctgactatggactggtgaagtttgatcattcaggccgtgtgatccaatttcttgagaaaccagagggtgctgatttggaatcgatggttgataccagcttcctcagctatgcaatagatgacaaacaaaagtatccctacattgcatcaatgggaatttatgtcttgaaaaaggatgttcttttagacattctgaagtcaaaatatgcacacctgcaagactttggatcagaaattctcccgagagctcttttagagcataatgtgaaggtagcatgtgtcttcacagaatattgggaggatattggaacaatcaaatcattttttgatgctaacttggccctcaccgagcagcctccaaagttcgaattttatgatccaaaaactcctttcttcacctcacctcgatacttacctccagcaagattggacaagtgcaagtgcaagatcaaagatgcaataatctcagatggctgttcctttagtgaatgcaccattgagcattctgtcattggaatctcttcacgcgttagctcgggttgtgaactcaagatctatgaaactgaagaagaaacttcaaagctattgtttgaaggcaaggtcccaattggaataggccagaacacaaagataaggaactgtatcatcgacatgaatgctaggattggcaggaacgcgatcattgcaaacactcagggggtccaagagtctgatcaccctgaagagggatacataaggtctggaattgtggtgatcctgaagaatgcaaccaatgcaaccatcaaggacgggaccgtcatataaaagcatagataggccttggaatcgcacctccagtcatctgaaaactggcatccattgatgtgggattttgatgcatgagttggattcaagacggatagcgtagcctccatggcgaagtggtgtttttggtttagctatatgcctatatgcaataagctgcctgtggaagtcgcgcaaccttttgtgtaatttcaggtttatgtacttggtttgttttggaatgggaactctattattggtattctgaagtttgcacctaaaaaaaaaaaaaaaaaaa

SEQ ID NO: 386183 - DNA, 483 bp, Oryza sativa
  unsure (1)..(483): unsure at all n locations
cccccccctcgaggttcgacccactcgtccgcgctgacggttagttccaagggaaagaagaaatggaggcttcacgcaaggtgttctcggccatgcttctcatggtgctgctgcttgcagccactggtgagatgggcgggccggtgatggtggcggaggctcggacgtgcgagtcgcagagccaccggttcaagggcccgtgcgcccgcaaggcgaactgcgccagcgtatgcaacacggagggcttccccgacggctactgccacggcgtccgccgccgctgcatgtgcaccaagccctgcccctgatcgatgaaccagcagctagcgcagagcttgtgccgccacctcgcgcatgtgtcatcgtgtcgatcgatcggatcctagctgccctatgaatgaataaaagtgtgtggcttatgcgtggtttttctttgagaaaaaaaaaaaaaaaannnnnnnnnnnnnnnnnnnnnnnnnnnnn

SEQ ID NO: 386184 - DNA, 1847 bp, Oryza sativa
  unsure (1)..(1847): unsure at all n locations
gtccaattttattgtattatttaaggcctaccgcgggtgggtctatacccacgcgtccggcgcggcggcccatcatcagtgatcctctacaatcatcgactttcagcaaattaagatggctgctgccttctcctccaccgttggagctccggcgtccactccgaccaacttcctggggaagaagctgaagaagcaggtgacatcggcggtgaactaccatggcaagagctccaacatcaacaggttcaaggtgatggccaaggagctggacgagggcaagcagaccgaccaggacaggtggaagggtctcgcctacgacatctccgatgaccagcaggacatcaccagggggaagggtttcgtcgactcccttttccaggctcccacgggtgatggcacccacgaggccgtcctcagctcctacgagtacctcagccagggtctcagaacgtacgacttcgacaacaccatgggaggcttctacatcgcccctgctttcatggacaagctcgtcgtccacatctccaagaacttcatgaccctccccaacatcaaggtcccactcatcctgggtatctggggaggcaagggtcagggaaaatccttccagtgtgagctcgtcttcgccaagatggggatcaaccccatcatgatgagcgccggagagctggagagcggcaacgccggagagccggcgaagctgatcaggcagcggtaccgtgaggcggcagacatcatcaagaaggggaagatgtgctgcctcttcatcaacgatctggacgcgggtgcaggtcgcatgggaggcaccacccagtacacggtgaacaaccagatggtgaacgccaccctgatgaacatcgccgacaacccaaccaacgtgcagctccccgggatgtacaacaaggaggacaacccccgtgtccccatcatcgtcaccggcaacgacttctccacgctgtacgcgccgctcatccgtgacgggcgtatggagaagttctactgggctcccacccgcgacgaccgtgtcggcgtctgcaagggtatcttccgcaccgacaacgtccccgacgaggacatcgtcaagatcgtcgacagcttcccaggccaatccatcgatttcttcggcgctcttcgtgcccgtgtttacgacgacgaggtgcgcaagtgggtgtcggacacgggtgtggagaacattggcaagaggctggtgaactcgagggagggcccaccggagttcgagcagcccaagatgacgatcgaaaagctcatggagtacggatacatgcttgtgaaggagcaggagaacgtcaagcgtgtgcagctggctgagcagtacttgagcgaggctgctcttggtgacgctaactccgacgccatgaagactggttccttctacggttctgcgccatccagctgaataaaagatctctagctattcgcatcccatcgatgcatcgtaggcggcctgcataggaggaggagggcaaggagcacagcaagcaggtaacctgcctgtgccggaaggttgcaccgaccctgttgccaagaacttcgacccaacggcgaggagcgacgacggcagctgcctttacaccttttaagcaggccggcttgacgcttgctattaattatttctcctttttatgttttctctttgttctgtgtatcagatcgcgcccaagccatagctgggcatgacaagtttttgttaataataatataatataaagatatgggctatactatacatgagtatatttcatttgggtatcaaaaaaaaaaaaaaaaaaaaaaaannnnnnnnnnnnnnnnnnnnnnnnnnnnnnnnnnnnnnnnnnnnnnnnnnn

SEQ ID NO: 386185 - DNA, 610 bp, Oryza sativa
gctggtgaactcgagggagggcccaccggagttcgagcaccccaagatgacgattcgaaaagctcatggagtacggatacatgcttgtgaaggagcaggagaacgtcaagcgtgtgcagctggctgagcagtacttgagcgaggctgctcttggtgacgctaactccgacgccatgaagactggttccttctacgggcaaggagcacagcaagcaggtaacctgcctgtgccggaaggttgcaccgaccctgttgccaagaacttcgacccaacggcgaggagcgacgacggcagctgcctttacaccttttaagcaggccggcttgacgcttgctattaattatttctcctttttatgttttctctttgttctgtgtatcagatcgcgcccaagccatagctgggcatgacaagtttttgttaataataatataatataaagatatgggctatactatacatgagtatatttcatttgggtatcatttgtcaatttctgtgtccatccagtgttttcttagaacaatactgtaagacggtttactgtcagccaaaatgctaaattaagcaatgggaacaatacggtttgcaaaaaaaaaaaaaaaaaaa

SEQ ID NO: 386186 - DNA, 694 bp, Oryza sativa
  unsure (1)..(694): unsure at all n locations
aaagtgagcgcgcntaattacgacttcactatagggcgaattggttaccggnccccccctcgagttcgacccacgcgtccgcccacgcgtccgggtgaactcgagggaggncccaccgganttcgagcagcccaagatgacgatcgaaaagctcatggagtacggatacatgcttgtgaaggagcaggagaacgtcaagcgtgtgcagctggctgagcagtacttgagcgaggctgctcttggtgacgctaactccgacgccatgaagactggttccttctacggttctgcgccatccagctgaataaaagatctctagctattcgcatcccatcgatgcatcgtaggcggcctgcataggaggaggagggcaaggagcccagcaagcaggtaacctgcctgtgccggaaggttgcaccgaccctgttgccaagaacttcgacccaacggcgaggagcgacgacggcagctgcctttacaccttttaagcaggccggcttgacgcttgctattaattatttctcctttttatgttttctctttgttctgtgtatcagatcgcgcccaagccatagctgggcatgccaagtttttgttaataataatataatataaagatatgggctatactaaaaaaaaaaaaagaagctcgtaccgctctcgagcatccgtgcgcgtgcatgcgtgctcatag

SEQ ID NO: 386187 - DNA, 592 bp, Oryza sativa
  unsure (1)..(592): unsure at all n locations
taannggggggnaaattgaaggggtgggaattgnggnggccnacggattngngcnccaaagaganaatggaaagtcanggatagggaaantgttgtgaaggagcaggagaattanggtgtgcagtggtggagcanaattgagggaggttgttntggggacgctaactccgacccatgaagattggttcctttttacggttttcccccttccagctgaataaaagacttctagntattccgctccccatcgatgcatccgtaggccgcctgccatagggggaggagggcaaggagcacagcaaagcaggtaacctgcctgtcccggaaggttgcaccgaccctgttgccaagaacttcgacccaacggcgaggagcgacgacggcagctgcctttacaccttttaagcaggccggcttgacgcttgctattaattatttctcctttttatgttttctctttgttctgtgtatcagatcgcgcccaagccatagctgggcatgacaagtttttgttaataataatataatataaagatatgggctatactatacatgagtatatttcatttgggtaaaaaaaaaaaaaaaaaaa

SEQ ID NO: 386188 - DNA, 525 bp, Oryza sativa
gcgcaggttcgacccacgacgccacgcgtacccgatcgaggccacgcgtacgtccatacatgttcttactcagggtctcagaacggacgacttcgacaacaccatgggaggcttctacatcgcccctgctttcatggacaagctcgccgtccacatctccaagaacttcatgaccctccccaacatcaaggtcccactcatgctgggtatctggggaggcaagggtcatggaaaatccttccagtgcgagctcgcgtcaagcaagagggagatccaccctatatcagcgcgcgctggctagttagcatggctccactgcccgactgaaaccacattcaagcaggcaggccttccggctggcgacatgatggaatatggtatgacgggtgcgctgcctattcataaacgatctgcgcgcgcatgctgttcgttgggacacgcccataccactgggatcaaacaactggcttgcgcgaccctgatcaacatggacaacagcgcagcccacgtgcagccaacggggat

SEQ ID NO: 386189 - DNA, 811 bp, Oryza sativa
cccccgggacccccgacgcgccacgcggccgcaacagttgagttgaattgagctcgaattgtactcgattcaccacacagaggaatcaaatcgaagcagccatggctctcgtggagggaaacaacggcgtgtcggggggagcggtcagcttcagcgaggagcaggaggcgcttgtgctcaagtcgtgggccatcatgaagaaggattccgccaacattggactccgcttcttcttgaagatcttcgaggtcgcgccgtcgggaagccagatgttctcgttcctgcgcaactccgacgtgccgctcgagaagaaccccaagctcaagacccacgccatgtccgtcttcgtcatgacatgtgaggccgccgcgcagctgcggaaagccgggaaggtcaccgtgagagacaccaccctgaagaggctcggcgccacgcacttcaagtacggcgtcggagacgcccactttgaggtgacgaggttcgcgctgcttgagacgatcaaggaggcggttccggtggacatgtggagccccgcgatgaagagcgcgtggagcgaagcctacaaccaactggtcgcggccatcaagcaggagatgaagcctgctgagtgatatatatactgctccacctccatgatcctcgctgatcaactttgttgcattgtgctcgttcaatattcctcgccccacaaaagggacttttgtcggtgtgtgtatgtccaaatgattaaatcaactgctgttttgttctatgtaagatacataactcataaataaagatggttttctacaaaaaaaaaaaaaaaaaaaag

SEQ ID NO: 386190 - DNA, 831 bp, Oryza sativa
  unsure (1)..(831): unsure at all n locations
tcggaatcccggtcgaccacgcgtccggttgttttcagagcccagctagctctcgatcatttgttacagagaaattgatcaaagcaggaaattaaccagctgtcaggaagcaatggctctcgtggaggataacaatgccgtagcggtgagcttcagcgaggagcaggaggcgctggtgctcaagtcatgggcgatcttgaagaaggattccgccaatattgccctccgcttcttcttgaagatcttcgaggtcgcgccgtcggcgagccagatgttctcgttcctgcgcaactccgacgtgccgctcgagaagaaccccaagctcaagacccacgccatgtccgtcttcgtcatgacatgcgaggccgccgcgcagctgcggaaagccgggaaggtcaccgtgagagacaccaccctcaagaggctcggcgccacgcacctcaagtacggcgtcggagacgcccacttcgaggtggtgaagttcgcgctgcttgacacgatcaaggaggaggttccggcggacatgtggagcccggcgatgaagagcgcgtggagcgaagcctacgaccacctggtcgctgccatcaagcaggagatgaagcccgcggagtgatcgacaggcatgctagctgctccacctccatgatcctcgcctcgcgagtccgattagcttttgttgctttcaaatgctcgtttcatattcatcgtgtcccacaaaaaaaggagtgtgtatgtggtgtacgattggtgcacgctcctgctgttttcttctcgtgataagacataaataaagatggttttctacgctaaaaaaaaaaaaaaaaaagaann

SEQ ID NO: 386191 - DNA, 553 bp, Oryza sativa
  unsure (1)..(553): unsure at all n locations
gagcnnancgcganancgaggnttngaagatttgaatttgaagcagcgcgattggtactcgattcaccacacagaggaatcaaatcgaagcagccatggctctcgtggagggaaacaacggcgtgtcggggggagcggtcagcttcagcgacggagcaggaggcgcttgtgctcaagtcgtgggccatcatgaagaaggattccgccaacattggactccgcttcttcttgaagatcttcgaggtcgcgccgtcgggaggccaggatgttctcgttcctgcgcaactccgacgtgccgctcgagaagaaccccaagctcaagacccacgccatgtccgtctttcgtcatgacatgtgaggccgccgcgcagtgcgggagaaagcccggggaaagggtcaaccgtgagaagacaaaccaacccttgaaggaggcttttggggggnccaagggaantttcaaaggttaacggggngttcggagcnccccaaactttttttaaaggtttaccggagggtttccgggcttgnttttaagaacggtttnaaggggggg

SEQ ID NO: 386192 - DNA, 1049 bp, Oryza sativa
gaattccgaacaacaaagccgtcctcttctgaccaaaaagaccaaagccatggcgccttccctcgccacctcttccaccctcgctctcttcctcctcgtcgccgtctccatcgccgacgccgcgacattcgccatcaccaacaggtgccagtacacggtgtggccggcggcggtgccatcgggcggcggcacgaagctcgacccggggcagacgtggaccatcaacgtgccggccgggacgacgggcgggcgcgtgtgggctgggcgctgcggtttcgacggcagcggcaacgggcagtgcgagacgggcgactgcggcgggaagctgcggtgcacggcgtacggcgcggcgcccaacaccctggccgagttcgcgctgaaccagtggaacaacctcgacttcttcgacatctccctcatcgacggcttcaacgtgcccatggccttcctccccgccggcagcggcgccgggtgccccaaaggcgggccgcggtgcgccacggccatcacgccgcagtgccccagcgagctgagggcgcccggcgggtgcaacaacgcgtgcacggtgttcaggcaggacaggtactgctgcaccggatcggcggccaacagctgcggcccgaccaactactcggagttcttcaagcggctgtgcccggacgcctacagctaccccaaggacgacgcctccagcacctacacttgcccggccggcaccaactaccaggtcgtcttctgcccatgatcgaacggccgcgcgcgcggctgatcgatcgatctctgatgatcttgggatttgtatgatcgatgcatgtgtggatgtaaccgtgatatacgtacctaagaataagcccgcacgcgcaaacgaggataagtttatgttatcgatctttgaataagtaaaaacaactgggtttatgaattgatatatatgaacgatgactttcagtaagataaacacggttaattacgtgttcgatcagccatatgttattatgcgtgtaactatggaaactattctaactataaaaattaagaagacggaattc

SEQ ID NO: 386193 - DNA, 923 bp, Oryza sativa
ccacgcgtccgggctacacaatggcagctcccgccatcctccgcctcctccctcttctcctcctcgccgccgccgcgaacgccgccacgttcaccatcaccaacaagtgccagatcaccgtgtgggcggcaacggtgccgtccggcggcgggcagcagctggacccggggcagcagtgggtgatcgacgtgccggccggcacgacgggcgggcgcgtgtgggcgcgcacgggctgcagcttcgacggcagcggcaacgggcggtgccagacgggcgactgcggcggcgtgctgcggtgcgcggcgtacgggcagccgcccaacacgctggcggagttcgcgctgaaccagttcagcaacctcgacttcttcgacatctccctcatcgacggattcaacgtgcccatggacttcctccccgccggcgaccgggtgcgcaagggcgggccgcggtgcgaggcggacgtggcggggcagtgcccgagcgagctgagggcgcccggcgggtgcaacaacgcgtgcacggtgttcaagcaggaccagtactgctgcaccggctcggcggcgaacaactgcggcccgaccaactactcgcagttcttcaaggggctctgcccggacgcctacagctaccccaaggacgaccagacgagcaccttcacttgcccggccggcaccaactaccaggtcgtcttctgcccatgagggacgatgacttgttagctggcatctgatcgatgtgatcttggttagatgtatacacaataaacaagcatgcatactttttatgcgagtttgtatcagaatcatgaagagaaaagttactctgtaataaagtaaaccattcaaaactgaagtggtttttcacttgtagtttggttaattacacaggcatgaacgaatccgttcaaattctcggaattc

SEQ ID NO: 386194 - DNA, 1220 bp, Oryza sativa
tcttatctcatcccatcatcggtcatattcgcctcagcttcatgttgctgagctataggcgaatggttgacaagagtactagttagcttaataatatagctttgcaaaagttgaggtaaggggttgtgagaagaagcagcttgatttgctactggctttgtgctgtacccgcgggaatcgttcgatcgatcgggcgagatggggaggggaagagttgagctgaagcgcatcgagaacaagatcaacaggcaggtcaccttctccaagcgccgcaacggcctcctcaagaaggcctacgagctgtccgttctctgcgacgccgaggtcgcgctcatcatcttctccagccgcggcaagctctacgagttcggcagcgccggcataacaaagactttagaaaggtaccaacattgttgctacaatgctcaagattccaacaatgcactttctgaaactcagagttggtaccatgaaatgtcaaagttgaaagcaaaatttgaagctttgcagcgcactcaaaggcacttgcttggggaggatcttggaccactcagcgtcaaagaattgcagcagctggagaaacagcttgaatgtgcactatcacaggcgagacagagaaagacgcaactgatgatggaacaggtggaggaacttcgcagaaaggagcgtcagctgggtgaaattaataggcaactcaagcacaagctcgaggttgaaggttccaccagcaactacagagccatgcagcaagcctcctgggctcagggcgccgtggtggagaatggcgccgcatacgtgcagccgccgccacactccgcggccatggactctgaacccaccttgcaaattgggtatcctcatcaatttgtgcctgctgaagcaaacactattcagaggagcactgcccctgcaggtgcagagaacaacttcatgctgggatgggttctttgagctaagcagccatcgatcagctgtcagaagttggagctaataataaaagggatgtggagtgggctacatgtatctcggatctctctgcgagccacctaatggtcttgcgtggccctttaatctgtatgtttttgtgtgtaagctactgctagctgtttgcaccttctgcgtccgtggttgtgtttccgtgctacctttttatgttttgatttggatcttgtttgaaaataatcttaccagctttgggtaaactgtttattacgtactct

SEQ ID NO: 386195 - DNA, 1802 bp, Oryza sativa
  unsure (1)..(1802): unsure at all n locations
ggcacgaggaatcacacacgccggactctccccttctctctgtctcgctccttcgttcgctcgctttatcccccccgaataaaggcgagaagccgcagcggcggacgaagaagagggcagatagaaatggcggcggagacgttcctcttcacctccgagtccgtgaacgagggtcacccggacaagctgtgcgaccaggtgtcggacgcggtgctcgacgcgtgcctcgcccaggaccccgacagcaaggtggcgtgcgagacgtgcaccaagaccaacatggtgatggtgttcggcgagatcaccaccaaggccaccgtcgactacgagaagatcgtccgcgacacctgccgcggcatcggcttcgtgtccgacgacgtcggcctcgacgccgaccgctgcaaggtgctcgtcaacatcgagcagcagtcgcccgacatcgcgcagggggtgcacggccacttcaccaagcgccccgaggagatcggcgccggcgaccagggccacatgttcggctacgccaccgacgagacccccgagctgatgcccctcagccacgtcctcgccaccaagctcggcgcccgcctcaccgaggtccgcaagaacggcacctgcgcctggctcaggcccgacggcaagacccaggtcaccgttgagtacctcaacgacgccggcgccatggtccccgtccgcgtccacaccgtcctcatctccacccagcacgacgagaccgtcaccaacgacgagatcgccgccgacctcaaggagcacgtcatcaagccggtcatccccgacaagtacctcgacgagaagaccatcttccacctcaacccctcgggccgcttcgtcatcggcgggccccacggcgacgccggcctcaccggccgcaagatcatcatcgacacctacggcggatggggcgcgcacggcggcggcgccttctccggcaaggacccgaccaaggtcgaccggagcggcgcctacatcgccaggcaggccgccaagagcatcgtcgccagcggcctcgcccgccgctgcatcgtgcaggtgtcgtacgccatcggcgtccccgagccgctctccgtgttcgtcgactcctacggcaccggcaagatccccgacaaggagatcctcaagatcgtcaaggagaacttcgatttcaggcccgggatgatgaccatcaacctcgacctcaagaggggcggcaaccggttcatcaagaccgcggcgtacggccatttcggccgcgaggatcccgacttcacatgggaggttgtcaagccgctcaagtatgagaaggcatcttcctgaggaagaagataaagatgatgaccatgagaggggggtctctctctcgctatctacctccattgccggccgttgtcggcgccgccgccgcctacctgatgtgtctttgatcagtagtgactggttgctccatggaagaagaagaagatgggaagatgatgaaagggttgaaatcgacttgcgaagttgctagtgatatcggtgtagcagccagagttttagtgttcagatatcttcggcgttttatccttttttcatttttttgagtcagctgaaactgcaagagagctctgcagtttgctctatcagtttgtcttgttctttttttttttcaggttgttgtgtaaccgcatctgtaatactgtctctttcaatatgaaggaaccatatgtgatactggcaccataattcatccaaaaaaaaaaaaaaactcgagggggggcccggtacccaattcgccctatagtgagtcgtattacaattcnnnntttctn

SEQ ID NO: 386196 - DNA, 482 bp, Oryza sativa
  unsure (1)..(482): unsure at all n locations
ggtaccgggccccccctcgaggtcgacccacgcgtccggtttctctctcgctatctacctccattnccggccnttgtcggcgccgccgccgcctacctgatgtgtctttgatcagtagtgactggttgctccatggaagaagaagaagatgggaagatgatgaaagggttgaaatcgacttgcgaagttgctagtgatatcggtgtagcagccagagttttagtgttcagatatcttcggcgttttatccttttttcatttttttgagtcagctgaaactgcaagagagctctgcagtttgctctatcagtttgtcttgttctttttttttttcaggttgttgtgtaaccgcatctgtaatactgtctctttcaatatgaaggaaccatatgtgatactggcaccgttaaaaaaaaaattaaggattaaaaaatattctagaaggacaataaatgataattttgatacttatacaaaaacgg

SEQ ID NO: 386197 - DNA, 776 bp, Oryza sativa
  unsure (1)..(776): unsure at all n locations
ccacgcgtccgcccacgcgtccgcccacgcgtccgcccacgcgccggccccctcgccccatcagagatcaggtagaacagtgagagtgaggtgcagaaaaatttgagctgaagctgaggatggcaacatccatgatcacctcgccgctggtggcgccggcccgggccaagggccttccgtccatctcccgccggggatcctccttcgccatcgtctgcagcggtgggaagaagatcaagaccgacaagccctacgggattggaggtggcatgtcagtcgatattgatgcatctggcaggaagagcacggggaagggtgtgtaccaattcgttgacaagtacggcgcaaacgtcgacggctacagcccaatctactcgccggaggaatggtctcccaccggtgacacctacgttggtggaaccaccgggcttctgatctgggccgtgaccctcgccgggctcctcggcggcggcgccctcctcgtctacaacaccagcgccctcgccggctaaatttcacccaaatccagtctatgtatgtaacaccaagctgggtgtctgcatattcatctgtaatctaagatagccttcctctgaatgcgatgtgatgatgcccactgcttaatcaaactgcattgtgattaatctatgtaacactgtacttgcatgatgatgatatactacacttgatacttgaatttggagattaattgttgatactaaatacatagattacataaaaacccaacccnnnnnnnnnnnnnnnnnnnnnnnnnn

SEQ ID NO: 386198 - DNA, 706 bp, Oryza sativa
  unsure (1)..(706): unsure at all n locations
ccacgcgtccgcccacgcgtccgcccacgcgtccgcccacgcgtccgggcatgtcagtcgatattgatgcatctggcaggaagagcacgggcaggacttgtccccagctcctaaatttctcaatgggaagggtgtgtaccaattcgttgacaagtacggcgcaaacgtcgacggctacagcccaatctactcgccggaggaatggtctcccaccggtgacacctacgttggtggataccaccgggcttctgatctgggccgtgaccctcgccgggctcctcggcggcggcgccctcctcgtctacaacaccagcgccctcgccggctaaatttcacccaaatccagtctatgtatgtaacaccaagctgggtgtctgcatattcatctgtaatctaagatagccttcctctgaatgcgatgtgatgatgcccactgcttaatccaactgcattgtgattaatctatgtaaccctgtacttgcatgatgatggatatgctacacttgacacttgaatttggagattaccaaaagggggggcccggtacccaattcgccctatagtgagtcgtattacaattcactggccgtcgttttacaacgtcgtgactgggaaaaccctggcgttacccaacttaatcgccttgcagcacatccccctttcgccagctggcgtnatagcgaagaagcccgcaccgatcgccctt

SEQ ID NO: 386199 - DNA, 575 bp, Oryza sativa
ccacgcgtccgcccacgcgtccgcccacgcgtccgcccacgcgtccgcacaattatattgagctgccattgcttctcacctctgctttgcatccatccatccatcagagatcaggtagaacagtgagagtgaggtgcagaaaaatttgagctgaagctgaggatggcaacatccatgatcacctcgccgctggtggcgccggcccgggccaagggccttccgtccatctcccgccggggatcctccttcgccatcgtctgcagcggtgggaagaagatcaagaccgacaagccctacgggattggaggtggcatgtcagtcgatattgatgcatctggcaggaagagcacggggaagggtgtgtaccaattcgttgacaagtacggcgcaaacgtcgacggctacagcccaatctactcgccggaggaatggtctcccaccggtgacacctacgttggtggaaccaccggtcttctgatctgtgtcgtgaccctctacgggctcctcggcggtggttcccttcttttctacaacaccttttcttttttcttttaaattttcctcaatttctgttt

SEQ ID NO: 386200 - DNA, 781 bp, Oryza sativa
ccacgcgtccgcccacgcgtccgcccacgcgtccgcccacgcgtccgtgagagtgaggtgcagaaaaatttgagctgaagctgaggatggcaacatccatgatcacctcgccgctggtggcgccggcccgggccaagggccttccgtccatctcccgccggggatcctccttcgccatcgtctgcagcggtgggaagaagatcaagaccgacaagccctacgggattggaggtggcatgtcagtcgatattgatgcatctggcaggaagagcacggggaagggtgtgtaccaattcgttgacaagtacggcgcaaacgtcgacggctacagcccaatctactcgccggaggaatggtctcccaccggtgacacctacgttggtggaaccaccgggcttctgagctgggccgtgaccctcgccgggctcctcggcggcggcgccctcctcgtctacaacaccagcgccctcgccggctaaatttcacccaaatccagtctatgtatgtaacaccaagctgggtgtctgcatattcatctgtaatctaagatagccttcctctgaatgcgatgtgatgatgcccactgcttaatcaaactgcattgtgattaatctatgtaacactgtacttgcatgatgatgatatactacacttgatacttgaaaaaaaaataataaataaataaaacatacattattaaaaataaaatataaaaaataattcgcacaattaagtatgaactacatctagattgaaatatacataataaaaaaaagggggg

SEQ ID NO: 386201 - DNA, 1227 bp, Oryza sativa
  unsure (1)..(1227): unsure at all n locations
cctacacctctgtattggaactattacgaccacatgctctcttcctactctcctccttagcacgagcggacttaatctctctcgccctaatcatcatcgtcttcctcctcttggatcttctcctctgccatggcgggcaacagaggaggcgatgccggggaaggggagtggctcaaggtcgccgagctcagggccacggtggaagcccaggacccccatgccaaggaagtggacaacctgacgctgaggaggttcctgcgggcgcgagaccacaacgtggagaaggcgtcggcgatgctgctcaaggcgctccggtggaggagggaggcggtgcccggcggctcggtgccagaggagaaggtgcaaagcgacctcgacgacgacaaggtctacatgggcggcgccgatcggaccggccgtcccatcctcctcggcttccccgccaagcacttctccgccaaacgcgacatgcctaagttcaagagttattgtgtctacttacttgacagcatctgtgcaaggatccccagaggccaggagaagttcgtctgcatcgtggatctcaagggctggggttactccaactgcgacatcagagcttacatcgcggccatagagatcatgcagaattactacccggagaggctcggcaaggccctgatgatccatgtaccctacatgttcatgaaggcctggaagatgatctaccctttcatcgacaatgtcaccagggacaagttcgtgttcgtggacgacaagagcttgcaagaggtgctgcaccaggagatcgacgatagccagatcccggatacgttgggcgggaagctggcaccggtttccctcaagaacaacgcgcgaattaaccttgattagtagcgaggctcaattagcacgcagttataccgataatcaagcacaagattatacacacacgtatactatacatggatcgatgggatgaacaaaagatatgtgtaattgtgaaaaatgcagctctcatatcacagctggtctcactgtttgtagcattgccatcgtcatttatctcagtaaccaaagcttctgatcagtaattacatgtactactgtcactatgacaagtaaagactccaatactccatatcgaaaaaatatgaaaaagggagccacgtggctaagaagtataaatttataataaagtattcccaaaaaaaaaaaaaaaannnnnnnnnnnnnnnnnnnnnnnnn

SEQ ID NO: 386202 - DNA, 1134 bp, Oryza sativa
gcagcaacgagaaaaggcggaggcggcggcgcaaccgacaaggaaaagcaaagcgagagcaggaaaacctcgccggcggcgacaccaccaccaccagcaggcagggatggcccggtacgaccgcgcgatcaccgtcttctcccccgacggccacctcttccaggtggagtacgccctcgaggccgtccgcaagggcaacgccgccgtcggcgtccgcggcaccgacaccgtcgtcctcggcgtcgagaagaaatccacccccaagctccaggactccaggtccatgcgcaagatcgccagcctcgacacccacatcgcgcttgcctgcgcggggctcaaggcggacgcccgcgtgctcatcaaccgggcgcgcgtcgagtgccagagccaccgcctcaccgtcgaggacccagtcaccgtcgagtacatcacgcgctacatcgccggactgcagcagaagtacacccagagcggcggggtgcgccccttcggcctctccaccctcatcgtcggcttcgacccctacaccgagaagcccgccctctaccagaccgacccatccggcaccttctccgcctggaaggccaacgccaccggccgcaactccaactccatgcgcgagttcctcgagaagaattacaaggacacctccggcaaggagaccatcaagcttgccatccgagccctccttgaggttgtcgagagcggtggcaagaacatcgagattgcggtgatgacacacaaggatggcctccgcgagctggaggaggctgagatcgacgagtacgtggctgagattgaagcagagaaggctgccgccgaggccgcgaagaagggcgccccgaaagaaacctgacctgatcatcatgattcagcaaagcataatctctcttagcatgtgttgtttcttttctgttcttgtttgagaggaacgcagaactgtttggttcaactgaagtggatatggctatttgctgatcagcctacctggagtaaatcctcatgctatatgcttttgtgattgttgcacaacaacctgctgcgatgctcatcgtgtcagttgccactcagtgggtctccttttatgtatgaatatatctgttgcctgttggttgtaaaaaaaaaaaaaaaaaa

SEQ ID NO: 386203 - DNA, 861 bp, Oryza sativa
cttgagttggagcaacacaccaagaaggccagagagattcagagaactacaccgagaaggcgagattgtttgcgtggttggtaatttggccggccttgatcgatcgagcggagaagagaagaaaaagatggcggggagcggtgtcctggaggtgcatctcgtcgacgccaagggcctcaccggcaacgacttcctaggtgagataggcaacatacacccgtacgtggtggtgcagtaccggagccaggagcgcaagagcagcgtcgccagagatcaagggaagaacccgagctggaacgaggtgttcaagttccagatcaactccacggcggcgaccgggcagcacaagctctttctgcggctcatggaccacgacaccttctcacgggacgacttcctcggcgaagcaacgatcaacgtgactgacctgatcagcttaggcatggagcacggcacatgggagatgagcgaatccaagcaccgggtcgtcctcgcggacaaaacataccacggcgagatcagagtcagcctcacgttcacggcttctgcaaaggctcaagaccacgcagaacaggttggaggatgggcgcacagctttcgtcagtagaaagattgtgaacttcaagtctataatcagttggggcctgtgggaggtttagataagtatactatagtactagcaaggtaggattttgtgagtaacaacggcatctaatgcccaagattgatgtggttcgaagtgtatgtatgctgccttttttttttctatactagatgtatattcagaacattgtagagtcatgaacctgttaatggatgtgaattatgatactaaaaaaaaaaaaaaaaaaaaaaaaaaaa

SEQ ID NO: 386204 - DNA, 1724 bp, Oryza sativa
cccacgccgtccgcccacgcgtccgcccacgcgtccgaccgattgagggaaaaaaaaagagaaaaagaaaagaaaaaaaagaagaagaagagagaactcgaactctcgcctaccatttcgcccccctccgcaagcaatccaccactgcatcggcggcgagggctcaccggcggcgagccatgtgcggcggcgccatcatccaccacctgaaggggcacccggaggggtcgcgccgggcgacggaggggctcctgtggcccgagaagaagaagcccaggtggggcggcggcgggaggcgccacttcggggggttcgtggaggaggacgacgaggacttcgaggccgacttcgaggagttcgaggtggactccggggactcggatttggagctcggggaggaggacgacgatgacgtcgtcgagatcaagccggccgccttcaagagggccctctccagagataacttgagcaccattaccactgccggatttgatggtcctgctgcaaagtctgccaaaagaaagagaaagaaccaattcaggggcatccgccaccgcccttggggtaagtgggctgctgaaatcagagatcctcgcaagggtgttcgtgtctggcttggcactttcaacagtgctgaagaagctgcaagagcttatgatgctgaagcaccccggattcgtggcaagaaggcccaaggtgaattttccagaggctccaacaactgctcagaagcgtcgtgctggctccaccactgctaaagcacccaagtcaagtgtggaacagaagcctactgtcaaaccagcattcaacaatcttgccaatgcaaatgcgtttgtctacccatctgctaacttcacttcaaacaagccgtttgttcagcctgataacatgccatttgttcctgcaatgaactctgctgctcctattgaggaccctatcatcaactctgaccagggaagcaactcatttggctgctctgactttggctgggagaatgataccaagacaccagatattacatcaattgctcccatttcaaccatagctgaagtcgatgaatctgcattcattaagagcagtaccaacccaatggtccctcctgttatggagaacagtggtgttgatctgcctgatttagaacccaacatgaggttccttctggatgatggtggtggtgactcaattgatagcctttctcaacctggatggatcacaggatgttgtcagcaacatggacctctggagctttgatgacatgcccgttagcgatttctattgaggaattcgaagtcttctagtcggagcatgtacacagggaaaaaaaaggaataaatactattggagattgggaggcacctgcatggcaccttgggggtagcatatcgttatgtttagcttagatgcaaaaggctgcatcctgaaactctttggtgattggacctgttccctatccgctgtctatgtatggcagccatctatgagactcaagaactgcttttttttttccgttctagttttctgtcgttgctacctgtatatggctatgaacatcgtgaatccatggccattatgttttaatctatgttgttgactgctctttctttcggtctttgctgtgctgcgctatgttggtgataactagctaccatattgattttctgtacataattcatttgttgaatccgaaattaaatagtgcattgactaaaaaaaaaaaaaaaaaa

SEQ ID NO: 386205 - DNA, 1053 bp, Oryza sativa
  unsure (1)..(1053): unsure at all n locations
cccacgcgtccgagcagacaaggtagtagtacaggcttttgtacgtacgtagcagagggagttcccaagatggctggggcctctgccaaggtcgtcgcgatgctgctctccgtgctcgccacgtacggcttcgccgccggcgtcgtctacaccaacgactggctcccggccaaggccacctggtacggccagcccaacggcgccggacccgacgacaacggcggtgcgtgcgggttcaagaacaccaaccagtacccgttcatgtccatgacctcctgcggcaacgagcctctgttccaggacggcaagggctgtggcgcctgctaccagatacggtgcaccaacaacccgtcgtgctccgggcagcccaggacggtgatcatcacggacatgaactactaccccgtggccaggtaccacttcgacctgagcggcacggcgttcggcgccatggcgaggccggggctgaacgaccagctccgccacgccggcatcatcgacatccagttcaggcgcgtcccgtgctaccaccgcggcctctacgtgaacttccacgtcgaggccgggtccaacccggtgtacctcgccgtgctggtggagttcgccaacaaggacggcacggtggtgcagctcgacgtcatggagtcgctccccagcggcaagccgacgcgggtctggacgcccatgcgccgctcctggggatccatctggcgcctcgacgccaaccaccgcctccagggccccttntccctccgcatggtcagcgagtccggccagaccgtcatcgcccaccaggtcatcccggccaactggagggccaacaccaactacggctccaaagtccagttccgttgatccatcgatcgatctacctatgtgcatgcaatgccttcgtcgtcttgtgtcgccggtcaagaacgaattttgattctaccgatcggcagttcggcactagtactgtactacgattctgtgtgtgtgtgtgtgtgtgtgtgattgcaatgcaaattgcgaacggatcaattaagagcgtttttttctctctctcttttt

SEQ ID NO: 386206 - DNA, 1358 bp, Oryza sativa
cccccactcatctcacttcactctctttctcttctcttcacttcaccaccgccacctctctcatcggatccctgcagaggaggagagggcagtggcggcgaaaggcgacatgggctcgctgtcctctctcgccgccgcggcggtgtttctctccctcctcgccgtcggccactgcgccgccgccgacttcaacgccaccgacgccgacgccgacttcgccggcaacggtggggacttcaactccagcgacgccgccgtctactggggcccctggaccaaggccagggccacctggtacggccagcccaacggcgccggccccgacgacaacggcggcgcgtgcgggttcaagcacaccaaccagtacccgttcatgtcgatgacctcctgcggcaaccagccattgttcaaggacggcaagggatgcggctcttgctacaagatgcagatgcaccaaggaccagtcgtgctccggcaggtcggagacggtgatcatcaccgacatgaactactacccggtggctccgttccacttcgacctcagcggcacggcgttcggcaggctcgccaagcctggcctcaacgacaagctgcgccactccggcatcatcgacatcgagttcaccagggtgccatgcgagttcccggggctcaagatcgggttccacgtggaggagtactcgaaccctgtgtacttcgcggtgctggtggagtacgaggacggcgacggcgacgtggtgcaggtggacctgatggagtcgaagacggcgcacgggccgccgacggggaggtggacgccgatgagggagtcgtggggctccatctggaggctggacaccaaccacaggctccaggcccccttctccatccgcatccgcaacgagtccggcaagacgctcgtcgccaacaacgtcatcccggccaactggaggcccaacacattctaccgctccttcgtccagtacagctgaaccgccgctcgccggcggcgaccctcggcgccggcatcgccgccgctgctgctgctagtaatactactactgctatgatgtaattgtgttaccggttgggttctttgagtttgttggggttggggattgtgtggtcggtctgtgttgcgatttgcagaaaccgggcgagcgaaagaagaaaaaaaaagctgtgtgggaaatggaggaggtaggcgtacaaggttacgctctcccgcccactctcgcttttataatttatcattttcaaatggtgatgatatgatgattaatcaaaaggattatattgctacttaaattgtatggtactaccattagcttgctgtgatctgtatctatcctccctgtttgcgtaaaaaaaaaaaaaaa

SEQ ID NO: 386207 - DNA, 755 bp, Oryza sativa
  unsure (1)..(755): unsure at all n locations
tgcaggattcggcacgagctcagaatcctacctgactagtactaccactactagctagtagcgagctactctctctggtcatcaagctttgagtggttggagtggtggcagctatggctttttccatctccaagaaggctgcagttgctgcactcttctccttccttgttgtcacctgcgtcgccggcgccaggccggggaacttcagcgcctccgacttcaccgccgatcccaactgggaagtcgccagggccacctggtacggcgctcccaccggcgccggccctgacgacgatggcggtgcttgcgggttcaagaacaccaaccagtacccgttctcgtcgatgacctcctgcggcaacgagcctatcttcaaggacgggaagggctgtggctcatgctaccagataagatgcgtcaaccaccctgcctgctccggcaacccggagacggtgatcatcaccgacatgaactactaccccgtttccaagtaccacttcgacctgagcggcacggcgttcggcgccatggccaagccggggcagaacgaccagctccgccacgccggcatcatcgacatccagttcaagagggtgccgtgcaatttccctgggctgaaggtgacgttccacgtggaggaggggtcgaaaccggtgtacttcgcggtgctgggttgagtacgaggacggcgacggcgacgtggtgcaggtggatctcatggangccaaatcccantcgtggacgcngatgcgcga

SEQ ID NO: 386208 - DNA, 398 bp, Oryza sativa
  unsure (1)..(398): unsure at all n locations
atctcacttcactctctttctcttctcttcacttcaccaccgccacctctctcatcggatccctcctcgccgtcggccactgcgccgccgccgacttcaacgccaccgacgccgacgccgacttcgccggcaacggttgggacttcaactccagcgacgccgccgtctactggggcccctggaccaaggccagggccacctggttacggccagcccaacggcgncggccccgacgacaacggcggcgcgtgcgggttcaagcacaacaaccagttacccgttcatgtcgatgacctcctgcgggcaaccagccatttttcaaggacgggcaaggggattgcggntttttcttanaagattcagattgcancaaaggaccagtngttcttccggaaggt

SEQ ID NO: 386209 - DNA, 1989 bp, Oryza sativa
  unsure (1)..(1989): unsure at all n locations
gaattccggtcggggttcgcccggcgcagttgttgagaggcaaggcaaactcaggcgactgagctaaagaagccgcactagtatgggggtgacgaaggcggaggcggttgccgcgacggggaaggtggtggacgacatcgaggcgctcgccgatctcagaaaggagccagcatggaaaaagtttttgtcccacattggaccaggctttatggtctgtttggcttacctcgatcctggaaatatggagactgatctacaagctggtgccaatcacaaatatgagcttctttgggtgattttgattggcctgatctttgcactgattatacaatcattatcggctaatcttggagtggtgacagggcgccatcttgctgagctgtgcaagactgaatatccagtatgggtgaaaacctgcttatggctgctagcagaactagctgtgattgcttccgatattccagaagttataggtacaggatttgctttcaaccttttgttccacataccagtgtggaccggggttctcattgctggctctagcacgcttcttcttcttggactgcaaagatatggggtaaggaaactggaggttgtggtcgcgctattggtgtttgtcatggcagggtgcttcttcgtggagatgagcatagtcaagcctccggttaatgaggtccttcaaggattattcatccccaggctcagtgggcccggtgccacaggagactccattgcccttcttggggctcttgtaatgccgcacaatctattcttgcactctgccctggtgctgtcgaggaatacacccgcatcagcaaaaggaatgaaggatgcctgtaggttcttcctctttgagagtgggatagctcttttcgtggctctgcttgtcaacattgcaatcatctctgtctccggcactgtatgtaatgcaaccaacctttcaccagaagatgctgtaaaatgcagcgaccttacattggactcctcatccttcctcctcaggaatgtgctaggaaagtctagtgcgacagtgtacggtgtagcactcttggcttctggacagagctcgaccattactggcacttatgctgggcaatatgttatgcaggggttcctagacatcaaaatgaaacagtggcttcggaacctgatgacacgcagcattgccattgtgcctagcttaatcgtctccatcattggagggtctagtggcgccggtcgtctcatcgtcattgcatcgatgattctatcctttgagctaccatttgctctgatccctcttctcaagttcagcagcagcagcaacaagatgggtgaaaacaagaactccatctatattgttggattctcctgggtgctggggttcgtcatcatcgggataaacatctacttcctcagcacaaagctggtcggctggatcctccacaacgcgctcccgacattcgccaacgtgctcatcggcatcgtgctgttcccgctcatgctgctctacgtcgtcgccgtgatctacctgacgttcaggaaggacaccgtcaagttcgtgtctcgtcgtgagctgcaggccggcgacgacaccgagaaagcacaggtagccacctgcgtcgccgacgaggacagcaaagagccacccgtgtagtacccttccagaccggttaccggtgttggctggtttttattggatagatgtttaggtccaattttttttatataaaaaatccaatagatgtttaggtccaaaattttgaattcaaaaaccggttagcagtgataaccggctgaaattttggcccatgggagtagattgttgctttttttcttagtgattagttattggcagattggcagaatgttgtagctaggcaatctaattgtatggttagatatttagtcataaatccaagagtgagttttcttggatgcgaggacaaggacaaatataaatgtaaataaatgcagttaaagtaacaccttgctccttgtggacatcnn

SEQ ID NO: 386210 - DNA, 1155 bp, Oryza sativa
  unsure (1)..(1155): unsure at all n locations
ccacccccaccgcctcgcccatccacaccgacgccaaggcagcgcttgttcttgttgttgttgttgttgttggcttcgctttgctgctaagctagctggaggaaggaggaggaggaggaggaggcgggatggggcgcgggaagatcgagatcaagaggatcgagaactccaccaaccgccaggtgaccttctccaagcgcaggagcgggatcctcaagaaggcccgcgagatcagcgtcctgtgcgacgccgaggtcggcgtcgtcatcttctccagcgccggcaagctctacgactactgctcccccaagacctcgctatcaagaatcttggagaagtaccagaccaattccggaaagatactgtgggatgagaagcacaagagccttagcgcggagattgatcgaatcaagaaagagaacgataatatgcagattgagctcaggcacttgaaaggtgaagatctaaactctctgcagcccaaagagctcatcatgattgaggaggcacttgacaatgggatagtgaacgtgaatgataaactgatggaccactgggaaaggcacgtgagaactgataagatgctggaagacgagaacaagctgctggcttttaaactgcaccagcaagatatagcgctgagcgggagcatgagggatcttgagcttgggtaccatccagacagggactttgcggcccagatgccgatcaccttccgcgtgcagcccagccaccccaacctgcaggagaacaattaagctgctaggttgccccgccacttcgatcagttatctcatccactgatccaccactggattgaatgtcctagtgcattgtcaactgtatccctgttttcatgtctgtttcgatgaactattgagcatgtcatatgtgagttgctttgtgtgccaatatatagtctgtctctagtacaagctctgtgcttgccattctgcctcgctgtagatagcaccagcaatggagctagctcagatatcagtaacttcgtgcaagctgcaaggtatgcttgtgttatcaccgcatttgtcagatggtgaatagtagtttgtgattgtaacaaacaatttatgcaagcttggtttcatgctaatgcngttcacttgnatttcnnnnnnnnnnnnnnnnnnnnnnnnn

SEQ ID NO: 386211 - DNA, 1598 bp, Oryza sativa
  unsure (1)..(1598): unsure at all n locations
tccccaccttaaagaccggaagaacggcaactccccaaccctcttgtttcttcgagagcgaggtgaagatttgtttcttggtttgtgttcttggagtggaggaggaggaggagttggatatggggcgcggcaagatcgagatcaagaggatcgagaactcgacgaaccggcaggtgacgttctcgaagcgccgctccgggatactcaagaaggcccgcgagatcggcgtgctctgcgaccgcgaggtcggggtcgtcatcttctccagcgccggcaagctctccgactactgcacgcccaagaccacgctgtcaaggatcttggagaagtaccagaccaactccgggaagatactctgggatgagaagcacaagagcctcagcgcagagatcgatcgtgtcaagaaggagaacgacaacatgcagatcgagctcaggcatatgaaaggggaggatctgaactccctgcagcccaaggagctgatcgcgatcgaggaggcgctcaacaacggccaggccaatctgcgggacaagatgatggaccactggaggatgcataaaaggaatgagaagatgctggaggacgagcacaagatgttggcttttagggtgcaccagcaggaggtcgagctgagcggcggcataagggagctggagctcggctaccaccacgacgacagggacttcgcggcctcgatgccgttcaccttcagggtgcagcccagccaccccaacctccagcaggagaagtaggctgctgagcactgccaatttggctgaacctcctgcttgctagctttgcatttcctcatgcgctgctagatgtatctgtggtttctctcatgcctgtctgaatgaactcacactgatgagagggtgtcagttgttttgtgctcctcccagcattagcactcagaattcagaaatgactcaatgtcagttgcttttgtgcttctcccagcattagcactcagaattcagaaatgactcaatgtcagttgcttttgtgcttctccctgcttgtttaattagccactgttcttgtttccagatggtgaacagtcagtttgtattatctagttatcttggcaaggatcagtaaaattcacaagtagcagccaactctgataataattccatctgtttcatcgcttggaatgaattgtatgggaaaaaaaaatcaatgcaaatcaagagataacgaaacatatgattctggagttcaattgaccagaatttgcaagagcactacatccatatcggctattgttcttatctagtaggctgtatgattcttgaattcgccaagaaaaagatcacctcctcctacatcacctgagcatgtcgccattgtcaatgaacgggccactgaacgccggcgaggcgctgaagttgctcccggcctcgctgaacatggcgctgtgcccgtacggcagcggccggtccggcagctccgggatgtccatgtccccctccagcatcttcaccgcctcggtgatggtcggccggagcgccaccatgacgtgcgcgcacaggatcccgacgagcacgaaccttttcatggcgccgncccgggggcctgccgcagtcgacagcgcg

SEQ ID NO: 386212 - DNA, 1734 bp, Oryza sativa
  unsure (1)..(1734): unsure at all n locations
caaatccgaacctcccccccccccccactcctctgcgcctccctcctccgcggcctccgccatggcctccctcgcctccgcctccgcatccacctccctggtcttctccacctcctcctccaagccgcgcctcggctcctccgtcggattctcctcgcccgcgcggttccggcgcacggcggcggcggcggcgtccaagggcacggggcggcgcgcggggctgctggtaatgcgcgcggcgagggggaagttcgagcggaccaagccgcacgtcaacatcggcaccatcggccacgtcgaccacgggaagactacgctgacggcggcgctcaccatggtgctcgcctccgtgggcgggagcgcccccaagaagtacgacgagatcgacgcggcgcccgaggagcgcgcccgcggcatcaccatcaacaccgccaccgtcgagtacgagaccgagacccgccactacgcccacgtcgactgccccggccacgccgactacgtcaagaacatgattaccggcgccgcgcagatggacggcgccatcctcgtcgtctccggcgccgacgggcccatgccgcagaccaaggagcacatcctgctcgccaagcaggtcggtgtccccaagattgttgtcttcctcaacaagaaggaccaggtcgacgacgaggagctgctccagctcgtcgagctcgaggtccgcgaattgctctcctcctacgagtacgatggcgacgaagtgcccatcgtcgctggctccgcgctcaaggcgctcgagaacctcatggccaaccctgccattaagcgcggcgatgatgagtgggtggacgggatcttctcgttgattgattccgtggataactacatccctgtcccacagcgccagaccgacctcccgttcttgcttgctgttgaggatgtgttctccatcaccggtcgtggtaccgttgccactggccgtattgagcgtggcaccgtcaaggttggggacacggtcgatatcgtcggtatccgggagactcgcaactgcacggtgactggtgttgagatgttccagaagaccatggatgatgcgatggctggggacaatgtcggcctgcttctccgaggtatgcagaaggatgatatcgagagaggcatggtgcttgcgaagcctgcttccatcacgccacacaccaagtttgatgcggttgtgtatgtcctgaagaaagacgaaggtggacggcactcaccgtttttccctggttaccgccctcagttctacatgcggactaccgatgtgacggggaatgtcacaaagattatgaacgacaaggacgaggaggcgaagatgtgcatgcctggtgaccgtgtcaagatggttgtggagctcatccagcccgtcgcttgtgagcagggaatgaggtttgccatccgtgagggtggaaagaccgtcggtgccggcgtcatcaatacgatcttgaagtaaactggatggagcatatccaccgtgagaattttccttgtttactctttgcgaaatgctctgtagttgttattacgcgttgagttttaggggttgctcatgtgaaattgtagtatggcacttttctcttcaagtgaatttgcatactttgtgatattcacgacaaagatacatgtgtttgcaactaatttggctatgcagtgccatttactgtcctgtgttcaattgttcatctattgagcttgatgccnnnnnnnnnnnnnnnnnnnnnn

SEQ ID NO: 386213 - DNA, 1174 bp, Oryza sativa
tctccctccgcctttgccccgccttccctgcccttttctcttgctgagccgcttctgcattggcttgtgatgatgggggccacttctccgtcaggcctggagctcaccatggctgtccccggcctcagctcctctggttcagaaggggccggttgcaacaacaacaacgccggtggcggctgcaacatgagggacctggacatcaaccagccggcgagcggcggcgaggaggaggagttcccgatgggcagcgtggaggaggacgaggaggagaggggcgtcggtgggccccaccgccccaagaagctccgcctctccaaggagcagtcccgcctcctcgaggagagcttccgcctcaaccataccctcacgccgaagcaaaaggaggccttggcgatcaaactgaagctgcggccgaggcaggtggaggtctggtttcagaaccgtagggcaaggacgaagctgaagcagacggagatggagtgcgagtacctgaagcgctgcttcgggtcgctgacggaggagaaccgccggctgcagcgggaggtggaggagctgcgggcgatgcgggtggccccgcccacggtgctctcgccgcacaccaggcagccgctcccggcgtccgcgctcaccatgtgcccccgctgcgagcgcatcaccgccgccaccggcccgcctgccgtgcgcccgccgccgtcgtcagccgccgccgccgccccctcgcccttccaccctcgccgcccctctgcggccttctaggcccaaggtctcgcatcctaaaggccacaaaaagatgggcctcgccgtcccgtgtaaattgaaggagacgacgcagcggtagagggccccgtgtcggcgttgttgcgtcgggtccagtcgtctcagaggagtcagaggcgtggacaaaatgtttgttgcggtgtttgtgttccattggtcgttgatcttagcttgatgatctgtgattcgcgccttgctcgtctaggtttctcttgggccgacgcatgatcttttttcccccgtgtcggaccttattgggccttttgagatcgacgggccccctccttgtttcgcatgtggacatgttatttcgtccttttgggccaacaattcagcacggtggccaacggtgcgtagttcgtcgccgttttctttcaaaaaaaaaaaaaaaaaa

SEQ ID NO: 386214 - DNA, 1445 bp, Oryza sativa
cccacgcgtccggaaagagagagagagagagagaggtagggagggaagaagagtcactccacactccacactctcatcccctggtccctttcttggatcatgagaaaccgcgcaacaaaattgcaattctaggcagcatttggaccggggacttggctacgtggtgtttggccatggatcgcagcgtggaattaagaccggcgaggactcagcgacggaggcacccgcgtcattcctacgcttctgtgcccgtcgtcttctcgcagtgagagagagagagagatcgaccaggcgttcactgaattttactagaactcggcatgaagcgacccggcggtgccggcggcggcggaggcagcccatcgctcgtcacgatggctaattctagtgatgatggatatggaggggttgggatggaggcggagggggacgtggaggaggagatgatggcgtgcggcggcggcggggagaagaagcggcggctgagcgtggagcaggttcgcgcgctggagcggagcttcgaggtggagaacaagcttgagcctgagcggaaggcgcggctggcgcgcgacctcggcctgcagccgcgccaggtcgccgtctggttccagaaccgccgcgcgcggtggaagaccaagcagctcgagcgcgactacgccgcgctccgccattcctacgactccctgcgcctcgatcacgacgcgctccgccgcgacaaggacgccctcctcgccgagatcaaggagctgaaggcgaagctcggggacgaggaggcggcggcgagcttcacgtcggtgaaggaggagccggcggcctccgacgggccaccggcggcgggatttgggtcgtccgacagcgactcaagcgcggtgctgaacgacgtggacgcggccggcgccgcgcccgcggcgacggacgcgctggctccggaggcgtgcacgtttctcggtgcgccgcccgccgcgggcgcgggcgcgggcgcagcggcggcggcgagccacgaggaggtgttcttccacggcaatttcctcaaggtggaggaggacgagacggggttcctcgacgacgacgagccgtgcggcgggttcttcgccgacgatcagcccccgccgctctcgtcgtggtgggccgaacccacggagcactggaactgaagcaaatccggcgtaaccgcagccgagagagagagttggaaaacactatgcctgggggaataaagaattctgcaggaaagcagggtcttatctgcaattttgtaaaaaaaatggacctctacgtacttctctagtctcttttgccaattctcgcgcacattagctgtagcactgcagtgtagtaaaatcctactactccattacctctccaatttctagctctcacttccctacttaaactcatctgagctctaatgtaagcatatgccatccaaaaaaaaaaaaaaaaaa

SEQ ID NO: 386215 - DNA, 1842 bp, Oryza sativa
ttgacgcctgggcggacgcgtggtaaaatcccaaaaacaaaaaataataaaaaaaaagaaagagagagacatttcgcatctgctgccctgcctcctctcccatcacctgcccattttttcacattgaggcccctctgaaaatattatatttacaactaggtccctggccgggccggccggccaccggaaggagcacctcgccggagaaggctttgtctcttctttttcttctcctcctcctcctccatcggcggcggcatggggttctcgctgtaccccatgaagacgtcgacgcgcatgctgtggagcaccagcttcttccgccataaggtcgcctcctccttctaagcccacgccctctcgggcggcggcggcgagccggcggcggagcgcgcggttggtaggtgcgcgtgcgtgcgtgaacgggagagcagcttcgagatcgggttttcttgggttcttggagaagggaggagaagagggggaggagagcatggatcccggccgcgtcgtgttcgactccggcgtggcgcggcgggcgtgccccggcggcgcgcagatgcttctcttcggcggcggcggcagcgccaacagcggcggcttcttccgaggcgtgccggcggcggtgctggggatggatgaatcgcggtcgtcgtcgtcggcggcgggggcgggggcgaagcggccgttcttcacgacgcacgaggagctcctggaggaggagtactacgacgagcaggcgccggagaagaagcggcggctgacggcggagcaggtgcagatgctggagcggagcttcgaggaggagaacaagctggagccggagcggaagacggagctcgcccgccgcctcggcatggccccccggcaggtcgccgtctggttccagaaccgccgcgcccgctggaagaccaagcagctcgagcacgacttcgaccgcctcaaggccgcctacgacgccctcgccgccgaccaccatgccctcctctccgacaacgaccgcctccgcgcgcaggtaatctcattaaccgagaagctgcaagacaaggagacgtcgccgtcgtcggcgaccatcaccaccgcggcgcaggaggtcgaccagccggacgaacacacggaggccgcgtcaaccaccggcttcgccaccgtcgacggcgcattggcggcgccaccgcccggccaccagcagccgccgcataaagatgatcttgtgagcagcggcggcaccaacgacgacggcgatggcggcggcgcggccgtggtggtcttcgacgtcaccgagggcgccaacgaccgcctcagctgcgagtcggcgtacttcgccgacgccgcggaggcgtacgagcgcgactgcgccgggcactacgccctctcgtcggaggaggaggacggcggcgcggtcagcgacgagggctgcagcttcgacctccccgacgccgccgctgccgccgccgccatgttcggcgccgccggagttgtgcaccacgacgccgcggacgacgaggaggcgcagctcggcagctggaccgcctggttctggagctgatcgatggaagcatggagcattggagccatgctatcaatgaatgaatgaatcaaatgaccttgagaccctcctctccgtcctttcttttgccctatttttaatcgctgttatatgttaattatgtgcaattaaagtgtacgtgttttgtcgtaagttgtgtttgttcaaattgtatgttttgaaggtgtcatgtattcatacacgatatgatatatagacgggatcatgaatgatactcggaaagattggaataatcccatgtagtgttgagcaataataaacattctcctcaatat

SEQ ID NO: 386216 - DNA, 685 bp, Oryza sativa
cggacgggccgaattcgagtcctgttctttttgctgctgctgcttcttgttcctactgccgtgaaccatggccgctgagactgttgtcctcaaggtcggtatgtcatgccaaggttgtgctggagccgtaaggagagttctcacaaaaatggaaggcgtggagacctttgacatagacatggagcagcagaaggtgacggtgaagggcaatgtcaagccagaagacgttttccagacggtctcaaagacagggaagaagacctccttctgggaggctgcagaagccgcttcggattctgcagctgcagctgttcctgctcctgctccggcaacagcagaagctgaagctgaagctgaagctgctccacccaccaccaccgcggcagaagcacctgccatcgctgctgctgctgctcctcctgctcctgctgctccagaaagcaagctccggccaaggctgatgcttgatgatcacacataatgcttgcattgacatctggaaattgaactccaagcgattgatttactctctttgcatttagcctctagtaaccggggggtccagtcttagcttgtgtgttctgcctcatagcagtgttccaatttggttatctgttgccggccagtgtaccagttgaaatccgaattttgattaaatccagtccgatccgcatggtttcggaat

SEQ ID NO: 386217 - DNA, 1458 bp, Oryza sativa
  unsure (1)..(1458): unsure at all n locations
ccacgcgtccgcccacgcgtccggtctggtcttcccccacccgcatcccccggcctcctcaccgcagccgcaaaagccaagccgccatggcaaccgccgccgcgtcggatctggagagcaaggccaaggcggccttcgtcgacgacgacttcgagctcgccgccgagctctacacgcaggcaatcgaggccagccccgccaccgccgagctctacgccgaccgcgcccaggcccatatcaagctaggcaactacactgaggctgtagctgatgctaacaaggccattgaacttgacccatcaatgcacaaggcttatcttcgtaaaggcgctgcatgtatacgactggaggagtatcaaactgcaaaagcagctcttgaattgggttactcgttcgcatctggtgactcaaggtttactcgcctaatgaaggagtgtgatgagcgcattgctgaggagcttagtgaagtccctgttaagaaggctgaagatggagcagctgccccctctgttgcttcttttgttgaggaaaaggatgatgctgcaaacatggataatacaccaccaatggtagaagtgaagccaaaatacaggcacgacttctacaacagtgctacagaagttgtattgacaatttttgcaaagggtgttcctgctgagaatgttgttgttgattttggtgaacaaatgttaagtgtgtcgattgaagtccctggagaggagccgtaccattttcagcctcgtctgttttctaagatcatccctgagaaaagcagataccaagtgctatccacgaaggttgaaataagactggctaaagctgaacagattacatggacctcacttgattatgataaaaaaccaaaggctgttccacaaaagataatccctccagctgaatcggcccagaggccatcatatccttcctcaaaatccaagaaagactgggataaactggaagctgaagttaaaaaggaggagaaggaggagaagcttgaaggcgatgctgcattgaacaaatttttccgtgacatctacagtgatgctgatgaagacatgcgacgagcaatgatgaaatcttttgttgaatctaacggtactgttctgtcgaccaattggaaagatgttggctcgaagaaggtagagggaagcccacctgatgggatggagcttaagaaatgggagtactaagatctcggttcgtgccatgctgtaaattcgttatcggcctgagtcatcacttggctggagaattcgcgcatcattgtcaagttggattttgtgtgatgctcttcgttgcgtttccatattgtaagctctctgtgtgacaggctagcttgtctaagactttatcctagttttggaagatacatctggacacaagaatacgttatctgaatctttgctccgaagtgcagaacgctctgtcgttttactaatannnnnnnnnnnnnnnnnn

SEQ ID NO: 386218 - DNA, 2632 bp, Oryza sativa
aattcgtttcgaaatcgaattccaaatcgaaatcgaaatcgaatcgattcgtccgtgcgtgcgtgcgtgcgcgactcgctctcacacacttcgcctccaccgacctctctctctctcactcgctagggtttcgaggcgacgacgatgtcgctgcggccgagcgagcgggcggaggtgcggcggagcaggtacaaggtggcggtggacgcggacgaggggcggaggcggagggaggacaacatggtggagatccgcaagagccggcgcgaggagagcctcctgaagaagcgccgcgacggcctccccgccgccgccgcggccgccgcggcggcgtccccgctgctcgcccactcctccgcgctccagcagaagttggaggggttgccggcgatggtgcaggcggtgcagtccgacgacagcgccgtgcagctggaggccaccacgcagttccggaagctgctctccatcgagcggagtcctccaattgaggaggtgatcaacacaggggtggtgcctcgctttattgccttcctccaacgtgaggattatccccaactccagtttgaggctgcatgggcactcactaacattgcatcaggcacatcagataacaccaaagtggtagttgagtctggtgctgtgcccatctttgtcaaactgcttagctcccccagtgaggatgtccgtgagcaggctgtatgggctctgggaaatgtggctggtgactcaccaaaatgccgtgacctggtgcttgcaagtggtgggttatacccattgttgcaacagcttaatgagcacgccaagctctcaatgctcaggaatgccacatggacactgtcaaacttctgccgtgggaagcctcagcctaattttgagcaggtcaaaccagcgctttctgcactgcagcgcctcatccattctcaggacgaggaggtcctgactgatgcctgctgggctctttcttatttgtctgatggaactaatgataagatccaagctgtgatagaatcaggagtgttcccaaggcttgtggaacttctcatgcatccttcggcttcagtgctcattccagctttgcgcacggtgggtaacatcgtcactggggatgacatgcagactcagtgtgtcatcgatcatcaagctcttccatgtctcttgaacctcttgaccaacaatcataagaaaagcatcaagaaagaagcatgctggactatctcaaacatcactgctggcaatagggaacagattcaggctgtgatcaatgcaaacataattgctcctctagtacatctgctgcaaactgctgaatttgacatcaagaaagaggctgcgtgggcaatctcaaatgccacttctggtggaacacatgatcagattaagtaccttgttgcccagggttgcatcaagccactctgtgatctgcttgtttgcccagatcccaggatcgtgacagtttgcttggaaggtcttgagaacatcttgaaggttggagaggcagaaaagaaccttggggcaggggatgtcaattcctatgctcagatgattgatgatgctgagggactggagaagattgagaaccttcagagccatgacaacactgaaatatatgagaaggcagttaaaatgctcgagtcctactggttggaggaggaagatgatgccatgccctcaggtgacaacgctcaaaacggcttcaaccttggaaaccagcagcccaatgttccatcgggtggattcaactttggctgaagatacctatctggaatgatgtaccactgttccttagctacttgcttggggctagtcagagttgggggagtcttgtcgttggagtcttggttgggtcctggcggtctggtctcaggcagtcgtaatgtcagtcccagtccttgggcttgcatcatcgccagtggtgcagcttggtcagtggtcagtcttgaaggtcatccagttggatttacttgggctctgtctcacctgtggtgggagcatgggggagagggcgtccagagccgcaggtgttgtcgggagagagttaccagttggcttttgcctcctatatagcatgaatgaattatattatcatctgttttgaggtaaaaagaaccttgaaagatagggtttattcatggttgtgtcagtttttgtcaagtctctatgtgctgtattaacatgtcagaagagtattggcacaacttataaacatcaaatagcaactgggtttttggtggagtcccatgctggtctgtctattcattggtttgttgttgtaatgtttttaatgtcatggttttgtcgcgtcaaagtttgtcggtggttgtttgcgtacttgctgttgttgttgtcgttgtcgttttgagattcatgttgttatgtctgtcttctgtctagaaaactgaaaactcaggagaaccgcctagggaaaaagaccgcctattttggcgatgagttttggttgagttcttggtgtcatgtgtggagtgtaaaagggaagatgatggttcctagttttaccccctggaacccggtttatgattgtatgattattacgttatgaaccatatgcacatgataaaaggaagagaagggagctgtcccacttcatatttccctaaaaaaaaaaaaaaaaaaa

SEQ ID NO: 386219 - DNA, 1210 bp, Oryza sativa
  unsure (1)..(1210): unsure at all n locations
ccacgcggtgaattgtgatctctccaccaccatcaccaccaccacgacgctgcaggcagagaggagcacgcggcccctgtgatctccgtgccaaaatcctcgatcccccgccgcggaatccagcagagggactgaattttgcaattctcagccatgggttcagttgtggatgctccagtggttgtggagggggttgctgagaacatgttgggtgataagaaagttacagttgtatttgttctaggtggtcctggaagtggaaaaggcacacagtgtgccaacattgtggaacactttggattcacccacttaagtgctggagaccttttgcgtgcagagataaaatctggttctgagaatggaactatgattgagaacatgataaaggaggggaagattgttccgtcagaggttactataaagctcttgcaagatgccatgattaaaaatgagaatgataagtttctaatcgatgggttcccaaggaatgaagagaatcgtgctgccttcgagaatgttacaaaaatttcccctgcatttgtgctattttttgactgttctgaagaagagatggaaagacgtcttttgggacgcaatcagggtagagttgatgacaacattgagaccattaggaaaagattcaaagtttttgttgaatcaagtttgcctgtaattgagcactacaatgcgaagaacaaagttaaaaagattgatgctgcaaaaccaatttctgaagtgtttgaagatgtcaaagccatttttgccccatatgctaaggttgaatagagataaaaaaaggaccacagagggcacaaatggtggcgtgctgtcagaaaaggccttgctcgagtgtgactatatatctgtgattaagaaccattgatatagaagaaaagtttttcttggctcccatgagctacctaattatcagtaggcaattcgtttcgttaccagcaataagtagatccgagtctcgctgcccccatggtgtaccggcgtgtgtcctctgtaatgctgtactgttgtataatttacctcatggatgatcaaacattatgccctcccatcagctgtgccattacaagagggtttaaaacttctgtaactgtcacattctttcataagcgattggctattcgttaatttccaaaaaaaaaannnnnnnnnnnnnnnnnnnnnnnnnnnnnnnnnnnnnnnnnnnnnnnnnnnn

SEQ ID NO: 386220 - DNA, 1654 bp, Oryza sativa
  unsure (1)..(1654): unsure at all n locations
gccgagtccagccccggcgcgctcactctcgccgcctcgctcttccccgacgcgccctccccggccttccaggggtctttcacccagctcctcgtcggcgccatgggctaccccgccgcctccgcccccgctccgccctcaccgttcccggtgccgcacggactcagccccaccgcgttcctcgggggctcccccggcctcttctccccgacggggaactttgaaatgtcccatcaacaagccttggcacaagtaacagcagaagcagtccattctccgtacagtatgattaatcaatcagatttctcactcccgttctcgtcgacaacgacttcagtgttggcatcacaacatgtcaactcttctgccaatgtgtcatcaccacgagaaataccaactctgccatcccacacagataatagcaacattgaatcaactgaggtttcacatggattccaaactactgccctcactgaggataaacctgctgatgatggctacaactggcggaagtatggccacaaggcagttaagggtggggagtatcccaggagctattataaatgttcccatttaagctgtccagttaagaagaaagtggaacgctcatctgacggacagattactccaatactttatagaggccagcataaccaccaacgaccaaccaaaaagagtccaaagatggtggcgctatacttaaatgaagcagatgtttcccgtgagaaggaagatgcatcaattagatcagaacagggctcccaagattattctggaaaattcaaggcatcaaatgatggtggtccttcatcatccaggaggggagataggggtgagcaaatatcgggctcaagtgatagcaagcatcaaggcgaggaagaagtgaaggttgagggtagagctactagtgatggaaatgcgaacaaaagacatgtgccagctccagctcaaagaatcattgtgcaaacaactagtgaggttgatctttcggatgatggctaccgatggcgcaagtatggtcaaaaagtactaaaagggaatcctcacccaaggagttactacaaatgcacgtaccaaggatgtgatgtgaaaaagcatattgagagatcctcacaagacccaaagggtgtgataactacatatgaaggcaagcacagccatgacgtgccagcagccaggaacagtagccattcttccgctaatgccaacgtatcgtcttccagcaatttacctcccaagggacagggggcaacggtcgtcgtgcatagatggttcgcggaatgcatcttcagtttcttccttccagttaaaggagggggggggatggcaggaaatttgggtggggtttagcggggtaaattgttttttttttcagtccatttggggtgtgttgtttcccaagccccgttgggcggggggtctgggctttgtgggtgggttttggcatgggtttagttggggcttgggggttcgttgggtaggggggaatatgttcattttccttttggaattcgacccgtttcatgggaaaataaaatttatgccttccaaacaggcccttggcaaggggaaaccccgcatagcttccttcccnnnnnnnnnnnnnnnnnnnnnnnnnnnnnnnnnnnnnnnnnnnnnnnnnnnnnnnnnnnnn

SEQ ID NO: 386221 - DNA, 1632 bp, Oryza sativa
cccacgcgtccgcggacgcgtgggcgcgcttccgccgctgcagccgatacgggagattggatcggaagcttctagaagtttccgtgggcgatggcgatccgcgcgaggtcctcctcctacgccgccgcggcggtcgcgctggcgctcgcgctggcgtccgtcgccgctgtcgccggcgaggtcttcttccaggagaagttcgaagatggatgggaaagtcggtgggtcaagtcagaatggaagaaggatgagaacatggctggtgaatggaaccacacatctgggaagtggaatggagatcctgaggacaaaggtatccaaacctctgaggactacaggttctacgctatttcagcggagtacccagaattcagcaacaaggataaaaccctggtgctgcagttctctgtaaagcatgagcaaaagcttgactgtggtggtggatatgtcaagttgcttggtggtgatgttgaccagaagaaatttggtggggacacaccgtacagcattatgtttggaccagacatctgtgggtacagcaccaagaaggtccatactatctttactaagaatgacaagaaccatttgatcaagaaggatgtcccctgcgagactgatcagctgtcccatgtgtacactttgatcatccatcctgatgctacatacaccatacttattgacaatgttgagaagcaatctggcagcatctacgagcactgggatattctgcctccgaagcaaatcaaggacccagaagctaagaagccagaggactgggatgacaaggagtacattcctgaccctgaggacaagaagcctgagggatacgatgatattcccaaggaaatccctgaccctgatgctaagaagcctgaggactgggatgatgaggaagatggtgagtggactgcaccaaccattcctaaccctgagtacaagggaccatggaagcaaaagaaaatcaagaaccctaactaccaaggcaaatggaaggcaccgatgatcgacaccccagacttcaaggatgatccatacatctatgcttttgacagcctgaagtacattggcattgagttgtggcaggtcaaatcaggtactctgtttgacaacttccttattactgacgaccctgagttggccaagacattcgcagaggagacatggggcaagcacaaggatgctgagaaggctgcttttgacgaggcagagaaaaagaaggaagaggaggaagctgccaaggccggtgaggacgatgatgatttggatgacgaggatgctgaggatgaggacaaggccgatgagaaggctgactctgatgcagaggatggcaaggattctgatgatgagaagcatgatgagctctaagatggtgaggatgaagaatggaggccgccttcgcgacgatgccaggatttgctagttctcccattgttatgaagttccctttttcgtgatcagaaacttgacaagaaagtactctgtagatgagcattgctgaggaactttaatttggtctttgtagctctctctgtagtgtcatttttcccaccacaagaaaaagaactgataacttattgaacaagagaaaaaaaaaaaaaaaaactccacggggggcccgtgattgtataaaaa

SEQ ID NO: 386222 - DNA, 519 bp, Oryza sativa
cgcggcacgtcccgggtcgaccgcacgcgtccgatcggaagcttctagaagtttccgtgggcgatggcgatccgcgcgaggtcctcctcctacgccgccgcggcggtcgcgctggcgctcgcgctggcgtccgtcgccgctgtcgccggcgaggtcttcttccaggagaagttcgaagatggatgggaaagtcggtgggtcaagtcagaatggaagaaggatgagaagcatgatgagctctaagatggtgaggatgaagaatggaggccgccttcgcgacgatgccaggatttgctagttctcccattgttatgaagttccctttttcgtgatcagaaacttgacaagaaagtactctgtagatgagcattgctgaggaactttaatttggtcttcgtagctctctctgttgtggcatttttcccaccacaagaaaaagaactgataacttattgaacaagagaaatgttttgctcactactatggaaaagccaactgtatgagtattatgatcatcag

SEQ ID NO: 386223 - DNA, 1227 bp, Oryza sativa
  unsure (1)..(1227): unsure at all n locations
cccacgcgtccgcccacgcgtccgcaaaaaaattcgaagccatccaccaacgaagaaaaaaaaaagggagaaaaaaaaatccacgcacactttgcgtgcgaggcgaggcggttcgattcgagaggagagagagagagagagagagagagagagatggacgccttctactcgacctcgtcggcgtacggagcggcggcgagcggctggggctacgactcgctgaagaacttccgccagatctcccccgccgtccagtcccacctcaagctcgtttacctgacactatgcgtcgccctggctgcgtcggcggtgggcgcatacctgcacgtcgccttgaacatcggcgggatgttgactatgctcgggtgcgtggggagcatcgcctggttgttctcggtgcctgtctttgaggagaggaagaggtttgggattctcttggccgctgccctgctggaaggggcttcagttgggcctctgatcaagcttgctgtagactttgactcaagcattctcgtaacagcatttgttggaactgccattgcatttgggtgcttcacttgcgctgccatcgttgccaagcgtagggagtacctctaccttggtggtttgctctcttctggcctctccatcctgctctggctgcagtttgccgcatccatctttggccactccaccggcagcttcatgtttgaggtttactttggcctgttgatcttcctggggtacatggtgtatgacacgcaggagatcatcgagagggctcaccacggtgacatggactacatcaagcacgcactcaccctcttcactgacttcgtggccgtccttgtccggatcctcgtcatcatgctcaagaacgcgtctgacaagtcggaggagaagaagaggaagaagaggtcttgagagcttctcttcccgctttgcacataagaaaaaaccaccgcggctattgcctctacgtattatgacagagccgcacttcaactgggttttatggtgaatacaagttcttttgcattttgttgatacggtgtgaatcttctcaggtttgtcgtcgtagtagctttgcaaatactagcatgctacatgacacggatctttctgtaatggtggtcgcgttgatcgaaacgtgaaaacacatcttcatttgcgactaatttgtttgccttttggtgattgatgatgatcctttccccaaaaaaaaaaaaannnnnnnnnnnnnnnnnn

SEQ ID NO: 386224 - DNA, 420 bp, Oryza sativa
gattttgaagactagtcgcgttgatttggggaaatagccatggagattagtcttcgttagtttcgaggattagatttagagactgaattgggttggtttgggtaattccctgacgtgacacgtacccaatccacggctatctgtttataaaacgccacacgcgctactcgattgggcataatttttgttcacagattttgtttgattcgtagctgtctatgaatgggttgtattactgttgattccacgcagcaggtagcactgcaagtctgaatgttatgccccatagcctgggatgcttttcatgccttcttaggtttacctgacactatgcgtcgccctggctgcgtcggcggtgggcgcatacctgcacgtcgccttgaacatcggcgggatgttgactatgctcgggtgcgtggg

SEQ ID NO: 386225 - DNA, 2021 bp, Oryza sativa
  unsure (1)..(2021): unsure at all n locations
caacctccctcctcctcctccacctcgtcgtcgtctccgccgcgctgtctcctcctctatataccctcacccacactcgcacgcgcaaacccaacccccgcataggcttaactccccaacccaaaccctcctcctcccccatgggcgcgtgcttctcatcccacactgcgaccgccgccgccgatggcgggagcgggaagcggcagcagcggaagggggatcacaaggggaagctccccgatggcggcggcggcgagaaggagaaggaggcggcgcgggtggagttcgggtaccagagggacttcgaggggaggtaccaggtcgggaggctgctcggccacggccagttcggctacaccttcgccgccaccgaccgggcctccggtgaccgcgtcgccgtcaagcgcatcgacaaggccaagatggttcgccctgttgctgtggaggatgtaaagagagaagtgaagattcttaaagaacttaaaggccatgagaatattgttcacttctacaatgcgtttgaagatgactcatatgtatatattgtgatggaactatgtgagggtggtgaactattggaccggattttggcaaaaaagaacagccgttatagtgagaaagatgctgcagtggtggtgcggcagatgctcaaagtggcagctgagtgccatctgcatgggctagttcaccgagatatgaagcccgagaacttccttttcaaatcaaccaaggaggactcacctttaaaggcaacagattttggtctgtcagacttcataaaaccagggaaaaagtttcacgatatagttggcagtgcctattatgtagccccagaagttttaaaacgacggtctggccctgagtcagatgtttggagcataggagtcataacttatattttgctctgtgggagacgccctttttggaataagacagaggatggcatattcagagaggtactaagaaacaagcctgattttcgtaagaagccttggccaggcatcagttcaggtgctaaagatttcgttaaaaagttacttgtaaagaacccaagggcaagattaaccgctgctcaagctctctcgcatccatgggtaagagaaggaggagaagcatctgagatccctgttgatatatctgtattgtccaacatgcgtcagtttgtcaagtacagccgttttaagcaatttgctctgagggctttagcaagtacactaaaagaggaagaactagcagatctgaaggaccagttcgatgcaattgatgttgataaaagtggatcaattagtattgaggaaatgcggcatgcccttgcaaaggatcttccttggagattgaagggcccccgtgttctcgagattatccaagcaatcgacagcaacactgatggtcttgtggactttgaagagtttgtagcagcaaccctccatatacatcaaatggctgagcttgactctgaaagggggggcctacgctgccaggctgctttcagcaaatttgatctggatggggacggatacatcactccagatgaactcagaatgcacactggcttgaagggttccatcgagccattgctggaggaggccgacatcgacaaagacgggagaataagcttgtcggagttccgcaagctcctgcggacagcgagcatgagcaaccttccagtccaagaggacctccaaatccacaacccctgtgaacgtcggtaagaaccgagatgagacgtcgtaaattagtcttgtaaaggttgtcttgttcctgtccgcgtgccatgtgatgttgagggtgtcttgagtttttagcatccaggttccgtgtgcagcatgcagataaagtttcggtgtagtacggagtacatacatatttttttcaaaaaaaaatgttacaagcagaaatgctgttctagtctcccattttcctccttgtacataattctatatatgtatgatttgattgcacgtattcatcgcaataaagttgcctgggattgcatgatcnnnnnnnnnnnnnnnnnnnnn

SEQ ID NO: 386226 - DNA, 1614 bp, Oryza sativa
gcggacttcgggtacgacaaggacttcgaggcgcggtacgcgctcgggaagctgctgggccacggccagttcggctacaccttcgccgccgtcgaccgccgctccagcgagcgcgtcgccgtcaagcgcatcgacaagaacaagatggttcttcctgttgccgttgaagacgtaaagcgagaagttaaaatactgaaggccttacaaggccatgaaaatgttgtacatttttacaatgcatttgaagatgataattatgtgtatattgttatggaattatgtgaaggcggggagttacttgaccggatactagccaagaaagatagccgttatagcgagaaagatgctgcagtagttgtgcggcaaatgctcaaggttgctgctgagtgccatttgcatggtttggttcatcgggacatgaagcctgagaacttcctcttcaaatcaaccaaagaggactcatccctcaaggctacagattttggtctttcagattttataagaccagggaaacactttcgtgacattgttggaagtgcctactatgtagcaccagaagtgcttaagcgtaagtcaggcccagaatctgacgtttggagtattggcgtaataacctatattctactgtgtggaagacgacctttctgggacaaaactgaagatggaatatttaaagaggtgttgaaaaacaagccagattttcgtcgcaagccctggccaaatatcactccttgtgctaaagactttgtacaaaagttgcttgttaaggatccccgtgcaagattaactgctgctcaggcattatcacatgaatgggtgagagaaggaggacaggcatctgatatacctctagatatatctgtattacataatatgcgtcagtttgtaaaatacagtcggtttaagcaatttgctttacgggcgttagcttctacactaaatgcagaagagttgtctgatcttcgtgaccagttcaatgccattgatgttgacaagaatggaacaattagtctggaagaactgaagcaggctcttgcaaaggatgttccatggagattaaagggtccacgtgttttagagattgttgaggcaattgacagtaacacagatggattagttgatttcgaagagtttgttgctgcaacattacatgtgcatcagctagtggaacatgatactgagaagtggaaatcattgtctcaagctgcatttgataaatttgatgttgacggagatggctatatcacatctgatgaactgagaatgcaaacaggactgaaaggttctattgatcccctcctggaggaggctgacattgacagagatggaaaaataagcctagatgaatttcgcaggctcctgaaaactgcaagcatgagttcacgcaatgtacaaactccgaggagtgttcacagatcgtagcttttcatagctgtgcacacttcacaaaagtgaacaaagggcagtcattgttgtaatatttttcatcgacacgtgtaatcaaaattgttgccagaaaagctcttgatgtaaattaatatggacatgtaggactgaagctagccagctaaaaaaaaaaaaaaaaaagagaaattaaacgttgtcttgcataaa

SEQ ID NO: 386227 - DNA, 2019 bp, Oryza sativa
  unsure (1)..(2019): unsure at all n locations
gtccgcggacgcgtgggcgacgcgtccgtttcgttttggtattcccatacactttgtttctcttccccgtctcgtggtcgagagaaaccgagaggagagagagggagaggagcgctgccgattttccggagggggagatctttttcttctccctgaaggttcgagatcgatctgcgacgaggaggagcggggaatcgtaactttatttccgaggaaatttcaacaaattgatgcactaatggagtccaagggtggcaaaaagaagtctagcagtagtcgttcctccctgatgtacgaagctcccctcggctacagcattgaggacctccgacctgccggcggcatcaagaagttccgctctgctgcttactccaactgcgcgaggaagccctcttgatagcccccttggctaccttgacctagtagtttagttactcctctgaattctcgttttgggctttcttacatctctctggctagctgcttcccagtgaccgggaaggtcatcagtcctgcttcctttcttcctcatctctggcatcgtccttcgaaacaatggcagtcctgtcagttgctgactctccaccggtctcggcgatcgggtttgagggatatgagaaacgcctcgagatcactttctccgaggcgcctgtctttgctgaccccaatggcagggggttgcgtgcactgtcacgtgctcagattgactctgttcttgatctggcgaggtgcaccattgtgtctgagctctccaatgaggtcttcgactcgtatgtcctttctgaatcgagcctctttgtgtacccatacaagattgtgatcaagacctgtgggactaccaagctcctgctcgccattccgaggattcttgagcttgctgaagagctatctctgccacttgaagctgtgaagtactctcgtgggacattcatttttcctgaagcacagccctctccacacaagaacttctctgaggaggttgcagtcctgaaccgctacttcggcggtctcaaatctggtggcaacgcatacgtgattggagatcctgcaaagccagggcagaagtggcatgtctactatgccacccagcacccggagcaacctgtggtcactcttgagatgtgcatgactgggctggacaagaagaaagcttctgtcttcttcaagacttctgctgatggacacacaacatatgctaaggaaatgaccaagctctcaggtatctctgacatcatcccagagatggaagtctgcgacttcgatttcgagccctgcggctactccatgaatgccatccacggccctgctttctcaaccattcatgtgactcctgaggatggcttcagctatgccagctacgaggtcatgggcttcaaccctgcttcccttgcctatggtgaccttgtcaagagggtgttgagatgctttggcccgttggagttctctgttgcggttaccatctttggtggccgcaaccatgcagggacctgggccaaggggctggatgtcggggcctattcttgcagcaacatggttgagcaggagctgccttctgggggtttgctcatttaccagagcttcactgctactgctgaaatcgccaccgggtcgccacgatctgttctgcattgctttgctgatgaaaacacggagaaagctggtaaaatggaggctctctactgggaagacgatgctgtcgaggagatagatggcacagagggtaagaagatgaggagctgctgatgagggaagcgcactgaagattaaagaatactcaaaactccagtagcgatcactctgttactttgtgaagcagccagccagactattcatatagtactagtatatgctatgaccaatgttctttattatcttgcatatattctgaataaaagggctctaggtggtctgctttgtctgccacagtgagcaaaatgtatccgaatatcaaactttaatgttgggaatataatacaagtcattttataataaaaaaaaaaaaaaaannnnnnnnnnnnn

SEQ ID NO: 386228 - DNA, 850 bp, Oryza sativa
ccacgcgtccgccgtggcgttggagtgaggactgaggaggaagaagagggcgggatctagggtaccggatgcgctggctgtgctgagtgagagtagagatgagcgcgtctcggttcatcaagtgcgtcaccgtgggggacggcgccgtgggcaagacctgcatgctcatctcctacacctccaacaccttccccacggactatgttccaactgtttttgataacttcagtgcaaatgttgtggtcgatgggagcactgtgaacttggggttgtgggatacagcaggacaagaggactacaataggctacgcccgttgagctatcgtggcgctgatgttttcctgctggccttttctctgatcagcaaagcaagctatgagaatgtttctaaaaagtggatacctgaattaaggcattatgctcctggtgtgccaataattctcgttggaacaaagcttgatctgcgggatgataagcaatttttcgtagatcaccctggtgctgtacctatttccactgctcagggcgaagagctgaggaaactcattggtgcagcggcatacattgaatgcagttcaaaaacacagcaaaacatcaaggcagttttcgatgctgcgattaaggtggttctccagcctccaaagcaaaagaagaagaagaaaaaggcgcagaaaggatgtgccatctttgtaattcaatggtagacagtgcagtgcagatccgatgtatcccttcatttgtagcctctggctttcaatcgtcgcttgtttggataattacgctacatgccaccggcagaagatataatatagtcctcctgcctttgtggtgttggtctctaaaaaaaaaa

SEQ ID NO: 386229 - DNA, 1405 bp, Oryza sativa
ctcgatcgatccatccatcgatcgatcggtcccccccaccgcgcgcgacgcattccgccgccgtctcgccgtgtccacgtgatgggggccggggctaggggataggcggatagccagcagccaccaccaccagtagttgccgtgtggggataggtgtggctatagggctagtggtcgtcgctgatagcgaggtgggtagggttaattttggttggaggtagagagagagagagagggagggagggaggaggaggaggaggaggaggaggaggaagaacaggaggaagatggggcggggcaaggtgcagctgaagcggatcgagaacaagatcaaccggcaggtgaccttctccaagcgcaggtcaaaactgctcaagaaggcgaatgagatctccgtgctctgcgacgccgaggtcgcgctcatcatcttctccaccaagggcaagctctacgagtacgccaccgactcatgtatggacaaaatccttgaacgttatgagcgctactcctatgcagaaaaggtccttatttcagctgaatctgacactcagggcaactggtgccacgaatataggaaactgaaggctaaggttgagacaatacagaaatgtcaaaagcacctcatgggagaggatcttgaatctttgaatctcaaagagctgcagcagctggagcagcagctggaaaattcgttgaaacatatcagatccagaaagagccaactaatgctcgagtccattaacgagcttcaacggaaggaaaagtcactgcaggaggagaataaggtcctacagaaagaactggtggagaagcagaaagtccagaagcaacaagtgcaatgggaccagacacaacctcaaacaagttcctcatcatcctccttcatgatgagggaagcccttccaacaactaatatcagtaactaccctgcagcagctggcgaaaggatagaggatgtagcagcagggcagccacagcatgttcgcattgggctgccaccatggatgctgagccacatcaacggctaaggaggcttcagatccataccagtaatcacaagttgcaacctgacccggtccggtcgcctgctgctctggtttactactagtactattgtcatcttgcggttgcgagacgaggaaagcattttagccctaaattcagcattagtagcaagctgcaatgtgtatattttggcttcgtccagcaccgtcttcctcccaccagtaatttacccatgtaatatatgcgagtagcatgaacaaattttcccgtttccaaccatctccattggtgtcatgtgtgacttaaatagcgaaatttcagcattgtgcatagtgtgattactgtaagataaaaaaaaaaaaaaaaaaataagtctccgttatcttgctgattggagctg

SEQ ID NO: 386230 - DNA, 1404 bp, Oryza sativa
  unsure (1)..(1404): unsure at all n locations
nnnnnnnnnnnnnnnnnnnnnnnnnnnnnnnnnnnnnnnnnagtcattaacaaatgtttatatattaaaaaaggagggattactagttacataatcctgacaatctattaagcgatatgtactgccaataagtgcagatataatcactccttagtgtatattcaccatatgctgtgaaaattgaactcattgaccaacaagatctcgccgctgcaagtattacaaaagaacgattcattgaactttgcatttaactttctaacaacagttgtgcactgccttcttttcaacttgaaacggagccagtgagacacatctacaagggggtcggtggtggagaatgcactttgagttgcaaacttgcaagagattttactctttcaatttgatgactctctaagacatacgcgactagtagcttgttgcagcatctaaacatctgtcagaattatcgatgatacaatcatgacatacgcgaggaagaagaacatgacaatctggatgaagaacttgggattgtccctcaagctcggagcggccactgatctacttgcaatgcgttgtgaaagccgatgaaagggtaggctctgtatgaagaccacgcctggtcctgtgagagatgctgtaagctggttacccccactgaagactactcttctcggttggttaggggttttcaactgaaagttgatggtggttgtcatagccacaatacaagcagcgtcaactgtaatcacctcacgaggggcaagaattttctgcatgactgatccaccaccaacaaggaaagccatcccttgacccctaagcttctgtttgaggatcacctctgcaccaatttcaatgtttcgcggcctctgctcaactgtacttgtgactgacacatcattaactgagcagagaaaagcatctgcctggcaaagaagtctccaccaaagtttgctagatccataggcagtattctcccagggaaatggtgcagaaatcccaacatatcccatcatcagagccagggttgaaagaaaacactgctgcttatgcttttcccaaaaatccactgccacacacctccatcattttcaggcaagtagttgttgtccgtttgaatattaccagacatgtagcacattgtacctggtttcacggtcaacttttcctgtgacttaaccatcacctgcaggacctgcacatcgccgccggatatctggaacgccgtcacagatccttcctggctctggtagacgtagggctggaaaggcgtggagaagaagggcgcggccatggcggggggtcggagccttccggaagcttctagaagcgatcagtgagagccgactcggagcgtcgtcgtcgggttcgagggaggcggagttgccattcgacgacctctcggcggacgcgtgg

SEQ ID NO: 386231 - DNA, 740 bp, Oryza sativa
gactcagaaatgcgagcgaagggtacgaagaagatagatgctgtgaaacatgacaaatcaagcttacaagttccaaccctgactccatcataagtccatatgacataatataatagaagtggtgcatacattcgacatcaaaactacggagaacttccaggggttctcagggaacagcagttcaacttgcaaactcaacatgaatacggctcctttcaagacattttcagccagaagtaaaatctaagagagataagcaacatcctccacacttcaagagtctttagatgctgctcgggtacatgaagactctgaccttgcgccccatggaagcggggggcaggttggacttgaacttggcgcggacgacgccggagttgccatgggggcgggtgaccttgccccagatgcagcggtagttcgtgccgccgctcttggtcttggccttgtacacgtacgccatcctcttcccgcagtaccacgccacctcctccttggtgttcaccccctcgatctgcaccagcgacgtgttctcgtactggttcgacttcgacctcttgtatccgaggatggtgccgcggacgtagagccgcacgcgctgcccggtgcgtcccttcaccatctcgtcgtcgccgccgcttctgccgccggagagagactgggagctcgcggaggtgggggtttcggaggcgccggacgcgtgggcggacgcgtgggcggacgcgtgggcggacgcgtgg

SEQ ID NO: 386232 - DNA, 804 bp, Oryza sativa
aagaaccactgaatccatctgcctatcattttcaaatatactcaacgagcagtgccaaccaaatttagatatacagatacgatatcaaacggctgagatcacgatccaaatgctaaacctctgtagcttcaaatccgctaaaaagccttcaaataattgtcatcatgatacagcaaatagtccgaaataaaaagaaaagctaaaactcctcaaaaccgcttaaatttctgactggttaaccaagtgactagctgatataaaaccctccacggtgacaactatcagtttcgcagcataggcaagaaaccttggatgcttttagatgctgctggggtacatgaagacgcggaccttcttgcccatgaaggtgggcgggaggttggaccggaacttggcgcggacgacaccggagttgccgtgcgggcgggtgaccttgccccagatgcagcggatggtggagtcgttgctcttcgtcttggccttgtagacgtaggcgatgcgcttcccggcgtaccacccaacctcctccttggtgttcaccccctcgatctgcagcagcgacgtgttctcgtactggttcgacttcgacctcttgtagccgaggatggtgccgcggacgtacagcctcacgcgctggccttgccgtcccttcatcgccgctgaagaggaggagtacggagcaagcggcggcgacggcggcggcagagaggagaaggcgggctcgatgattccgccgccgccgccgccgcagatggcgtccggcaccagccccacctccgacgacgagccctgctcgatcgaaag

SEQ ID NO: 386233 - DNA, 566 bp, Oryza sativa
caagagccttgactgcacgcgcacgcgagcttgaatctctctagagctagcgcgctctttttttttttttttttagcgaaatgagtcacatagtatatagcgagataatcatgtgcattgtctcacttatgatatatagcaggcagggagcaaagcagttaatatcatcctaaatctgattttttttcagctcgatcgagctgaagcctaatccatgacccctcgtcatcagctagcattagacccctacatatatagtaagaccgaaggggatcttaattatgaatcatgcatgtaatgttgcacgttggagcatgcatgtatatgctccatcatgagatactgagattgagacgaatggaaggtcagtcccattggatagtcctgtggaaggtccagtcggaggggttgacggtggattggccgctggaggagacgagatcatagggtgagtcctccccaaactctgtcggcatccccttccagtgcaggcatggatcccactctgctctccttgaggatccttaggatctttttcacaacaatttggatcccttcttaataca

SEQ ID NO: 386234 - DNA, 1108 bp, Oryza sativa
  unsure (1)..(1108): unsure at all n locations
tttttattccattatactactgtatgtgtctattgaattagtgatgtcattcacaggattttctccattacattggggggaaaacaaaatacacatgacagaattttcagtctccttttgtacctggctgagaacttcagagttgagactgtcagagacatagaaagcaggccttacagtagatgagatgatccatacacacatcatttcatctcaaagttctttattttgaagagactcatcttgcagctttgccaccctgcttttctttggagtggttctgattttctgaactgtttctgcagctgcatctaacaaatgtgaccccccatttctgaataccatatctaagacgatttcacaatctcatctcttctgtcgacggtgaagtcccagagctcgccgtacttctcgttgaagtcccagatgtccatggtgttgtagtcggcgatgagcttgtcgcgagccgatctctccatcatgtagatctccggctcaaagttgtgtggcttgtccggtttgtccatctcgataacgcagaacacgacgacgaacactgctgcgccgatgtagaggtactcccccggaacattgaaggccatgccaaggatgattgcaggaggaaacaaccaggagatcagtgcttggaagccctcaggaggttcagcttcttggtaccactcagagacatcctcccaaaagcccttcttatcttgggtttcattatatgtgtggtgaccatcatacactccatactcgaagtcgtccgggctgacgccgttggtgcgccacttatcaatggggtcctcgttcaggtcgggctcgatctccgtcagtggcccgggccccgccctcgccaccaccgcccggcctctgctccggcagcagcagcagccgccatgctccgtctttagctgcctcgctgctactgctgctgctgctgctgctcctgttgctgttgctgcatcgtcatgacgaaggcgagcttttgcagtggcagacggtgacgcagaaatggcggacaccaagctgctgctgctgctcatcatctcgctccaaacgctgagctctgccggacgcgtgggcgnacgcgtgggcgnacgcgtgg

SEQ ID NO: 386235 - DNA, 1636 bp, Oryza sativa
aaattaaaattaaaattaaaatataataaaatttattattttttaaaaaataaaaaaaaaaatattttattataaattataaatatttttataaatattttattttttttatttttttttttttttttttttttttttttttttttttttttttttttactgacaaatcatgtttatttatgtaaccctgtgtagtagaattttcaataagttacacaagaaaatccgacaaatataatgtacacctgtgtaaaacaacatgcaggaaatggcttccattgacagcatggcctgcactcactcaaatgcacaagtactgtactgaaactactgaaagttttctaacgcctctctttggggaagcccaggagggcaagaatcagtgcaaagaagctgccgtttatcagtcctctcaggatcttctgcttctcaatcgtgtaaggtgggtacctagcagttgcctcccctccgaagccgcggatcaggacggccttcttgtgggtgaaacaatcgaagctgaatttgccatggtaggagccgatcccgctgtcgccgactccgccaaatggcaggtgcggattggcgagatgcagggcaacatcatttacaagcattcctcctgctgggacattggacacaaattcctcttgcagtttcttgtccttggtgaaaagataggctgcaagtggcttggtccttgagttgatgaactggatgctatcttcaatcttgtcaactgttacaatgggaagtaagggaccaaaaatttcctctgccatgagtgttgtatcaagaggaacatctaacaacacagtaggagctatttttagttgcttctcatctgtttggccaccatatacaatcttttgggcgactttcttatcctctatcaaatttgtcaatctacggaaatggttagaattcacaatacgggacaagtcttctgattgcaaaggatcctccccatagaaccttttcaaaactctttttaaagagtcaaccagctctggagcaaatgattttgttgttataacgtagtctggagcaatgcatgcctgcccgttgttacatccccacttgccaacagctagcctcttcatggtaacatgaagatcagtattagaatcaacaattgcagggcattttccaccaagctctagagccacaggggtaagatgctttgcagctgctgccatcactatgcggcccacatttccgctacctgtgtagaagatcttatcccacttttgttctaagagtgcggttgtttctggaacgcctccctccaccacttttatgcaagagctatcaacgtattcaggtagcagcttggcgaacaatgctgaggtggctggtgcaatttctgatggcttcagcacaacggcattcccagcagcaattgctcctatgactgggtcgatggagagcaagaaagggtagttccatgctgagatgactaggacgacaccaagaggctctgacacaatttgtgcagttgatgggaatgtcgtgagggcggcaggtaccttcacaggtttcatccaattcttcaaccccttcaaggcaaatgtgcaggctgcctttgccaatgatatctcgtggaggtaggactccatgcgaggcttggcgagaacga

SEQ ID NO: 386236 - DNA, 452 bp, Oryza sativa
actgacaaatcatgtttatttatgtaaccctgtgtagtagaattttcaataagttacacaagaaaatccgacaaatataatgtactcctgtgtaagactacatgcagggaatggcttccattgacagcatggcctgcactcactcagatgcacaagtactgtactgaaactactgaaagttttctaacgcctctctttgggcaagcccaggagggcaagaatcagtgcaaagaagctgccgtttttcagtcctctcaggatcttctgcttctcaatcgtgtaaggtgggtacctagcagttgcctcccctccgaagccgcggatcagggcggccttcttgtgggtcaaacaatcgaagcggagtctcccatggtagcacccgtccccgctgtcgccgactccgcccggacgcgtgggcggacgcgtgggcggacgcgtgggcggacgcgtgg

SEQ ID NO: 386237 - DNA, 848 bp, Oryza sativa
ttggggtttttttttttttttcagttgtaaacagccaaagagatcattgatattttaataaacatcatgcataaaccacgcaggttatcaagtcagttttaaggtccagcacaactcttgcacactagggactatgacacacaaagagcggcagcattacaaggtttgcgacaacataatagttattcagtattcactcatgcaccaacagaaacatcctgcatggtatcaaaagacccagcataggttacgcaaacattttggctttggttgctccaacactatgcttcagggcctaatagtagaacattatttcttgccgcgcagctttgttccaagagccctttcaagcttcccgatgatctgctggttcggaatagctttacctgactcgtactcctggatcacctggggcttctcattgatcatctgtgcaagctgtgcctgggtcatcttcttgtccagccttgcttgcatgaggtttttcttcaggtcacttgagacacgctcatgggcaaggctctcggtgtcgtcatccagccgcttggtgttgagggatgtgccactggacgccgccttgtttgttccagcgttatacttcttcatggtctcgatctcggcgccggagcggcgggcggcgttgacggccttctcatccttcttggcggcggcggtgggcgccttcttccgcaccaccaccggctcccagtcctgcctgatcggaccaatcccggccatctcgacgagacgacaagaggaagaacaagatgaacaaagaaagggttaggggatgaacgaacaaggaagaagagaaggttctgggggtcgcacggatcgcgtgggtcgtg

SEQ ID NO: 386238 - DNA, 840 bp, Oryza sativa
ttttcgagctatgaacttggttatttgcatcttggagggccaagattcaaggaaccactgcatttggaagcactgacttgttggcaaagttgcaaacattatctgaccgaaaaaaaccaccagtttgatactattcgaaatcactgcaatgagtgagtgacacaatggagcaacaccaagagtgcactgcaaagccggttttgatccttacaccacacaaggcgagagggagacacacccgttgataatgttgttacaacatcgacatgtccatcgatatctgaggtgctacatggcgtacctctgagtccaggtccttgctgtgttctcgtacttgtgcctatctgtcttgtacatgtgggcgatctcagggaccagaggatcatcagggttcggatcagtcagcagggaacagattgacagcaacaccttggaaatggttagtgctgggctccattggtccttaaggatgtcaaggcaaatgctcccgttgctgttgatgtttggatggaaaaccttggtgcgaaacgccaccttgggtggtttgaagggataatcaggagggaagtggatggtaactaggaaaactccaccagcatatgggctatcagatggacccattatcgttgcctgccagtggaacatgtcttcaccaacaggacctgcactgcatgatgtagggggatccttctgcagatccttgagctccttctgtatcctctttgacgccatccccaattcccccttgcttttcctcttcctgtctaacggagagatttcacttcttttcttgcctcgcctctagctgctcttcctccttgcaggaatcctgagccggcc

SEQ ID NO: 386239 - DNA, 988 bp, Oryza sativa
taattatcattgttaaaactttgtctttccattttaaattatctgcaaagtaagaaagtaacactcccaagttacaacagcacaccatccatatatccatgcaggcagcctgtttgtgcccttgtgcagatgcatttcatttatacaagtagaaggcactcaaatcagccaccacatgaacacacacatgttccatcatcgatcgatctacacatgcatcacccggtcatgcacttacaaacaaaagatctacttgaagaagtacgggaggtcgagcacgtagaggaggaagtaggcccagaggacgccggagatgccgccgaagaagaagccgccggtgaacttggcccagccgtcggcggtctgcagcttgtcggcctccttcttgcggccggtgagcgtcagcgtcggcgccgtggacggctcgccctcgccgaaggaggcgacgccgtacatggtgaggcagacgctgaggatggcgacgaggcctgcggcgccgagggcgccggcctggccgtgcaccggcgtgttgcggagcgggccggtgagcgcgaagggcccgacgaggaggtagccgtgggcgaggccgacctcgatgccgcggagcagcgggctgacggcggtgcggtacgccgggaggttggagaggtaccaggcgaccagcgggctggaggtcaccggcgtctccaggctgccgatgaaggggtcgccattgatgggctgcaccacctggtacgttggcttctcagactggatggccttgactgtgaagcggggcctccttgtcagcgaagcaccagacagccccctcggcttggagcacaccaagctgctcttcatcagctggctcgccatgggagcataagcagtggccatctctctcctctcgtctcttcctttctctccctagctagatgctctctctcccggccaaaaaaaatggatgtgaaacagccttcttggcaactgccccggaaattaaagtttg

SEQ ID NO: 386240 - DNA, 419 bp, Oryza sativa
cgtgttaaggagcgggccggtgagcccgaagggcccaacaagaggtaagccgtgggcgagaccgacctcgatgccgcgaagcagcgggctgacggcggtgcggtacgccgggaggttggagaggtaccaggcgaccagcgggctggaggtcaccggcgtctccaggctgccgatgaaggggtcgccattgatgggctgcaccacctggtacgttggcttctcagactggatggccttgactgtgaagcggggcctccttgtcagcgaagcaccagacagccccctcggcttggagcacaccaagctgctcttcatcagctggctcgccatggccgcatccagcaccggccatctctctcctactcgtatcttatacctttctctccctagctagatgctctctctccccggacgcgtgg

SEQ ID NO: 386241 - DNA, 797 bp, Oryza sativa
tttttttttttttttaatgcgggtaaatctcagctcagcgtaaaattttggggcaaaggacaaacgttgcagttcggttttcaaccaacctagctcaaggctggtggtaatcataagcaacagtttgcctcaagatgtaacatattgttgcgacaaacattgaactttaacactattaccaccggagttttcaagtctccacaatcagaatacagtacacactcagcatgggaggagaccgcaaaattgcattagctagcgagtacacaacaatttcacataatgtttttcagtgttcgttttcaaaatttcctttcactggatgttccacttctgctcgagagcactgcatattcgattcaaacagcaggcagcactgagagggtaattgcaaatttgtatgtaatcatctgagtattcgttggtcaatctttccatgagccatagcacctaccacaaacacaaggggtacatcgtcactggatttggcaacatagtcaaacaaattgactgacttctcagcactatatgaaagaccaatcttctttgctccaactggtagatagcgggtgactggatttttaatgacattaagaagcttctcccgctttccaactgctgtaatgctcaaccgctgcaataattgtaacattaaaccgcaaaaacgtttgaatgtacgtggcatgcggacgtaaggcttgatttcaaacaatactcccttttcagtcctaacataaacagcttgtaacctcccagctttagttagtgggctatcaaatattgcaagaagagcctgg

SEQ ID NO: 386242 - DNA, 712 bp, Oryza sativa
agcaggcttaacccttttagtccggtcatccatgttgagttgaaaagaaataacaaatgatgtgtgttgtatgaagtatataaaccacattttcacataaaaaattaatcacttttgagtcacacctcacatgttgctacgtatacgcaaatcatcctccaaattaagcttggagtttgaatcaaactgtttgatgaggaggagggtaatacatcgatcgtgtaggcaagctgacgctctgcgttggagtatatacgtacgtagaattcgaaaggattcttcagcctttcttggcgaagagggcgccgaggttgaagccgccgccgccgccttcctcgtcggcggcgctcgccgcgggcttcttggcgggggccttccgggagacagtggagccggagggcggcgcgccgtcgaccttgttgagcagcgggtcggtctcgacgagctggtccttcttgaagatgaagccgaagatgaagtcggcgaggctcttctcctcctccgccggcgccggcttccccctcgtggcgccgaccgccatcgccacccgcgacggccgcctccgcccagccgacgacgacgacgccgacggcgccacgcccgccgccgccactctgctcccgaatcccaccgaagccatgattcttagctcagctctagctctctctcacgcgacgatgatgagaatgagatgggtgatgcggacgcgtgg

SEQ ID NO: 386243 - DNA, 478 bp, Oryza sativa
atgttgagttgaaaagaaataacaaataatgtgtgttgtatgaagtatataaaccccattttcacataaaaaattaatcccttttgaagtcacacctcacatgttgctacgtatacgcaaatcatcctccaaattaagcttggagtttgaatcaaactgtttgatgaggaggagggtaatacatcgatcgtgtaggcaagctgacgctctgcgttggagtatatacgtacgtagaattcgaaaggattcttcaccctttcttggcgaagagggccccgaggttgaagccgcccccgcccccttcctcgtcggcggccctcgccccgggcttcttgccggggcccttccgggaggcagtggacccggagggcggcgcgccgtcgaccttgttgagcagcgggtcgctctccacgagctggtccttcctgaagcccacgcgtccgcccacgcgtccgcccacgcgtccgcggacgcgtgg

SEQ ID NO: 386244 - DNA, 1218 bp, Oryza sativa
attcaggtattcacatgcattgagcttgcagttcataggcaatcaggctgttatagtcgtatcgtacattcgtactggacaatgatgttcatctatcgacttgagctacaacaggcaataacttgacccaattcacttgtcatgtatttttggtaagaacaacactgccatgtagtttcacagaatacagcaccttttcttcattgttgattcctatcctaaacgaaaacaaaaaaacagctcattattggttgctcacatcgtcacacggctgtggtgatggccaaatatccttgcaagctaaggtacaagagaacgtggccagacaatttgctcaacaggagcaagagcatagcccccatgactcacttgaaggtattttacctgagaactctagctctacaacttctccctgacataacataagtagtctgcttacacctcgaagatcagcttcctgaacttctccatgtgctcagcctgcaatgagatggctatggataggctaccatccttgttcgcgcttgggaggacaaacgccagcccttcataggcgatgccaccaggacccatgaacactggtcttccccatccaaaatctgcatcatgaattggcaagcgcacccagctggtgagcccgaggttcggacaccggaaagtgtgtgctccacggaccaatgctgataaatcaggctgcagctccaggtagtccaatgctgagcggcagtagctatcgttcatcctatctagcgcctcttggatgactgctgctccatctgccagcccactggtcaccttgcctgcctcagcaagtggagtggcggtgaaaatgacattcccaaagtaaccttctggaagtggaggctgcaaccgttgtcgcccatcagtggcacaatacagcttagtgggctgttcagaaggcaggccacgtgcaagagatacgcatcgccagacatgtgcagcaagaactgcatatgtgctgaaacgtggtgcaccttctcctgatgggagctgcgaacgcagtcgaccaaggtctgagcgggtaagcttgaaaatgtccacagcagttggaggtggtgttgtcttattagcagtaacagactggggtacggaggacagcatggctggggcaggctggtactcaacatgtgggtatgatggagttggtggatctcgggctcgtaggagagtgcggtcaatgaagggcatgatggcaat

SEQ ID NO: 386245 - DNA, 1677 bp, Oryza sativa
gtctgattttcttcccttgtcgatcatatgttgttgacttatgaccagaagcaatagccttcttgtttggcactaaaggaaggacctattttttatagtagaaagcaaccgtatttctttctacattgaaatatagaagatgtacattgaaatgtgtcaagaagagatgtaggagcaccctcatggagagggatttttagaagttccattgcatggtttcacaagttatgcaatgaccatcctactttcttctagctgtaatatttccaaaactagttacaagaaatgcgaggatgcccattgtcattgatatggtatggtgatgaagagattcacgaaatatgaatgtggagctcattaaacttttgccgcttcagtaggtgcaccggccctctcagcaataatctgctcatagagatctctaatcttcagtcctacgatagtttggaagagacctgttccattgttgctgccggggaagtctgcatgctttagcatttgctgtgtcacctctccataaaatttggttgagaggttgcttaaatggctctcaacatagataagctcatctagtctgtcaaattggccatccatctccagcactgatacctcatgcccaaagtaagtgtctgggccataggcaaatttgatgccaggataagaacatgtgagttttcttccacaagggacccaggtgatgcttgatccttcgtcgaagaggtaaactgggttgaagttctttacaccttctttcatgatcaatttaacacgtagcacctttccttcattgtcatcaggaataagctgggttggcagaacttcaatcactgcatcagcatattgcttctggggatcaatgaaggcatcaaaatctggtttcctggcttcgatactagccttgatgctttcaaggctgtgaccgcgctctgccatatccctctgaattttccatgcaaatttaacctcgtcactgatgtccaggtagatgctgaaatctaggaggtccctcacacgttcatcaaacatgggatgtaagccctcaatgacaaaaatcttggggggctggataagctccggtgggtctaggagaccagtaacatggttgtagattggcttctcaattgccttgccttctttgattgccttcacctgctcatacatgagatcaaaatcgtttgccctagggtccagggcagtcacacctttctccttcctgccagtcctgtccaaggaatggtagtcatcgaggcatatcaccgttgtcgtgtcactgatgagtgtgtttgagtctgggttgccacccttgggtggctctgcagcaccaccaaacacactggtgagccggcgcataaaggtgctcttcccgcatcctgagtctgctgcaaggccaatcaccactggcttgtcgactgagcatgaaacctgaaaggttcttgctcctccgtaccttgtgctacccctcctgttgcttctggtggtgaagaagatgacctgattctgcctgaagcttgtgttggtggtgcatggggagtgcagggaggtggtggcatgtaggctggagatcgccatctttgcttctggcctttctacctgctggagttgctcttcttcccttcaagccttttgattgaggcttgatgagaagagagaggaggttcaaataatcggacgcgtggg

SEQ ID NO: 386246 - DNA, 1446 bp, Oryza sativa
  unsure (1)..(1446): unsure at all n locations
nnnnnnnnnnnnnnnnnnnnnnnnnnnnnnnnnnnnnnaatctcacaagagccaacatgagactccgatattaaccattgacacgtgaaacacattaaggtttgataaataaaaagatctccagctggagtgtgacaccacatagtctctgaggactgtctgggactctgggtttatttattgaccaacattacagataagaaagcgcacagcacaaacaaactcgaagcactcatgacgcgaactggaaatactcatgacgaacgaaatactgaaaagacgataaggcgaagtaggcgatgattgggaggagattcggcgcatcactcttcctcagattcagaatccgcgctctggagccactccacgaacggcttggcattcttcaccacctgggactccttgccaccagcaacagattcattataccactgagttatcacttcttcatccaggacgtccccatcatacagggccttgagaacaatcggcacctccttcacagcttcggggcttgacttggcgccgaaggccaccagcgcttgcagcaggaccatctgggaggcttcatcaggcacagcagcagcgaggaatttcttcttcttcacaacctccttggcgaatcctttgccgaggccgccaaagagtgcatcaaaaagagcattcatagcatcctggggtggcagcgctgaggaagtcatcagacccttgagctgaacagcattggcacccttgctcaagttatccttcatctccttgaccagatcatcataaggactgcttttagcctcttcaaccacatgttttgtacttccgttggaggcaccctccttgtgtgaggcctcgtgcttcttcttcttctcaggttcttcagtggacagcattaccatctcagcagttgcagcgctcagttgttcctgcatgcgctgttttgcagcctccaacgaagtgtcagtctgccactggacatcatcatcatcatcctcatctgcagccacattgtcaccatcatggctgcgagttggtgaatttgaatgatcctcatcagagccagcagcagccttcttcttcccagcaccacttttagaggaggtactttccttggatgcacctttcttctttgcttccttctttagcttcttcatctcctcatcagcagcctcaccttcctttagacgctccttctcagctctcctcattgccttcttgtctttcccagcacccttcttctgttcaggtggattcttcaggataaaagttgtgagcttgtccctcatgtcaacatctgacacaaaaccacaggcagcacacttcagtgtaatcatctgggtcttggagattaggacctcagtctcagggttgccacatccatagcattggacatacttcttgatgaagttctcaaggagaccagccagcttagcagtatcatgtgccccattacaa

SEQ ID NO: 386247 - DNA, 736 bp, Oryza sativa
  unsure (1)..(736): unsure at all n locations
ttggttttttattttttggggtttttttttttttttttaatctcacaagagccaacaatagactccgattttacgcattgacacataaaacacattaaggttttgatagataaaaagatctccagcaggagtgtgacaccacatagtctgtaaggaccgtctgggtttattgaccaacattacagataagcaagcgcacaggacacacgaacaaactcgaagcactcataactcgtaggaaaagcacacgacgatacgaactggaaatattcatggcgaacgaatactcaaaagacgataaggcgaagtaggcgatgattggggacgaggttggacgcgtcactcttcctcggattcagaatccgcgctctggagccactccacgaatggtttggcattcttcaccacctgggactccttgccagcagcaacagattcattgtaccactgagttatcacttcttcatccaggatgtccccatcatacagggccttgagaacaatcggcacctccttcanagcttcagggctagacttggcaccgaagccaccagggcttgcagcaggaccatctgggaggcttcatcaggtacagcagccgcgaggaatttcttcttcttcanaacctcctttggnaaatccttttgcccgagggccggccaaaagagtgcnatccaaaaaagagcattcatagnatcctggggggtgggcaggggctttaggaaagtcattcaga

SEQ ID NO: 386248 - DNA, 1964 bp, Oryza sativa
ttttttttttttttttcaaattgcgtgcagggccaaaagattacaagttacgatttataaacacgaaaaattccgcaatcatgcgaattattcacagaatacaccaaagtatgtgtaactgcttgtccaagaagatagtgaaggttaatatagcattagcataacatcttacagtaggtgtctacgataagaactattgacaaagtttccacacgctgtaaaatgccaggggtcccttttacataagatggcactccatggatatatgtttacaccgacttgttcttgcaagaattccaacagtcacctcaggaattcagcttgatgccttttcttttacccttgctgttccattcaaagtttcttagttcttgtacttcatggtttctttctcaaacccaattgtggggaactgttttgcatattcctccacatcatggcgaagttttgcaatctcggattgaatgttgctatcagattgcaaagtggcaacaaagtccttcagttttgttccacctgctgcagccttaaccttcaaagccaagttcactgctgcatcgaagaaatcagcaaccttagcaaagtcctcctcaacaaatcctcttgaggtcagtgctggggttcccatcctgatgcctcctggtaccatagctgaaacatcaccaggaactgtgttcttgtttgctgcaatgtgcacgttttctaaaaccttctccactcttgaaccatctatgcccttgctcttgagatttaccaacactaaatggttgtcagtcccaccagagacaagttcgtagccttttgctgtcaagctctgtgcaaattttgcacagttactcataacttgctcttgataagctctgtactccggagtagttgcctgcttaagcgcaacagctaagccagtaatggtatgattatgtggtccaccttgcagacctgggaagacagcagcattgatcttgtcctcaaagtcatacataacctctttgccttgcttgtttactcctttcacccccttcctgtaaaagatcatggctccacgtggtccacggagtgacttgtgagtagtggtagtcactacatctgcataatcaaaaggagatggaacaacaccagctgcgacaagcccactgatatgtgccatatctgctagaagtattgccttctgcttgtcacaaaccttccgcatgcggtcatagtcataaagacgcgcatatgcacttgcacccgcaacgatcaactttggcctaaaaagaacggcacttttctccatctgatcataatcaatcaagccagtgctttcatccaatctgtagggcattgtctcaaagaatatcgaaactgctgaaatcttcttagtatcagtctggtagccgtgagaaagatgtccaccatgaggaagatccaaagccatgattctctcatgtggtttcaatagggcagtgtaaacatggaagttggcaggtgaccctgatagaggttgcacattcactccccatttcgctgggtccaagcggaaggcctccaaagcacgtttctggcacaatgactcggccatatcaatgtattcgtttccaccgtagtatctcgcgccggggtacccctcgctgtacttgttggtcatgacggatcccaccgcctgcatcactgacaccgaggtgaagttctccgacgggatgagctccagacccttccattggcgggccttctcgtgctcgatgatgtcggcgatctcgggatccacctcctccagcggcgcgttcagctgcttcggccaggtgactccggatctctcctccgtcgccggcagggacgccatgtagtagagcggggtgatgcgggagagcggctggcggcggagggcgtcggaggagagcttgcggagcgccgtcgccatggccatggtgggcgagcggcgagcggcgggtggtggtggaggacgggtggggtctcggggtatg

SEQ ID NO: 386249 - DNA, 1408 bp, Oryza sativa
aacttgcaggatttattcataccctaccctgtatgatttccatatgtatggccctatcactccatcttttacagttcgccatccaagcattctgtttatttttgttctgggggaaacaacgtaaggtattgataattatgtttcctgaggtaaggtatatccaacaaacacaaaatgctgggaagttattcaaacgatttccagcatctctataaaacattggtctcttacatttcgagtggttgaagaggtgcgagaaaggagtagaatatagcaagtttagaatggtacatgaagaagatgcaacaaaatgaaacttagcctcatacggccacagtgacagcttcatcaagtgcaatgactccaggaagttcctttccttccaacagctccaagctagcaccacctcccgttgaaatgtggctcataacatctgcaactcccaccttctcaacagcggcaacagaatcacctcctccaataatggttgtaacacccttgccgctaaggtctgccaacttctttgcaatagcctcagttcctactgcaaacttgtcaaattcgaagacacccataggtccattccaaatgactgtctgtgttgtttccagggtagagctgaatgacgcgactgaatctggaccaatatccagacccatccaaccatcaggaatagcagatgctggaacaacctggctgttagcatcaggagcaaacttatcagcaatgataacgtcagatggcaacagaagggagacacccttttcttttgcctttgcaaggagagatgttgcaagctcaagtttgtcttcctcaaccaaggaagaaccaacagagagtccttgtgccttgtaaaatgtgaagatcataccaccacctagaagaaggatatcacatttctccaaaagggattcgataaccccaatcttggatgacacctttgaaccacccacgatggcagcaaatgggcgtttagggcttgaaacagctccaacaaggtagtcaagctccttctgcaaaaggaatcctgcgacagaaggctttaaaaacttggtaactccctcagttgatgcatgtgctctgtgggctgttccgaatgcatcattgacatagagatctgctaaggaggcaagcttcttggcaaactctgggtcattcttctcctcttccttgtaaaatctaacattttcaaggagcaaaacactaccatttggcaattcagataccaatttctcaacatctggtccaataacatcttctgccttagtcacctgtatgccgagaagttcagacaatcgcggtacaaggggagccaagctaaacttgggagtaacaccctttgggcgacccaggtggctggagaggatgaccttggcaccgttcttcggacgcgtgggcggacgcgtgg

SEQ ID NO: 386250 - DNA, 524 bp, Oryza sativa
aaataataaagcaacagatctggcacctacggtttcgtagagtgggacacagattaagcggaacccatgcaagcttgcattgctactatccactgagggcagtttgatccatatattccaatccgggaacctggcttcacccccagctgctgcaaagcagatccaacttgcaggacttcttcatacacttccctgtatgatttccatatgtatggccctatcactccatcttttacaggacgccatccgagcatccgattatctgggtacttgcctgctgcgaccctgaacacgtcccatgatgttttcatgtcaggctcaagtggcgggaatccatcctttgacagtgcactcctgaacactggccctaccgccggccggccgtccttcctgggctttccatcctccacctgaactgtgaaaactttcttcgtccccccctccatcgaccaaagtgacccccctacagagaagccagggagctcttatgtcgagttgagaagaagctggcgcggacgcgtggg

SEQ ID NO: 386251 - DNA, 567 bp, Oryza sativa
ctgtaactgaacttgactgctgagtgatcataatacccaaaatatcttcagatcattcacaggaacacagcccaagcacttaattggtttggtatgaagccttttgcaattcgatagcaaaaagttcagtatcaggcaacgtgcaagcatgtaagatttccttacttgcctcgtctgttgattacatacccaggtagggggcaatatacagcttacaaaactcagccaagatcttggaataacttcagctatgcctacattcctagacagaaactttgagctgtacacaaacaaaatcgcttacatgtaggtattggcgagctgctcaaaggtatacactaccatacaatgggagggcaaaatttagaggcattgggttggacctcaaccatcgatcctcatccttttgataaatttgctaggataagggacaatgacaagtagcatctcatccaagtcaatttgaaccagaatggcaagagcgatattagctgtagggacgacgtctcaaaatatgttggttttggagtagatgggcatccaagtgatctgatgagctctacgact

SEQ ID NO: 386252 - DNA, 477 bp, Oryza sativa
ggttggggaaaaaaaatccaaaaatcttgggccagatatttgcttgtgggggtctgagattagcgaatttcaatccctgattacactcatgctgaccatttggtagctacaggagacgtatacaattttacatggagtttggatgtacagcattaatcgtcttccaatgtttcttctcctgatcatgtgctaggctctctctctttttctccatgggcggggaaattaatctactgtattgccgccacacagcagcgctagttaaaattcagctacttgtcccactcatgtatcttccactccggcaattgctgaatgaccatctgtccagttgaatctggattgccgacagtagcctggcacgccaatctccatgtctttggtttccttttcagcaattccttctcaacatcagttttgggggaaagcagttcaccgccttcaactacctcgacgatgcaggtcccggacgcgtgg

SEQ ID NO: 386253 - DNA, 807 bp, Oryza sativa
  unsure (1)..(807): unsure at all n locations
tttttacaatnacccatgcagggggacacatatcatatgctgcagttgagctacaacaaaatcggattttatgactgaggtagcagtggctactgtgatacatattgaaaaggggaagaaaaaaaatacaaaaaaaaaagctctcgctatggtctgaaaatgaaaaatgcagcaaaagagatttgtcaccaaattcggtgccaatttctgtctatacaaacaggtaacgcacgtcaggattatgcgttgcttctcaaaaccatatgccagcgcctagctacaatagcagcgggtggcgccacagcaccaagtatgggagggcctcaactctgctggctacctaacaaaaaaagaccttcacatctccctccctagaataccaattcatcctcctcttcagttgcaacggatagtgtgcctgccgatgcggcatcccgaatctggccggccttctcgtcgcttatgccaagcagatactgcaaccttgacagcttttcaggcttcggaatgctcttcatgtaaatgccgtacagatcatccagctctcctgatgtaggccatgataggggcttcgaagcaggcacagccgcgtcgcatgcaagcaagtcgttcaaggatgcgaccacttcatctttcttcttctgccgaagcagagcaacagcttggacaagggcgttatccaacctaatcttcgcaatgtcctggacaatcgacttggccttctcagcattcatgatgagatcagctgggatctttacatacacttcctcttcatcaaattcaccccacgcgtccgcggacgcgtgg

SEQ ID NO: 386254 - DNA, 592 bp, Oryza sativa
ttttactacaaaattaacccttattactagtaggatgatgaattgatgacatgaaacccttactattttcccaacaaaaccaaacctaccattctgcttcgaggatgaaaccagccttgctatattacacggtaattctattacagtagcttccccacaatgtcatttcagaaaaaaaggacaaaaagaaagctacaattacatgcttatatatatatatatatatatatatatatatatatatatatatattctcgttggttctcacactggcgctgctgtcccgttgcacttggaggagtccttcaccggcgagctctcgccttcgaggagctgcgtgttgtgcaggtggtgctcgtcgtcgtcgtgcttgaggtgctcgacgtcctcgtggctcaggaagcatggctggttcgtcgagcacagcaccctcgcccacatcctgtccgtgatcaccaccttgttctgcttctccgtgattctgtagaacgggatatacgcgtgcctgccgttgaccggcgcgacggtgaagccggtgtaccccgccatggcgccgtggagggcgctgtgagctagcagggtgcagtagacg

SEQ ID NO: 386255 - DNA, 204 bp, Oryza sativa
agggggactggaagtaggcctcggcgtggcggagacccagcgaggcgtagtactcgtcgggctccggggagtcgccccagaagtacttcgtcgccgtcggtggcggcggtggcggcgccatcgccggagacggagacggcagcacgcgagacggcgagaagatattttttttctcctttatttttcgttgacgcggacgcgtgg

SEQ ID NO: 386256 - DNA, 672 bp, Oryza sativa
ggaaactagtagccttttgcgcaggtatagggtcaagaacaatctactgcaatagaattatggaagcaattaaccatcaacaactccatatctccatatcgtaaatcagtttacagaatctccaaaacaacactgcaaagagacgatgatctcgatacaagacagcgatcgaggcgtgtctgtgaatgaaggagaaggagaagatcaggtccgcttgacggggtcgaagttggagacggcgacgacggcgccgacgatggcgacgagcacgaccccgccggacacgatgctgaggaggaagttcttgagcgacggcgtcaggctgccctgcgcggcctccgcgacgtcggggaggaccatcgccgccgccatggccgcggccgtcagcccggccgtcgccctctccttcatcgacgccgacgccctcacggccatcctcgccgccgccgccggcctcgccctcggcacgggctggaacgaggcgcacaggggcttcttgagccaggccacggacagtggccgcgccgcgacggcggacagcgacgcggttgtggccatggaggatgaagaagaagaactcgcggtgctttcttggcgcgagagcgagacgaggtgcaagtgtgtgcggacgcgtgggcggacgcgtgggcggacgcgtgggcggacgcgtgg

SEQ ID NO: 386257 - DNA, 773 bp, Oryza sativa
tataccttaattaggtctgaatgaatgaatgatgtacttgtccaatatatgtcaccgatgcatttactcatcgatctgaacaaagaagataggggcgctttactactaatggaaaaactcaattacaagtttacaattgcacatacgcatcatgaaatcgaattaattaagccaacacaaacacgtacgtacacgtgcagcaaaagtttcatgcagctgcactaccgttctcttgtagcatacagaatttgaagccatggatctcatgtcatacgtcacagctacgcaaagaagcagctatatcgatcaggtccgcttgacggggtcgaagttggagacggcgacgacggcgccgacgatggcgacgagcacgacgccgccggacgcgatgctgagcaggaagttcttgagcgacggcgacagcgccggcgccgcttccgccacctcgggcaccgccagcgccgccgccacggccgccaccgcggctatccccgccgccgcggcagcagctgaggccttctccctcctcaccggctcccccgacgacgacgcccggacgacgacggcccgccgtgccgccgccggggaggcggctttcatcggcgccgccggcgacgagacgcgagccagcggcctcccgagccccccggccacggacagagacgccgcaacggcggtcgcggtggcggccatggatcgatggaggtgtctcctctcgcgcttgcttgtgaagaggaggagatcgatgggtggacggggggggggacgcgtgg

SEQ ID NO: 386258 - DNA, 618 bp, Oryza sativa
gttctcaccagagtatgcaatcaggaggcatcttgcaattggatgtttcgtgctagaggggaatggcagtatcctcctttgctgcagatgatccaatccagaggtgaaaggtaacaagtgccaaccatgctgagtgacgaaggataatcagctcaatggagctgaaatgaaattttcctctacaatgggtcactgaagtgtatagcaaattagcaacatacttctatacatcaaataatcaacaaatcgctgccaaaacttggtggactatgccgggcctttgtttttggttgatgtcataaatgattcgccgcaaccacattctcccttggaattagggttcataaacacaaactcagacctaagtggatcatcaatgaaatccattttggttccaatcacgtgcatacgagctttcggatcaattagtatcttaactcctttatcttccacaagttcatcgaattttcccttctcatcagcataattcattgtgtacgacaacccattgcaaccacgggccttgacgccaagacggagataagcacgctgccgtacgccaagcagtggcgcaccctcgacgccgctgcatcggtcagcgtaagggcctgctttcgg

SEQ ID NO: 386259 - DNA, 1240 bp, Oryza sativa
gtgtcgaatgcttgtgtgaattttgaaacaattaaatgtacacagttctggttaaggttcgtacaggattcaactaagcatcacactaaacaaacaatgatgaaacaactatacaaaaaaagagtagacgagaatccgtgtccataattaagaacccagggcctcaaggaagcgtcctccaaacaggagctgctaagcccatttttcagatccttaaaacagcagcagcagcaacaccaatggagctttgttagaccagcagttaggatgtttgctagtcctcgagctcaacaagctgagctcttctctcggcagctttcttcctgacaaagatgccccagcgcatagctgccttgatcttgagccacccgacgacggctttcccaggtgggcgggcacggtcatccccacagttgaagttgggggcagttgatggcatgtagttaggaaatgcgaagccgtcttccgtcaggttggttgacgcgccacccatgctcaaaatccgcaacatctgttgcatctcttcgttctccaatatctcgtggctccgcatcctgatctcctccatcaggtagtcgtcaaccccactccggttctcctgcggttgcgaccagtcatcgaaaggattcaagccggtgggctgcatggactggccacctagtgctgagaattcaaaattttgctgatgttgttgctgtggtggtcccaatgccagtatattggagcccctagaaacttgattctgcagtgcggaaccattgaactggctttcaggtgtcagtgaactccgctcatattgtgtagtgacgtttgcaggtatgctttgagaattgactgcatatcgtcctgcctgatttccattgtatgcacttgtagatccatctgcttcacttgtagtgcctgtagaagtttgccctgcttttgctggttgagacaattgtttgtgtgtgttggatgaaccataggaaacagggctgtttgttgctgctgcagccgtgtcacttcttgttgtgacagatttctttttctgcttgaagctcaggagtgccttgccatcatattctacaacatgcatccaatcctcatatgctttcttaaccaatccatctgcatagatcttctgagttgtccctgagattttctgctgaaatgaactggtcgtcaacaaacaaaccggacggttgggtcgacaattcaattccggtccccctaccggcaggcgtcccaacctaccctatag

SEQ ID NO: 386260 - DNA, 599 bp, Oryza sativa
  unsure (1)..(599): unsure at all n locations
tccacgcgtccgcccacgcgtccgttnttnatttnttgcacaacattgcactgaactcagtaaaaattatcctacaatttcagaagaaacaaaacgtttcctctttggctgcatattctaaattacagtatagtaaggacaaccattattctgaattcttgattctttctactaatgagtaacctctttcaaggttcaagccccaaggttgaagtaaaccgtgtagaattcgtctctcaggctgtacaatggttcaagcaggaagttcctcttcaccccctttgcaatgaagctgataggatggtactgcctcaatggagcagcctgcacaaagctcgcggcctgctcgaaaatcccgttgatgcttggaagagaactcttgcaactgacctgaatctttgtacccacggagtaatccacgcctatcaccaggaagcatcccggtttggtccccagctcgagggagaccgagtttgggtttccatctagcccaggtacaatgttgaagagggaatctgaactcttttgcgcggattgggtaaggttgttgtgatcaccgttccttggaggtcaaatggttctatctgcacagaggtccc

SEQ ID NO: 386261 - DNA, 855 bp, Oryza sativa
aaacatgcagccatcatattagcatcaacctgaccgacctttttaatggcactgaatcatttttatttcctcatcctttttattcattcctcccagagagacggatccatggaagttttcttgccctcatcaggcaagcagagcacacacacacggtggcagtggaagtgctatgaacaagacgctaatcaacatccagagctaaaacaaacaaggggatcaatgcaaatcccgaaaaaaaaacacaggggaaagtccacatcttcttctcgtccccaactcctccgtgtcaccaccacgtcttgcggatttttttttaccctgttctattcgctcaggcgtccacgatctcgccgtcgtccttcgacgccaggatcagctccgggtgcgccgccgccgccgccgccttcttgatcgtgccgtcgatggcgttcggccggccgagcgccttcagcgccaggtgcgccgccttctggccggagatcatcatggctccgaacgtcgggcccattctcggggcgccgtcgatctcggcgacctccatgccggtgacgatcatgccggggacgacctcgcgggtgaggcggacgatctcgtcctcggcggtgttcatgtcgagggcgcgcatgccgggcacggcgtcgatcatgccgatgtcctgcagccgcttgacgcccgtggcgccgaacggcccgtcgtggccgcaggagctcaccaccaccctggactccatcacgttggggtccatgcacgactgcgtgtcgtggttcatcgacaccagcgcccagttggtgaccacgccgccgaccccacgcgtccgcggacgcgtgggcggacgcgtgggcggacgcgtgg

SEQ ID NO: 386262 - DNA, 1362 bp, Oryza sativa
atgcaaaacacagggcggccgccttttttttttttggtttggttttagacgctaatcaacatccagagctaaaacaaacaaggggatcaatgcaaatcccgaaaaaaaaacacaggggaaagtccacatcttcttctcgtccccaactcctccgtgtcaccaccacgtcttgcggattttttttttaccctgttctattcgctcaggcgttcacgatctcgccgtcgtccttcgacgccaggatcagcttcgggtgcgccgccgccgccgccgtcttattgatcgtgccgcctatggggtttcggccggccgagcgcctttagcgccaggtgcgccgtcttctggccggagatcattatggctccgaacgtcgggcccattctcggggcgccgtcgatctcgacgaccttcaatgccggtgacgatcatgccggggacgacctcgcgggtgaggcggacgatctcgtcctcggcggtgttcatgtcgagggcgcgcatgccgggcacggcgtcgatcatgccgatgtcctgcagccgcttgacgcccgtggcgccgaacggcccgtcgtggccgcaggagctcaccaccaccctggactccatcacgttggggtccatgcacgactgcgtgtcgtggttcatcgacaccagcgcccagttggtgaccacgccgccgacgcggccctccttgacgatgaggtcctcgacggcgacggcgttgaacagcttcacgttggggcgcgccaggaggcggctcatgacggtggaggtgaagagcgcggcgtgcttgatgacgacgtagtcctcctgctcgtcgtacgcgacgccgagctcgtcgaggaacaggtgcgccggcttgcgcaccaccatggcggagaacagctgcccgccgagccacgcgccgccgccgggggacaccgactgctcgatgacggcgacgctgacggaggggtccttggagagctcgtacgcgcaggagagccccgcggagccggcgccgacgacgacgacgtcggtgtcggcgtaggtgatcatgtcggtcatgtaccgccgggtcatctcgcgagacacgatggactccttgatggggctgaacctgatggcgttgaggtcgtaggggggagtggacgacgacgacgagatggagttgcagatggcgccgccggtgcgcggcgcgacggagacggtggggttgcgggcggcggcggggaggcgcgcgccagcgaaggaggtcttgaggaggctggacgcggtggtggccatggctgccatgcgagaggaggaggagctgagcttcttgctctgggatgaggagcgcgcgcgtccgcccacgcgtccgcccacgcgtccgcggacgcgtgg

SEQ ID NO: 386263 - DNA, 695 bp, Oryza sativa
caagaaccttctacattctttttttcgcactgcaaattctaagcgagtgaaatggtcggtcagcacataagtagggttcgtagaatgatggaaatttatgtgcatgtacaatttggccgtagaagaaagaatacaacggttataagcaagggattatcaagtccacgaggaagaagcagaggcaggcaaattacatagtattatacggattataaagaagaaaccaccaccattacactaatacacacaaagctcgatcaagcagcttaattaatttcttccacatgtacgacatgcatcctctcctcactccgtgatcaatttaagatgattctttgcagctccagctcgacgacgatccatccgaattaaaatcatttgacctcctggatctcgtccagggcgtagttgttggtcgacacgccggcgtagttcaccttggcgaaccgaaccaccaccgggtagcgagtgttgggatcctgatcaacggtgacgacggagccagtgccgttgtaccagtaggactccctcctcaggatcttcaccttggtgcctctcttggggccaatgggaggcggcttggcggcggcgggctccttggtcgccacggccgcctcggcctccgccggcttctcccttccccgcgggcggcggcggcgggcgtgttgcggcggcggcggatttcgaattccaag

SEQ ID NO: 386264 - DNA, 678 bp, Oryza sativa
ccctatggtgtttaaatttttgaacataagcaggggaaagctaatgatggaacttaatgtgcatcaacaaatagggcggctatgaaagaatacaacggttataaccacggcattatgaagtccactaggaagaagcacatgcaggcaaattacatagctttatacgcattctaaagaagaaaccacgaccattacactaatacacacaaagctcgatcaagcagcttaattaatttcttccacatgtacgacatgcatcctctcctcactccgtgatcaatttaagatgattctttgcagctccagctcgacgacgatccatccgaattaaaatcatttgacctcctggatctcgtccagggcgtagttgttggtcgacacgccggcgtagttcaccttggcgaaccgaaccaccaccgggtagcgagtgttgggatcctgatcaacggtgacgacggagccagtgccgttgtaccagtaggactccctcctcaggatcttcaccttggtgcctctcttggggccaatgggaggcggcttggcggcggcgggctccttggtcgccacggccgcctcggcctccgccggcttctcccccgccccgggccggccgcggcggcggcggcgccgcggcctcctcctccggacgcgtgggcggacgcgtgggcggacgcgtgg

SEQ ID NO: 386265 - DNA, 478 bp, Oryza sativa
  unsure (1)..(478): unsure at all n locations
ttagttatttgggtggtttttattgtgttttttttnngggggcaaattacatagtattatcgggattataaagaagaaacaccccccattacactaatacacacaaagctcgatcaagcagcttaattaatttcttccacatgtacgacatgcatcctctcctcactccgtgatccaatttaagatgattctttgcaagctccagctcgacgacgatccatccgaattaaaatcatttgacctcctggatctcgtccagggcgtagttgttggtcgacacgccggcgtagttcaccttggcgaaccgaaccaccaccgggtagcgagtgttgggatcctgatcaacggtgacgacggagccagtgccgttgtaccagtaggactccctcctcaggatcttcacccccgccgccacggccgcctcggcctccgccggcttctaccntncgcgcgggcggcggctcgcgatctagaacta

SEQ ID NO: 386266 - DNA, 437 bp, Oryza sativa
  unsure (1)..(437): unsure at all n locations
tctcccacacgtacgctatacatcctttcctagatccgggatcaatttatgataattctttgcaagctccagctcgatcgacgatccatccgaatttaatatcatttgacctcctggatctcgtccagcccgtagttgttggtcgacaggccggcgtagttcaccttggcgaaccgaaccaccaccgggtagcgagtgttgggatcctgatcaacggtgacgacggagccagtgccgttgtaccagtaggactccctcctcaggatcttcaccttggtgcctctcttggggccaatgggcgccggcttgacggcggcgggctccttggtcgccacggcacgcctcggcctccgccggccgctcctccggcgccgccgctgccgccgttcccgccggccagcnggaacctcgaggtggccgacgccacgttaatggtg

SEQ ID NO: 386267 - DNA, 541 bp, Oryza sativa
ttacatagtattatacggattataaagaagaaaccaccaccattacactgatacacacaaagctcgatcaagcagcttaattaatttcttccacatgtacgacatgcattctatcctaactccacgatcaatttaagatgattctttacacatccagatccaccactatccattcaaattcaactcattacaccttctgtatctatttcatgacatacatgtttgtcgacacgccggcgtaagttcaccttggcgaaccgaaccaccaccgggtagcgagtgttgggatcctgatcaacggtgacgacggagccagtgccgttgtaccagtaggactccctcctcaggatcttcaccttggtgcctctcttggggccaatgggaggcggcttggcggcggcgggctccttggtcgccacggccgcctcggcctccgccggcttctcctccgccgcgggcgagcggcggcggccttgaaccacacgggctccttgaagtcgacgcgcacggacgcgtgggcggacgcgtgggtcgacccggg

SEQ ID NO: 386268 - DNA, 902 bp, Oryza sativa
cttctgacgcccttggactccaccgccgtggcggccgctctagaactactggatcccccgggctgcaggtttttttttttttttttttttatctcaagctggtattggtattatcacatcaaaggtaattaaacgctgaaagtagggaaacacatggcagtatttacacatggaagatgtttacacacaaacacacttctttgggttgtcgctagcccttgataggagccagcaggctagctgacacgtaccggtctctggtagtactaacagagacagcaagctactaggaacagagtaacaagataagatagcaacatactagataattaattacgtattagataaccacaaggaccagcaaacgtggcgtgacagagagatcgaccagcctccgatcaatgggattatttagttcagcgatggctgctcctggtctcgtcgctgtacagccagtcgtagacggtgggggagttgggctgcgggcggtcgaagaggttggcgccgaggctcttggtggcgaggttgctccccgggtggaacacgctcctccacacgttgctgccccgcggcgtcgtcgtcgccgtcgtcgtcggagacgaagacgacggcgtcaccggcgtcgtcggggtcgtcggcatcgactgcgtccgcttgtacgccgccccgctcgcctcgccgtcgccatctttgttgatgacaagggggcgggttgtagcggccttgcggagcttctccaggccggtctccggtcgaggcccggccaccacgtcgtcccacagcttctccagcatcttcctgatctctgcttccacgcactcaacaactgatctctctcttgcaactttacaacaactcaccgcacgcgtgggcccacgcgtgggcggacgcgtacccaggaa

SEQ ID NO: 386269 - DNA, 456 bp, Oryza sativa
agaaaaggctaaggaatagacggttcaggaaaggacgtcagggcaaaagttctacaccgaaacattgatggagtggatcgcctcatacacttctgacgagaccgttgttaaagttcaccgtcttctaaccagtaaaggctagaagtgtagtacgacaacagtgatgcgtcgcagccttggacgaatcagtcgtggaaagaagaggcgagacgatggaaggcgccgatgcgcttctccctggcgatggccgactgcatcccccgcttcaccgcgttgaacactcccgggcacgagtagcgagtagaagctcggcgacagctgcgcccacgacccgccggcgaccgacgagcaccaccaccaccaccaccatcacgaccagggcggcagtgacgcgccttgctgaccaagtcggctgagccatattgatattgctcaaggagctagcaggtaatcaaa

SEQ ID NO: 386270 - DNA, 493 bp, Oryza sativa
aaaaagaattatctttatttcctaacaagactagagaacactcttcaattaccaaggtgcagtagtctgtagaaactaaaaataggccttcgcttagcctgctagacatttgccatatgctgataaattatctatcttcacgtgggtagactaggaatcacgaactggaatctatttcaggagcggtttcgacattgaatcgtatctgagggagcagccgagcctcgcttcttggcttctgagctgcagatgctcacagtgcgaaagggactcaaaagaagagactacttggggttggggtcctgtgagcctcctggttgccacaatttcttccggattatgaagatcatttcattctcctcagattctggacttgactcggcatctacagttgttactgcttcccagtgaagtgcgttgaggtatttcttgatgaattcgatgacagtgtccttgtctctcacgatgataaatccactaggcctaacgatgc

SEQ ID NO: 386271 - DNA, 586 bp, Oryza sativa
atgtttctggatcagtggtgcgcggggtcggcctgtcgacgacgacggcgtcctcttctccggctccgggggcgccgggttgagctggaagacggtgacggggagggcgcggccgaggccggccggggtgcggaagacgagcttggtgccggaggggctgagcacgatctcggagatggagacccagatgaggagctccttgctcttcaccccggcgacgccgtgcatccgcccctgctccacgaacgccgtcacctcgcccgcgtaccacacctgcttcccgatggtgtcgaacgtgtgggtggcgccgcccgcctgggtctgccggagccacacgaacccggcggcgcggttgtacccgacctcctccagggacggcagcgggaggagcccgtcggggaggccgagctccaccagcagctcccgggccttccgctcgcagagctcgtgccccgtgtggacctccgcgcccgaccggtgctcctccaccagctgcgacgccatcgccggagttgggttgggggtttcttggcttgccggaggcccggagttggggaatttggggacgcgtgggcggacgcgtggg

SEQ ID NO: 386272 - DNA, 548 bp, Oryza sativa
tactagataattaattacgtattagataccacaagggccaagcaaacatggcgtgacagagagatcgaccagcctccgatcaatgggattattcagttcagcgatggctgctcctggtctcgtcgctgtacagccagtcgtagacggtggggcagttgggctggggccggtcgaagaggttggcgccgaggctcttggtggcgaggttgctccccgggtggaacacgctcctccacacgttgctgccccgcggcgtcgtcgtcgtcgccgtcgtcggggacgaagacgacggcgtcaccggcgtcgtcggggtcgtcggcatcgactgcgtccgcttgtacgccactccgctcgcctcgccgtcgccatctttgttgatgacaagggggcgggttgtagcggccttgcggagcttctcgaggccggtctccggtcgaggaccggccaccacgtcgtcccacagcttctccagcatcttcctgatctgcttcccctcaacaaactaactgatccccctctctctctctcgcaactttacaacaaaacac

SEQ ID NO: 386273 - DNA, 1592 bp, Oryza sativa
  unsure (1)..(1592): unsure at all n locations
ttttgtttttaaagcatatacttactgtccattcatttttatgtttgtgaagccaagaaagatgagactagtccatgttcaaaaactcattagtccaaaacaaaaacatgacgcccatggctagcactcagaaaaaactggagaacactttgctcaatgcttatatcattttcatcaagattatgatcccaataagatctactcaacacttggctcgacaagaaggtacacaccattttctccccaaaattatatactctccgaacagcgccagcaggagagttcttcagtcactatgctctcagagacctcaaggtgccatcgtttcagatgattgtccccaagcaggaacatgacagcactggaaaacactgaagatggtgcattgcccttgttactttgcttcttgcagcgaccaatgcagatcatgtggaagctgacctttcaagtctggatcatgaaacacgggaggtggtgctccaagatggccaggagctctgtgccttgggctagccctgtcgagttgccggcccctcgagtctaccagccgcctcaacaagctgccctctcagcttctgcggcaatagccgcccacctgtctccacgcattccctgtacagtggtaggtaggccatggcaatcaccagctcaagtgggaggtccctcaggcagatcggcgactcacccttttccattatcctcatgaagttaccgaagtgctcttgcgcagacgcgaatccctcagaaaaagctgcctctgaccaatgctcgagcatgaaagatctaagctttgcatccactgcctcatcggcagattttgcaatgttgtctgctacagcatatgtggcagctgggtcattgaggaagtttgagcggagaaggaagtccacgccatgcagggaaccggtgctcctctcaccagcagccttgagaatttcgacgctgaggggtgcaagaacatgctttgggactagagggagaagataggctgcaactgcaccctgactactagaggttgcagcagtaagggctaagcaaagctccatatcccgacaaccaaggttgacgaaccattcaacaacttgaaggcatccccgttcagctgcccgcattaaagggccaagaaaggcaaccgcattaccctcctcaactaagcaccccatggtatccagtttcccatagtgagcagcaaagccaagggctagatccacatcgatgtccaagctattccttcgagcaatctgaagtaagatgcgcacgagttcagtgcttccatagcgagcagcctcaagaaagcactggttcacattatcggcaccaccctctactaacaactctaagagtccttgtattgcagctgccgagatacctgatgcccaaccttggtcaaaggtgtttgagaagagtgtaagaggaaaacatgccgcgtcaaaggcctccgtgaaatccttcccagtaagatcattatcggcaagatccagaaatgtcttgaaagcagacagctgaagttggacctcaatgatcgtgccatggtttcctctgcccttgttctcccgnacacgcgaatgcagcccgatacactttagagccca

SEQ ID NO: 386274 - DNA, 872 bp, Oryza sativa
ggttggggttttttttttattttttttttttttgcacacaaggccaacatgcaacttttatacacagtttaatatgtgaatatgaaattaatatgtactttaaaagcattcccaagacacaggaaattaaaacatagtcagcggcattgcacacacggccaggtatctctcagcagtcagaaataataacgatactgaactgcactgcttctgcctcgatttcattttttttttggggtctcccagccacgatgagaccaaactaacaacacctattgttgatcctcaaactcatggccatgatccaaaagatagttggcagccagctcttcatccttgttgcatgcgaagaagacctccaaaacgagctcacggttgaaccccattgcctccagccgctgaatggcctcccgttcctctggagtaactgtaagtgcctgtggcatagcggctgctagttgacctagtatgtttcccccagcagcgccgctatcaggagattcattcaccagacggagaaattcagcctgattttcctgaatcaaccgcaagatttgcggattctgcttcccaagctcttgaagcattggctgcaagatttggggattagcctggaccaatgcaagcagcgcttggaactgtggaagttgtcgcaatgcatcagggaccagccctgcccggcggcgtcgatcagctatcatccgtcacctcagggggccggacccattgcctattgagctataccgcgcactgccgcgttacacgtggacggaaacctgggtccaatattgctgagcaatcctcccctggtaaaaaaagccccatccctcaaatccactatggatgaaccctacgcataccgggtggtcccc

SEQ ID NO: 386275 - DNA, 613 bp, Oryza sativa
  unsure (1)..(613): unsure at all n locations
ctcatggccatgatcnaaaagatagttggcagccagctcttcacctttgttgcatccgaagaagaccctccaaaacgagctcacggttgaaccccattgcctccagccgctgaatggcctcccgttcctctgnagtaactgtaagtgcctgtggcataagcggctgctagttgacctagtatgtttcccccagcagcgccgctatcaggagattcattcaccagacggagaaattcagcctgattttcctgaatcaaccgcaagatttgcggattctgcttcccaagctcttgaagcattggctgcaagatttggggattagcctggaccaatgcaagcagcgcttggaactgtggaagttgtcgcaatgcatcaagggcaccagcaccggcaccggcaccagcagcagcaccaggatttgacccagcacttggaatgccctgggggaataggtttagaggattcgcattaggtcctgagccgccaccagctggctgcacaggcggtggaggtgcagcctgagcctgagatggaacctgtggatttccctgttgaacagcagcaggtgctcgagccacaggttgtgggggctccacattctccggacgcgtgg

SEQ ID NO: 386276 - DNA, 1764 bp, Oryza sativa
aaaaaaaattaatatgcaaaacccggggaaaaaaacttgggacccttaaagcaggccccccaatatattaaatataaaagcattttttaagtatatataatgataacttaacaaaaacgagaatttgatttcaagtatagttacattaaattttgttaaaagtgttttttttgttgttttttttagtggcaaaacagaaatgcgaatttacctttatatgcaactgtttacaccaaaaggggaaaaaaacgggtaccttgcaaaaaggagtataactttgcagtttcaagtcccacttcaactacaacccaatctgcattacaggatgggagtctaaaacgactgcagtttcagcgtttttgaggcctgcagagacactgggctcgcgttgcagcaaaagattaggcggcggcgcccacggtggcgccggcggtgagcctcgacgagccgtagagagtctcctcgaaccggatgatctcgttcttggaaccgtaggccacttgagtccgctcgtcgaggttgttgatcaccttgtccagcaccgactgtttgccgtcgctgctgtacccgccggctttctctatcaagaaacccaacggcgccacctcgaacaggagcctcagcttggccttggctgtcggagacgtcacgttggtgaagatgcccttctccttaactatgatctggttgacatcaggaaccattcctccagtgtaacgcaatgtgtacttctccttgacatagtagttgatgagcttgtcatattcaggattatcaaatgtagccctcaggttaccaggagagaacattttcccctctccaatggttgtggtgtccttgacatgctgccattttccttcatcaagaagaaggaattcatgagttccaggacaatctttgagagcgataatgtaagtagtgcgagggccatagatgcccatggcagcagcaacttggtctccaccggtgacgcctgtcagcttgtcaccaggccagacaccaaatatggttccaactgtgaagttcgtgtcgacaatgctggacccatcaagagggtcgaatgctacactgaaaccaccatcgactggtccacccatgtcttgcagctccgggacttcctcggagcacgcatacttgcagacatgagagtattccagagcctcgaagaggagcttgtcggcgagcatatcgacggcgagctgctcgtcaccgaaggagttgacgcaggcggtgccgccgcacgacgccgtcctgaccttgaacgagatcgtcctcatcgcctcccccatgcagatgagcagcctgatgaggttcttatccggcgtcgccttggtcaggaactcctccaggctgtccccgatctcgcaccgggtgctgagcgccgcccggctcgccgccttggactgcctcccagacggcagcgacctcgccgtgttaacccgcagcgactcgccgtagaacgtgctcggcggtctagcggccttgggcctgtaggactgcgagaaggacatggcggcgcagcacgctggcgagcgcgtcgccgccccgcgggtgtagctggccgcggccaccgtctccatggccggcctagctagttagttaattcgcaggggtgacgccgccggacgagaaaacttaatggcgagggaaagagaggggcaggcagttgctgagcgtgatagtgtacaagtttccgtagtacgtttttacgttgccaggcaaagctgctgcggggtgcaccaagcccgggctcgcggatttggg

SEQ ID NO: 386277 - DNA, 905 bp, Oryza sativa
cagagatgtttatcatcaactcatttgcaattcttttctaatgagtcgatcaaccattctccgagatatatattctcattgtcatacgccagattatatgaacacttccacgcaacaagaaagcgaagaaattgttttgaatttcgaagaaacaactgatagtaggtttgatacagtttttgcactacgctgttactgcacatgggagcagaacatattctcgtagagatatacaaacatcacacagaggaagcagcagcaagcactctagagagtcaccccccaaaacttccccggacaaatgcagctgcttaattactccgttccagcgatcttcttcttcaaggtctcgatgtcggtcgccaactctttcctgctctccttgaagaggaggtagcggtagacgaaccagccggtgtagccgaggccgacgagctccaggatcttggggagcagcggcacggagttgatggcgccgacgacgacggtggtgagccagagggcgacgacggcgccgccgctgtagaggaggaacgtcggcttgtcctcgatcgcctcccactttgccttgaggtcggcgacgagctcgtcgccgctggccgaggtggaggtgtcgtcggaggcggccctgacgcggagcagggacagtcgcggcgcgtcctggaggcgcagcggttggagcacgccgccgcggcgcggcagaagcgcggcggagcgtggagcggcggggacgcgcgcgccggtggcgccgaggagcgccacggtgtacgccgtggctgcggccatgtcggtgccctcctcctcctcctcctccttatcaccaagtaagctagaggcagcagctgagctctcttcgtggcctctctttttttttcagctcgacccacgcgtccgcggacgcgtgg

SEQ ID NO: 386278 - DNA, 1441 bp, Oryza sativa
gaaaaaaaaaacacatactactctggaatcactcacttatcagaagtattcatattagtttgcattgcaaataaactgcaaagagatgaacatttagacgcagcttttgttaaaatataagagctagaggggaaggaagcagagaatcgagagtatacagcagaaaggaacacatgtatatccgcacgaatcttgatgcaatccgcaccgccacgtgggccacgcggattggaccgagaccctactactgtcataggcacggccgcataggcgccacccagtgattgggacgaattctagtaggtgtagcccttgacgtacaagctctcggacgtggcggggtcgccggcggcgccgccgtacttccgagcgtggcctcggagttggccttgcaccgggcgaggaaggcagcctgagcggcggcgacgttctccttcttgccgccccacttcttgatggtgctctgctgcagggcacggccgaaggagaaggtgagcgtccatggcttgagcacctccagcttgttcatggcgttcaggttctgcgacgcctcctcctcgctctgcccgccggagaggaacactatcccgggcaccgccggtggcaccgtgcgccgcagcgccgccaccgtgtactcccctatcacctccgcgccaacctttgggctgtcggagccaggggtgaccatgttgggcttgaggagggtgccctcgaggaggaccttgtggtcgttgagagacttgtagacggcggcgaggacgcgctcggtgacggcggcgcaggtcttgatgtcgtgggcgccgtcggtgaggatctcgggctcgacgatggggacgaggccgttctcctggcagatgagcgcgtaccgggcgaggccctcggcgttctgcttgacggcgagctcggacggctcgccggcggcgccgatcttgagcacggcccgccacttggcgaagcgggcgccggcctcgtagtacttggcgcagcgcgcgcccagggagtcgaggccctgggtggtggtctcgccgttggtgccggcgatgtccacggtgcccttgtccaccttgatccccggcacgacgccgccggccttgagcacgtcgacgaacggcgtgccggcggccgtgctctggtagagcgtctcctcgaagaggatgacgccggagaggtactggaacgcgccgggcgtcgtgaagaggagctcccggagcgcctggcggttgggctccacgttctccacgttgatgctggccaggcgcttgccgatggtgcccgtcgactcgtcggcggcgaggatgcccttccccggcgtcgcgatgtacttggccgtcttgatcagctcatctgcgtattttcccacaaaggcagacatggtgatcctgtcaagaagagcctatctgaaccggatcaggggagcagctgcaaaatcccggacgcgtgg

SEQ ID NO: 386279 - DNA, 1297 bp, Oryza sativa
atggaaacatatcacatcttcatagcaccatcaatatgatttgcctgaatccaagtaacatatagcaatatgtagaagtatattattacacaagaaccttctaacaaatcacccagcaacaccatccagccacccggccaccgcgttaatatactcgcggtgaatccatccatgcgaaagcctctcggggtgggataaatacagtagtccacgagagaccactaggcagacgcattgaccaaaagcctccgcgaggtatacagaaggacactaaagtgcagatatctcctttatgacctgctctttgtctgcctcgaactgttcatcctctttgtcaatcttgaatccggcaaaaaatcggagaagcttgcttcggtttgtgactagtatgtttacaacctcagttggcttggttttatttgccgcaaataacttgaacacatgaaatgcttcaatttgaatatttttgcttgaatctctcaagagattcatgagaatcataagattatcttttgaactaacataacgcatcatgactgtagagttggatctatcaagcagcatgtctcccaagaacttgatagcctgcctttttgttatgtagttggttgatgatagcaacctagtgttgaattctgaaaagaaccagtcataattctttgacagaaattctgccacggtagctttatgccttgtcagaagttccttaaaggtcgcagaagcatctgatgcaatgtcaaaatttggaagttgtatatagtcaaagaacttcttcatgtggtcagactctaaaacgtaccttgcaatactttggtggcgaatacattccctcagcatagagccgtaatgcaaagcaatgtccatattctcatacccagaaattcaggtgtccaaaagatctttatttgcttctagatactcagatgcaactatttttgaggagacttgctgcctttgcaagtttgcaccaacttgagttgcatctttcctggtctctaagttcaatttcggaagacaaataattagaagccgtaaagtgttctctctgaagaattcttgggtcaattgcacgcaagcctcagtcacaggttcagattcaccattgccataaagaattgacttcaactccctgatatttttgcttaattctgccatcttctcctcgcgcttggcgtcgccgccgcgtgatccggagtgtaggtcgaggaagatgaggagctcccgcgtctgccgcacgacgtctgccggcgcccacgcgtccgcggacgcgtgggcggacgcgtgggcggacgcgtgg

SEQ ID NO: 386280 - DNA, 479 bp, Oryza sativa
ttgttttttgtagatgatttggccagcaaccctatgcaatggacactaattcagaacaaacccagtactgaagccacaaacgggcttttccttcagtaaaggtcaaaaaccccatacactgctaatctgcgaactattattgtacagaagggaaaaaaacaatttctacattctagacagaagggaaggaatgggggttgctggtgttgtttaagcctatagaatcaggagcaacagcaaaaagaagacaatattttacatgtaatttggccactctacgtctcaacctcatttggataacaaaaatgcctcaaaaataagccgcacaaggagctggtagttgaccaacaggattccgttgaaccagagcaaacatataccacatggaacatacatccaccatcaatttgccattctacaaaatggtaaatacagatacattttcttaagtttctaatgaaccgccgcacaaaatttat

SEQ ID NO: 386281 - DNA, 767 bp, Oryza sativa
tgtttttacatatgaaatcgagagaatccattattcattcacttaatgatcaatcgataaacacatacactcatacagtactgatacaccgcaaaatacaaggattacgttgacgacacgtacagataaaaaaccatacaaaccacacatgaacacaaggagaaacgaaacgaaacgacacgatactgcatcatatccatctcagctcgctcacgcgtacgtacactacacatatatactcggcacgttgcccttctcctcctatctccgatggacgtagctcctctcatataaagtcgaagagacgtgaatccctaacaggtgaagcttaccgtcatgaatccacacgtcggtagcacacctctttctgacgtacgcccgaggagcctcacccaactccaataatccatcacttgtacgggactgcgatcctgtccggccccgatttcatgtcctcccagagcagatccgacagcgccatcatcgtcttccccaccttcccgtcgccgatgagctggtcgtcccactcgacgatgggcaggacggggaggccgctgccgacgaacgccatctcggcggagcagcgcttggcctcgtcggcggcgatgtggcgggtggtgacggccttgaggaggccggactccaccagcctcggcgccagcgcgagcacccgcttggcggtgcacccgccgaggatcttgtcgaacgccgggagcaccagctcgccggcggccgtgacgaacgccacgttcaccggacgcgtgggc

SEQ ID NO: 386282 - DNA, 1849 bp, Oryza sativa
ggaacagcaaaggaagaaatgcatatttagatgcacaactctacgagtctcacggtgcaagcatagccatctgaccacaaaaaatgttgagccactgcacacggtgcagtgtcagttgtagcattcacaacataccgagtttctttttaggaggtaaaactctacgagtctcacagcatagtaaaacgtagccagctattactagatacgagtagcattttttaagtcgcaaacaaaagggatacagtcccggcttaaggggtgtaaaatcagcttcactatcttcatgttcgccgcaacgggaaacagagcacaatcatctttgggtccaaaaatttacggcaaacctttgcgacgacgttgatttgtgaaccaatgacgagtttcctagatgacatactctgcttactgttgcgcgcactgaactctctgggcacctccaggcatctcatcgtcctcatcatacgcctcctgagcagcttgggctttcctgcgcatctcttcctcaatgttgttgacatcgtgcatcgtggtctcctcgcattcatctatctccatttctgtcagctgggatgcaggcttcggtggaagcacagcctcgagagccttgcattgttcaggcgccagggaatcagggaactccaccgtgaaatgaatgtagagcttccccttcatgaaaggcctctggtacattggcattccctcatcgtttattgccttgaattggtcaggcttaacaacttcaccggggtttgacttaatgagcagctgtctgttgtccagatgtgtcaggacaaattggaaaccacaaagtgcttcagtcagagataaggtgtgctcataaaagagatcatcgcccttccttttgaacttggagtggtccttctgctggaggacgaatacaatgtctcccgtaacggtatcaggcgcctcatcagcttcaccagggaaagtgatcttctgattgtgttgcatccccttctcaacgtgaacctccagaaccttcttctcctgaataaccttctcgcccttgcagcctgggcagcgatccttctcattaatgctctctccagtccccttacactcattgcaaggctgctgcatctgctgtatcatggaaggccccagctggcggatggtgattttcatgccagacccctggcaacctgggcacctcatggaagcaccagacttggaacccttgcccttgcacttggcgcagaggacattgcgggaaagagagagcttctttgaagtaccattgtaaagatcttctagagaaaccttaagcggatggatcacatcctctcccctcctttgccttctgcccctgctgctgccaccaccaccaaaagaaggtccaaagaatgatgaaaagatgtcaaatggatcaacatgggatccgcctccacccattccttccttgagggcatcttcaccatattggtcatagatttcacgtttctccgggtcactcaatacctcataagcttgtgcaagctccttgaacttctcggggtcgccgcccttgtcggggtggttcttgatggcggccttgcggtacgccttcttgaggtcgtcctgggaggcggtcttggggacccccaggatctcgtagtacttggtgttgtcgctcttcttcggcgcgcgcccgaacatcttggccccgcctccgcctccgccgacgaaaccactagccgctcccgtgccgccgcctccgcgccgccgccgccgccggggaggaggggatgggggatgcggaggaggaggacgggtcaaagttggtggccggagctagcggagtgcggaggagagaaagagggtttggttaggtcgatgcgccagtgct

SEQ ID NO: 386283 - DNA, 1532 bp, Oryza sativa
aaggagaggcagtagagattttgtttcatggaccagtaggtccggttgatgtacgtcattaatacgcagtataaaagaccaaaagtagtatcacatcatcatatgcctaacatggaaaacttgatagtattatcgcccctagagcggaaagaaacaatttgtcgccgccgtcaaagccgtgcagatatgtatgcacggcgctgcttgctgcttactgctgcgcgcactgcacgcgctgggcgccgccgccgtgcatgtcctcgtcctcgtcgtatgcctcctgctgctgctgttgctgccgcctcctcatctcctcctcgatgttcacgtcgtacggcatggtctcctcgcactcgtcgagctccatgtcggtgtactgcgacaccggccttggcgggaggacggtctccagggccttgcactggtcagggttcaaagagtcggggaattccacggagaagtggatgtagagcttccccttcatgaatggccgctggtacatcggcatgccctcgtcgttgacagccttgaatgaatcaggcttgacaacttcaccgggcttggacttgataagcagctgcctgttgtccaagtgagtgagaacaaactggaagccacaaagggcctcagtgaggttcagggtgtgctcgtagaagaggtcatctccctttctcttgaacttgggatgctccttctgctggaggacgaagataatgtctccagtgacagtatcgggcgcttcatcagcctcaccagggaaggtgatcttctgtccattctgcatgcccttctcggccaccgcctcaagaaccttcttctcctgcgccaccttctcacccttgcagcctgggcatctatccttgtcgctgatggtctcaccagttcccttgcactcattgcagggatgttgcatttgctgaatcattcctggccccaactggcgaatttggaccttcataccagaaccttgacaaccagagcacttcatggaagcaccagatttcgagcccttgccattgcacttggagcagagcacattgcgagaaagggagagcttctttgatgtgccattgtacaattcctccagagaaaccttcagagggtgaaccacatcctctcccctacgctgtctcctgcccctactgctaccacctccaaagccacctccaaagaatgaggaaaaaatgtcaaatgggtcatgcatcccaccaccagggacccatcccctccttgagagcatcttcaccgtactgatcatagatttcacgcttctcagggtcactcaggacttcataagcctgagccaattccttgaacttctcggggtctccgcccttgtcggggtggttcttgatggcggccttgcggtacgccttcttgaggtcatcctgggacgcatccttgggcaccccaagcacctcgtagtaccgcgtgttgtcgctcttcttcggcgcgcgcccgaacatctcgtcgccctcctggtgggaaaaaaaaaggtcgaaaccctagctgctcgatccggcggggagcga

SEQ ID NO: 386284 - DNA, 494 bp, Oryza sativa
tcctctcccctcctatgccttctgcccctgctgctgccacccaccaccaaaagaaggtccaaagaatgatgaaaagatgtcaaatggatcaacatgggatccgcctccacccattccttccttgagggcatcttcaccatattggtcataggtttcgcgtttccccgggtcactcagttcctcataagctggtgcaagctccttgaacttctcggggtcgccgcccttgtcggggtggttcttcatggcggccttccggtccgccttcttgaggtcgtcctgggagccggtcttggggacccccaggatctcgtagttcttggtgttgtccctcttcttcggcgcgcgcccgaacttctgggccccgcctccgcctcctgccggcgcatcctctacccgctcccgtgccgccgcctccgcgccgccgccgcccgccggggaggaggcgatgggggatacatagccccagccgggtcatagttggtgtccggagc

SEQ ID NO: 386285 - DNA, 749 bp, Oryza sativa
ttaggaaaaacaatatttatgagatttggtgaagagaaaaggagagttggttttatacgaactatgttacaatggggaatgccatttgtccagaaccaccgccatgactatgatgctaattaatacaaaatactagtaggaattatcgaccagttagcttgaccatccaagcaccacccaagtacaggccaagcagcggaccagccaagagcatctgagtcaacggatctgtcgacggtgtaagcacagcagcagcaactacagcgccaacaacaacatatcttcagatggaaagcatttggtcactagaaaccaaaccgacttgccccagcagtagctggataacagggacctgaaaagataatcctgtgctgaataaaagcacaagcacaaactcaaaatactgatcaatcgaccataacgattccactgccccatctgcgtagttcacgaagaaattcaatgctgcaggagcaagaaccgtgtaggagaagaaaatgccaaggtagaatagtacagaagagcccagaacaatgggccctaggaatttacgttcatcccttgttaaacccggaagaacaaatgctattatctcatacagaataacaggactcccaagtagaaggccacaataaccagagaccttcaatgttgtaaagaaaaattctccaggagagagctgcagaaaccgaacaccctgaacactaactggtgcttctagaattccggacgcgtgggcggacgcgtgg

SEQ ID NO: 386286 - DNA, 939 bp, Oryza sativa
aagacaaataaattaactagatgaattcaaataagaagaagagctgtactgaatttttgttcaagggaagagaggattaggaacaggattaattaaggcataagtacaccacattccacgtcactaccactccactccactccaccaccctcaaaacacaccacgtacacacatgtacggatgcaatcttcaagctcaagctctcagtctgaccgcatgcggtttagctggttcaacgccggctgcaggatgttgtagagaacccaggcgatcgccggcgccaccacgaacagcagcagcaggccgcggttgtcgccgccctccgccgccgccgcctccgccgccagcctcgccacctcctgcgccgccgacgcctcgggcgggaacgcgagcccggcacccgccgccgcgcccaggccgagcccggcgacgagcacctgctccgaccgcatgcggttcagctggttcagcgccggctggaggatgttgtagagcacccacgcgatggccggcgcgatcggcagcagcaacgccagcccgcggttgtcgtcggcacccgccgccgccgcggcgacgtccgcgatctgctgcgccgcgagcgccgcgtccgtcgacgccagcgccgagaagaacgcgcccgccatcgccgccgccgccacgggcgccgccgccgccgacgacgacgacaccgacatgcccttcttggccaggctcttgagcgagatgctaggcaccctgccgctccccgacggcgccggcgatgaccgcgccacgatcttggacggcttaagcatggccatcgcagctatggtggtcgccattgacgccttcttcttcctcctcttctctgagctctagctcacttgcaactatggcagctgctgttggatgcaatttctgagatggtgagtgcaatcggacgcgtgggcggacgcgtgg

SEQ ID NO: 386287 - DNA, 947 bp, Oryza sativa
  unsure (1)..(947): unsure at all n locations
nnnnnnnnnnnnnnnnnnnnnnnnaaatttgcagcatatatatggatgaatatcactccaaattttgcaacacggattatcacctttcagtaagttacacacatgcataacacaatattcaactattcataactattgttcacaaatgcattctgacatatcatcatgtaactattgttcacccatcaagtagcagtattcctatatagcagttatccatcagctcaaatagctattacataagagttcaagtacatagcaataattacataatttagatgtaactaaggttcttgtaggtgtattgaggtcccaaaaacaaaacaaatcatctcttttatggttcttgtaggttcttgattttttttacagcacctctgctagccctttttatggttgcctgctcgctggttagtctttgctgtcttcttgtgtaccttcttttgtagctgtacattattaacacctggaacattttcttcaccagctaagggcatatttcgaggatcattagcatcagcacctccattttctgcatttgttcgtgttcctaggctataatattgcacctccaactactactccatctgtccctgagttgtctcgtcggcgaccgcgtcgaatgtcgtcctgcccctggacatgcgcacgcacaagtccgacgccctcgcttcctcctcctcctctacacggcacacaccaccacctggacgggcgcgaggtcgactccgccagcgcggtgcatgcggaaaaaagatccaggtgccggcacgccgaggcggaggaggagtccgcgcgccgcggcggtggatttggcgaagcaggcggtgctccgtggaaggaggaacaacggcgcaggttcgttataatctcccgttttccattttggggcgtattttcgttcgaacgaaacgggtgggttgggccggaaactgcagttccggacc

SEQ ID NO: 386288 - DNA, 689 bp, Oryza sativa
gattaaaatttccatgtactgggacagttaaaaaaggtactattcagtaatggaccagtctgttcgagtaacatttacaagtatggaggattacaattacaggagtatagcatatgaacacaaaggtacacagattatcactttctgactgaagtagtatgtccattccaatttcatcgcatatggtgccttagtgtttctttcgtcccgcgacggactttgcagcggatagtcgggagacctaggcgctggtgagcctcatagcggtgacatccagaaaaaccatagtagactccatcaacctccagtacgtcaataggtacttggaggccaatgacacggatactgtccatgagttcttgcaccttggctggatcattggcacgcgtccgcatcagtggcctcctaatcttgtccagtggaatttccatcaccacagggcccttcttctctgagtcacttagggaggatggaacagctgcaccattggaggacgaagcggagaaggcgaggccgccgccgccgcccctcccgctccttccccagagtgggacagcgctgggcgccgcagggcagcggaggaggaacccggacgccgccatggtcttcaccaaatccaagctcgagctcgccgccattcttggtcgccaccaggttcttgatctcccgagaggaagagagagcgtaac

SEQ ID NO: 386289 - DNA, 1260 bp, Oryza sativa
agaatgaatacacgggctcgtttcaaaatgacacggcgaccttgacggcctaattcacccaaaattccttgctcggcggcaaatctaaacaagtcatgcacagcttgcttaacctatcaacgaatattagaaatatagcattagaagagtctgtaatccgtatgtgctacctctacctgagacctgggcgcatgagcagctcatcaaacgacgcattctgctccaggtcttgcagactgcctgtcgtgttgacggcttcggagggagacgtcttggacatgaggtggtgaatgctggagggcagctcccgttgcagctcgatggcaatggcgtcctgaatctccttgagcacctccgagatggacggcctcagcacccccttgggcttcacgcacatcgtcgccacctccgcaatcttccacaccgactgcaggtcgtaccctgcgtctaacgactgatcaatgatgccgtggatatccccactctccatgtgcgatctagcccattcaacaatgttacggcagtggagcccaaagttgtcatttgagattggctcatggcctgagattagctcaagtaaaatgacaccaaaactgtacataatcactcttctctgttagctcgctgcgagatatagtactctgggtccagatatccaactgttcctctaactatacttgatacatgagacccgtcgacaacaggttttgacaagccaaagtctgcaacttttgctctcatgttcttgtcaaggagaatgttactgctcttgaggtctctgtggatgatagttggggagcatcctgtgtggagatactctattccttttgcagcatcttctgctatctcaagacgcttgacccagctatttatttttacatcatcagggcctccacggaggtgctcttttaacgtcccgttatgcatgaattcatacacaagtatatttttaccatcttgctggctgtaaccaaggaagctcaccaggtttctatgatgaattcttgaaagcaatgttacctcattcaggaattctcggatgccttgataggagtcatttgtgagaagtttgactgcgatttctctcccatctgtaagctttccatagtatactatgccaaaccctcccgaaccaattcttctgtcaaatttgtcagtagcatcttcaatttcagacaatgcaaatctgtgtgccgattccgtggccacttcactgaaaaatgagcctcgcttttttgctggtgccgcaataacaacggt

SEQ ID NO: 386290 - DNA, 1115 bp, Oryza sativa
taaagcagtttataatttcaatccaatttctagcaaaaggatcattgattttatacttatcacgagaagttcactgaaattacattcttaggagaagcagcgtatacacacggataaaacacggagaaaatctttacgagagatggttggtgtttgggaggcaagaacggccggcggcggggcggccattacgcggatgggagcaccttcttgacgatctcgtcgctgagggaggcgatctgggcgtcgagcgccttgacggcctcctccttctgcgcctcgaggttggcgagcgcctccacgagctcggcctcgacgcggcggcgcccctcgtccagcttcgcctccagctcctgggtggtctccttcttcatcttgttgagcgccgcggcgatctcggcgcgtgccgccttcagcacggcggcggcctgctcctccagctgccgcacctcctcggacgcgtccttgacgccgccgagctcggcacggatcttggcgtcgcgctcgtccatgaacttgcccagcggcgtgaagtagagcttgtccagcgccaccatcagcagcaggaactcggtcgcgatcagcgggagcgtcaggttgaagtcgaacagcgccgccttctccatctgctccgccagcgccggtagcggcgccgcggccacggccacggccgccgtcgccacgagccccggcagctgcttcaatcccctccgcggttgctgctgctgctgccgcctgggcggctgcacggacgacgacgcgacgaccggcgcgcggcgaggggagcacgaggtggcggtcgcagccatcatagccgtcgccatgggctagtgcaaggagtgcgcggcgcggaggaggtaagcagcagcagcggcggcggcgccggcgactcgaggtgtggtgagctgagagagagaggaggaagcgggctatctaatccgaacgggttgggtggtgagattccgaagcaaccaaggccacctcttactaaagaattacattactctgtcagactctgctaagctgatattttactgagaaatgaattggcaatatgcaagtgttgcaatgaacaagcagcaattctgaacatgcgaggtttaattgcagcgtag

SEQ ID NO: 386291 - DNA, 983 bp, Oryza sativa
  unsure (1)..(983): unsure at all n locations
nnnnnnnnnnnnnnnnnnnnnnnnnnnnnnnnntttttttttttttttttgcataagcgtcagaaggtatttaattaattattagcaagccatattgtcactgagccacatactagagtaccaaatcatagaggaaggatgggagcagcaactgagcaaagctccatcctgcttagatacattcgagaggctttttttaggcttttaaccagccaagcgcaagcacttcagttaaagcctaaacagagttccagcatgatcagatcatgcgcattacttccacttcttgaacttgccaccaccgaacatgccgtgcccatgcttgccatgcttgaacttgccatggtggccgtgcttgccatgcttgaacttgccgccgtggtgaccgccgtagccatggccgtaaccaccaaagcctccatggcctccatagcccatgtgtccaccatggccatgagaagagatcttgtgtgccccataggctgcagcagccgcagcggcgcctccagccagcattgctcccatgtgtcctccaccgctactcccatggccgccctggtgcccagatgatccggggtagcccgcaggagggtagccaccatgttgggggtaaccaccaggtggagggtagccaccaggctgagggtacccatgctgtggagggtatgccccaggtggtggagggtaagccccaggaggagggggataagcccccggaggaggcgggtacgctcccggcggcggcgggtagccctgaggagggtatccctggtgaggaggatacccatggccgccggcaacgccgtgcatcatgttagagaagagccccttgtcgctctcgtcatgcttgtccttgccacctcccattgtcacccaccccaatcaagctaagctatcagaagacgaattgagtcctgaagacgaggaggaggaagaaagatcttggctgggaggaaggattgatcggacgcgtgtgcccccag

SEQ ID NO: 386292 - DNA, 1089 bp, Oryza sativa
  unsure (1)..(1089): unsure at all n locations
aatattaacgcttacaatttgccattcgccattcaggtgcgcaactgttgggaagggcgatcggtgcggccttttngttattacgccagctggcgaaagggggatgtgctgcaaggcgattaagttgggnaacgccagggttttcccagtcacgacgttgtaaaacgacggccagtgaattgtaatacgantcantatagggcgaattggggtcaacaacaactcaagattgaatcatacgtaagtgcttgctgatacaatatcaacatggagggtacattgccggttccatatgaacaaacataaaaacaccgaaaccccatatggccattatgccgatcctagcctagcttggcgaggacatcgccaagagcagatttggtcaacgtgtagtacttctccgcctcttcggggctcttgatcttggctgcatggtcaagcccgtcaatggtggcgaagagcttgccggtgaggtccttgaggcccttcttctcgtccttgggcttggagttgatgacggttttgaggtcgtagcgcaggtaggaggccctgaggcggaggtcgtccctgacgaacggccactgcttcttctcgatgagcggcttgaggttgatgatgtcctgggccgactccttcgccctcgccgccgcctccgccggcggcagcggctgcaggtagaacctttccctcagcggcaggtccgtgtccctcgcctggtccgagttcagcgtcccagggagtccaccggagggcggtggcggggggccgagcttgatgggcttggcggcctcggcgagcgccgcctgcgcgagggcgccgccggcgatcccggtggcgacgaggccgagcacggcgcggcggccggtctggacgtcggcggcggcggcgtcggccctgacgacggcgagcctggacctgccgccggcgcgcctgggcccggccggcagctgcacgccctgcgacagcccggtcatggacgccattgcctgtgccatctctcaacctcagctcagacctcacctgactataagctgagaatttctcgcggcgggggcggacgcgtgggcggacgcgtgggcggacgcgtgg

SEQ ID NO: 386293 - DNA, 345 bp, Oryza sativa
  unsure (1)..(345): unsure at all n locations
aggggtaacccccatanctcttggaagggtattgccccccagnttggtggagggttaaagcccccaggnaggaagggggattaagccccccggaggaggcgggtacgctcccggcggcggcgggtagccctgaggagggtatccctggtgaggaggatacccatggccgccggcaacgccgtgcatcatgttagacaagagccccttgtcgctctcgtcatgcttgtccttgccacctcccattgtcacccaccccaatcaagctaagctatcagaagacgaattgagtcctgaagccgaggacgagggtggagggtcatctatgcctccgcgcaaggagtgaga

SEQ ID NO: 386294 - DNA, 564 bp, Oryza sativa
  unsure (1)..(564): unsure at all n locations
nnnnnnnnnnnnnnnnnnnnnnnnnnnnnnnnnagccggcaacaacaactcaagattgaatcatacgtaagggcttgctgatacaatatcaacatgggggggacgttgcccgttccatttgaacaaacataaaaacccccaaaccccatatggccattactgcccatcccttgcctagacttggcgaggacatccccaagagcagatttggtcaacgtgtagtacttctccgcctcttcggggctcttgatcttggctgcatggtcaagctgcacaaatcacaaagggggattcttgtcaacaactcagctgagcaacagtaatactttttccgtttcatttcatattataaattgtttgtctattttcttaatcaaagtttttagctttgactaagtttatagaaaaaaatagtaacatatgggatataaattaattttattaaatttaacattgaatatattttaataatatgtttattttgtattgaaaatattagtatatttttaaaaaaacttgataaaacttgaagaagtttgaccggacgcgtgggcggacgcgtgg

SEQ ID NO: 386295 - DNA, 616 bp, Oryza sativa
tttttctttgtcaattaacacacacttaaacggatgagtacatagcttatatagcgggctacgcttcctcacatgcacatacgggagcgcctactccccaggtcatacgcgcacctacgcacggcctgcacgagccacgaactcatgcacaacagactcactaactccatgatccacatgaagcggtctaccagcctgaccacctaatcacgcatacaactaactaactacttgctaattccatgcatctagttattccactaattaaattaactcctacatgcaacacacgcgcgaacctttaccgatctatgcacgacaacacatgcaaaatattctaatacatgtacaagtcatgattagtgttaacagccgccacatccctgccttcactgtagttggcaagaatcttgcagccctttgttctacatgtttctctgtgtttttcccagcgcccggctcgcctagccgccgcctcgcccactcgctgccgtggccggctcgccttctggcctgttcgtcgtcgtcggcccactcccagccgtcgcccaggccgccgccgcgcccagccaccgcctcgcccaggggagggggaaggaggagggcggacgcgtgg

SEQ ID NO: 386296 - DNA, 931 bp, Oryza sativa
  unsure (1)..(931): unsure at all n locations
gatgtgctgcaaggcgattaagttgggtaacgccagggttttcccagtcangacgttgtaaaacgacggccagtgaattgtaatacgactcactatagggcgaattgggtaccgggcctccccctcgagaagccagcacaacacctccagagcaaaacctctcatgggaatcatgagagcttggagaaggcggtaggtacacatcgtggtcaacaagtatctctgggtgatgaacttctgcttttgacgcatattcattctttgctgaatgcagtacagattccacatgatgatggtcttctttgcggcaacggagaagtaccgctggctctttcaaccgaagcaaaccctgaacgacgagttctttcaaaaggttcttgtattcatggtggttgtggctgacacgcaggagttgctttgtagcatcctctttcatggaattaaccaaatcatcctgagcttgaagcactttgatgcgagaagcattcagctgcatagagtactcaattttctttctaacttcgacttgcttctctttccgttcatattcttgcctgatcttctttttctcagcttcaacaagttgaagcttctcaatattgaactcctcctcggcggagacggagatctcgctggccttctcctcggcctcctggcggatgaaccgcaccatctgctggatctgcttggcgacatcggcgtcgttcatcttggcggcggcggggatcccgacggcggccctcgcggccttttgctgctgctgctgctgcgctccggcgaaccaccaccgcgcgcgggggaggggagggaaggggaggagagaggagtccacgggagtggtcgagagagggagcagggatggggagtcgtgggactagtctactagcggtctagccgcgcggggcaacgtgccgcccttggttgccgctgc

SEQ ID NO: 386297 - DNA, 904 bp, Oryza sativa
  unsure (1)..(904): unsure at all n locations
nnnnnnnnnnnnnnnnnnnnnactaaaatttggctccatattggtatcaaactaaaagtaggctaattaactttaccctaccaaaaaattggtagtgccacaatatgcctagattttagcactaccaataaataggtagggtagagaatcaaataggcccacaccagagttacacaaactatacggaattacagaccaacaggccagggacaacaggcaaataggtttacacagcaatggaacgtttgaccgtcctttattattattattatacctctgagcaaacaagcgtgcgaatagttggtgctcggcgataataatgaacaaataggtagtgttttacatagcggatgaatactttaaacaatcaatttggcacaaacaggtgaaattccttgcagctgcaggttcgaacctgcagctaattacatggaagcagctataccgcagctgaaattacatgcacagattatgccgtcacctgaccaaaaagaagcttccggatctccggtaatttcttgcggaagacaacttccagcctggcatcaagtgtgttctcacacacaatctttccatctcgagaagccagcacaacacctccagagcaaaacctctcatgggaatcatgagagcttggagaaggcggtaggtacacatcgtggtcaacaagtatctctgggtgatgaacttctgcttttgacgcatattcattctttgctgaatgcagtacagattccacatgatgatggtcttctttgcggcaacggagaagtaccgctggctctttcaaccgaagcaaaccctgaacgacgagttctttcaaaaggttcttgtattcatggtggttgtggctgacacgcaggagttgctttgtagcatctctcggacgctgggtcgacccgga

SEQ ID NO: 386298 - DNA, 550 bp, Oryza sativa
aggaagaacacgagcatctattcataaaggtaatgcacagcattcccattgtttcattgttcatatgacaaaatgtaatccatacgaagaatttccaacacgacgcgaaaaaaaaaaagaggaagaaatctcgagtatagctttttaaacacaagaaaccggtgtactgcatatgagttataacgacaggaagaacggctgttgttgttctgaaaggttgcaagatttccaagaagaattcatttctgtgagctatctgtagcgaagtaaggtatggccacgatcaagctgagaggagctgattgatcttcatggtgtagcagctttgaaattactccttgccatcggcagcacggagggagcccagctgaaccggggcctgggtggacaccaccttggatgagccgtaacccgcgatgtcaacgccatgggtcttctccttctctatctgctccttgatccacaagtaggtgaacctcagcccgtccgtgagcttcaatgtgggtgcccaaccaaacttctccttgatgagggtgttgtcgtagtatcg

SEQ ID NO: 386299 - DNA, 807 bp, Oryza sativa
  unsure (1)..(807): unsure at all n locations
nnnnnnnnnnnnnnnnnnnnnntttttttttttttttttaaggggcaaacagatcctcagctcatgatgatttcagataaataaacagctgatccagcacagtaaacataaagttcagaggtccaaattgctcatatccccttggctcacaccacaaaaattttcttatctcctagcaagccacagaaccaagcaaaatataaaggaaagtacacaatgtcaagcacaagttctggatatcgggaacgctatatctagtgggacttgacatagtcctggactatgttgaggccctctgactcttcaccgaagtccttgacaacgacgcaggagcagcctacgaccttcctcgccttgccctcagaatcaatcttgcaaagccctgcccactcgccaagagttttagcactaggcacggtaacgaggtgaacattgtgctcagcgcagagtgccttgaccaacttgacataatcaggctggtcacagtcctcagcaagcacgcaaagctgagcggcatgcttctcaatggccttggccgcctcacggagccccttcacgagcccatcatgagcgcttgacttcttcatcacaagctgcagagcagtcatcaggtccatcggctctccaagaaccggggcaggtggggcctcaactggagtctcttccgccatgtctcctgcgctagaaagacccgaggggccgacagcgacgacgacgggagggatcttgggagagcggcggcggcggaggaggaggagggttagggttttcgcgagcccacgcgtccgcggacgcgtggtcgaccgg

SEQ ID NO: 386300 - DNA, 767 bp, Oryza sativa
  unsure (1)..(767): unsure at all n locations
nntnttttttttttttttttttgggcaaacagatcctcagcttcggatgatgatttgtattaaaagcagacgattttcagcacggtaaacataaattcagaggttcaaattttgctcatatctccctggctcgcacttgaaaagaattcttatctcctagcaagccctagaaccaagcataaattaaaacaaaaggtacagaatgtcgagcacacgttctggatataagaatgctatatctagtgcgatttgacatagtcctgcactatgttaaggccctcagactcttcaccatagtccttgacaacgacgcaggagcagcccacaaccttccttgccttgccctcagagtcaatcttgcaaagccctgcccactcgccaagagtcttagcactaggcacggtaacaaggtgaacgttgtgctcagcacacagagccttaaccaacttgacataatcaggttggtcgcagtcctcagcaagcacacaaagctgagcagcatgcttctcgatggccttggcagcctcacggagacccttcacaagcccatcatgagcacttgacttcttcatcacaagctgcagagcagtcatcagatccatgggctccccaagaaccggggcagctggagtctcaactggggtctcctccgccatctccgcgctcaaaagaccggaacaccgactgcgacgaaacgatcttgtggcgaagagcggcggcggcggcggggttagggttttcgcgcggacgcgtgggcggacgcgtgg

SEQ ID NO: 386301 - DNA, 1078 bp, Oryza sativa
tggctggatcacaacatcatgttgtaaagttcatagtgcattccaagtccaagagccgagagaattgatgcttgttctaacatacttatctattttgtcaaatgggcatgctcaagtatcatacaccgacaagtcgacagcagcaggtcatgagaaatctaacacatcttcatataggcaggaggtccaaggaggcatatccttttgggaaaggaagaagaaaggatcaaactagtgcactatttatccgagaagatgcctcgttacaactcatcacacctccatgttcatgaatactgatgcactaattacaagtaatatgtcctaattgcttattcttctccttcaacagccggtaggccttccttgaaccatgtgtagagtcctccatccagatggaacacattcttgtaaccattcaggaccaacaagtaagctgctatcagggacctcgattgcttcccatcaggaaagttctgtgttggtttcaatgttcctcctgtcgaacatgccacaataatctttgcatctttaccaagtttctcatcaacactttgtatgaactcaggattctcttctgttccagaaaatatgccaaagaatgcaaatgctgcccgtcttgcaatatcccatgctgtccattcctttatcaatctatatatttgcacattaacggcaccaggtggatgagcctctttaaagtccgctactggcctgacatcaagaattgcaaaattgttttccttctgaagacgcagtgcttccttcacatcaacactacggacccgcttttctactagcacttgcctcttgatcttccattcttcttcagctggtgactttgcaggctttgtggcagtacaggttatctgcagcgagcgcacagctcgtgtccggcagagttttgcagcctctataggacgccaggagtagccagatgtgaagtctgagcaggaggatatccttgatgagcaaggaaggttgctgttcactacagagctagctgcaagcattgtggtcatgagaaaaaaggagcagaaagcggacgccgggggcggacgcgtgggcggacgcgtgg

SEQ ID NO: 386302 - DNA, 473 bp, Oryza sativa
tgcacattaacggcaccaggtggatgagcctctttaaagtccgctactggcctgacatcaagaattgcaaaattgttttccttctgaagacgcagtgcttccttcacatcaacactacggacccgcttttctactagcacttgcctcttgatcttccattcttcttcagctggtgactttgcaggctttgtggcagtacaggttatctgcagcgagcgcacagctcgtgtccggcagagttttgcagcctctataggacgccaggagtagccagatgtgaagtctgagcaggaggatatccttgatgagcaaggaaggttgctgttcactacagagctagctgcaagcattgtggtcatgagaaaaaaggagcagaaagaactatggagccctctgagagccttagaagaggggtttgcctctaacacctaaggatggatcctgtaactgagaagattttttcggacgcgtgg

SEQ ID NO: 386303 - DNA, 750 bp, Oryza sativa
ttgacgccgctgcctacgctgtaagcttgtatactgtacacccttcgttttttttttttagtaaaaaaattacattttgatacaacttgtcatatttacaaggtaacaatctggacatacaacttacatatacatattgataagccatttaaaactggcttaggctattaatagaggcaaaaaaaaacaaaacaaaaaaaagaacagtgtgggaaacaagaatatcagttgaaatttccagtattttctattctacagcacccctcttattgctgctttcgtcgatgaacacgctgcccataccaagaaagccatgtttttgtgacagcttcctcgagaaaacttatagagcaatgtttgaggtaaatttattcgtcaggaatttctgcactttgttaatatctgggtatatttgcaaaagaatcatgtcccaaattttctttcttttgtgttgagtatcagtgctggggaagggatgtatcctacactcgaattcctgaagcagaagcaggcattgggggtatcaaacttttaggaggcatcgggggccttatgcgaactggtttgccttctttcgcctcaacaatcaccacgtcagatgtgagaaaagacttggcgaccacagcagcatgttctatgcaacatctcacaacctttgatggatctaatattccagcggcccggacgcgcgcgcggcggctcttggcagcattgtagccatatctactgtccttatttaataacaccttt

SEQ ID NO: 386304 - DNA, 698 bp, Oryza sativa
  unsure (1)..(698): unsure at all n locations
nnnnnnnnnnnnnnnnnnnnnnnnnnnnnnnnnnnnnnnnnnnntntgtcgacaacaatgtgaacattcacccttgattaatagttttgttatacacaacaatgttatacacatcctgtacgacaacaatgtgaacgttcacccttgattaatacttttgtcttaggttcatatcaatatcaacagacagtgtcgattcgtggcacgaaaactatttcatgattttgttccctattttatttagggaagaattgttaccaatatatggtacgagttccatgtgatactagcaaccccgtctgagttaccttttgtgatcttggtaatatataattgtagccaaaatatgttacacatcactgtaaaaatcttgaacactgggcattgggctcccagccaagaatgatttgatgagaattagagcctgtttgggcctatgcagaggaacctcatgacctgcgcccctcacagtcacgaagttgagtcccttgtacccttgagtccagccaccaacctcaccatcatcgtcataccaagcattccaaggggttaccgttggaagtttgagggcattgatgctgtatctagttgatgttactggaagcactgcatctgtatctccactgaacacccatatacgaagaccatactgtataagttcatgatagatatgcagcacagatctttcggacgcgtgg

SEQ ID NO: 386305 - DNA, 351 bp, Oryza sativa
tatgcatatttctccatgttcggacataattgtatggagaactcttgatagctttaagccagggaaaaacctgccaaatggcgcaaaaaaatcttgtccatactacaacaattgattacggtagcattgcaatgtagcccagtttttgcaacaactgataaatagaagaatattgtacacgatggagagactgaattcatttttttctaaacagctagaaattaaggcctcctgccctccttgttcttggtcttgctcatcatcacccttgccaacaagcagagatccatttaactcggatggttccatcactttcgggacctcctgggattcataaccaacctggaatat

SEQ ID NO: 386306 - DNA, 984 bp, Oryza sativa
atcctgataccagctggctattctctcttgcccttccacgttcaagtttcagcccaggtacggccggaagctatctaaggactgcagctatgggcaatttgttctgctgtgttcaagttgatcagtctacagtggccattagagaacagttcgggaagtttgatgctgtgcttgagccaggatgtcactgcctgccttggtttgctgggaagcgtatagctggccatctcacactcaggttgcagcaactggatgtgcgctgtgaaaccaagacaaaggacaatgtgtttgtcaatgttgtggcatcgatccagtacagagctttggctggcaaggcaaatgatgctttctacaagctgagcatcacaagatctcagatccaagcttatgtcttcgatgtgatccaggcaaagtgttccgaagttgaacctggacgacgcatttgagcagaagaacgacatagcaaaggcagtggaggatgagctggagaaggctatgtctgcttacgggtttgagattgttcagacgctcatcgttgacattgagccagacgagcacgtgaagcgagcgatgaatgaaatcaatgcagctgcgaggctgagggtggctgcaaacgagaaggcagaggcagagaagatcgtgcagataaagagggcggtgggagaagcggaagcaaagtacctgtcggggctgggtatcgcgaggcagcgtcaggcgatcgtggatgggttgagggacagcgtgctggggttctcagtgaacgtgccgggcaccacggccaaggacgtgatggacatggtgctcatcacccagtacttcgacaccatgaaggagatcggcgcctcctcaaaggcctcctccgtcttcatcccccatggccccggcgccgtccgcgacatcgccacgcagatccgcgacggccttcttcagggccaggctaccaccaccttccattagcatccatgtgggacaccagctgtggga

SEQ ID NO: 386307 - DNA, 1688 bp, Oryza sativa
  unsure (1)..(1688): unsure at all n locations
gcgaatgtagggtactccatccagctgaggtaaaccaactccaatatatatacaaacacaaacaacgtacccaatttttactgttaaaatacaggcacaatgcctggtatcacacgttattaagtagacagactcgataaccatgacacggacagggacttcttgccactggtttacgcacggttaatattacagaccacacatagagagacggcttagctatttgcaaataagcttgacaagatagatgatgctccaaaaggatgcgatctcagcagttgagtacttacgctggttcatctagaattccctatcggggaagaggagtggggcgacaagggaccaaatgtacagacctgccgttgcccactgggttgcaatcctgacccaaacggatggccacccaacgtcaacaagctttccactctcaccaactgaggttgaccagccagtcaagagcatcgcggagtacatgcttgccaaggagaagatcaggtggaagaacgagtaggagtatgtcactggccttggcacatccttcttttccgcttcctcatctgccttactgaaaggaagcagtggcttgtcggcaccagcacgtggtgagtctggggctgagagcacagttgcagatgagccagcacggacagccgaatagcccacagaaaggatggtggttagcaatcccagcgaaaggctaccagtcgacacagctttggaatggttgtgccagtcccattgcattcataatccctcggctcacttgaaagtccactgtagcacaaataggtgcagtagagggcgataactgatgctggcagcaagctaccattgatctttgggtgcagggcgacaatagcaaaaacaaaaacaagaatcagtgtgaagacaatgaagaacagattgattccgcagtcatgtccagatggagtgaaccagtgaaagagcagacccgagaaagagaatgtggcaatgtaacagacaactgagacaaccaatagagccatgtaccagaactgttcatccttggcaacccaattctcggtccatccatgaacaaagtccaacaaaagaaccaacctgaacaagcaggaacagtccagatccaancttggatattgattcgtagaagcttacgacgccgttgggcacgaagaacatgaggaagncgatgacaacccagcagaatatcttggccatccatccgccatggtgtatcttgtcgcgggggtccttctggtccttgatgccagccatgatgatggcgaggatggtgaagaagacgaagttgccgaggctaaccctaagcacggcatcggtctcgaaccactcgcggtcgggcgtcttgtggaagtggttaatccatgggatggattggaggaggggcgcggcgacctcgcggagcgcccaggaggcgaagagggagagcgcgaagaggccgcagtaggcgatgcgggcggagcggcggccgatgctgccgaccgccgtacggcacgcctcgcacgcgcacgcggcgcagcacgacgccaggcaagacgccgcccacatggctgctgctcgtcgtcctcctcctcctcctcccttgcggcggcgcggtcagatcgaatcgatcggtgggtgaaggagctcgacgatggctttggcttgttcggatttggggatttcgccgcctctcggggaaatgcatt

SEQ ID NO: 386308 - DNA, 483 bp, Oryza sativa
ttttttttttttttttcgcaacttaaccctttatccttgcattacagatttacagactaaaattcttcttttacactgagcagcgaatgctttgtcatccggatgtccttgtgatttccagagctcaacattttgcagatgtagcattcctgatctgcatgtctgggtacagtttgtgacactgtaccgtgggagtttgcaggatttctagctccatggagtaatctgtttgacgcttctgcggatgcttgcccacaggtgcgaagtgttcacgctcgggaggctcttgttcctcttgaaccgcgtgatcctcaccgtgctcttggcgccgcactcctcgccgtcggcctccggctccgggtcgccgtgcccgtcagccttcctccggtggtcgtcgtcggcgaagtaggacatcgacgaggacgacgaggatgacgagggaggaggacgacgacgccggagagcggcacgacgcgttcagag

SEQ ID NO: 386309 - DNA, 915 bp, Oryza sativa
  unsure (1)..(915): unsure at all n locations
nnnnnnnnnnnnnnnnnnnnnnnnnnnnggttaagagttaaccgaatgccatgacttattaatattcaaaacaacgtcaaatcgctgtacctaggcagttttgtgctatatctgcaagaaaacccactgtatctgtcgggcaaacggtgagaccaaaaataccggccccagtaaagtttctatagaagagaaattcaattacacatctgaaacaaattgagattaacaacacggcacattcaacacatatgaagtgaaataacgtttgcacggacaccctttcttgggattcttgcaagcttttccgatacaaaataacccaaatgctttctttgttgttcttgctccgttgtatggcgaagtaactctactaagcttggatttctttgtagtttgcaactcaggaatgttattcagcctggtaaatcctcttatacaaagtccccatgatgcaatcggaccatagcctaccaaatcatcagctgaggtcacttgaagggtgcaaacaaaaccgatgagttatgcccaccgaatccgaacgagttcgacaacgccacctttacatcacatctctctttttgtgatcccactagaatgctgacatccacatttttctccgggttgtctaaattgatatttgggtggacccaaccagtccttatagcttgtatagcagccacagcttctattccacctgcagctcctagcagatgacccgtcattgactttgttgagtttactctaagctgagggttctgaccaaaacagcggttgagagcttcaaattccttcaaatcacccatctgcgtcgatgttgcatgggcatttacataattaatgtcttcctttgctactcctgcatctgctagtgcattttcaatacaaaggataacccctctaccttcaggatgtggc

SEQ ID NO: 386310 - DNA, 569 bp, Oryza sativa
ttacatatatagcttgatgatcgcaaattatttataaacatgtattaagggaaacaccactaccaacattgaacatgaattttctatatccactagtagaaccaagttcagataaacatcatgggatcgaccgcataagaagcagattgcatgcaagttcagataacatcatccgaatggcagcatatactgcaagatgttctggtaacaaataatatattacaattcacacacaatgcttgtacacgatcacttagagtgaaccaagtgtactgtcaagttcagttccttgatcagctctagtgatatatatgagatttaattagttaccagtgaagctccatcggctgtgcaattattcttccaacatctccgaatgatccgaaggtgttgtgccacttgtttcattgttggtctttgatctatttccaaacacatacacttgagcaatagcttccctatctcttcgaggagagcaacatcttcgctacgagttgtgatatcatcgtcgaaaaatgcccttccgctgttatctgccttgtaagctgcaaggaattgcggacgcgtgg

SEQ ID NO: 386311 - DNA, 499 bp, Oryza sativa
  unsure (1)..(499): unsure at all n locations
tcttgcatattaacaaaatcctagagttatnggaagataagagggaattactacagcactgcacagaaagaggacttttctgcctttctggtcacaactacagtaaagccttttgtcgccttcaacctaaccttttttcttcataaatctaacctttccactgtcattaagactatacacaaaagggaaacacttttactcccctaatcatctgggagctttctgcatccatgcatcaccgtcaatgcaaaccaacaaaatgcggcatcaagttctctctgttttgtacatttcacaatccaacagtcagcgtctactgcagataaattagcctccttcagaaaaacctcccggtaggccgattacttgaatcttttaactgaaattatcttcccttgggttttcagggaggtcatgcctttcttgtgtggcatcttgctgggccatggagataaatattccgttcaacaggatctgattggtgttttcagtatgcttg

SEQ ID NO: 386312 - DNA, 426 bp, Oryza sativa
cacaaagagaagatggcaaatgatataacatgctacttgaaaaaggtttcaaggacatgagtacatgacagagcgaaacattcctgtaaactttagataaattggtcaagattaattttgttcactgccaatattgttcttaggagattggggaaggaggcaagttgttccaagaaggaaggtcatatcagaatttaggcataaagcgagatactacaagcgctagcaataatgtaaaaagacaatacagactaaaatcttacagcttacacgattatctcgacaggagatgaggcaagcatcgaattgatcatccagcaataattatcatgccaatatggttgcctcagcatgctcttcatcaattcaagtagcaggactacacaaagaagcatccattgagcctgaccgagggcggttcacaat

SEQ ID NO: 386313 - DNA, 1593 bp, Oryza sativa
acactatataagagatatgcggtggcatgcgcagcgcgcgcgtgcgttggaactcttgagagggggccggcctttgttgttgggtggttgtgaccacccaggcggtatagagccggtaggatttttttaacagcaatcgttaacatccaaccatttctctcaccaatcattaacagcaaaaattgtgatcaagcataagaggtatgtgacggatggtccggataatactcaaacttggaaacaagtacctggccttaatggcaaggataccaggccgagaagtataacgcctaacatccaacccgggaactcgaaccactcaagtcaaaccatacgagggaaaaagtgccatgttgccgataacctcatgcaagatcacacacaactgcaagctaaaaagatagctacgactgtaaattaggagataatggcgtcgcccagtgacagcgcacaagttgactggtcggggtgttcgcattgtgctgctgggccacattgcggaggacatccatcgcctcagcaaccttggacttcagagcctctggagactcgagcagatgcaggacctccgtctgatccatctccagaagcattccggtgaccttggccgcatggttctgttccagaagctcaaccagtggatacaggctttcaccaagtatcgttctttgctgttctggattagcatttgcaagggcagaagtcagcgttccaattggagcaggtgacaaaccagcatctcgtactgggaagcctcccatatcatacgattgaatcataccaccagcaacccccggcattggtggaacatcaggcatgttatgcgcaggtgggtaacggtacacacgtcctcttggaagcatctgttgctgaaatggctgagcagattgctgtccctgggcagaaccagcaccagaacgccggatacctggacgtggaccctgttgaccttgttggacaactggaacaaagtaatttggcatatgggcacccccaggcctcatgcctggaacaagctgttgctggaaaccaaatccaggctgtgggggcatgatagcaggtggagcttgtccgtagaagagttgctgcccaagaggagccataggagggtacatgggaagacgtggagccatggaaggtgtcatcggtacagggcgcacctgagaaaattgtgcctgcaacatcgccttcctgtcttctttacgttgtgcaaatgcgacatacaatggctttccagatatcattttgccattcatttcagttaaagcttgagatgcttcctcacgagttgaaaatgcaacaaatccagaccctttgctaacaccatttgcatcacgcattatcttgcatgaagtaattttgccatagttagagaacaattcacaaagctggtcatccccaatgctatcatccaaattcttcatgtataagttcagtccttgatatttgtcagcagcatctttcatgctttgctcaaatcttctcttcaattcaatctctctttctgacttcttctgagctcttccaacataccattctttgtcattaattttctttccattaagttcctcaacagcacgagcagcatcataa

SEQ ID NO: 386314 - DNA, 842 bp, Oryza sativa
  unsure (1)..(842): unsure at all n locations
anaaacncnncaanaaaananacannnttnaancnnnaannacnanaagnaaaaattgnaccaacnntaanggnaattntttncgaattaaaattccatatttnataaanaggcattanaccacaaaatnaaaaattncttcttaaccagggataaatgaaaaaatgaagggccaacctnaaacgttanaacccctnatcaattgcatgcttcctaaaaattcaanncttntgccccttattttaaanaancttcccnaaaatggtatgaaattacttcttctcccggtgattacattgtagggtgctcttgattttgctcacaagagcttccctgtctggctggaagatgaggttccggtatgtaaacccccctgtatacccgattccacgagctcaagcacgccgggcaaaagtggaagcctgtcgatggccttgatggcgcctatggcagtccagaggccgacgagcgcggcgacgccgatggcggtgacggcgtacttgtcctcaactttggcccacgcgtcctgggctgccttgacgacctccggcacctccgtctcgctgccggtgccgtcggccgccctgatcgccacgcccctcgacgccctgagaccgtacttgatgccggtggcggcgacggcaaaggcgaccgtggtggggcggcgaggcagcggtgcgaggacgagcggcgcggcggcgaggcggcaggtggtggcggccatggtggggtgaccgagcgggtggcgcggcggtggacgcgtgatcgatcggtgatctgtttgtctgtcgtccgcgcacgcgtgggcggacgcgtgggcggacgcgtgggcggacgcgtgg

SEQ ID NO: 386315 - DNA, 706 bp, Oryza sativa
  unsure (1)..(706): unsure at all n locations
ttggagcggaaactgaaaacatatttcattattgttgaattaaaataggtacatgagcagctcatcagcaataatagtattttgtctgctttgagccaggggataagatggaaataatggagggaccagtctcaaaacgttagcaacctcctcttcactggcatggctgccgacagatgcagtcctgctgctctctgatttacagaaatcttctcgaaaatggtatgaaattagctgctgctcccggtgatttcattgtaggtgctcttgattttgctcaccagagcttccctgtctggctggaagatgaggttccggtatgtaaaccaccctgtatacccgattccaacgagctcaagcacgccgggcaaaagtggaagcctgtcgatggccttgatggcgcctatggcagtccagaggccgacgagcgcggcgacgccgatggcggtgacggcgtacttgtcctcaactttgccccacgcgtcctgggctccttgacgactccggcacctccgtctcgctgccggtncgtcggccgccctgatcgccacgcccctcgacgccctgagaccgtacttgatncggtgcgncnacggcaaaggcgaccgtggtggggcgcgaggcagcggtgcgaggacgagcggcgcgncggcgaggcggcaggtggtggcggccatggtggggtgaccgagcgggtggcgcggcg

SEQ ID NO: 386316 - DNA, 497 bp, Oryza sativa
gttttacatcctagggatcttgtaaaggtacctgttattaaaccgacaccgattactaggtgccggtttgaaaatctgacatccatatatcgccgattaccaatgcggcacataagtccattccttatttagcacgtaagtcgtgccataatgacgctcgatatatactacgaccactcatttcgcaggtgattggctcttatttcataagtattatcacgaccgttcgatggacgatcagtggtcggcgacgatctcctgagccttggtctcgtactcaaacttgtagctgctgaccatggagctatccgctgaccagatgaacaaccccggcagcttcccctgccgctgcaactccttcgcgccggcgatcccctgctccggcgagagcagcccggtgacgttcccggtcttgaagctggcgagcagcttgctgccggggtagttcgccgcctgctcgtcgtagaacatcacgtacgtcgccacgtcggtgttgg

SEQ ID NO: 386317 - DNA, 1047 bp, Oryza sativa
gagagaagcgggggtcaggaaaattattcagaacaaaagcaaccgagggctgttagcttgttaggtgataatatgaccttcttctaggataataagagcttctatatatacaagggggctagaaaatcgaagcctgcagttatgtgcccaacaatctaagaaaaatgatggcataaaatgtctatatgctgattgtacaatgacaccgtatagttatttcttccaagccctatatgctcacatcttcctcagattatcaagccgggcctgtaggtcgtcatctatcccaccgtccccacctccagcggcttcagcttgagcggcaacctttcctgctccaaccggtgcagcaacagcggttgaaggagccccgacaagctctgagttgacgtcgatgccaatttcgtcaaggacctggtttaccagttcttctggttcttcctcctcctcatcgccctccaaagcatcgtcaatggcatcattcattgtgctactgactatctccatcttctcgttttgtatctcaaactcccgcattatcttctgcagagctggtagattcatctgcctgttcatctgtctcatggcttttgtgacacccttcatggcctcacccatagcttgtgtcgatttcaatgtctgaattcgaagagatacaccctgtagctgggacttgagggcatagaattttgtgatctgatgtcttgtgcggataaggtcctttgccataatttttacggctcccatctgtccttgcttggccaccttcttgatctcggcgatgagcttcttctcctgagcctgcaggccctgcctctccctctcgatctccctgatggatttatcccgcatccgcttgttctcccgcagcaactcggctggggtcttccgcttgccgaagatgaagctcatggcggctcgatcgattggattcgggtttcgatctgctccgcgattacccctttccccctcgctgcgatcgatgcaataacccttcttcttcttcttcttcttcttgggtggattcggttgggttggggattcgcg

SEQ ID NO: 386318 - DNA, 830 bp, Oryza sativa
gcttatgaagaattcaggtgcggtgaaatataaaacatatcttagttttactcccgtataagagtctgttatttaagatagtttgaaagattgagcaccttaaatggttttctactgaatacattgcccagctttcttcgctttgagtagaagagaaagagtagaacagaactgttcagaaagaattagcaaaacgaagcatatcagagcttttattttcttttcaagaacaaatatggtttttctattccttttattgcccatttgctttcatcaaaatatagggtggacgtatattattttggctattgcagctatatacatttgaaaggaaaaaaaattaaagacgagattttgtcaatgcagcaggtttgaagctggcgattccggtgatctctcttccggtcaccaagctgttgatgtcataggtgccttcgtacgagaagattggctccagatcacagaacgcctttgctaccagaaagtcagccaaaattccgtttccacccagtagctcacggccaagagaaaccacctccctagccttcttggatgtccatgccttgcctaaactagcatggcctggtgtcattttgcttgattcatacagcttgcacaggcgccagccgacaagaagcatggcttggaatgtttcctagcatgcgaacaagcttttcttggttgagctgaaaagctgccaacggaactccaaattgctttctttctttcaaataccgatgacacatgtcgaagacccccatggatatcccaattggctgccatgccaccataatgcgcgacatagcaaggaccttgtttcggacgcgtgg

SEQ ID NO: 386319 - DNA, 1218 bp, Oryza sativa
aaaaattaagaaattagcaaaagtacaaataatggtacaaaatatgataggatatagaataaattagtacaaaactgggcagtcgaaggaataaactgtccaaaagcggatatatgtgagagaataaataattattttgggatcataaaatttcttatattttgatacaaatttgaagaccaaaataccaaataccttacattatatggcggatagagtaattaaagatttaaatgcacatgcaaatatgcaatgccaccctttatcattggacactccacacactcgacctatcaacttcaagtcttcaactagtccactgttcgggaatgatccaattatttatttgtaactactcaaacgcgtacctaaacactgatgcgtacatgatatcggcttgacatggacagcaagccacacacaaggtcaagctcaggccaacgtatggcggacagtcatgacacgagacgagaaacaatcgcaaccgtggacggactacacgtacggtggagaagatgcgcttctctgatctccacgtctagtggcggtcgacgaagctcttggatggcgtcgacgagctcccgggtcctctcgccggtggccggggtccatgtcgacggcgtacttgttgaggtagaaggagtggctcatgccgcggttgaccagcacctccacgtccttgccggcggtgcgcagcgcgtcgcagtactcgaggttggtgtcccggatgaggtcgtgctcggcgacggcgaccagcagcggcggcagcgggacggactccagcggcggcgcgttccgccccatcgggcacgtgtacgggtggtccttggtggcgccctcggggagcgccatggcgaggaacttgtcgagcatgtcgagggtgaagaaccccgagtcgggcctcggctccagctccgacttgctccgggtggcgtgcacgaaccccgggtggagcgggatgcctccggcgacgcggaggggcgcccagctgtccgccccgtcctcgccgacgcgcgcgccgacgtggtggacgaggttgccgcccgagctgtccccgatgaggaacacccgcgagaagtcggcggccgtccggaggagctccgccgccgggtcgccgagagcggcggcgtcggacagcgcgatggagcggagccggcggagcccgtcgacgccggtgtcgatgtgcgccggcaggcggcgctcgggcgccaagggcaa

SEQ ID NO: 386320 - DNA, 422 bp, Oryza sativa
gaatcaattgagtgggcttagagcaaagcccgattccattaaggattactttgcaacaactaccaaatcacaagctacaccatacacgccacgcattctggttacatgcttcaaaaactcttccaactcgatcagaagagatcagcacccggagttatttcccatctgcactaccataatcccccctaattaaacacaacacgcgaacaaattaacagcccatagacttgttttttaccaccttcttattcttcttcttcttcttcttcttcttcttcttcttcttcttcttcttggtctacgcttctatcttaagattcttaattttaattagcctcctccgagaagcaccttggtctactgtgcttctgctggtcagagagtacttctgcttctgctggatctactggtagcaaagcaca

SEQ ID NO: 386321 - DNA, 1096 bp, Oryza sativa
aaacaatatttaagacatttttaagttgacgtggaagataatttacaggctcacacaattatcagatgtatcatctggtgattaagttcctggaaactatcttctgcacagatgatgcgggcaaatctggaagcgggaaaaaaaaaggaggtttttgaagttgggggctatatacacaatgttagataaaattggttattgtttttcatgcatcattacacaggtatgaatcatctgtgcaaaaacaataacgcatgcgtgacatttggccatagaagactatgcacatgttaatcaacagacaacacaatcttgaagtatttttcaagcattgcatcctttgagaagtcagtgaagtaccccttttcaacctcaagtccttgctctgctgctatctgttccacctgctgctgaacctgatcggcactgacatgatctggatccaggaagcatgcaatctctgtgcagtcatcaccatgggaaagggcaagcgcttgcactgtcgggagtcctccaccacgaccagtcacccttcgggtgatccttcttatggttgggatatccttcgatagtaccggcacattatagttcaggggtaaaggtgcagcaccgatcattatggcacctctttcacgagaaacatgatctgggccctcatctggcttcaccggcagaatatcagggagtacctgacccatccattggatgcccatgtaatttggctggaagtagcccagttcacgccgtactgcagtcacaggtttgccagtggggtgtgctgctccatacaagaatactgggacttgtaagaagttgccaatgtcagaggccacagtcttagccagttgagcagcatcttccattgtggcttgattcaaggggtggaaggacatgtcatcaatgactccaatccttgggtgagttccagtgtgcgtttcaaggtttatggttgaaaacgctttctcaatcatctccaacaatactcgcctcattgggctaaatttcacttcaccagttgagttctcgttgatgatataagacgcaagcgtgcaacggacacggttgtagtggtcatcataagaacttgctgagcaaa

SEQ ID NO: 386322 - DNA, 683 bp, Oryza sativa
ggaaaggtataaaattaccccaaagcttgttccctaaacacagcaaatagtttttccatcttctgaaaaatgttagcattcacaagatacagaaataccggtactatgctagagaccagcgagagcattcaacgagatcaggcatcgcaatgtggctttgcccccacaaataaaacggaaatctaacaccaacttggtgccagattatatcagtgtgtgcatatgccttcaatcctcttcaattggggtgctttcttcattttgcttcttctcatccgccccattttcttggttctgaccatctgtctccatcttttcagtttcctctgaagcatcagccatattagcatctggcttggggattgcaaattcagcaggaatttggccagtgctcagtgccttttcaagccttgcaacctcctcaagtgtctgagaattcacaatggcagccttgatagctgtgatttgctcaggtgttggagcaactacttttggaccctgctcctccattgtggtatcttgagcatccaccacctgtccaggagtaaaagttttggctggcaccttctttgcctcttcctctgcctcctttgagtgaaacttctgtgctgctgcaattctctcctgttgtttcactttcttgaaatccagcaaccgcaaatgcttcaatttcggacgcgtgg

SEQ ID NO: 386323 - DNA, 1552 bp, Oryza sativa
tgctaaggaacttaagtatggagtatcaacaaccccaaaacatcatataattacccttctgttggaaaactgtaacccccactgtgatgcagttcactgccacttaaatggagatcataacaaaacctttgccaaatggtacattgttgaagtctcaatactttacaaaggaacacacgaggtgcagattctgctaaccacccatcatctcaccgttcgaagcccctcaggcagaaaatatcagcattcctttttgaaggaaaaaaaagctggagatggtcttcctacagaatcagtagacaagctggggctcgaattcagcgaaatcaacagagccagactcgattgggggcatgaggtacgcagcaatgatctcagacaccagagcggcaacgtgaggaatcctcttcaggttcttcaccagggggatatcgtcagactcgcctatggcaatgatctttttgttgatctccaccatcctgtctaacttcctcttgaattcagggttctcgacgtcaagaacagcggggaaaatccttgctgttgtgcggttggtctcaattatcacatgcatgtcgaattctttggtgtccagaccaatcccttcatagaatgtagtacgttggcaatcatttaggtacatggtcacatacaccgagaggcagaagaaccgtgaccagagcttggccttccagtcgttgaggaactgcggctgcgccttgagcagcgcggagaagaaatcaccgtgacggttctcatcctggcaccagttctcaaagtacttgaagatggggtacacctggtactccgggttcgccttgaggtgcctgaagatggtgatgtacctccagtacccaatcttctccgacaggtaggtcgcgtagaagatgaacttgggcttgaagaaggtgtacttcctagccttggtcaagaacccgaggtccagtgccaagttgaaatcagacagccccttgttcaagaacccagcgtgccgggcctcatccctggacatgagcgagaagatctcagccaccactgggtttgttttcttgagcctgcggccgagctccttgtagaggaggaacccggagaactccgcggtgcaggagcgctcgaggaactcgacgaagatctgcctgagaggcccctccatcttgtcggcggcggccttgaactccgggttgcggacgaagtgggtctggttatagtccgtcttgaactcctgcagcagcgcgtcgaactcctcctggttgagctgcttgttgatctcggcgttgaacagccgctccatctcgtcgaagtccgtggtgtagaaccgcggcgtcagcagcgtctcctggatctccgtcttcccgcgcttcttgggcgtcccgggcttcgccgcgggcggcgccgcggctgacgacgccacgcggaaccgcacgatgcgcctggaagacacgacgcggggcttggcggcggagaggccgcgcattgccgccgggttgaggagggagagctccatggcggaggaggccatttcgtcaaacacctggccggggcgggaggggga

SEQ ID NO: 386324 - DNA, 459 bp, Oryza sativa
catctcaccgttcgaagcccctcaggcagaaaatatcagcattcctttttgaaggaaaaaaaagctggagatggtcttcctacagaatcagtagacaagctggggctcgaattcagcgaaatcaacagagccagactcgattgggggcatgaggtacgcagcaatgatctcagacaccagagcggcaacgtgaggaatcctcttcaggttcttcaccagggggatatcgtcagactcgcctatggcaatgatctttttgttgatctccaccatcctgtctaacttcctcttgaattcagggttctcgacgtcaagaacagcggggaaaatccttgctgttgtgcggttggtctcaattatcacatgcatgtcgaattctttggtgtccagaccaatcccttcatagaatgtagtacgttcccacgcgtccgcccacgcgtccgcccacgcgtccgcgga

SEQ ID NO: 386325 - DNA, 511 bp, Oryza sativa
tttttttttttttttttaaagtaaaatttcctttggggtgacactatcgaaagaaagtcgggctaaggtagcaatgatgcacatttcacttttaagactaaccaaacacgaaacaaatatgccgaaataaaagggtgccagaaccatcaaaatatgggagaccggtacataatatcctgcgtcacaggctacaacttctaaaagaaacaaaaatatgatcctaggccattgctggtagattgtacggctagagagcagcatttggcatgtcatacgtagtgacgagcatccatcaagccaaatcatacgataggatgaggaagcatccattgttggcgccggcacgacaagctgatatacccgaatcttctcgagtgggaaggctagcgcaaggggaaaacgccatcaacttcagttcctattagccagctctttccctctcccgcttggtgtacagcctctcaaggacgcgcttttgcctcgcaccgaggggaaatttactaagatcata

SEQ ID NO: 386326 - DNA, 374 bp, Oryza sativa
ggtattaaggagagggagtagtagttagagaaaaaaacgtaaggaaatgcataatgttctaagctgtaactatatatatacatgtaaaaacaataacatgtatggagcaaattaagcatggagtaattaagctaggtggtgggcggcatcttggggtagcgagagcgggcgcaggcgacgcctaggaggaggacggcggcgagggagagggcgagcagcggcttctcctgctttgcattacctccggtacaaccggcagaccgcgtaccagccgctggccttgttcccccacatggcgatcgacccgatcgcgccggcgcctgccgtcgtcggcccctccaggttcaccaccaccgcgtcctggctggggcagc

SEQ ID NO: 386327 - DNA, 726 bp, Oryza sativa
tttaatgccgtgacaagaagagtttttgactagttgctatagatttacagagttaagtcttcagtagaaaagtacatttgacaaaagagtacacttctaatagaacatttggcaaagtctatcatacattaatacctctccccgttggtaatcgtacgtcatcgtacgagacctgcacctagtgctttgatgacttcacgcaggttgtcgttgatgctctaacagagagtaagatggtcgcgcatgtaaccgctaattttcaactaaagacgtgacacttaattagactgagacaacgggtaccgatgaattccaaccccatccatttctatcgttagatgaccaatgactttatctaggttcaagctcagtgatcgacgaatgaggcccccaaggtaatggaacgtccattgtttccgtgtagctcctgttcctgccaaagatatatgccggcctgtagggtgcttgcagagtgacggtgccactactgagcataaggatgatcgctgacatcggcggccggtccactgggttttgctggacgcacagaagcccaatgttgatgcatttcaggatatctcctctagagtagtggttgcccagagaaggatccacaatctctgtaactgttccctcattccagtgcctccacacaagactgaagagatcttcgcaatgttcagagaccaccgcataactgttccttcgccctgtccggacgcgtgg

SEQ ID NO: 386328 - DNA, 478 bp, Oryza sativa
  unsure (1)..(478): unsure at all n locations
nnnnnnnnnnnnnnnnnnnnnnnnnnntaatgaccaacaagcaacaaccacaagtctacaaatcatcggaaatgtgataaaatccaaaaggggggacatgaatctctctattctcaactcctagctaagggacaggaacctgaagtctgaacaaacagacaacacatcacaacagtgcagataaaaatgaggcttcatagccctttttaaacatggtaaaagaagccctaacatagagattcagaaaaacaacaaggtagcagcatccactcttcgatgcatttgatgaaaatcaaaaggtggaagtcaatgcccgaaccatccccccttgcatagtggtgacactatgtatcttcgcgaaaattttctcgcaaacgcgtcggtttcctcgcaaattcttcactagcaagggcaccacatggcaaggagagtttgaggtgcgttcttgactccctactgctgaatcaaactccaaaat

SEQ ID NO: 386329 - DNA, 703 bp, Oryza sativa
gcttataaacttattgcatgcgccgatcaataagcaacataatcatgttgttctatggagattgagcacacaaatgcctgtgcagctagagccagtgtactgaatgtctgaatgcataaatgtacggctcagatcatatcaccggcgaggcatgacctacaatgctagatagagtcaggctcgtagcaacgtggagataggtcactatcgcatggtggcttgatgctgatgccttgaaacgcagtgagccagtgatcattttcttcttctgggatgtggattggtgaactataatgaaagagaagtactctctgtctctccctcatacaatcttccagtgtactagacagtagtccatcatctccacaggatgttccatgaatttcactgttgatagtttcgagaggagctgagccactcgttgctgttcaagagtgcggtgaccctgtcgagacagcgttcctttccagtaattagcatacctcaatgtctcacaaatcatctcaagatctcctcttcttctcagcccaggttggcccataaattagcaagtttgtcctaccaaacctcctgtcagctacttttataaggcttccacatgattcggccatgtctgttttcagtgggtattcaacgagaatgaagcaatcttctccaaccaatggtgaccttggaagttgcggacgcgtgggcggacgcgtgg

SEQ ID NO: 386330 - DNA, 641 bp, Oryza sativa
  unsure (1)..(641): unsure at all n locations
tcttnttttagttgaggggcgtggcataactccatgatcaatgtattttggcaaacaaccgatgcattgcatgttcagttttcacgaattggtcattttggcaatactcaaaaaaaggagtatcagggcagctgctttctgacaccaaaaagggagtacaacgaaaaggtccatatcgacatggctctagtgaccccatttaaaaggtttggtatcttattcatcggatgcaatatcagtagataccaccttgcatgatagcctcaatttcttcctctgacagtggcttgcgtttaggaaggagtgaagctggccctccaacagccgtataagaaggtggggaaggcacatctgatctaaagcggtaatttttaatctccccggaagaagatggtgcctctgatttaactcccaatcgggacaagagggacgcgtgctgatctgcaggttgcgccgctggtgggggtggggatgggatcttgagattcctcttggggaacttgatcagcggaatccgcggcatctccgagcagcaagaaatcccctcgcgcaatcgcgattcttctccccacagcaagaaaagtcgagaatcgaggctgcgcgcaaggaggaagaagccgagagagagagcggacgcgtgg

SEQ ID NO: 386331 - DNA, 503 bp, Oryza sativa
agaatgacaaacagaactgaaattgccctgattttattgcttcacacaggcgaagatgccaaacaaaactagggttcttcgctgaaacacagttcatgggagactacaactatgctctgccacactgattcgcttgacatatgcagcaatcagcatcaacagttcaacaccaaacagcttacataatccagcagccaagaaccatcacataacctattccatcagtacaatacaaatacatcaatggcacatttcttttgcctccctcgtttcataactaggaaacaagagggaattcagctcagggacaggggaactgaattttctaaggtcagacattttgttcagctgctactggctcatccttgagattcttgctgagccactcctgagcagctaccaggtcagggagcacagttgctccagacttcctccagctttcagcatcggcggtcttgaatcggtccagaagcagcgcgtgcattccgatgctccgtgcaggg

SEQ ID NO: 386332 - DNA, 433 bp, Oryza sativa
taaggcgggaatcagattatcattagataagagagcaaaatcaacagtcatgcctaccgcatatttgggtgcggtaatcagctcacctcctcaagcttactactcctactcaataaggtccatctcttttttttttctctccaaaatttaccaagtctaaaacctaatctcgcggtacagaatcactaagtttgtctatacatgtgagcaatgcagttttgttttttcttttcttttacatattgaataatttatgcacaataaatcagtaatggaaatggttctgcactcattataccaaaaacaaaattagtctttcatcatattaacgttagctttggttagttaggatagttagtttatatttttgaaggctacgagtaagttaaagtttgcacttcaaaatccccccattatcttgtcacaaaacagg

SEQ ID NO: 386333 - DNA, 888 bp, Oryza sativa
aaaactaccaaatatacggacgtagacctaactagcagccaaggaaaggcactaccttaactgatacactggtgctcgctcagtctcctcagtcctcccacaaccacaagtccataactccagagcctagcctaagaacttcatatttgagcttccatggtttctcaatcccagagcttctcttatcctgaaagcaaccgaaaggcatccttttttttctttcagcgtatgatttgatgaagatttgggcgccatctgttcaagtctccgtctcctgacaaaatctcaagaatgctttcaaacctgggatgcatccggttccacacctgaaaagatctccatctggaaggccaattcagatcacttcatgtccacttaagcgtatatcaccattctcagtaaggatcgtcccagcgaccacttctgcaacctccatgaattcagtacagttgctacttgccaagctttcatttccttctagttttcctttcatccttctcaaccacactttctgaaggcgcctgctctaaaattgtttgaattggatcattttcaacattggggcatcaagcagccaggtcagctagtttcatcaaccaaaccaatagtgccaactgctgcacagctgttgcctgatacagtggacccctcagatccatgtggtgaagtggagcaattagtcagtccaaaatttgcatcatcatgcaactgaattgatgcttcctcacaagccgggctaactgaagcccttctaacagatttgaatgagtcaacgtcagcacctccaacagaatgatactttcgcttgagctgacccaccagagatgctgtcgttgtgcaaacttcagagtcatttttatcagaccggacgcgtgggcggacgcgtgg

SEQ ID NO: 386334 - DNA, 838 bp, Oryza sativa
cagtcttcccacaaccacaagtccataactccagagcctagcctaagaacttcatatttgagcttccatggtttctcaatcccagagcttctcttatcctgaaagcaaccgaaaggcatccttttttttctttcagcgtatgatttaatgaagatttgggcgccatctgttcaagtctccgtctcctgacaaaatctgtgacaaagtattcggtgtgtcaagggtggttgttctcttcaactcctcgccaattgctcagttcatgacagacgagctcttccatggcagagaaggtgccaaacaacaccggatagacaaaaagaacattttaaatgttaaatttgaagggtgagagtacaagacatgcctcaagaatgctttcaaacctgggatgcatccggttccacacctgaaaagatctttgcaaaccaatccaacaccatattcatatttataggtcagtcaatttaagcagaacgaaatgaaaggataagcacagtacagagtgagtgcacagaaagcaaaacctccatcttggaaggccaattcagatcacttcatgtccacttaagcgtatatcaccattctcagtaaggatcgtcccagcgaccacttctgcaacctccatgaattcagtacagttgctacttgccaagctttcaattccttctagttttctttcatccttctcaaccacactttctgaaggcgcctgctctaaaattgtttgaattggatcattttcaacattgggcatcaagcagccaggtcagctagtttcatcaaccaaaccaatagtgccaactgctgcacagctgttgcctgatcggacgcgtgg

SEQ ID NO: 386335 - DNA, 1426 bp, Oryza sativa
  unsure (1)..(1426): unsure at all n locations
tttagtagaatactctgcttgtacatttggcatcgctgaattgaaatcttgtgtatctcgcgcgattaacaattacatcgatcgagtcggatcgatcttttttccttttttttttcgtgctatcacagaaattacagacacaatagcaagagagaaaaaggaagtaaaaaagaatagagtagtatatataacagcagcaacctcagcagctcaagcgaggtggatgggatgaagaaatgagttgattggatttaggcgagggcgtcggcgccggcgacgatctcgaggatctcgccggtgatcttggcctggcgctggcggttgtagaccatggagaggttcttccggagctcgatggcgttgtcggtggcgctgctcatggcgctcatcctggcggcgagctcgctggcgagcgactcctggagcgcgcggaggatctggctgttgaggtagagcgggaggagcgcgtcgaggatctggacggggtcctgctcgaactgcaccacgggtgagaagggctgcgtctcgatcttcaccttctcccgctccacggtcagcttcccttccttggtggtgagccggaacagctcgtcctcggtggcgtccacgcacacgccgttgatgtcgcagatctcccccttgggcgacatggggagcagcgtctggatgatggggtcggagcggacgagggagacgaacttggagtagaggagctccaccttgtccaccgcctcggacacgaccagcgagtagacgaggtcgcagatggactgggagtccttcacggtggggatgccgttcacctccagcgtccgctcggtggggatgaaggggcggcggatgaagtaggcgttgcccttcttgccgacgctgacgacggtgtactcgaggccgagctgcttgagctcctcgatgcgggtctcggccttcttgaggacgttgttgttgaagctgccgcagaggccgcgctcgccggtgaggacgacgagggcgaccttcttgacggggcggatgcgggtgagggggaggtcgatgtcctccgtctggatctcctggttcatgttgtagagcacctccaccagcgcctccgagaaggggcgggaggacaccaccgcctcttgcgcccgccgcaccttggccgccgccaccagcttcatcgcctccgtgatcttctgcgtgttgcgcaccgagtcgatgcggctccgcagctcacgcagcgagcaccgcaccacctgcaggcggccgctgctgccgctgctaggagcggagcggcggcgggtggccagggcggaggaggaccaggcggtggagaggtgcgagcacgacatggctggcgggtcaccggcaacagcggcggcggcggcggcggcgggtggagggaaagatttcggatggggtttgggtggagtgantcgaacngcatctc

SEQ ID NO: 386336 - DNA, 1410 bp, Oryza sativa
  unsure (1)..(1410): unsure at all n locations
cnagtgaattgtaatacgactcactatagggcgaattgggtactggtcccccccctcgagggttttttttttttttttgtctagtataggatttttattccatgatcaggaaaaaaaggtttagtgcaactaaagggtaattagcatttcacggtcgttttacagaagtgattttacatgtatatgagcccggcgaaaattttacatgtatatgagcactatatataggacactctttacatgtatgcataactttgtcccttcatacacctcacttgttcatgaaatcgatgcccttctgaatgctctccatcagctctttctttgccatctccaagccagctctctcaaaatcattcaacggccccagagggagaacctcttcggctccagcacgacctaacctcacttttgttgcaaagaacggcaactcggtcaccgcagatgcaacatatgaacattccacaacgccagcatcaccacgcattgctcgcaagcatgcatcaccaaattttgctgcagcaaaagccattgacaaagttgcagagcctgctcctgcctttgcctcaacaacttctgtgccaccattctgtatgcgtttagtcaaatagctgatttcatctggggtaaatgagcatggggggtggacctgggagaggaggggtaatatagtcactccagcatgcccaccaacaactggaacattgacatcttttgggtcaattccaagtacttcagccacaaaggtgtttgcccttgctacatccagtgttgtaactccaaggagacgtttgggatcataagttccagctttcttgaaaacctctgctgcaatggggacggttgagttcactgggttgctgatcaagttcacaattgcatttggacagcacttggcaacgccttcacaaagtgagcgaacaatcccagcgtttttgttgaacaaatcatcccttgtcattcctggtttccttgggagaccagcagggataatgacaagatccattcctgtaagtgctgcctcaagctggttgggcccaaggaaaccacggaccacggcggtggtgtccatgtggctgacatcggcggtgacaccgggcgtgttgacgacatcatagaggtggagcacagagacgagcgggttcaacttcatgagcagcgacagcggctgcccgatccctcccgccgcgcccagcacggccaccttgaaccccggcgcgccgcccttggccctgcatggcgccggcctcaccccctcctccatctgggggcgcggcgacgggctgaggtgggcggcgacgcgggcgatgcggtgggaggcggagtcgggctgcatggctggctggctggttgcggttgcggcggcggcgacggagcaggagagcagttggcgcgcgagcggacgcgtgg

SEQ ID NO: 386337 - DNA, 469 bp, Oryza sativa
  unsure (1)..(469): unsure at all n locations
ggaccggtgtttttntttttggtatttgaacactggaaaaaaaaataacagtaacactgagctccaaatctgtttagctttttcttacaacatttaaatataaaacgatgacaacgaaaccagtaaaaagaataataaatgatctgctcttgctattctcttcagagaatatcgactgcttatgtttggagtttgcctctccagagttgtcgggcaataataattacttaaattacaggcaaaaaaattgatcggcatgcccctatgcttcaatctgtacttgctacaatttgacatctgaaaaatccacatcacaatgttctattcactgaactgcacatatatttcccttgtgagcctgagccttatacatcataattgcagatgttgtcggaacccatgtactcgtgtcgggcaatcttgccaatcatgttggggatgccggctccacctagtgagattgcgctta

SEQ ID NO: 386338 - DNA, 1309 bp, Oryza sativa
tccaggaatcagttctgaatgcgaatccatccatccacacgtgcatgatcaatttcagtgcagaatcggatcaaacaaggggacacagattgcacaggcatatggagaagatcaagatagccagatgccactaatattacttgcatatacatatattccttcttctagctagtgaggagggagggggcccaaaagaacagcattgaggaggcactgctaatgctaaacactgtcccaattgacatattttgccaaaacaccaaatcgccagacccgagctaggggccgcctttggctaaatcttttcggttagtggatgttactttcccctggctgagaaaaacaaacttcctccaggatcatattcggcttcggcacgagaagaaggtatcgtcgtccgccggttagaagcttgggtaagaatagggccagagccgagagatcaggatgaggtgatcctggtctcgaggtcaggcgcgaagctgtgcggcatctgatcgtcccaaaccaagccgacctcgtactcgggaacatactcctcaagcttcagaactagctccctggcagttggagccgagatgataatgcgccgcgcatcctccgctatgaatccttcgctgacagccatgtcaatgaaggatagaaaaggatcataaaacccgtcgacattcagaaggccaaccggcttcttgtggattcctagttgggcccaggtgatgacctcaagcaactcctcaagagtcccgtagccgccaggcagtgcaatgaacgcatcagcaaaccgggccatttcagccttcctctcgtgcatgccagagaccgctctaacttcaccaacaggctcaccagtgacctctctgggcatcaaggatttcgggatgaccccaatgacatggcgaccaccgtcgtgaacagcgtgggagacgaggcccatgaggccgatggagccaccgccgtagaccaggtctatgcccctctcgaccagttccttgccgagctcgacggcggcgtcctggtagctggccttcctccccttggcgctgccgcagtacacgcagatccgcctgaaccgcgaccgcctctcccctgcaccaccgccaccgctctccggcgccgccgtcgccgccgcccctgctccggcgctcctctccgccgcagcctccattgccatcggcaccagcctcgccctcaggtaggtagagcgcgcgtgcgtgagcgaggcagcgattggaggagagagatggagagagaggaaattgaattggagggggaggcttttgcttgagcccacgcgtccgcggacgcgtgg

SEQ ID NO: 386339 - DNA, 924 bp, Oryza sativa
ggggcaaaatggtttgcattagaaaagaacgactgtaatcgataaattagtgccatttacagggatggaagctcgcgcttctgagctatagctaaacttattttctaaatgctatgttaaagaatggggaagcaacaaagaacaaggtaaagcatataccaccagccaacccagaaaaaagaaagaaagaaagaaagaacagtaaactaatggccaatttgacatctacagtaaactaattcatgaatttacgacaattagccgtttggcagaggcaaggaactttgcgatcatcagcctcgtcagggtcaaataagtagtcatacgttagctcttcgccggcagagacatttttcttggcgattaggacaatacggctctcgtcatgccccacactcataatccttgcatagcagtttggagtgcaagaatgattaatcaagcgtgccacgttttctttaatctggggcatcaacgactacttcctcgctgattttgaaaagataacaatctttgccttgtacacgatattggtcttcccttaaatcagcaacacttcgtctgacctgctcacctctatactcgagcaccatttctccttcttgaatgcccctacgagcaaaaagtccccatctatgaattcctgacctaccaaagcatactctggtatgctctgttttctgcagatagtgtagacgctccttaaaagtagaaaaggactctggatccctctcttccctaggtggattcaaactgtcgatttcatcccatcgatgttgacaggatccccttacacggtgtgcaattgctccctcccgagatctctttagttctttcttaacataaaaccgacatcttgctgcagataagttctctgaaatttcaacttctgacactgaatccttgggaagatcggacgcgtgg

SEQ ID NO: 386340 - DNA, 718 bp, Oryza sativa
agaacgcgcccgaaatgggttgtctccatccatttgtttagctgcatcctatgaaatcgtcagctaactcttaagatgatcagttgtttatatacagatgctatcgatatcaagcatacttggttgtgttttctatatacatttttaagctgctaaattagaagctaaggaattcccagcaacaaagaactctctgatttcctggacgcatcgacgatcacttgtaagcatggacgtagtcctgcgaaatagaagttcttctcgatgaagttggcgagccagcgggaggcggcgaagcacagcacggccgcagccacgacggcggatctctgcacaaccgacgtgaccaccgtccccttggcgacggcgaggaacccgacgacggcgaccgacgccacctgcagggcgacctccagcgccttcatcttcttcagtgcaccgctgcagctcgtgcactgcatgacgtgcgaccaatacctgtccaagagctgatctttgctaggagttggtggcagctgattagttattggggttgcccagccaatctgatgcttgcagtactttctgaaccagtttctgaaggtgatgatcatgttgtcagatgatgtgggcacatagcaagctttctgccagttatcaagaccaaccgtagcgaaattgcgctcctcaatcccacgcgtccgcccacgcgtccgcccacgcgtccgcggacgcgtgg

SEQ ID NO: 386341 - DNA, 743 bp, Oryza sativa
ttttttttttttttttatattttattttagccacaacacatatatttgtcctttaaagttttaaggagttgaggagaattacaacagcgtacatccgcaagaggatcaaatcagagccctatacaaaaggaaggatatgcagcgcacacatccgtccgtacagtcaagctaaccaaaagccactgtggattcattcacttgtcgaagtagccctcggtcctgcccttgaacccgatctggccgaaggtgagcgccaggaacagcccaaggtgccacgtcaccaaccacagccagaacggcgagtcgagcgccggcggcgaggggaagtgggagagctcctggccgatgctggagaagaagagccccgtgaggctgttgccgttgatcgccgggacgctcgacggcgcgatccacccgatcagcccgaacccgatcacgttcaggtccctcctaagccagtcctgcggaaacgtcatgcaggtgatcctgccgttcctctccaggttcctcgtcagcagcgggttcctcgccgacacccgggcgcccgtcgtgaagccggtggagaaggccggccggcgggcgagggtggcgccggcgaggccggagacggtggaggcggccatggcagctaagctagcagatggtctctctctgtctctggtcggcgagctgcgtgtgttgtcgcgggcgcgtgtgggggcgcgtgggcggacgcgtgggcggacgcgtgggcggacgcgtgg

SEQ ID NO: 386342 - DNA, 625 bp, Oryza sativa
tagataagaagaaagaaataagaataattaagaatagtagggggggcgcccccagataagaaagtgttatagagaatgaaagggcccttaaaagttttaggagttgagaaaaatttccaccagggtcgagccccagaggagatcaatcagagcctgtatcaaaaaggaaggataagcagcgcacccatcggtccgtacagtcaagcatagccaaaaggccactgtggattcattcacttgtcgaagaggccctcggtcctgcccttgaacccgatctggccgaaggtgagcgccaggatcagcccaaggtgccacgtcgccaaccacagccagaaacggcggagtcgagcgccggcggcgaggggaagtgggagagctcctggcctgaatgctggggaagaagagccccgtgagggctgttgccgttgatcgccagggacgctcgacggcgcgatccacccgaatcaccccgaacccgatcacgttcaggtccctcctaagccagtcctgcggaaacgtcatgcaggtgatcctgccgttcctctccaggttcctcgtcagcagcgggttcctcgccgcgaacgcgtgggcggacgcgtgggcggacgcgtgggcggacgcgtgg

SEQ ID NO: 386343 - DNA, 470 bp, Oryza sativa
  unsure (1)..(470): unsure at all n locations
cccngnaaaaaaaaaantngnagannttntgncgntnnagagagaaanccccngtaggctttgccgttgatcgccgggacgctttgacggcctgatccacccgatcagcccgaacccgatccacgttcaggtccctcgtaagccagtcctgcggaaacgtcatgcaggtgatcctgccgttcctctccaggttcctcgtcagcagcgggttcctcgccgacacccgggcgcccgtcgtgaagccggtggagaaggccggccggcgggcgagggtggcgccggcgaggccggagacggtggagccggccatggcagctaagctagcagatggtctctctctgtctctcctggtcggcgagctgcgtgtgttgtcaccgtggtttgtggcagcgtaggttaggccttattttgtggtggtggctgcggttgcgtacgtggcggcaggggatgagcgggcgccggacgcgtgg

SEQ ID NO: 386344 - DNA, 710 bp, Oryza sativa
aagggggtgaggagaattacaacagcgtacatccgcaagaggatcaaatcagagccctatacaaaaaggaaggatatgcagcgcacacatccgtccgtacagtcaagctaaccaaaagccactgtggattcattcacttgtcgaagtagccctcggtcctgcccttgaacccgatctggccgaaggtgagcgccaggaacagcccaaggtgccacgtcaccaaccacagcctgcaaattaatcacaaaacccacatgaacaattagacacgtagccactgaacgcttttgctactaattatataggagtactatactgcgtgcctgaagaagatagaggtactgaccagaacggcgagtccagcgcccgcggccagggaaagtgggagagctcctggccgatgctgaagaagaagagccccgtgaggctgttgccgttgatcgccgggacgctcgacggcgcgatccacccgatcagcccgaacccgatcacgttcaggtccctcataagccagtcccgcggaaacctgcaggcccaacacacaacaccacgtacgcaccgtcagaatctcacgccacgtacgcttgctgctctcagaattcttcttgcaggtgatcctactactgctacttacgtcatgcaggtgatcctgccgttcctctccaggttcctcgtcagcagcgggttcctcgccgacacccgggcgcaaa

SEQ ID NO: 386345 - DNA, 373 bp, Oryza sativa
  unsure (1)..(373): unsure at all n locations
gcggcaaaggnaattggaaacctcctggccnattctggaaaagaagagcccccgtgaggcttgttgccgttgatcccccggaacgctcgacggcgcgatcctcccgatcagcccgaacccgatcacgttcaggtccctcctaagccaagtcctgcggaaacgtcatgcaggtgatcctgccgttcctctccaggttcctcgtcagcagcgggttcctcgccgacacccgggcgcccgtcgtgaagccggtggagaaggccggccggcgggcgagggtggcgccggcgaggccggagacggtggaggcggccatggcagctaagccagcacgcgcgcgcggtgcgaacgcgtgggcggacgcgtgggtcgaccg

SEQ ID NO: 386346 - DNA, 706 bp, Oryza sativa
ttttttttttttttttttgcatagaagtactttattctcttattattgatatgtaggacaagaaacttacatgatatcttgtgatgcatatgcctacagaaaacaacacactacaaacctagacagcaggaagctaattaggattaccatgccaagcacatcaaacaagtaaaacagaagagcatatggttcatagttgacaccttagttattgatagagcacatacaaacatcataggcataccactctttatgggtcattcaggtcaaacataggccgggctggtgctttgccaacatacagattatagattaatacacagtcctgccatcaccatccaggatcatgtccttgaatgcgcccccacttgggatcataggcagcacatgctcctggtgcgggacgatgatatccaacaagtatggccctggagtctcgagcatcttcttgatggcggcacggacttcactcttctttgttacacggactgcaggaatattgaaccccttagcaatagtcacaaaatctggatatatctcgctctcacattccggggttgcccaagtatgtatgcgccctaattcgccttgtaaaacctatcctcccattgcaccaccatacccaaatgttggttgttcaacaccatcaccttcacagggaggttctcaatgcggatcaatgccagctcctgaatcggacgcgtgg

SEQ ID NO: 386347 - DNA, 727 bp, Oryza sativa
  unsure (1)..(727): unsure at all n locations
ntttttttttttnncttntttttttaagagtaattctactattagggattcgaaaaggaaacaccggtaagcatttgcacagcatactttgcagttacatgaaatatataaaaaaggaaaagggtctcagttaaatgttgaagggaggtctgagtcaacaatttaagcatggatggaaggtactacattacttctaaacccttgtactcttctttcactcttcaaatccaagcttcttgtcttggcagaattcaagcctctttctcctcttcacgctttggcagttgggactctgtaagaagggcaacgaatgcggccccaaacaagtacccggaaatagtgacgccagcaaccatccacgcatgtttcgtattgtgtgtgccaatcttcttcatgcgctcaaggatcaggctctcagagctttctctcaccatatctctttttgacaaaatcttctctatactccttacttttccaaggtttctttcattcatcaacacctggatgtacctatcgagagggccctcagcctcggagatgtcgagacctcggccgctgttgatgtgcagccgtgtcggcagcgctttcgataacacgccgtaccggactgccctcccagccgccgccaccgccgccgccgccgccatcccgccggttcgctcctcagttctcaggcgttacggacgcgtgggcggacgcgtgggcggacgcgtgggcggacgcgtgg

SEQ ID NO: 386348 - DNA, 591 bp, Oryza sativa
agcaaatcatgaggggtaagcgtatcacattcttttgggatttataaatgatcttgttctattctggcatctaaggtctggaatctggacgtatattcttgcacagctcctatacacaattactgtttctcaccaatcaggaattgattttcccctgaatgttctaacatgcctgtgtaaagcataagacttgtgcatgatcaccagtaaagtttcagcgatacagaaaccagaatgaccaagtctgatgccccagtaatggcataatcttttacttttccggctatccttctccatccataaagaatggtccctggtacccatgtcgaattctgaactttgtggttcactgctcctgtgcactgaactacctatacaaatatgctgctaaaccttacagatatgtacatcagctgcagaccttgatcaatgcaaattgactaacagtttacacaaaaatttcaaggtcgaaatagtgcgcgcctatcaatgggtgtcagaaccatccagtccagttagacgttgcgccacttgatttaatggtttagtcagatatatccaccaatcacggacgcgtgggcggacgcgtgg

SEQ ID NO: 386349 - DNA, 490 bp, Oryza sativa
tttttttattactttggggtgggtttttttaaaatattgttctcttttctttttaaccgcaaatatttctcttcatttctcccattcgtatttacatgggccaaagtaggtataggtactagttacaaggtaattaaatacagtagcgttaaccggacacacactttctcctaatcatccttattaaaatcctaaaagaattcaagtttttcgtcctatctaattacaaccccattattaatgccatgaaaaaaaaaagaaccttaaagcatcacatgatttgaacctaataggagagaaaaagaaaaaaaaaaggaaaacagcttgatcgctactgcgttgttgattcagagccagagtgcaccggcctccttcagaatgggcactagcttccccgagatgtgcactgccatgagcccgtcgagcccgcccaggagccttccgcctacaaacaccccccgcagcgcgactccccctcctccggtgacca

SEQ ID NO: 386350 - DNA, 1268 bp, Oryza sativa
  unsure (1)..(1268): unsure at all n locations
nnnnnnnnnnnnnnnnnnnnnnnnnnnnnnnnnnnnnnnnnnnnnntttttatatacaccaatcatcccaagcaaagaaatgataactgacagagtgattgtttagacatgcttcaaacataaaaaaacacgcgcaaagccacaatttattatcagtgttgaagcgacatcatactatcatggagacggataacaaatagtgtccatgagacgaacgatgaaacgactgagcaggagcatcttttattcacgcagagtactatggctggcaagtgatagcagcaatcgatggccccgtagaagataacgcaccggaagcttaatcatcgtactcctggcggcgatggtggtggtgcttctgataacgctgcttcttttcatcatcagagtcattgtcatcatgtttcttgcggccgtagcctccctggtattcgtctcccccgccatagctcggcttgttgtatccaccactctcatacgcaggcttctcgccgtacccatacccataagaaccctgcgtctcctcctgactgtaaggcttcggcttggggtaaccaccagagccataggtcccttcactctcttcctgggctttcttcccatatccataaccagaaccaccaccatagctctcttcctcggtcttcctgccgccatagcccgcggaaccatagctctcctcgacctgcggcttgcgaccgtagccggagccgtagctctcctcttcctgctgcttccttcctccaccaccgtacccagatccatagccggagccgtaggtgttctcctcctcggcctgggggcggaagccataggcgggctggggcttagatccgtagccagaggagccgtaggattgctgctgctcgtgctgggggcggtagccggaggaggcgtaggacggctgctgctgctgctcgtgctgggggcggaagccgtaggcgggctgcggcttggagtggtgggcgtagggggagggctcgtcggcggagtagtgcggggcgtcgtaggaggtggagggagcggagcaagggtagcaggtctcgtcggagggcgggagcgggcggccgaaggtgatgaagaggtcgtagccgccgccgtacggcgtggggtcgtactcgtcgaagtcgtcgggctcgtcggcgtggtccctggcgccgccgccgccgcggtagtacccggtcgccatggctgcggcggtggtggtggtggtaggagatctgtgcgctagtgagcgaggcgtgggatggagagggagagagaaaaac

SEQ ID NO: 386351 - DNA, 614 bp, Oryza sativa
cataccaccgcttccatactcctccccaccctgctgtggcctgctcccataccccgatccatagctctcggcctgcggcttcctcccatagccggaaccatactccgatccgtagctctcctcctgctgcggcttcctcccatagccggagccgtagctctcctcctgctgcggcttggtcccatacccagatccataccctgatccatagctctcctcctgctgcggcttggtcccataccctgatccatagctctcctcgacctgcggcttgcgaccgtagccggagccgtagctctcctcttcctgctgcttccttccctccaccgccgtacccagatccatagccggagccgtaggtgttctcctcctcggcctgggggcggaagccataggcgggctggggcttagatccgtagccagaggagccgtaggattgctgctgctcgtgctgggggcggtagccggaggaggcgtaggacggctgctgctgctgctcgtgctgggggcggaagccgtaggcgggctgcggcttggagtggtgggcgtagggggagggctcgtcggcggagtagtgcggcccgtcgtaggaggtggagggagcggagcaagag

SEQ ID NO: 386352 - DNA, 540 bp, Oryza sativa
tcccagctggcaaattaattaatatatcggctgataacgccgtgtaatatattatcctgatcagacagattgtgcactggcatagaacatcgacaaaactaaagataattacattttcatcccatcgcggactccacaaataactcctcctgatgtgacccctcggatcacttatcggctacatttacaacatgtttctcatcattcgtattgttcacttcagatcagaaggtaaaaacttcagtcgtatcctcattaaaactgactattgaaaccaatacagatgtctactgaactttctttggtcttggaacagaagtggccaattctttactagatgatctgatgatgaagggccccgcctccatcagcatgccaccgactaatcctaagatgcctccagcagcattcattacaggactgttgttgaacagagctctgaaagcaacaaatccaacccaaataacccgtgaacattataagaacaacatgaagaccaaatccaatctggtccttgtaggaggagaagagctcggggct

SEQ ID NO: 386353 - DNA, 1080 bp, Oryza sativa
ttttttttttttttttagagtaaaaaccttggaaaaatcattaataatataaatatatcgaaaacagttggttaaacagagtagtcaagagtcgatcgatcgatgtacacggagacaaaatcaaagacctctctcatcacttggattaattaatactagtaatatttagagactcttgggcaagcatagaaataattagcaaatgaggatggtgatgcaggaggtgtagaggctaggcagcaagggaggggtggtggtggtcagagttggggatggtctccttgtggagatgaccgtctcccttggggacgatgagaccgaagcctccttccttcctcttgtacaggacgttcatctccccggtcttctcgtctctgaaggcgtagaagttgtggtccacattcactagctgctccatcgcctcctccaccgacagcggcggcatctcgaacaccttggtgcgcaccaccttggtgagcaccgtgtcctcgtcctcggcgccgacggcctcctccagatccttgagctgggcctgggcgtcgtcgtcgttgttgtcgagcaatgatggcggccagtcggagacggggggcttggtccccttgaggtggcggacgtcggtctccttctccttgatcttcctgagcttcctcttgatgatggaggaggcgaggtcgatgctggcgtaggtggactcggcgtcctcctcggcgcggatgacgccgtggcgcttggtgaagagagtgatctcgcacctgcaaatcttgggacctcggctgagctcgccaccgcgggcggagaggcgcacgtccacctccttcacaagctggctgtgcttcgccactgctctccccgccttctcctcgatgtgctccttcaccttctcattcagcttgacgttgcggccctgcataatgaggcggaccgaggagaggggcccgtcccacgacatccgcacggacacggcgctgctgcggcggctctcggcggcgagcagcggctgtgggtgggcagcagcaggcagtgcgcggccaagcccacgcgtccgcccacgcgtccgcccacgcgtccgcggacgcgtgg

SEQ ID NO: 386354 - DNA, 738 bp, Oryza sativa
  unsure (1)..(738): unsure at all n locations
tagttgaactcggcgtccttcttcgncgcgaatgaccccgtggcgcttggtaaagagagtgatctcgcacctgcaaatcttgggacctcggctgagctcgccaccgcgggcggagaggcgcacgtccacctccttcacaagctggctgtgcttcgccactgctctccccgccttctcctcgatgtgctccttcaccttctcattcagcttgacgttgcggccctgcataatgaggcggaccgaggagaggggcccgtcccacgacatccgcacggacacggcgctgctgcggcggctctcggcggcgagcagcggctgtgggtgggcagcagcaggcagtgcgcggccaaggaaaccggagcggaggggcacggagacggagacagacggagggagctgcagctgcttgacatggtgatggtgatggtgatgggaaggaggcggcgcgagggccattgctgcggtggtggcgggagccattattccccaccactaatagctagagaagaagaacaatgctctgctctcgcagtctcgcttcgctagactactgtttgcttgctcttaataacaagagaagagagaagcttgagatggctggctggctggatctggaacgaattctggatggatgcacaaaacgaacgacgaattatctcccctaccactactactgatgaactactgatgagcagcagacgaccgcggacgcgtgggtagaaccaataattaaaaccg

SEQ ID NO: 386355 - DNA, 435 bp, Oryza sativa
acataaaatggtctttgattaaggattaatttggtactaatcaagcaggtcagagaatatgtatttgtcctcaaaacatagtgaattttataacaaagtcattcatactctgcggtagaaagggtaaagagcaactgcacatcctagacaacaaacagttatccaatccaaacgaagacgcttcaacaacgaaacacccatccctcctggcagtgaaggcggtggaggagaatcatcaatagaagctgcctcgatgcgccgcaggaacgatagcgtccggcttctgttttcaggagctgcaattatgaagtcaatgaactccataatctctgctctagtgtatctctcatctcttggtacaattccctctcgtggcgagattttgaatccatattcttttatctgcttagacattgccttgcttagtggaaacga

SEQ ID NO: 386356 - DNA, 978 bp, Oryza sativa
tcaacaaagaagctaaacgtggatctccgaatcgtttgtttcatagtgccaattcacactaagattccaactgtacatatagcaattaacaacaacacatttactcacttcgaaattactcatcgaatagataatatatatatatatacccctttcacttccatcatctaagaaaatatagatagctgtatacatacaagaagaagcagaagcagcaatggtggtcaagccgcggcggcggtgccttcctcctccttcttcttcttggcctcctctccctcctcctccttggccacatcgtcctccatctccgcggcgagggactcgagcagcacggacttagggttcaccatgggcgggcccttctccctcccctcgagctcgtcgagatcgaaggtgatgagcctgtcccagatccccccctcgaacagcaccccgaccttgccgtcggtgacgcgctgcacgatgccgcagtacatgtggtaggcgttgttggggttcttgacgagcaccaccatcccggggaggaacagcggcagctccggcgccctcggccgctccaccgtggcggcggcggcgagacctttcctgtgcgccggcttggggggaggcgggttcttggcgacgaagtccttgaggccgacctcgccgccggggaatccgccggtgaggcccatcatctccttgtcgaacgcgtccgggtccaccccggacgcagccggcggcggcggtggcgactccgcgggctcgtcggaagaagtggtggtggatggcggcgcggcgggggagtcggaggcgagctccttgcggatgccgacctcgccgttgcagagaccccggccgccgaggaggtcagcgacgcggaaggtcgccgagggagggggcaggcggacgatgcgggggtggtggtggtggggcagcggcggcgggcggaggaaggaggcgggggtggtgggcgccattggtgcggacgcgtgg

SEQ ID NO: 386357 - DNA, 446 bp, Oryza sativa
tttttttttttttttttttagagtaggaaacaactaatatattgccttgtacttgaggttctagcaggaaacagctctcaagtactcgtgagttgagaaaatttaaatgtacaagagtagcctcaaaaccaggacatcttctggccgacaataaaattatactcaaactttggattaatctaacctacttggggtccgaattcctactaacgtaatcttgccgtgtttttaccagtacatctcggctctctgaatccagtacatcggcacacatatggacattgcttcaatatatgtatatatagaaggtaacatactttttttctgtaaagaaatgtgggattacactacacagggagagggggtaggtaagctatgaccacccaggtgaagcgctgcgctgaccgaagatgtctggaatcccatcccagttccccttctccctt

SEQ ID NO: 386358 - DNA, 804 bp, Oryza sativa
  unsure (1)..(804): unsure at all n locations
ntgtggttttgagagagcaaacggatttagccatcacctttttctttactcagatttagcaattgtttgagcagtgacagacataaacattatcatccattgacaccattgacagcatcatagagtagtgacacataaactaaacatcatagctaaaacatgccgacgaagacgcgacggaacacggtcacatatgtatatgtgcgcgaatcaacgcatctatcacacggcacatcatgacacagtagtaataattcaaaacagcaagcagcagcaagtaagcacaccggagcgagcggcggcgggcggtagtagtagcagattcgggtgatgatggattcgattgcggttacttcttgaggctgccgcggacgccgggcttgggcttggaggaggaggcggcggcctctccgcaccgcggccgcgccggcgccgccgccagtggaggttgttgagcttgtcgggctcgaaggggagcttggggtggcgcgcctcgtggtggatctgcatggacttgatgtcgggggcggtggtcttgcagagagggcactcgagcttggcgtggccgcccttgtcctgccccagccggtccttctgcccggccttcccgccgcccctgttcgtcgtcgccgcgtcgatcttcgccgcgatctccttcgccgtgtgcttcttcggcttcgccttccccgtcatctccgcgcccccccgccgccgccgccgccccctcctgtctctctccgctctcgccgccgccgccgccgattctcgcggacgcgtgggcggacgcgtgggcggacgcgaaga

SEQ ID NO: 386359 - DNA, 392 bp, Oryza sativa
cataagtatgcatatatgtattgaatagtccattcagaatcaaacaacaatcaaccgcgtggaggttgttgagcttgtcgggctcgaaggggagcttggggtggcgcgcctcgtggtggatctgcatggacttgatgtcgggggcggtggtcttgcagagggggcactcgagcttggcgtggccgcccttgtcctgccccagccggtccttctgcccggccttcccgccgcccctgttcgtcgtcgccgcgtcgatcttcgccgcgatctccttcgccgtgtgcttcttcggcttcgccttccccgtcatctccgcgcccccccgccgccgccgccgccccctcctgtctctctccgctctcgccgccgccgccgccgattctcgctaacac

SEQ ID NO: 386360 - DNA, 1153 bp, Oryza sativa
  unsure (1)..(1153): unsure at all n locations
nnnttttttttttntttttttaccaatgtaaaggaaacatgaataaaaagcatctatacgagtctacaatcacatttgcggtagcagtagcgtaaagttaatgagaaacatcagctgatctcaaaagagatctctcaacatcgacgagagaaacatgtccaaacaagttcatagacaagggcgcttctacagttcacagccctggataccatgcgccagattgggcagagggaggtttaagcagctggggcatcggccatttcctgctcgacaggagtggcctcaaccgggtagtacttgtagtgcagctccccaacatcatctccagaaagcttcgtccagccgttcgggccaacatggtaaacgctaacacaaccaccacttgccccatcacggaatgtagcttggtaaatagcccgccttgctaactcagcagcttcctcaactggcatcacatagcggtaaccctcgtccaagataccataggcatacagagaacctgatccaacagagaatcggcttcccatgagccttgcgccctcactatcaacatagtacaagccaggacccttctcatcccatccagcaatcattgtaccaattgacagtcccatcccacggtaggagtacaggatgttggccaaaagctttgaagcaccagcaatagagatcctccgcttgttcgcgagctcatggagtcggcacttgatgcccaagttcctatgccaaaattgacaatcagcagcacctcctgccattgttccaagcatgtacggatttatttcaataattttcctcacagtttgcgaagatatgtatccgcccatgctggcgcgggagtcggcggcgacgatgacgcccttgtcgaagatgaacgcgagcgtggtcgttcccttcttgtgcttcagcatctccttggtctccttctggaacccgtcgaagtcggcggggcaggtggggagctccatggcgggcaggtcggcgccggcgccgaagaggccgccgtcgtccctcgccccggcggcgtgggcggcgaagttgttctccatggcggagacgtccagcttcatcgcggcgatggcggcgagaggcggaggcgatgcagtgagttttttctctctttttttcttttttttttttttcctttcttgcg

SEQ ID NO: 386361 - DNA, 528 bp, Oryza sativa
  unsure (1)..(528): unsure at all n locations
gggtacaccacaacatagcaggatatgatatcatcaacaccaacaagtacagatgattcagcaataatatcacacatggcatgttggtaaaagcaaacaagattcagaagaaaaaggaaaaacaaaagaagcaaaaatgtttctcatcatctgagatgctgcagatgcagaaaaacgagatagagcaaaggtggtgttagtcctcaggccgaaccatttggcccaacctttccttcttctgaccgatcagtctaacccgattaaaactttttaactctctatctctgcaaagttgcttgcatctccccccaactacgggcttgggaaaagatgcgaaaaaggtaactgtattcttttctaggatctatcccttcttattagccttcttcattcactcctagaatcttcacttcatctnccttggattctcttgataagcttttatcaactgctggacaaatatacttctagaacgacaggtgagacgccaccatggcctggagcttgtcccagtcggatgggatctcc

SEQ ID NO: 386362 - DNA, 822 bp, Oryza sativa
gtattaagaaggccttgagtctgagtggcctgaatcagttgcaattaacaatgataacagataactgaaattgaaacgcccaatcacacttcagacttaaaacacgttgcaaatgcataatggtagaataagaaacgtcatcaacccagaatgaataatatcagttctatgggtcgttccaactttcaaacgatagcatacgaaccacttaaaaagctaaggacgcattagaccattgaggcaatccagcacagggacatgctatgtacacaggaggttgaccatgacacctggccatccatgtttatttacagcagcagcaacagttgatgaattacgcagagccgaatgtgttctcgccactgtaagtcatgtagaggaagccgtcctcatccttgttctcttcgtagattgcagacatcaaagaagcagttggcggcaatgtgttcttcacaaagacaaagatggccttttctgggctaagcttaatcctcttccgaaccacatagacaaactggccaacagtaagatcagcagggacaaggtacttctttttgtcaatttctggaacatcggtcttgtcagccttctcaacgatcaccggaattctgtctgagtacttctcacggatcctggcagattctgcttgcctcctttccagtgggtgctcgagcttgaaggaagtcctggccatctccaaccgatcgaaggggcgctgccgcggaatcgatagatcgaggcggggggcgaatcgatttggggggcgagaagtcgatcggcggaagcaaccggaaggaaggaaggaagtcgccggacgcgtgg

SEQ ID NO: 386363 - DNA, 575 bp, Oryza sativa
aaattataaggccatcttcatgtatagttaaatgtgggatgataccacggttcgctgtttccgacatgaattttcgacttctggccgacatcggtagattcccgttccaacggttccgtttccgatataccgacattaccgatatcgttaccgtttccgagtatgccattccgattccattttcgagaaaataaaatgaaaatggaaatggtagagggtttttccgaccgtttccgaccgttttcatccctacaccgaggatcagcttcagtgccctcgaggcaacagagcgaagggactcttcgtactccaggacagagacgcctccagatgaaagcttgaaattctcttgccatgcccttctgactgtctgctgcgccatcaccagatcgtcccggatttagcagtcgatgaaatggtcgatgcagtgaggttcaggcttcagttgcgccatccatatgacctgctcaattgcggatcttctgattccagggtgtacgcttgcttcagttctatgtgaatttgcttgcttcaggattaatttcagcttctgtacaaaattccttaagccgatt

SEQ ID NO: 386364 - DNA, 517 bp, Oryza sativa
aattcgtggaattgaactgttagtgttgggtgccataaacatactatacagatacagtgatgcagctttgacaacatacacctctgaattgtccactgttcaattcaagcgattcgctccgcacatcactaagatgtgaagtgttgccctattcgtaagcctggaaccccaggcgcgcctgtcaatactattatctacaaacagtttatatagtggtacaagaatttctgaactatgacgtgcattttaatcaaacggatcaattcgagggtcgtgctcacttgccattgccatccccgtgcagagacatgttggacacatcacctttcctgcgcctgaacaatttgggcacctctctgttcttggcgtagataaaggctgatcaccatcgctgaatgttgaaaccggttcagtaagcaccagagttccggtacttgaacagcgagcacaggccaggtatccagttcctaaacaatatttgcaccgcttatgctcctgctgtttgacatcggacgcg

SEQ ID NO: 386365 - DNA, 609 bp, Oryza sativa
aaaaaaaaattaatccttcaacacggtacagtactgatcacattacatcggcagttgcatattgcatacagtaatacagatcgatacatgcatggtaggcaccttatttgcactgaaatgaaaatacatcacaaacatagttacagtagtagcttagctagttcgcccttgcaaacgccagatcaagaagcgtccggaaaaacttgtggggatagatgggtggtttctccgtcagtgcctggtgaatcagtacagtggatggagtcatcccaggaacagtgtttacctctatcagcagtatctccccattctggacattaacaaatgcgtctattcttgaaaagccttccaatccgagagtgtttgccaaagtttcgatacaacttttgcacttctgcagggcttcctcgctcataattgttgaaggaggtggtgtcaagttgattccagttccaccttgaaatttctcctcaagagataaaatgtcaccactttctttgactgtgatacttggatttagtgacagcatttctccacgtttgccaactacaccaacagtcacttcaagccatttattttcccccttccataccagatgtcgggtaaaaa

SEQ ID NO: 386366 - DNA, 1392 bp, Oryza sativa
  unsure (1)..(1392): unsure at all n locations
nnnnnnnnnnnnnnnnnnnnnnnnnnnnnaattcacatgcgcgtatataataaataaatgggacactaaagttgtcaaaatacagcagaaaatgggaaaccactttatagtcgacgaatcgtcagtataatatctacatgcatctcatcagatgagatcagatcgagtacaacaagatggcgtatgcaggttgcgcatgcatgcatgaaaatcgagataaaaagggattaattaattattaacatatatatatccatcagtagacttccacattccattgctccgacttcttcagctgcttcttgtagtcaagccagtcgatgccgtcttttgcagcgaggtcgatcatgatgtcgtcgatgcctttctccatgcccttgaggccgcacatgtagacgtaggtgttgtccttcttgagcagctcccacagctcgtccttgtactccgccatccgcgtctggatgtacatcttctcccccgccgcgttcgtctgctcccggctcaccgcgaagtccagccggaacctctccggcgcgatctccttcatccgctcgaactcctccctgtacagcagcgtgctgctggtgggcaccccgagaaagagccacgccaggccgttgaacttgtagtcgtcgtgctcctcgaagaacatcttccacaggaaggacctgaagggcgcgatgccggtgccggtgcccagcatgatgatggtggcgttggggtccttgggcatcagcatctccttccccactggccccgtgatcttcacgtccgaaccaggcttcaggtcacagaggaagttggagcagactcctttgacgatctctccctgatcgttggtgtacaccagcctcttcacgcacagcgataccgtcttggagtcggcgaagtccccgatggcgctgctggcgatggagtagaggcggagcttgtggggcttgccgttcttgtcgatgccgtcggggatgacgccgatggactgcccctcgcggtaggggatctcgccgtcggtgctgaacaccatgtgccacgtctcaccgggggcgtcgtcgccggtgatcctcgtgttcaggaggcaccgccccgtgtacggctccttgggcctgtacttgttcgtcaccacgccatccacctgcttcttcgacaccttctccaccttagtagtcacctccgcagccggcgctgcggtcgtctccgtcgtcgacgcctgcgcccgcacgccattaccgctgcttcgcttggaccagcaacgaggagggtagaatacggagcaggtcgacggcctcggagctcccccggctacggcggcgccagctttgctacagggcagcgacgacactgtgttcacggcggccatgtctgtgtgcctgtgactcgccgacaaaggaagga

SEQ ID NO: 386367 - DNA, 495 bp, Oryza sativa
gagtcaaaggacttcaataaacaaatgttcagtcaagtacatggcattttaacataagatcctcggtttttctcttttcttctagtagtataaaatagctctgggtgaggagttcaacttaaaagtcggtagggtatttgtcgggtttaaaccacagggagaaatcaattcctttcttcttaagatcttctgtggcagggccaatccgatccaaaagctgatcatgtacaacaccattggaaacaaggacagaacgatcaaagacggtaaactccccaccatccatgcgtgacaccatcccaccagcttcttcaactatcagaacaccagcagccatatcccaaggcttaagtcggtattcccagtaggcttctgtaatgcctagggcaacgtgggacatgtcagcagcagcagaacctagtcttcgtactcccctgctaatgtctgtgtattccttgaacaaatttatgttggtcacccatgccggacgcgtgg

SEQ ID NO: 386368 - DNA, 484 bp, Oryza sativa
  unsure (1)..(484): unsure at all n locations
nnnnnnnnnnnnnnnnnnnnnnnnnnnnnnnnnnnaaaacaacaggaggcattccattcattcaaggtcatggttatcggtatgcgttcaggtacaaagtagtacagacaatggcgggggcggcatgcggttcctccaaccagcacggccggcaccgtggaatatgtaggttctatacatgcttaaagccaagagacaaaaggcaacagagattttgtctcctgatgttgggggtgtgtacatcatcgtatctctaaacataggatgagtattacactgaagaagagaaaaaaaagaaagcacgagaaccctactgacctcgttcagttgccttcgacaacaggaagctctctctctctgcgcaggagttctgctgcgtcgcaaaagacaccacaaaagatgtatggagggaatggcggaaaactctggttccgaagctctgctgcaacggcagtcactcagggtatcgccacggcccgatggg

SEQ ID NO: 386369 - DNA, 1361 bp, Oryza sativa
gaggactagaacgttttttttgtcttccaggtgtgaaatacaccctggctgtggtacatcactgtactgaagcacagtatacatgtgacaactatatcttcataacagggagaggaattccaagcaaaaacttctgctgggtctaatctatgcaggtatcggtgaatggcattttacaaagacttttgtagaattgacagctatactttggctacaaaggttttgatgtaattttaggctacggcttctgcccagaaaacatgatgaacgacctctggaccttgctgctgtaattaacaagaccgcaggatttgcacaagtcttcgagctctccttcggtgaagtaattgtagctggtgttaactggtccaacaatctgtctcagtggccgcaacgcttcaacagagaagggattgttcctgggagaagataagaaggttgttgctacaaagacaccaccaggcctcaggactcgacttatttcagccaccgcattcgaaggggagggccagcagtggatagcagctccagcatgaatggcatcaattgaagatgaagcaaaagggagtctcgaaatatctgcccttacaagagcaagatttgtgtttacaagagtatcatcttgctgaataaattcataacactggcaaagcatattctcggagaagtccaaagcaatcacagctgagtacgatccagattttgcaaattttcttgtgaacaagccactgccacagcttacatcaagaagtacaccaccagcaactgattggaaataatcttgagccatttgaaactcttcgtcaagtccagggaatccacttcgattgaaattttgacgccaccctctttcataaagaaatgagacgagtgggctcctgaacagctcagttctagctggcttcaattcactatattcttttgttccagaagtgacagtgagatccaagaagatatctttgctggtgaatgacttgttgcactttgaacatttgaacccagacctataaattgatggcaagtttatgcccgatgggcctttccttatcaatggctcatagcaaacagggcatgcaaacacctcggcttctgaattgttactctgcggtactttgttttccggctcgacggcgatcgcggcggcctcgacagccacccggcgagcggggaggcggcggtggccaaggaggcggagcggggctcgggcccgcgggagctggagcgaggcgccggaggagcaggaggccgcggcggctgctctgaccgcgagctccatggtcgggcgcaccccacgcacgattgatgatttcacttgcaacgttgcacgggaaaaaagaccggacgcgtgggcggacgcgtgg

SEQ ID NO: 386370 - DNA, 449 bp, Oryza sativa
tgataatggtaacccgcatctggatatataatattatgatcagtaaaggggcagtaccaaaacctggtagacagtcgacaaatggagtaacaacggacatgtttaaaatgaattttgcggtgaccgcaataacaagttaattggcctggatgctcatactgtacaattgcacaggcacaactttaacctaaaaaaatttgaatcgctgtcacgaaatgagaaaaatgacggtgaaccaaccggcccggtaagagatgtcattctcggaactggctgcctgacctgactatggggactagaaatgtaatctatttttgcggatggtgatatgttgccgtcactacccccggacgcgtgggcggacgcgttttgtaagccacatcccgaatcccatcttcctctttcgccaaaatcgacagcccacaccatggcgacgattgaatgtctta

SEQ ID NO: 386371 - DNA, 579 bp, Oryza sativa
acataagtttgcagactagctgcaaagcgattagcattgcacattaaaatggatctggtcttttaagtgtgcacatgaatatataacataacagcatagacaaataaatttcaccatcatataactgattaacatagcctaccaaataagattgcaatttagcactggggaacaagatgcccttgacaatcttgcaaaacatcctctgtgatttccgccaacagatctggctcacaggacatgtcacagactttcattctctcgcactcggcaatgtctctgtgaagctcttcaagagcttcatcatcctccctaactaagttgttcaagccaagagcgaagtcatagtccttagaaggatcaaaatagatactgtcatcctcacataaacccacaaactcaatagccatcttctcagagataataagtcctttactggcaatttcctggtttcccacaggacatttcctcgaagtctgtttcacgccctcggtatgttccaatagctggatgcacaatcttagttcctttgcactcacaatgaaagcacctaccacggacgcgtgggcggacgcgtgg

SEQ ID NO: 386372 - DNA, 1525 bp, Oryza sativa
tttttttttttttttaactgttgttccaacaaaacccttcccttcaattcaaacatataggcaggcacatcacaagtcatattacaacagcacaacaatgaatcctagtcctaatcaaagccactctcatcagatgtgtgcaacctctcaaccaaatacattctacattggtcacttgtttgttccatgtcactgtaaaaaacaaaaagaagagagaaacaaagagtggggagaaaaaacaaaagtgaacttcacaagatgtatcatacaatgagcggtaaccatttcgcggcgaattttacacactgagcgaaggaacctctagttgttgttgcttcttctgttggccccctttcatgtccttgggctttgcctttggaggaccagctgcctttgccttctgcacccttgctaccggtttcttttgatcaggaggagatggtgttacggttttcttatgatcaggaggagacagtgctaccggtttcttctgatcaggaggagatgctgctaccggtttcttctgatcagggggagatggtgatgacttcttcttaggggcttttcgatcattgatgttgttgcttagactgtttgagccttgcaggcttcagagctgatgggtttgtgctggcattttccttctttgcctgtcctttcttcaggttttcggggtgggaccagtgatcggggctcccatggccgggccgctatccatcaggtccatccagctccaaccccagccacccttgccaacttcatagttgaagtttccaagacttgtggcagaccttgctctccactgatgattgaatgcatatgccatagctcgttcacgctttactgcggcttcttccctttgttggatcctcccaagtatttcctccatagtatccgagcctccattccactcgacctgcaaattttggagttttgcttcaagtttcatttgattttcttgcttcttcttcctattgcgcccttcagtgaccatgaaggcacgccggtttcttcggaatctctgcctgcaacttgttccaagactgtatgtagttcaatgtggcagctgcctgcttgttaactggattggcctgcccaataatgtgcaatcttttaacccccttgagacatctgagagttttctttgccttgtagcatctaaaggcattttgaattcgagtagctgcccattcctctagtgctgcattgtcttcagggtcactactagaggaaggaccattattagacttttgatttgttgagtttggcccattgggtacctgaccggcaacctttgcgtgttttgacttgccacgtttagacttcttcttgctgatgatcgtcttgaaccagtccccagaccccatggcttcaatcagagtgagcctcacagattaatccttgtccaacccccttgctgagcttcagaaggttgcagtgttggaatctgaatctgatcagaagttgctctcagaaagagaacgggagacagcagctcaggaaaggaagacatccattggaagca

SEQ ID NO: 386373 - DNA, 1172 bp, Oryza sativa
  unsure (1)..(1172): unsure at all n locations
tnnnnntntnttttttttttttttaaaaaaaagagatggtactgtactatgcttgtatctgaaatcctgaacaatgtgtgcgtgtgtggtggtgttcatacgtgtgatcaaatctatgcttgtgtatatacgaaacttaaaaatggtttcatcaatctaccatgtagtgtatacgtgcatatccttcatcagtacatttgaatctttgtgaactgtgatgatacgtatacaagcatcatgtctgaagtcacagacatttctgatcttctcttcttcttctctatctgcagcagcagcagttcaggaggagagctggtcctctgcggcggcggcggcgggggacgccggcgccggcgacgaggcgtcctctgtggcgggcgcgtcgacggcgggctgctgctggagcccgaccgcgcccaagggacggctggaacttggcgacgtagtagctgagcggcgggccggagtagacggtggcctgcggcggcggctggttcttgccgacctggatgaggatggacgacacgccggcgacgaagacgagggcgaggccgccggcgatcgccgccgtgttctccgacccgtccgccgccgcgcccgccgcccccgagctgatggcgctctccgccacgtacaccgtcggctcgacggagtagatgttggtttggccggcggtgtccttctcgacgtagccggtccatcccttcttcttgggagggaaggtgccgaccaccttggtccgctcctccgccagccactccgcgctcaggctccccacctccttctccggcgcgcactcctcctcgttgcagtcctccgccgccggcgccggcggcggaggtgaagaaggcgacggcgacgacgacgacgacgaggcgttgcaggacagcaggaacagcctcccccctcgcgcgaggctcgccgccgccgacgccgcggcctgtggcttggcggcggcgctgctcctcaggaacgcgcagcagctggtggtgctcgccgacagcatcgactgcgccgggcaagccatctcgctgcgcgccctcctctctactctctccggaccaagaagaagaagaagaagaagaagaaggaggaggagaaagggatggcgtggctagctagctagctagttggtggaatggtggagtgcggacgcgtgggcggacgcgtgg

SEQ ID NO: 386374 - DNA, 440 bp, Oryza sativa
gtgttgcgcgtgtcctctgagaccgtcatcctctctggaggaagtcgacacttgtcgtctcgcagcatcggtcagccccctcctctcggggcatctctgttcagccccccgcggcccgcgcggagtgagaagcgacgcgacgacgacgacgacgggcgttgcaggcagcaggaacagctcccccctcgcgcgaggctcgccgccgccgacgccgcggcctgtggcttggcggcggcgctgctcctcaggaacgcgcagcagctggtggtgctcgccgacagcatcgactgcgccgggcaagccatctcgctgcgcgccctcctctctactctctccggcccaaccagaagaagaagaagaagaagaaggaggaggagaaagggatggcgtggctagctagctagctagttggtggaatggtggagtgagcggacgcgtgg

SEQ ID NO: 386375 - DNA, 513 bp, Oryza sativa
ttttctaattgaattgaattaggcgtggtgcatcaatatcaatatttgatctcagtattcagtagtacaaacaaactatgccaaatgtgcaggcagcaaatttaacgtgagcggaacaaattaaagaatagctgacataatatgtccctactatatttacgaactactacacacttataatcacactggaagtactgaacactttagtatggttgagagtagacaataacttgttgcggtgatttcagtcaaatggagcactatcatcattacctccagtaaattggttgtcggcatttgccagttcgtggctatctgggagaaaggcctggtctgcctccaccacatgcccatagattagtcctgacggttctacatttggatacagatcactgaaaatcggatagtcccatggaccaactccatctgttacaggacaagaagtaccagcagcgtcagctgtagaggtgctggcatatccactgtgccgcccacgcgtccgcggacgcgtgg

SEQ ID NO: 386376 - DNA, 793 bp, Oryza sativa
tttttaattgtctaaaacattggttattagaacaccggtatatccaaatcgaatccaaacacggacaggcgccagttgatttctggcatctttagtactcgaccaacagaacgaatcagctacatgaggaagaatatcatgtacaacccaacaaagtgacaaggtgtagggacgttggcatcaccacaccctcacgggagaagtttctgcacgatcagcgtcagcatcaaaaagatctgtagttggcacagctaacagtttcagcacaagctacaccacttcacattacgttggagcatcgttctcctgccgttttgcttgatccctgccgtttttttcttgatagatctcttgagaaatcgcacggcaaataaatgggggtaaagcgtgctatcatctgcaagcaccatggcccgtacgaccgtggaattgcagttcaagccttgctcaagctgtaactcaagcatttgtacaacttagctgctactatcggccacgcgccatctttcgcctcttcctctcctgctcacgtctttcttcctcctcaatcaggcgaagttgctcgtcatcctcctcctttgcaattctcgcgcttctttgctcttccatttctatagtagcaaaatctgcttccatgtcgctatcatcgtcatctctgcctgcatatttactaggatcatacctaaacatgctcctgatcattgccaacggatcttcctcatcttcgctaagatcattaaatcttcgtttcatcggttcggacgcgtgggcggacgcgtgggcggacgcgtgg

SEQ ID NO: 386377 - DNA, 752 bp, Oryza sativa
gggtggggctcgaaacaacacattttcaacatcaagctgtaccagaaaaaagaaagcagatgtctacaggtccaacaggcagtacaaaaaaggtgatgcatgcatcacgatccgatgcaacagcgccgactgtatcgcctttctaggcatctaagcacatccagatccacatagactgaatggcaactgacaactttcttgtataaatcacacccaactcaaaaagttcttgcagtgaagtcacacactagcacgctccattggcatccatggcggctcctcctcctcctcgtcctcagcctcatgtcatggtgcttcccttccctgcgcaaggccatgtcatgcctctgatggagctctctcaccggctcgtcggcctcggcttcgaggtcgaattcgtgcacaccgacttcaaccgcgaccgcgtcatcaacgccatggcgaacgagacgggggcgatccctgatgggatccacatggtgtccttcccggacggcatggaccctgccggtgaccgtgccaacatcgccaagctgggtgacggcttgccggccgccatgctcggcggcatcgaggagatgatcagatcggaggggatcagtggggtgatcgccgatgtgtccatggcctgggtgacggagctggccgccacggtgggtgtccacgtcgccttgttctcgacttactccgccgccgttgtggcgcacaggctgcaagtccccaagctgatccaggatggcgtcctgcacgaa

SEQ ID NO: 386378 - DNA, 709 bp, Oryza sativa
gataagaatagggggtggagaggggaatttagaggaacaagggaggaaaagggcgggagggggagagtgggtgagtaggggaggggggaaaaggagatgtgaaataggaaaaggagagtatggggtttgttttttttgagcgcaatatacacaagctgacaagcatttattaagaagcacctgtttaacatagttaatcaacatgcataatagcccttctccacacccatcaccatcctgatcttgtctacctgaacataacaagtttacatggcaacattgcacaaagctgtaggcatttctcacatgagcatatatcccttcctgtactcactccataataagcaacacaagtagcaagcattacattatttttcttctctgctgctctatggtcctactcaaaacttgcaggaagtgcccagccgctgcttcatccgctgccctgcagccgccgcacgctcctgcagagcttctttcagcagctcctggaacttctcaaggaatatattccactcttctgcattcatgtccgacagcctgacgaagtatacacttgatggaagctgttcgtctgcactcctgttcagcgcatgcacactgcccgtagaacccgttgatttattcacaactggggaacttcaaccctccagaatggacacgctccgatgaacgcttggaagattcacttcggccatcatcatcatca

SEQ ID NO: 386379 - DNA, 1286 bp, Oryza sativa
aaagccaaagagtaatcatgtttcttcttgcaaatattgttaaagcagttcatttccatttttaaaaggcatcttcagatacccaaacattgatgttcgacatgtcgccacatatttgatgctctgcaattaaaaggaaaaaaaaaggccctaatcttggaatcaggtacctggtttcattacagcgacgcattatttcgacatttcaaggggttagccaatacagatttccgaagagtcacagcatagcccagttctgtccagaaaatagtacagcaactttttttctgaattcatattgaccaataagaacaagtgggtagcttgaccattccatgtacagatctgagattcttgcgtcgattcatcattttgaagggttcatcagcgagaaagaagatttatttttttctgagatcatcttccacagggactcttcaagaccagcgtaatagctctccaatttgatctattaccatcggtcaggaaatgttgcattcctcatatcagtggatccctattgacatctttatacagcaagtacctcgtcttggtttttccaagggcagcgtaccattgaggcacaaacggtgccatccaaatggtgtcccctgattgcaccgggtaccagctgtctcccaatcggtatattccttgtccctctaaaagcagcaacccatgttgattgtaatgaacctccttcacattaagatattccccaggctgaaaatccattatatggatattaaagtcataaggcagagaagtgggtagcagcttcctcaactcaaatacctctcctggggtttcaagaaggggttgcttatcagttgatccaacaatgagatcaggatggtaaccctcaatggttgtgtacctcctctcaaagattacaagggtagttacttcatctgagatcacagagtgtttcatgtttgcaggaagataggcataagagtccaccagcagagtatgggtattcccacctctcctcagacaatagaatgcttccttggagtacaaagataagcctttcaacaccttttggtggtagggctgattttgatccatcatgcatttttgccaggtacattgtgaaatgtgccccgatagctggactaattaaatatgctcctaatgtgttgatccagtcaggcaaagggctgaatacatggctctctggtgtaatcaaagcatgatcccttttgtaaacactacgtgtgaagccaggtaaatcctgcaggtgcgcgggcgccagagtcgggttggtaaccttccagtagagc

SEQ ID NO: 386380 - DNA, 462 bp, Oryza sativa
  unsure (1)..(462): unsure at all n locations
nnnnnnnnnnnnnnnnnnnnnnnnnnnnnnnnnnnntttgaaccaaacatacatttaacagagtactcaggggttcaaaatagatctaaaatatggtgactagagggtagcatccaaatccagccaatccgtatttccacttccacagcaaccagttgaaatttcggttgcaatttacctgccgatctagagcgctgagcctaactatatgaaagtccacatctttacagcaagcttccctggcaaatcacgggccactgatcaaagtttgctactctgctcagagaagagatgcacaaaaaatggccgcgtcgcttttcgatttacacacggacacagccatggaagtagctggagatacctagaaaggtttcgcctcggactgaaatgatacggtatcaatctcaacaggccaaaaagcttccagacgcatttccatctactgccgtccttcttcctcaa

SEQ ID NO: 386381 - DNA, 430 bp, Oryza sativa
tagaaattttgacagcttgaggggaagtgaaaccgggcgagcttagagttagtgacagcagtaacaataataataatgaacattaatacagcataaccaaaaggtagcagcagacgaagctactaccgtgtttcgatcaaggacaacgttgtggtatatgatgggttaaaattggctgcaatcactaaaatcacatgtccatcctgaatgtctcaagtctctcaatcgaggatcctccagccctgttttcgcaagcttcagatgtcatttgtatacacagattatcagcattgtggtgagggtgatgattgtcgcggttgtgaagatagcctgccgcaaccgccgatgcagcaagaccagggcgctctcggggatctttgttgtagtacttacagcagtaaagagttgctgcatagtaccagatcaacgg

SEQ ID NO: 386382 - DNA, 501 bp, Oryza sativa
ttttatgccatagatacttagtattagtgaagaactattataacatatctctctcaaaagaaattattgtacttctattctactagcatgttggggagtagtgggcatacatgctccaatgagtataaatttggcagccatgttggagtacaaagtagaagacatgcatgaacacataaaccatgttcattacagttcaggagggtattgtgtgaagccataaaccatacgtacaactgaaagtattctatactgattatcatagacagattatctcacaatccatgcttaagaattacgtctgcagattccagtgatggactccctttgggctacaacggcaaatatccatcatgccttcactttgatagcgggagcacgagatggaagttgctgatagcaggaaatgagtgaggtgacgaatccaaatgcccctgttacccttggagtgatcttcttgggtgacagctgaagaagccctaccgccaccacaacatccat

SEQ ID NO: 386383 - DNA, 636 bp, Oryza sativa
acgaggctacgagtaccaattgagaaggctccaaacagcttatagtttggatggtaaacaatattaatagttttacacatgctaatgtgcattcgtatgaatccaaatccttggcgaggaagaactaaaaccctatgcataaaataacaatagcaataaacagctctggaggagtaggtcaagatttatgggaaaacccgtatggaattttgaaaccttttgtagcatcctaaaagttgtggtagcaccctacaaatttacaacgttccacatctggtggatgtaatgaatgaaaataatgaatcggaagaatatgtaagcttgttagttaacacaattactacttgacaagattgaacctcagaggctttatacaattgtgacttcacaaaaggcacttgataaaatcttgaaagagaaccttgccctgctccatgtttcttacggatggatagaaacttcaattagaaccatgacctgacattttcttctctctgggaggtatcttcagtaaactcttcatcgtgtcatatgcggtaaaaccaatagccacagagggtaccaccttgatgtaattgaggctcaagccagcaaacaattgcctccatccctgcgtttgtttgatgatcataagac

SEQ ID NO: 386384 - DNA, 948 bp, Oryza sativa
aattaaagagaattttgtgtattacatggaaaatcatcctcataagtcatgacattaaattttgttcagaacatcatgcacaaatgtaaactaaactatagaaaaaaaaacatgcatctgaagttgccactatcattgccaccatcttccatattacagtcatcatcatattcacaagggatctttagatgacagttgtccaccttgcagtaaccatattgccccagatcatgatccatttatcttgtcaaccttataagcattagaattattcttcccttgttgcatgtgatcattctggttcatgtttcctttattcttatatatagtagattgcttggttggtagttgcaaaaccttgttctgaacatggatatttgtgtcctccattgaattgtcagcgataaagtttgttgtgctgcactgtcttttcttaggagcagcagttggttggttttggcctagtctaacatggctctgagcattttttttctctttctttattcttggatgcttcaacaacttttcgtgcattcatcacatggttttccttgttagttttttttttctgtgcagaaataaccttcctttgtttcccatagtcatgttgttcccaattttgtttgttcttgtcttcaacacattgcttggtttttggttgcaaatcctcatttggaacatggctctgtatattcatcatattgttttcctcctgaaccatatcgttttcctcctcagcaatacaaatttcttgcaagggatggtcagaatacactctcctccttttcgaaatagggccatcaacactagcttctttgtttgtagatactcgatctaaacctccctgattcattcgttctttttccaacttgtttgtcttcgctttcaattccaaaagctcagcatcatgattctgcgacatgattttcgatctttcaggacgcgtgg

SEQ ID NO: 386385 - DNA, 1766 bp, Oryza sativa
gaccggaacaaagtactatatgatcaattatccatcttcctttcttcagattacataacccaaacaggaacaagtgcaaactgaatgtctgtattgtgctgctgaaagcctgaaactgaaccaatttccatgcagattccagttcttccagctgccattctcaactagtatatcttctaccacatcgcatgaaaaattgctaccaatttcagatatgtacactcccaaaaacaaccaaatatgtctatgtatacagtatacacaacacatgaactaatacataaatatgaacaatcagtgagtactgtcccagttctctcagtcctctaaatacaaaagccagccagaggggaatagaggcctctaattattataatattattatattagagtgtatttacacatagtataagcagatattgaaaaggaatagggcctgcaatattataatgttattttctctaagtaccatatatatagatagagccaccaagagaaacccagttctcaatttgcccagatttcaaggcggtcagggcagctacgttgtgaaactagtggtggaacaagggaaggtgtcaggatggcaccttcatgcatcttacttgcaagttgagaggatcaaattgcaactcttcgcagatatcttggaggaactctgccttctttggggtcgcagccaactcattgttaaagaatttagtaggtctgaaatactcgagccttgacatctgtgatgattgcttctgcttcgtacttcgccagtccaaatatattcctcagttgattcaaagccgcaagcttgtcatcgttaagatgtccatctgaaagtacctccattgcataggcactatagagcatctttagatcctctaccctcttttcatgatcactgtctccacctaatgtaataggcccaagcccgcggacaaatctttcttctcccgggaaattgctcagtactgtaagcataccattaaatgaaaggatgcttttcacttcttcaacaacctgtgttcggttattcaagttgttcaaggctgttgaaatgttttcttcaactaacttctttgcatgctccctgaacatctcagaagcaatctcatcagaaagtttatatgctagttgtgatctccttacttcaattaatgtgcctatgtcaagacctctcccaatagacttgagcaatgatgcatataaactcttggcactttccctcataacatcgtctatctgagattcatgaaccccgaaaagacgtttccatggaagtaggtattcatatgcatcccgaaacacaagatttgttacaaatataagcttttcaaatgcctgctgttgtcctacaccagcattgcgatcaatgcgtttagcaatctccatgtgcacatttgcagcatctatatcattcaacccaagggcctttttaaactttataatagtctcaacttcagtaccttcaaggtcttcatatcctggatgaattaatgagaaaacaaacctgccatacaaatcacagagctcggccttgaaggttgcatcctctgtgtaacgccgtatttgctcgcgatggcctccacctcgctgctctccagcttggtggggtcgtcggagccggcgacgtagttgtgcagccccgccgcggcgaccccgggcacggcggagttcaccgccgcggcgcccgcgacgctgaccgccccgagcgccgccgcgcccgccaccgccgtggtccgcgtgccccccgcgcgccccggacgcgtgggcgc

SEQ ID NO: 386386 - DNA, 408 bp, Oryza sativa
ctcgctcttttttttttttggactgaaaagagactagatacaagttatctttaaagtataaaggatagtgacctcgatgtattgcttgctatacacagctgctggcatcttcaggagaaagatgcattttcgtgactttttcggagctagctcatctcggttaattacaggccaggctgacaacttgtttttaatcctatctaacaaacagcgagaccaacaattgggagaacagaataaattcactgacaacaacagcaggggagtgaacgcctagaaagggcacaacatcaacctgtagccaattctccacagcaagatccgactgtcgcaccgaccgcaagacccccaacagtaatcaatgccgctttacctgcacgcagctttttctttgtcaggaaatacaat

SEQ ID NO: 386387 - DNA, 797 bp, Oryza sativa
ttagtacttactgagtatgaagttatattgcatagcgtagatgtgaatatgaatatgtgtgtgatgaggaggatatatatatatatatatatatatgtatgtatgacaagtaaagtgagagaaatacagtactagctagtacaccaacagaaacactaggccatctttgccatgacctcctggaggatgatcttggtgtcggcataggaggagccgatctgggtgtcgtccttggtgccgcaggccttctggaggcgctcgaagctgtcgaagaggcgggtggcgaggtcgagcagcggggggcgctggtcgtcggaggcggcggagatgagcttgtcgaagtcgaagtacatgaaggtggacttgaggcggaggtacttggtgacgtagttggccctgtcggcgttgttgcccagcaggtcctccagcgccagcaggtcgaacgccgtgctccgcagcctgtacgcgtgcgccgcgtagctcggcccgatgtcggctatgtagatgccgttcctcacgaacgtccggctccccgtctcgccattgttcagctccttgttgacaatctttggcaccggcaaagggaactcggggagccaccacccattgtttgccggctcgtcgtcggtggcggcgcaggcgggatgatgctggaagatggtggcggcggcggctgcgaggccgacggagaggcaggctgatctccgtccgccagtggagcacgccgccacgaggaggagcagcctccgtggtgttggccggaggaggcggctgcccacgcgtccgcggacgcgtgg

SEQ ID NO: 386388 - DNA, 823 bp, Oryza sativa
  unsure (1)..(823): unsure at all n locations
nnnnnnnnnnnnnnnnnnnnnttttgcaagaaacctttttcagctaattacattttataattaaccaagagtaagttacatgtagtatgccaaaaaatccggccggcaaagtaaagttagtgtacaccaagaatcgaaaatatgaacatcttacagcatgttccattcctacaaaactagtgggatttaggcagggagagctgccggcgtggctgggggaacccggttctcgacagggatctccgtgaactcggagagaatcgccctgaactcgtcaccactcaatgtctccttctcaaggagcacctccacgatcttgtccatggcctcccggttgctcctgatctggctcaaagcgatctcgtaggcctcatcggacaaccgcttcacagcggtatcgatgtcctccgcgagcttctccgacatggagttccttgccatcatcctcatgatgacatcgccgctctgagctcctgagtccattagcgaccacggaccaatgtccgacataccgaatgtaaccaccatctgcttggctaggccagtaatttgctgcaagtcaccagcagctcctgtggtcacctcaggctccccaaaaatgatctcctcagcagcacgaccgccaaggccaccaacaattctggcgaacagttgttgcctggagatgagcgttgggtcgtccattggaatgaaccatgtgagaccacgagcgggacccctcgggatcaaagtaaccttttggacagggtggaaaaatntcctttttgcgctngggggccaagaggaggagatttttncaaatgngccancccngcaaccagga

SEQ ID NO: 386389 - DNA, 727 bp, Oryza sativa
  unsure (1)..(727): unsure at all n locations
gggnacttccaggatttgtccaggcttccgggttgttccggatnnggntcaaaggatttggtagncttaatnggacaaccgtttnanagnggatggatntcntccgngagttttcggacanggagttcctngccatnatcntnangaggaaatcnccgttntgagntcnngagtccattagngaccacggaccaatgtcggacanacngaangtaaccacnatttgctgggctaggccagtaatttgctgcaagtcaccagcagctcctgtggtcacctcaggctccccaaaaatgatctcctcagcagcacgaccgccaaggccaccaacaattctggcgaacagttgttgcctggagatgagcgttgggtcgtccattggaatgaaccatgtgagaccacgagcttgacccctcgggatcaaagtaaccttttggacagggtcgtggccaggcgtcaaagttccacaaattgcatgcccaacttcatggtaagcaacaagacttttgctcttcccatctgtcatcacagttccttccataccagccactattctgtcaattgaatcatcaatctcctttgaggaaattgctgtccgaccacgtcggcccgctaatatggctgcttcatttagaagatttgccaaggcggccccggacttctgcctttgcactcgaggaccaatgccgtctggcccgaggaaacctttgcacgcccggacgcgtgg

SEQ ID NO: 386390 - DNA, 1288 bp, Oryza sativa
aaaaatgatctcttcacaagcacgacggccaaggccaccaacaattctggcgaccagttgttgcctggagatgagcgttgggtcgtccattggaatgaaccatgtgagaccacgagcttgacccctcgggatcaaagtaaccttttggacagggtcgtggccaggcgtcaaagttccacaaattgcatgcccaacttcatggtaagcaacaagacttttgctcttcccatctgtcatcacagttccttccataccagccactattctgtcaattgaatcatcaatctcctttgaggaaattgctgtccgaccacgtcggcccgctaatatggctgcttcatttagaagatttgccaagtctgctccactaaagccaggtgttctcattgctatgacttcaagagagacatcagtatcgaacttcttgttgctaccgtgcaccttaagaatctctgtccttccgcgtacatcaggaacatcaacacttacctgtctgtcaaaacgtccaggtctgagtaaagcagaatccaggatatcagccctgttggtggcagcaataacaatgattccagtgttcccctcaaaaccatccatctcagtcagcaactgattcaaagtctgctccctttcatcatttccaccaccaatacctgtccctctttgcctcccaacagcatcaatttcatcaacaaatactatgcaaggagcattctcctttgccttcttgaagagatcacgaacccgggaggcaccaactccgacaaacatctccacaaactcagatcctgatatcgagaaaaacggcacaccagcttcccctgcaatagccttggcaagcaaagtcttaccagttccaggaggaccaacaagcagaacacccttagggatgcgagcaccaacagcggtgaacctttctggtttcttcaagaactcaaccacttccatgaagtcttgctttgcttcatcgacaccagcaacatcatcaaatgtaacaccagtgttgggttccatctgaaacttggccctagattgaccaaaaccaaggggaaagccaggaccgttaggtccaccaaggccaccttgtgctcttcttgacagcaaaaatagaccaccaataaggataagtgggaaagccaagtttccgatcaggttgaacagaagagaaccagagtcctcctggttgctgtgtgcagcaaaatcgatattcttttccctcaacttctggagaagctcctcggacgcgtgggcggaggcttagaccaggaagctgcacacgacggacgcgtgg

SEQ ID NO: 386391 - DNA, 473 bp, Oryza sativa
ggatgcgagcaccagcagcggtgaacctttctggtttcttcaagaacccacccccttccatgaagtcttgctttgcttcatcgacaccagcaacatcatcaaatgtaacaccagtgttgggttccatctgaaacttggccctagattgaccaaaaccaaggggaaagccaggaccgttaggtccaccaaggccaccttgtgctcttcttgacagcaaaaatagaccaccaataaggataagtgggaaagccaagtttccgatcaggttgaacagaagagaaccagagtcctcctggttgctgtgtgcagcaaaatcgatattcttttccctcaacctctgcagaagctcctggcttagaccaggaagctgcacacgaactctctgcacacggttgccgagctcaggagaaatagcctctacaatggcaatcgtgccattctcaaacaaatcaaccttcttcactctgtccttg

SEQ ID NO: 386392 - DNA, 768 bp, Oryza sativa
cactaacttaaaagaggttccgtgggataacatgtaaggtactcttctcggacagaagtctttacagtagatctacattttaaagtctctattgcatatagaagagaacatgatatatagtttgtagcatcatgcatcgagtctaagttagctaagcagttactactatatcggtaagcctggctggggtcgggctctgcgttgcagattattatcctagaatcccgcttcattcatcatccagacagaagctgcatgacatcctacagaaggggaacctgaagcaacagcaatcgtcccaactccagactcgccaaaagactctcccaagtaagcattagcggatggtttcctctctatccatcaatcagtttcttccatctcatcatccgtctgtgcattctctacctcactacctctgctcataccattatttgccgccaagaagtaatccttcactgagctcgcttcaaccttgtacttcacaaacttgaccacatttgcgtcttcagccccgcaatccttccttttcctcatgccattagccatcgccttcatagactgagcagcagccataaaagcattgtctgctgtttccatctcaacagcttcttcatcctcaccagctcttgtgtccataacctccccactgctctgcttgtcaattaagaaaaggtcagcatctgagtgagtcatcctgctctggtaaccattcttgacctcgtcatacatcagcctctccctaatcctggaaacacggacgcgtgg

SEQ ID NO: 386393 - DNA, 812 bp, Oryza sativa
taaccaaaacaggttcaattacatcgatacaacatcagtacattgagcatatcatcgccgaccaaaatccagccaacgtcattgtgaccaaaatgacgtcacttgtccaaatagtcgtttacattcaccaacaaaaacaaagtcacatgtccagatcacacccaaccccaaaactagtcatctcagcatgaatcagcatgaggctaaccacaacgagtgttaaggccaatcagccgacgaaggtcatttgtctccttcggtgacttctttaaaatttcaatatcttccagctgttgcttccttgcttcgtgtgattcttctacctctttcttgatggtaaaatagtatttattggttaatacagaagaaaccaactacatgaacaaaacagatgggtgaatatctattcatgcaaacagtgggttaagttcaattactcagaaatgtactgtaacgcatatataacttgtatcgtgcatgtattagaacaatagtgtggaatataagcaacaatacctccctgactactatatcttatctagagaatccaaatgtttggatgcaaatgtggtatgaatatatattgaacaattaagcaaatgcgtaaaaagtaatcccatctaaaccctaaacatgtatacaactacaagaaagcttgcggcaaaaaactacaagaaagctgtatagttttgtactagtcctcaactaaatgtcatacaactcttagcttgtttcattcatgttgagagcccgcaaaatacaaggtttaaaccaatcaatacataaatgaattacgataatcggacgcgtgg

SEQ ID NO: 386394 - DNA, 966 bp, Oryza sativa
  unsure (1)..(966): unsure at all n locations
nnnnnnnnnnnnnnnnnnnnnnnnnncagattgaaaaagaaacttgcttaaaaaaggattgagaaaagaaacatctcattagttccaaataaaacctacccccaactcacaccatcgatgctcagcttcaatacaaacttttcaacttttttctatggaagaagctgcatcggggagtttttaatacccctattttcgggagcagttacgcccaattaaacatccctcacgcttctcgaaactcgaaaatcgctcaacaatcacatcaccacaacaccaccaaccaacaaattgaagtctcccaatcaatgcatcaatgcagagtttgagaagatgcggtccaatttgtgggcgagcagccgaggacgatggcgagctcctcgagccccacgcaaccatcgccgtcgccgccgccggccacgcgtatcatggcgcggatctcctcgtcggccgccggcatcccggcccagccgaggtacgccttgaggtcgtcgaaccccaccttgccgtccccgtcgcggtccatcacccggagcacgtcctccatcgcgggccggcaccccgcccccgcggcggcgcgccccagcaggcgctcgaactcgtcgtactgcacgaacccgtcgttgtccacgtcggctgcggcgatcatggcggcgatgtcctcgtcgtcgaaccgctcgctggtggccgcccgctggcgtagaacgacttgaggtcctcccggctgatgcgaccgtcgcggtccgcgtccagcacgtcgaacgccggcctcaggtctcccgccgccgcgcaggcggggacgtcgaggcccgcgtatctgcctccgggacacatggctctaacgcgaaggggagaagaggaaaacaaaaactctggaacaatctgtggcctcgacggattcttttggatctctccgccccccacgcgtccgcccacgcgtccgcccacgcgtccgcggacgcgtgg

SEQ ID NO: 386395 - DNA, 1803 bp, Oryza sativa
  unsure (1)..(1803): unsure at all n locations
nnnnnnnnnnnnnnnnnnnngaagaaagaagaaacccaagcacaatgacatcacaaactgccacagaaaatgcggcactgtacaccacactacacataagcatcccacaatggcgaggaagcgcaatatttacaattttgttccttcccgtcacgccttggagggtacacggagtgaaggaaatacaagtaattttttcagtacttgaaaacgaaaagatcccgataaacggagcaggaaggacctagtaaatgctgttgagaatagtcccacattgaaagtttagggggagtggcaccaacttaaaaggggaggggtccctcacctcatgagctagcttttggggtgtagaaaggctttctcccggttgggccaacgtctcccggttttaggccaacaaatgctaccatagactttacttattaatctggcttcaatccaggcccttgcaaagctatctacatgaagccatccagatgattatttacaggtgatcatgtagtgtccagctactcgggtcgaacgcttatcaggttggggagcaccgtcgcctgcagcttcttcacctcacttgtcgtgaccctgcaggaatcaagcgacagcgagcgcaggttctgcagatccttcaggtggcggaggccggcattggatacacgagtgttggagacgttcagcgagactaaagcagttaagccagaaatcagctccagggttttgtctgtcaggttaacgttctgagaaagattgagttgcttcagagctttgagatccttgatattcttcactccagcatcagtaattaacccaccgcagacttcaagagattcaagattcttaaaaaatctgaagcagcttgtgccatagtccgttatcctagcaccaaaaaggtccagatgagtcaacccagtgagacttgtaagtgctgctaagccaacatcagtaatctgccgattgtcaagattaactgactccagtgaattcagtgcagatatcttcttcataccggtatcagtaactaacgtaaacgagagattgatgctttccaaattccgaaggccagatagatgctggagtccactgcttccaacttcggtgtcagatagctccaaacttttcaaaagcataaggcctctcagatgtaataagccttcatctccaaccttgcatgagtccaagtttagagattccaaattgatcaactctttcagatgtgctaaacaatcatctgtgatattattgaaccccaagtttaaaaccttcaattttttaagaccttgaaagttttcacagccttcaccgtatatgccacaccgactcaaattcaacaccaccagagaagccaatcctgatatagcttccaaacaggcagcagtcactggacagccctccaaattcaactgtgttagcttggacaagcctctaagataagaaacacccagatcagtgattctacaacaagccaattgcaattctttcaaatttgtgagatctgataagtatttgatatctgaatctgcaatgttgttacaatatctcatattgagtgactccagattcctgaggccttttaagtgaacaaggccaccatgaatctttaggcatcgttcgagatcaagatttaccaaattaactaaattagcaaatgcttccattgcttcagcagtaataccatcgctgctcttgaaactgagagatgtcaggtttgaaagacctgacaagattcctaggccatgctctgagatcatatcgcagtaattacatgccaagctctgcatgtttggacaatctctaagaagatataac

SEQ ID NO: 386396 - DNA, 748 bp, Oryza sativa
tgtttgttgacataacaaactgccacagaaaatgcggcactggacaccacactacacataagcatcccacaatggcgaggaagcgcaatatttacaattttgttccttcccgtcacgccttggagggttcacggagtgaaggaaatacaaggaattttttcagtacttgaaaacgaaaagatcccgataaacggagcaggaaggacctagtaaatgctaccatagactttacttattaatctggcttcaatccaggcccttgcaaagctatctacatgaagccatccagatgattatttacaggtgatcatgtagtgtccagctactcgggtcgaacgcttatcaggttggggagcaccgtcgcctgcagcttcttcacctcacttgtcgtgaccctgcaggaatcaagcgacagcgagcgcaggttctgcagatccttcagggggcggaggccggccttggatacacgagtgttggagacgttcagcgagactaaagcagttaagcctgcaaaccgggcaatcatgtcatattgtcatgtgataacagcacagatagacaacaatagagtgggcacatagggacgtcatatttgacacggaggaataataccagaaatcagctccagggttttgtctgtcaggttaacgttctgagaaagattgagttgcttcagagctttgagatccttgatattcttcactccagcatcagtcattaacccaccgcagacttcaagagatacaaa

SEQ ID NO: 386397 - DNA, 990 bp, Oryza sativa
ttgttcgaactgatacgcagactagtactattgtttgtaaattagtgcacaataacgtctcatcgaaataggaattcttatacagctatcttttgacgctacacggaagttcgacgctgggaaagtttgactacaaatggactcaacatatgacaacacaacatagcaagttttaacaaacttggcgcattccagcaagtaggatctctcagccatggttgaaggactggtaaaccggaacctgagaaatcatatgcccaagattgtcatagcaatgggggtatatcattgctggagttggccactgtgggtagacagcagttccagaagaggagcccatagataaatcgggttggccaaagtacacagaaggttggtttcttgacatattagcagactgcataaaaccaacaccatactgcataaactgtggcacaacaaaattgaagccaccaggactcacattgaagtcgtgcactgggcccctaacatacctcttgtagttacgatcatagtcaggatcactacgatccttttcagtgtccttaaaaacagcaactctggaacggctgttcattgtgttcaccttattctcatcaacaggaggctcaacattaattggttcatctctcgcaacagataaagctcccaaatcacttgtgccttcaatatcagaaatggaaccgttgaaaatgcgtgctcgtgctttgttgtattcctctatcctctcttcaacagttcttgctgcattgttcttggcaccggcatcacctgcaccattttggaaagccttgggccttggacaaataacaaacttaagcttctctgcagcttcatgctcatttcttgcttgtttgctgggaacttctgacaatgcaataactggaagtttgctttcagatgttttctttgcaactatcttgctaactgaaccatctactaagctatctgctactgtagtctctaaaccatagtgttgtgcaacacgat

SEQ ID NO: 386398 - DNA, 532 bp, Oryza sativa
taagctttggggccggtatatatgagtatattgattagatttaaattaaacttagagattatattctaccataacaaaccatacaatacgattttatccatatactctgataataaagacaagggataaatatcatcgcggccattctagtacgttgctttattaacaacaaataaggtacacaagtagttcttaaatgattatcgttgaaagggcccccggtccccaggcaaataaagagcatctgagaattttcgtcacttgtggccaagatgctggcctgctgggcatctgcaaattttcgtcagttagttctggacaagattctccacatcggacaggaactggacgaacgcagcgtgcgacgagcccccttcctccagcgccgcctctgcctccttcttccgcgcagccgaacgagccctgagctgcttcccttcctccgactccatcaccagcctcaccttggcctccaactcctccgctttgacaaagtccgagttgtacccgtccagctccaccccgacgccca

SEQ ID NO: 386399 - DNA, 767 bp, Oryza sativa
tacacaattatcctcatgaataataatggtattttcacataaagttcttctttttcccgggtacaaataacatcgctacatcacctgcaagatcgtcatcaaaaagagagggagaaatgtgccgctactcaaaggaacacaccatccatacaattgtacatacacaattctaactcgccattctccactggccctcatgtactctccttgctactggacgcctcgagctccttctcctcgccaccgtcgctaaccgccgtctcggttggaggcgggggctggtcgccaccatcagcagactctttcttcagctccgtttcgaactccttggctgcctgctggaagctcttgacggtcttgccgatgctgcggccgatctcgggcagctgcttggggccgaacaccagcgcggcgacgcccgcgatgacgaccagctccgggacgccgagcccgaacaggcacttgcaccccatcgcgcctcccccccgcgaccccgcccccgaccccgccctcgtccgcgcggccaccgccacggcgagcccccccgcccctcccgtgacgaaggaggacgccctcgaggacatcccggccgccgcgacgcgtgcccggcccgccgccgccgccctccccgcagccgcacacggaggccgcgcgagggtggaggaggaggaggaggacgggtaggtcgcgaccggagccatccccatggcggtggcggcgaccttaccttagctgcggaggcggagaaagggaattcgggcgaagca

SEQ ID NO: 386400 - DNA, 1202 bp, Oryza sativa
ttttgaaaaacaaataaaaaggaatactatattacatatatgaaataaatccgatcgagtacaaatatgatgtagggtgcaactaagttgcatcaaagaactgcatacagaaacctactactcctgatcaaagagtaacaagcagatgatcagaacccagaataatctcgcctgtacagggctagaatatcagagctaagcctatgaacagatatctgacatgatcgcatgaacatgccaatcaattacgccgtgcaaatcgatcgatcgatcgaatgaaatcaggcgtatccgcccttccacgcggcaccgcgataggcgccgcggttgtccctccggttgttcctgaacgcgcagcagccgagggagtagacgatgacgatgaagacgaggaagacgatgcagacgacggcgacgcgcttccagtcccgcttcagggtcgccaccgcgccggccttgcacgactggcagttgtagcacagctgcgtgccgtcgtcgacccacgtgttgcagtccgggtccgacgagttggtgggcaccttcgtccagttcgtgccgctgacgtagaggaagttgcagctgctgggtggcttgcagcatccggactcgagcggggagaggtcggctttgaagaactgggtccgatcccagttcttgtcctgcagtttcttgcagaccttggagtcctggaggcagctcctgatcctgttccagttcttgctgttctccatccgcttctgcagccagttggagtagtcgccgagcctgtactccttgtaccctctgccggagacggcctcgccggcgcccttgttggtgacgacgaaggcgaagacggtgaagcagaagaggacgacgatgaggacgaacatggcgacgaggtagaaccagaggaggcagttgacgcggcagcaggcgccgacgaggcccgcgagggagacgaggaggaggaacaccccgaacgcgatcaccggcgccgagaagtagcgcccgcactccgtgccgtcggcgcgcgtcgccagccagatgccgccgcccagcacgggcaccgacaggaggaacgtcaccgcgttcaggatcccgagcaggctgttgctcagccggaacgccatctcccacgccggtggtggtgccctctctgcgcggtttctgtcggggttttcttgggcccccgtcgcgtacggtgattttctgaggtttcc

SEQ ID NO: 386401 - DNA, 1189 bp, Oryza sativa
agctttgaagaagcttgccttgtgatatataacagactgatgagtcatatatatacatagcaaatgctggcttgaacactctcacttactttcagttctattggtgagggcaacatacggagcaaccgcgcaactggaagcgacgaccagagaattacagtcatcaaaactacattactacatgcatgtacagcagatgacattgaccatcgcatctgttcgagctcaggtcagctcacatacacgtttggacgagtcagcttacacacagtggaatgcccacacagcgaacgctatttacccattgttactgagcacatggttagcttgaccttaaatggtgagtggcagctgatgcttctcaccgttgggcgtatgtacgcagtaagctttctgggttcaatttccccccttcataagtttcgtgtgtcatatatcagtacataatagaatccccgtgctgaagaaaaatggtgtgtgtagccatctagtttggcaactcctcggatcatgtgcctggaagaggtccacctgagctggaaagtgttatgaatgcccagacgacagagagcgagaacacagaaacccatgtgttttctgtgtacatctccatggcatctgtgaaagagaagcgtgctcgactttcagcccaattacggattctatcagcctctgctgcatatactgctcttccctcttcatcaaaccatcggcctcggcgaacccatgcagtaaccaaggcaagcaagatccttggtggtgtcaagtagtttatcgcctttccacttcctttcacaactcgcatcctcggaaccaatgtccttgcaactgtttctggaagctcacatattaaattgaacatctgtttatttctcagagaagaaccgctcaaaaggaggtccgtaaggaccattccaggagaagcagtgtgtacaccaacttttgatcttctgctttccttcagaagtgatgcttgaaactgtctaaggccacacttagttgaaccataaacagctgttaatggtgtacttgatcctccagaacctgctccatccatgttaaatacgtgacctcccatttgttggtgttgcatgacattcatggcttctctggtgcacagtaaagagccagctaggtttgttgagacaatctgagaaatatcttcatctgaaaagtttcggacgcgtgg

SEQ ID NO: 386402 - DNA, 1497 bp, Oryza sativa
tttttttttttttttttttaaccttgtgaatcattaacaagtcgtaagtaaatatatcatatattcgattatatatatatatataatagcagacaggttacatccattagaactcagaatcaccggaattgaacatcaaaagtacaacacaagcagcagcagcatcagccagcagcaaacgacatgattacccacgcttttggatgaagaacaagaagtacgagaagaagaagacgatggtcgaacaccttgatcgagctcaacaatggcgatcgatcaccaatcacctacttggtgaactcgatggcccaggcgttggcgtagatgtaggtggccttgaagccggtgaatccggcggcgcgggcgagctccctgaactccctctcgtacctctccttgccgccggggttgtgggcgagcatgatcatgtcgacgtggaacaccccctgctccctcgccgtcgcgtcggagctctccggcagcacgcactccaccaccaccaccttcccgtgctccggcagcgcgtcgtagcagttcttgagcagccgcgcgcagtgctcgtcgctccagtcgtggaggatccacttcatcaggaatgcgtcgccgccgcggggcacggaggcgaacatgtcgccgccgacgtgctccaccccggggaacggcggcgcctcggagatgacgtgggggaggtcgtagttgatcccccggatgtgcgggtggcgggagacgacggcggccacagtggcgcccacgccgccgccgacgtcgacgacggtggaggcggcgtcgaagccggtgtagaggtcgagcagcttcttggtgatgatgacggagtggttcttcatgccctcgttgaagacgcggttgaagcgggcgtccgtgccgtggtactcgaacgccgtcatcccgtacgccttgttgaacgggatgccgccgtccaggactgcgtccttaaggtagtaccagctctccatgaggaccttgtcctggttcatgagggcgagggcggccatggagacgccgtcctcgttgggcgtcagccacttgcacaccggcgcggcggcgtagcggcgggagagcttgccgtcggcgccctcctccatctcgcacctgacgacgttgtaggaggcgagcaggcggagcatgcggtccaccatgtcggccgccgccgggttcgccttggacggcagcttgtcggccacctccgccggcgtcagcagcgccgccttcccccctcctccggcgacggcggcggactgcagcgtctcgagcaggcccagctcgatggcgttcttgagcgtcatcggcaggatcgacgacgacgccagctgcagcgcgtacatgcacgcctcctcgtcggccgccgcggccatgtcggcggctgtagaacccatcctagctagctaactctctctctctctgccggcgatggagaagaaggaggaggaggctgatcaccggccggacgcgtgggcggacgcgtgggcggacgcgtgg

SEQ ID NO: 386403 - DNA, 895 bp, Oryza sativa
  unsure (1)..(895): unsure at all n locations
nnnnnnnnnnnnnnnnnnnnnnnaaatatatcatatattcgattatatatatatataatagcagacaggttacatccattagaactcagaatcaccggaattgaacatcaaaagtacaacacaagcagcagcagcatcagccagcagcaaacgacatgattacccacgcttttggatgaagaacaanaagtacgagaagaagaagacgatggtcgaanaccttgatcgagctcaacaatggcgatcgatcaccaatcacctacttggtgaactcgatggcccaggcgttggcgtagatgtaggtggccttgaagccggtgaatccggcggagcgggcgaggtncctganntgccctctcgttacctntgccttgncacgnccggggttgntgggacgagcattgatcatngtggacgtggaaanaaaccccctgntaccgtncgnncgnncgngtncgganacnctgccgggcagnnantgnantcccanncanncaaccanncttcacccgtagctccgagcagccgcgtacgtcagcagttccctttgagcagccggcgcgcagtgctcgtcgctcacagtcgtcgggggggtccacttcatcagggatggcgtcgccgccgcggggcacggaggcgaacatgtcgccgccgacgtgctccaccccggggaacggcggcgcctcggagatgacgtgggggaggtcgtagttgatcccccggatgtgcgggtggcgggagacgacggcggccacagtggcgcccacgccgccgccgacgtcgacgacggtggaggcggcgtcgaagccggtgtagaggtcgagcccacgcgtccgcccacgcgtccgcccacgcgtccgcccacgcgtccgcccacgcgtccgcggacgcgtgg

SEQ ID NO: 386404 - DNA, 493 bp, Oryza sativa
  unsure (1)..(493): unsure at all n locations
cgagcatgatcatgtcgacgtggaacaccccctgctccctcgncgtcgcgtcggagctctccggcagcacgcactccaccaccaccaccttcccgtgctccggcagcncgtcgtagcagttcttgagcagcttcttggtgatgatgacggagtggttcttcatgccctcgttgaagacgcggttgaagcgggcgtccgtgccgtggtactcgaacgccgtcatnccgtacgccttgttgaacgggatgccgccgttccagctgcgtccttaaggtagtaccagctctccatgaggaccttgtcctggttcatgagggcgagggcggccatggagacgccgtcctcgttgggcgtcagccacttgcacaccggcgcggcggcgtagcggcgggagagcttnccgtcggcgccctcctccggcgacggcggcggactgcagcgtctcgagcaggcccagctcgatggcgttcttgagcgtcatcggcaggatcga

SEQ ID NO: 386405 - DNA, 699 bp, Oryza sativa
acctcaagagtacaaaaaaagaatgcaccgcgttacgcgttaatgcggggggatcacatcatcacaagctgcacgtggaaactttctcatgtgcaagccatacatacattcacttgccttccgtgaagctttccattttacttgatatggaaaaagttaaaacagaaacgtgcaaagaaaagttgaagtcagctatggacatatggacctacttttccaagcacaagattgtattggcttttgcccccagtggagaatcgagcactccacggtattaacttcacactggagcattcgtagggcctggtgttagtcattctttgagtacccagctttcacattcatcaaaaattgtatagagatggttgaattaatcatgacaatctgcagatataagcaaccttgactactatcctccgatcagtttatcactgggcgtttgttcatcatcaatatcaactgaggagacagacacggccagttcatcaaactcatcggtaagatcagtctcaggttctggttcagtagcatctgccagtgcgctcagcatggtgaccacctcaaacgtatcatccaggtaaaatttggccttgcttggtttctgtcccacagtgcatgcaaacaatgatgtgtttgtagcaaccataccctttttaatggtatcagcaatgttttcacggacgcgtggcggaggcgtgg

SEQ ID NO: 386406 - DNA, 1426 bp, Oryza sativa
  unsure (1)..(1426): unsure at all n locations
nnnnnnnnnnnttttttttttttttttttttaatgtaagcctgtggttttattgcatgatttgtcgggtaaaaaaaaattactaattgtacatcacttgacaggcctctctcactgaaagctgaaaccccctaaaccccgaagaaattaacagttgaaacgaatgggtaaataataaactcagacgaggccgacgagcttctcgctgaggtcccagagcttcctggccttctccgggtcgctggcctcctgcgagagctggttctcgaacgacgccgagtccttgttccagctccagtacacgccggacttggtcaggctcgggtcgcccaccacctgcgccagccgcttcccggactccgcctccgacacgaaccccttcgtcacgaaccgctggaacggcgggaacagcagccggaacagcgggatgtgctcgcggaacaagcccgtcgtcgcgatgcaccccgggtacagcgacgcgaacgtgatcccggtctcctcgtggaatctccggtggaactcctgcatcgtcagcatgttacagatcttgctgtccttgtacgccttggcgccgtcgaagctctccgcgccgtcgatcatcgccgacccgttctgcccgcggagcccgccggcgagcccccggaggtcgcctagcccggccttgggagggacgttgccggcgagggtgttggtgttgccggtgatggagccgaggatgatgagccgccgcgacgggtagtcggatttcttgaggtcgtcgagcatgaggcgggcgaggaggaagtggcccaggtggttcaccccgacgctcatctcgtacccgtcggcggtgaacgtcggctgccgcgccgtcggccggtagatggcggcgttgcacaccagcgcgtcgagcggcatgccggagcgccggaagttgtccacgaactggcggacgctgtcgagggaggcgaggtccaggtgcatgacggtgtagctccccgccgccatccccgccgccttcgccgccgtcgccgccttcaggaagtcgcggaacgccatcaccacgtgccacttccccgtctccgccagcgccttcgccgccgcgagcccgagccccgacgacgcgccggtgatcaccaccaccccctgccgcagcgtcttcttcccgtccgccttcgacgtgcccgcgccggggctcgccaaccggcccgccgcgtcgccaccgccctcaccaccagcgacggcttcttggccttctggctcacgctaaggaaccccggctccttcaccaccgcgctcaagttacccttcttggggacagagagagcagagggcaggagtgcggcctgaacttggagagccattggtgtgagtgtttgagtttggagtgagctcaagtgtactatgtttctggtgtccttttgcggacgcgtgggcggacgcgtggg

SEQ ID NO: 386407 - DNA, 1064 bp, Oryza sativa
tttcctttttttattttttaaaaaaagcaacttcctaaagtcgcgacagacgtgtagcggtttggattctttttgagaaggcatctcctctttcttttttggagagctcagaggcagctagagatgatctttgatagggtacaaaactacaaattactcaaaaactctacagagatcatacaacttaaaagaaaaaccatctgtagttttcgatcacccaagctcttattaccaaaagtaatcccaaaaaagaaaacacttgagttacatcttacaacaatcccatattcccatcccatgatccaccagtgaacaacacaactttcactctgcaccatcatatcgtacacatcaagctgatcattaacagctaagtaattcgtgagaaacgcgtcctacaaattctcctccatcgatctttcttggtagagaggagaagaagaagaagagcacagcaaaatcctagacgaaaatcaatagcacatcactctcactcactgatcgtgatcggccaagccgacgagcttctcgctgagctcccagaccttcttggccttctccggatcggaggcctcctcggagagctggttctcgaacgaggccgagttgttgttccagctccagtacaccccggacttggtgaggctggggtcactgacgacctgggcccagccgcttgccggcctcctcctcggagacgtagcccttggtgatgtacttctggaagggcgggaagaggaggcggaacagcgggacgtgctcccggaagaggcccgtggtggcgatgcacccggggtagagcgacgcgaacgtcaccccggtctcgccgtggtaccggcggtggaactcctgcatcgtcagcatgttgcacaccttgctgtccttgtaggccttggcgccgtcgaactcgccgccgtcgatcatggcggagctcgacacgccgtcgaggcccgaggcgagcccccggaggtcccccaggttcgccttcggcggcacgttccccgccagcgtgttcgtgttcccggtgatcggacgcgtgggcggacgcgtgggcggacgcgtgg

SEQ ID NO: 386408 - DNA, 343 bp, Oryza sativa
  unsure (1)..(343): unsure at all n locations
nnnnnnnnnnnnnnnnnnnnnnnnnnnnnnnnnnnnnnaatgtaagcctgtggttttattgcatgatttgtcgggtaaaaaaaaattactaattgtacatcacttgacaggcctctctcactgaaagctgaaaccccctaaaccccgaagaaatnngcagttgaaacgantgggtaaataataaactcagacgaggccgacgagcttctcgctgaggtcccagagcttcctggccttctccgcctccgacangaaccccttcgtcacgaaccgctggaacggcgggaacagcagccggaacagcgggatgtgctcgcgggaacaagcccgtcgtcgcgatgca

SEQ ID NO: 386409 - DNA, 1058 bp, Oryza sativa
ccaaggaaacgtcgttaatttcattaaatgttactggagtaccatgtttcagacaaaaatacacgtataagaataagaaatcaccatgctactaatatattcatgctgctactacatttttgcacgtgacgttcaagccgacaaggctgtagctttcttgcaccggtaggaggtagccgctgcagagacgctatcattccggaccgtcccctttgttcaacgaacaaattgtccggttttactaaataaaattcgtatagcaaacaccatgtggagccatgaaaacaatggcacgatagatgccatgccaggattttgacaggatgacacataccgggcagggaagtgagcagaatcaatgaatgtaacccacacgtctcattattttctttttcatagtgagtagtctgatgtgcctgcgagctatcacggagcaagactacacaatggaacacctaaatagtttcaacgttactcctttcaaggtgaccgaaccatagaagggggcaaaccggatgacaccccccccccccccaaaaaaaaataagtatgaaacagaaagaacaaaatttctttgctgacgactcaactcaactcttatgctacatgaacataacctagatgataatagacaagggtgtagatttcagagtactacgcgactcgagaatattaaccacaaccaaggggatgtaactttgcacagcacggtgtagaaacatgggccagagagaaacatcagctcgatgttatccattcttcaactccattcatatgagcataaaccagactagttacaattaccatcagctttgaacaacttcgcgtctactgtcttcttggccgcccgcgtgcccgccttaatctatctctccgaaccagagaacgcatcaaataccccacagcaattccaccatgttgcccgctgccctgctgcagccacagccactgcaggtccccgggccacctctgtagtatcagctgcacccagagaccgtgacaccttcaccacattcttgaccaacaccccaccgctcttcgtctcccattcctgcacc

SEQ ID NO: 386410 - DNA, 513 bp, Oryza sativa
  unsure (1)..(513): unsure at all n locations
nnnnnnnnnnnnnnnnnnnnnnnnnnnnnnnnnnnnnnnnnggacgaaacagaattcatggcattcagagcacacgcaggaaggaaacctaggttgttgatagataaacagcagcacagggtgtttgtttgtttgttgttgcttttgctgacaggacaggcctagctacaaaaccaagatccagccacaaaatttgcccaatcagtcacaccgccacgggaagtaaaaacatactgatggggcatacggattcatgtcgaaacccccatacagaacagcattatcagataatttaagcacacgagttctcaagcttcaagggcacctcctcctgatttcatcttagaatcgaccacgcccacggccgcgaccacggaatggtcccggtcctccgccccttcttcccctgccacgtccacggcctggaggggggtagtcctctggttcttcaaagtattcgccctgatcttcataatagtcccccctgccgccataaccgtaatcatagccata

SEQ ID NO: 386411 - DNA, 1461 bp, Oryza sativa
  unsure (1)..(1461): unsure at all n locations
nnnnnnttttttttttttttttttgctagttatatcatatatattagatgaagtttagtctcccttgtatcacatcttacagtttcccaatcccaatacattgcagcttacgcctgtacgcgtgtatccaactatccatattgtaccaaaccagcgttgataacaaaactgaaaccgtctccgcttgctcctgcccaccggccatggcggcccggccggtcagccgctcgcgtcgcgcagcaagcaatccgtccgctgtccggaaaggacggcggcgagctcagacgctgacgagcttcttgccgaggatcatgtcgtcggtggtgaagtcggccgccttcctgaacgtgccgcggccgaagtcgaggttgtacgagtcggtgaggccctccaccaggtcgtaactccggcttccacccgagctccaaggtcgccttctcgattgacgcgaagaaatgctggtctctgaaggggaaggccttcttcttcccgaaatcgaagtccttggggttgtagtggacgatctccggctcggggaatcctccagccttggcgcacgcccgtgctagaccgtcgaaggtgacgtacttggcgccggagatgttgaacacctgcttgctcgccttcgggttgccgagcgccagcacgaacgccgtcgccaagtccttgacatggccgagctgggtgatttggttgccggcaccggggacagggatggggcggccagccttgagccggtggaagaaccactcctccacggggttgtagttgagcgggccgtagatgtacaccggcctgatcgacgtccagttcacgtcccgggtctccagcaggctctccgtctccagcttccccttgtgccggctcttcgggtcgacggcgtcggtctcgaagtgcgggagcaggtctgatttcaggtacactcctgctgatgagcagtagatgtactgttcaaggttcggcaatgcgtctaggattggggctacctcaacagcttctctcccgtttatgtcgtaaacaacatcgaagccctttgccgcaaggcttgtcttaacgaaatcaaagtcttgcctgtcacctttcaagtgcaacacctttgaagagaactctgcatactctgcatctgactctcctggcaactgctgggtaatgggggcctttcctctagtgaacaatgtgacctggtgcccctccttgacaaggagcctggacaagaagacaccaatgaacctggttccccccatcacaagaatgttcttggagtctgcagctgctgctacctgcatccttgccccccttggctgccatgacctcctcctagcctgggttgagatggagagtgctgcactactgaagtcagagataggagatggtagcaggaggctgctcttcagggaggctgttgctgccatctctctctcttttttttcttgtttaccggacgcgtgggcggacgcgtgg

SEQ ID NO: 386412 - DNA, 760 bp, Oryza sativa
ggatcacattgattgaatctaggctgggtgaaccaatataagatgcatgattagaaatcaaagtgagatcgacgaatcgagagaaaattcgctacaaatctccactcagatgatacaaatacacagtgagcacgacaagcgttcaattatgcatgcagttgtgtcatatcacaaaggttctaggtacaggaatgttttcatggctggccaatcgatcgatgatcatcatcagatcatcaccatttccagaagacgttggatccgcacttgtacttctccttcccctcgcactcgatctcgagatcatctgagatgaatgggactttcttctgcttggcgaggtcctggcagccggtgaagttgtaggggaactggcagctgccgaactcgacggtgtacgccctcgcgaagttggcgccgctcgtcgccagcctcttcttgtcgttcagctccttgttggccttgctcttctcgaggtactcgtcgaacacgccggccttggcctgcccggcggcggtggcggcgaacacggcggcgagacccagcagcgcggcgcgcctgccaccgccctgctcctccttgggcggcacagcgacgtgcacgcgcttcggcaccggcgaggcggccgacttcggcaccgccgcggcgggcttgaggccgacgacgctggtgctcactccggccatggctcgagctgcgcgtgtgcaagaatttggttggttggagacgacgaccaggacggtgtggtgatggtttattg

SEQ ID NO: 386413 - DNA, 712 bp, Oryza sativa
tcctgtatactgtacagcgctcgccctttttttttttgcgagagaaattttttttcaaaactccactcaatggttccaaattccaatttagcacaatacgtgtccaattatgcatacacttatatattatcacaaaggttctagggccagaaatgtacacttgggtggccatgcgatcgatgatcataatcaaatcatcaccatttccagaaaacgttggatcctgacttgtacttctctttcccctggcactcgatctcgagatcatttgagatgaatggaacttttttctgcttggcgaggtcctggcagccggtgaagttgtaggggaactggcagcttgccgaactcgacggtgtacgccctcgcgaagttggcgccgctcgtcgccagcctcttcttgtcgttcagctccttgttggccttgctcttctcgaggtacttgttgaacacgccggccttggcctgcccggcggcggtggcggtgaacatggtggccatacccagcagcgcggcgcgcctgccaccgccttgctcctccttgggcggcacagcgacgtgcacgcgcttcggtactcggccatccgcaccacatcggccccctcgcgcgggtgctagagacctccacctctggtcctctcttggaccttggcatgagcagcgtggtgatcaagtgtatgtgttagtagcaaaagcgtgaacggacgcgtgg

SEQ ID NO: 386414 - DNA, 434 bp, Oryza sativa
gatcatataaaataaataggactatattatgcttgaaaaagtcctgacaaacggtaaaattgtagaggaactgcaaactgccgaactcgacggagtacgccctagagaaattggcaccgctagtcgccagcctctatcttcatccccggcatcagtggcagcactatcatcaatgttcttcccaaccatgttgaagtaggccagaccaaagacagtaccggcgaacacgacggcgagacccagcagctcggcgcgcctgccaccgccctgctcctccttgggcggcacagcgacgtgcacgcgcttcggcaccggcgaggcggccgactgcggcaccgccgcggcgggcttgaggccgacgacgctggtgctcactccggccatggctcgagctgcgcgtgtgcaagcggacgcgtggtcgaccgggattcgga

SEQ ID NO: 386415 - DNA, 775 bp, Oryza sativa
  unsure (1)..(775): unsure at all n locations
tttntanttnttnttgtatgtcgagatattcatcttattccatgagctgacagccataacaaatcctgaagagcagtatcagtatgtactctgctcacaagaaaggaggtaagttaatccattcaagtggatgctgttacgcactacagttattatgtatgtgcaagcgtgaaaagtggctgaacagaagaacaaaaaactaatcacgacgttctaattagtgcacccaattaacactagctttcatattctgacagcactgcgtctgatgtgccatcaattgaatttggctgtggcccttccaatcttgttaggacatcaggtgctccagatgcatctctgataatcagtatttcctcatccaagtaagaaatcatgaataggcgctggaacatcccattaagtggcaatttaatcccctctgaaacagcgtcccttatgggggcagggagttgttgcagagcacctgcagtttgtccaaagagaaaaaccctttagttgatcaggcagtgtttcttctctgatcccggggatctctattaggccctcgacatattcctctttcatcctaataggaccctccacagacaactgagtagtcagcaggaacttgctttgcaccgtatttaagaacttcacgttggaagaaattttggagtatccatccttgatcaggacatcaagtcctgtaaagtgtgcaacagttgtaggtgacctctcaaacagaagacgggctgcaagtgctccaggactgctgtcaccaaaccattcaaag

SEQ ID NO: 386416 - DNA, 1452 bp, Oryza sativa
tttttttttttttttgatctgatcatatattgatctgcattatatttcagccagcacaagtgacttgccaagcaacttgttcacagtatcaaaacatagaaatagttcgctactgcagccttacagacaggaccatgtatagtagactgtaaccggtgggtgcgcccgtattattcaattcccaaagagcagaaataattttatctatacatcatgcatatcaaggacaagaagttttttttttccttcagtagatcgagttacagattgttgcagcaaataattagcctttcgattgattgattaattaattaattaacagtgccttttaattataactgctcgatcagccacgctgaggcagattctttctctcttctcctggggtagtgctcatcttgttttcatttcacatcctggagtagccatcgtactgatccatgaaagtgtcgttgaacttcttgaagctggtcatgatggcaggcatgtcctcctcagctggcaggatggtcgtcctcaggtggaacaccccttctttttgtccgaaacctgaccctggaacagtggatattccagttgcttcaagaagcttgaggcagtagaaaacatcggccgctttgccagcccttttggctgcatctatagcttttggtggtaagcgtatttgggggaaagagtacatagctccttctgtgaaattgcagacaacatttcggcaactattgaaaccatctgtcatcaggcgtgctctcctcctcaaagactcgaggatagacttgctttcagcagaaaacttcagataagagatatctccaggctttaggagggttaaccattaaacccataaagatctgcccaggaacatttggactgagtgcgattgatgcaaccttgtagatctcgtctactgtcttgggaggaagatttgtcatttcaaaataccctccacgttgtccacactccccccaatatccttttgacacagtatggaaagaaaccagctgaacttccctgctcataggaggacccatgtcaaacagaacctttctagcacttataaatgggcgctcatcttgataaatgttctgttgatagacttcatctgcaagcagaactaagttctcatggaagcagaatttgagaagttcctttatgtttccttcactaaggcattggccagtagggtttcctgggttgataatcaccattgctcgaacagtgattccctttgaccgcgctgacgccacagtctgtcggagattgacgaagtcaagtccccagttagcctcttcttctaagtagtatggcacgagagaaccaccaaagagggaaatggcagcagaataaagcgggtattgtggaacaggaaccagaatcccatctctctcatttctgataatggtattcagcatttgcacggacgcgtgggcggacgcgtgggcggacgcgtgg

SEQ ID NO: 386417 - DNA, 740 bp, Oryza sativa
aaaccaaaaaatttcagaaaattaaaaaatcaagttcccaattaaccttatctttaaagtaataatggccagaagaaaccctccaaaaaggaaaatgccagcaaaataaagcgggtattgtggaacaggaaccagaatcccatctctctcatttctgataatggtattcagcatttgcatcacacctttgctggcaccatctgtgaggtaaataagttctggatcacttggataaccatcacgcctctcgatgaactcggcgacttccttcctaataccagggatacctcgggaatcactgtaagcacctagtccaccgggtgccatggcgaggtagtgcttggcccgcgcgatggcgtcggcggggaagataaggccgacgttgggatcatcgagcaggaagggggcctggcacagcgccacaacctggcgggggaaggtgagcggcttctggccgagcgcgtgtgggttgccgacgttggtgaagatgatcttcttgccctccttctggagctcggaggcgcgcaggtacagctccccccgcaccgcgtactgcaccttcttcacgttctcgttcagctcctcgtagtccagcggcttcctcccgccgccgccgccgccgccgaacatcttgccgccgccgccggatcaagaagttgagaggagttggtggctgttgtggtgacagtgtgtgcggcggacgcggagaggaaggggaaccaagaaaccccacgcgtccg

SEQ ID NO: 386418 - DNA, 777 bp, Oryza sativa
  unsure (1)..(777): unsure at all n locations
nnnnnnnnnnnnnnnnnnnnnnnnnnacaacaattgacttggcataaaaatgagattgaacatttccacctcgtcttacaagcgtatatcttgagagctaagtgagtataatgaaatacaataaattcataaattccccatagataccgaagatattcatttcaacggaactctatacatgcaaatagctatgtacaatcacttacatcggtattcgagattcttcagcacagttaaaaaaataaaggcagccaacttgttcagctgccagtctttcgcggatggagttctcaccattatcgaaggtcaatcacatcaaactttacatcggggttcatatacacatgggagcaatgctcataaattggtgaaccatctagaggggccttatgaggatggaatcctctctccgggcaatcatggatcacacccataccgccaggatcagagagatgaaatataccatgttttcttcttgtgtcagtaggtgccataactattgccaattgcttcaggtaacatcacctgataagaatcaatgattatggagatcaatggaagacagggagcaggactgtgttgggatgtgtgtggaatcccaacccaagagtggaaagcgagcccttgtcctgaaccatcaaataattcatcttcatttgtcgcttcacatgaatcagatgtagatttctgctttggaattatcaaggcagtcacataaaaggttctctttttcagggtaccagcaagaactccacatgtttctaaacggacgcgtgg

SEQ ID NO: 386419 - DNA, 951 bp, Oryza sativa
  unsure (1)..(951): unsure at all n locations
ccctagtagtaggattttgataaaagnaattatgttaggactgaggccgtaccatnaaataagaaagatttgagtcatggaatactggaagtttaaacatacgcatgcatcgggggtcatatagtccaaaataacaatggaaaattgataaaccccaactagccaagggtctagtgaggttgcacatgtgctgtaagctattactagtacacgcgtacatttatacatgtgatgccgttcgatacactacctattttgttttggtcgaactgtacgacgacatgctggtccatctcaatgacagctgatagcctgaggcatactatgcatgtagagctgatggctgagcaatcacaacttcacaaggggaaggaagtgtgatgacggtcacgttagtcgtttagtacaaacttggacacgggtgtccttgtcctctttggcacgttcgtttcttttcggcatggcagacaccaaaggcgacaagaggccgtttgatgtacactcttgtgtttcgtctttgtttgtttccgattctaatccctccctgtgggttctgattatacaaaaagaactactcacagattgcatagcagcaagggagaataaatgagatgagattagttgcaggaaggaaggaagggctaggcggcatgggcgacgatgtgggcgttgaaggaagtggttccaggtgttcggggaggccagggaggcaccagtggatgcagtccgcgttggtgcgagggtccgcctgctgctcccgggtccgcagcttgccctgccgcagcgtgtgcaccgacgtgtgcccgtcctttgcgaagctccgacaccgccgggatgtccacgaatcccacccccccccgccggatcgaccgcagcacaccgcccgccaccccgtgcagcccccagtccgtcccgatgtccagcccccctgattccggtcccaaatcgncc

SEQ ID NO: 386420 - DNA, 1583 bp, Oryza sativa
  unsure (1)..(1583): unsure at all n locations
cccaaanaggcagctagggtatcttcatttcgtaacagtaattaatctacagtagtagctagtacgggtgtaataacatacatgtagctcgcatgttttaagactcacaaaattacagtcgtactagtggtataataacaaggaattgaagctagctagtatattatatatatatatatatatgtgtgtgtgtgtgtgtgtgtgtgtgtgtgaaattagatatcaaaagtctggctgacagcttgttgcccgctccgctagaacagcaagcatatgcacctcgatctagacttcatgtagtggagtatgatcttgaaccgacagatataatatgatggaccgagctccagttcttagagctttgacgatggcaggccgagttgtttggcattaacaatgctggggcaagcagcgcgcggcgttgcatcctccttgagaaatggctccactagattcgggttcccccaaaccggataacccttgatcttgccaagaacgtttagagcagcaagtgttgccattccttcgcgcgtccacttggaggcagatgcgatgtgaggtacgacgacggcattcttcatgtcagcgaggccgggcttcatgtaaggctcatcctcaaacacatcaagaccgacgcggaacatggggttggccttgaggtgctccaccagtgctacctcatcaatcaccggtcctcgacttgcattcacaagaaccgcttccttcttcatgatggccagcctttccgggtttatcagatggtaagtggtcttgtccaacacagggtgcagactaatcacgtcggcctccctgaggacatcctccatggtggcggctctcttccatgtcacaggctgctctccgtttgctttcaggaactgcccgtaagctgtgacgaatttctcaaggcgcgtggactgatacaggtcgtagtagatcaagttcatcttgaagccctcgatcatcattcttgcgtaagctgagccgattcgaccagctccgatgactcccacagtctgacccttgagcaagttccccacgaacaggtgcgggagccatccgtcgtagaggccagccctcatgaactgatctgcctccacgatcctccgcgccgccgccagcgacagagacgcggccagctccgccgtcgtctccgtcagaacgccaggcgtgttgccgacggcgatgccgttcctattggcggcctccacgtcgacgttgttgtacccgacggccatgttgctgaaggctgttccgccggcgcgcttcagcgccgagaacagcacctctccccactcctccgtcagctggccgatgacaccatcgcagcgatcgccaatgagggcgaggatgtcgtcgacagagaggatggtcttcgtctccgtgcagatctcgaggcggcagtcgttgtcggcgaggaggcggatccagcgggtgccgggcatggacttggtgctcaccacgcgatactttccgctcggattccacacctcgatcgatatcggcttcgccatttcttgttttgctttcgcctgccatgcctgccttggactcgctactgcttcttgtcttcgaacgcgtgg

SEQ ID NO: 386421 - DNA, 447 bp, Oryza sativa
  unsure (1)..(447): unsure at all n locations
tatactcattcattcacgtgcgtatagttgcttcagtctaaaaatggtggaaagacgtacgccatccaatgaaacgtatggcctagtttaatcagagataatacaagccaacaacaataatagtttgcttttggtatatataatatatttcaattttgatatctactgttgtgcgtgcacggcggatcgatcgatttgagtattcatctgagtcgatcagtcataggtccctggcaatggcccggagtgcatcctgtacataggggtatcggtaggagaagcccagttgcttggccttcacaggaagaaccttctgcccttccaggaccactgatgcaccttctccgagcaccgctttgagggcgatttctggcaccggcagccaggaggggcggccgacgactcgccccagccgctcgcacatntncgacagccgaaccgggttgg

SEQ ID NO: 386422 - DNA, 851 bp, Oryza sativa
caggctgaaatgggttttttttattaaaccaagccaggcatggtcatcggtcacatggaagtacagttcgtcaaacctatcaaagtttacagcaaatagtccaaaagacaggttagatgtcggtttgacaacaacccatcaagatcaatcagcacaatcagacaggtaacgaagaaatttggccatggcatcaagtccctattccgagcggaaagtacagattacattacacaaggatccattagacaagtggcatggctataaagtggaaaaataacacacaaaattgaggaaataaaacaaacaccttcaagccccaacagtcaaaacacaaactactccgtatgtagaatgtgcatgaaagcacaaattgacttaagcaggctattttttttctgaatgaaagcttcaagcgtaaagctagttccacacttgagttagctgcaataggaatcagttggttgtggtcatctgaaaaggatatacacaggttcatcagtgcatcactaagcaaactatcaagacttcaagagcaaacaaggattgaactccagcaatttcagagaacagcaaactagattcatcggcgaagtgataaatcgctttaaatacgcaaaggctacccatagaacaaactaataaagatatatacttgcagatgatgaaatagggagaactaggttgaacgtttcagccctaaaagcctcctaagttctgaagcatccagcattatcagattccagtagagcaggaaaccaaaagatctagagctgctgtgcaaagaagagccgaaagaggcaggataagcatggcgatagacccaactttttttcccaacaaggaaaaaggca

SEQ ID NO: 386423 - DNA, 847 bp, Oryza sativa
  unsure (1)..(847): unsure at all n locations
gggngggggganngnaanngnngaaanganggnnnaagaaatngaaatataaatagctcaaatatacattttcgagaaaaataatactagaatgttacaacttgtgggcttgcattattgcgttataagacccctacgctatagccgtcgcacagcaatttatctgagattctactggcccctaccttttcaatgacctgatgtatcctagttacaacaacgatgaacctttttagttctttactatacatgtgaagctgcctgacctttcaggacctcgccatcaatcaacgcaatatcacaaaaagaattgtggcagccaagccttcggttgcaatgcacaagaaatagcgatttgatccgatctcaacgcacgaggagtctaaaacagtatgtgccaacgcacaactgtcaacatttgtctcgaacaggatcatacaactcctagcttgaggagctagctcgatccctttacaaaagttcagtcatcggaagttgcagaaatcatgtggttggtctggtcattgttgatagaccacggcctccaataggacccatgccatgcaggcccatatcgagctcatcatcagtcgtctcttcgccagattcagcaccagcaatcccaatgcaagcaaacaaagaagattcatcaacttttaggtgctcatatgcaagatacaagtcctcaatcgtggcactttcatacaacatcgtcaattccttgatgcaggatatttcctttctaggcacagatgaagactgcagatggcgctagtaaaccaagccaataggcatttgtctttgtctcagcctcatgtttcatcaataacgtcctccggacgcgtgg

SEQ ID NO: 386424 - DNA, 860 bp, Oryza sativa
  unsure (1)..(860): unsure at all n locations
gaaataatgcanggcgttatgtatatacggtgtcctgtacttactacagtgcagtagttacaagaaaacagtggcaaacagatgccaggtcattttatttcataatcgcacgatgagcactccaaacagatgcaggctcgctgtgttagccattccttgacgaggccggatttttaatccattttatttcatacataatgtcacgatgagcacgccaaacagatgcaagctcattggcacaactcaaattgagatgctgttggggatacccatctccatcacggacgtcatgtccttagggtcaccgtaggacggcttgagcagcacgtacggcaccacgccggggccctgccggttctttcgctccggatccttgttccggcagtcgatcatctccgcgatgctcatcatcctctcgttgaacctcccgaacgccgccctgacctccctgtccgccatccacgctgactccgcatgcgtgcccatgtactcctcgccgggcgagtgtgacgatagcaggttgagcaccggcaggacgagggtggtctggtactgcgatgggaacgtgtctagtagcaccctgacgggatcctcaacgaacgttggctgcatgccgtcgtgactgcacgcctgcccctccgtcggcatgttccgccgggcgatggtggggcgattggggaagtagccggcgtaggggtactggccaaagttcaccgccgcatggtgccccgacgcgacccagatgatggtggtcagaacctcgacgaggctcccgtggcagttcagctctggccacccttcctccttgtccgggtggcccttggttcgcacctcgttccaccaaccctgcggacgcgtgg

SEQ ID NO: 386425 - DNA, 725 bp, Oryza sativa
ttctaactgaaaattgcattgatatagcacatgctacaatcacttttacaccatacaaagctacatcaatctgcatttaatcagtcaagtataaccattgtccatttcaagcagcaatggagaatccgattggaacgatgagcaggatgctgcgcagaaagcagagtatgcaaggccatccaatttctttaattatactgcctaatcactaggaaagtatgaatgtgaaacccccattttcttaaagagtcagaggtatttatccttgattaattttagtatctcctcaattcttttgatgattttagggttcatcaagtcccttgcttgcctaaggagagtgccttctctgctgttataatatgcatcaacaatagcactggcccaagtgtgtaatacctctggactcgtgtataatgtatcaacattatccccctgaagttcaggcccaggagtaaatgcgtcattcaatgcactcaagcgttcttctggatcctcaatcattataagatgctttagtattctgatatcctttggcatttgtctctggagattggctactgcagtcatgtatagatgaaacattatatctttagcctcagattttgtgatgtcagtaccctttgcagctgaccaagcttttgaaagcattaagactaacgcagaatccaattcctttttctcagctaagtcatctatctttctgcatgcagccggacgcgtgg

SEQ ID NO: 386426 - DNA, 735 bp, Oryza sativa
  unsure (1)..(735): unsure at all n locations
ccgttggttttttttatattgtccgccctttgttttggggttctgtgggcaggtagaaatatgaaattattgacgaacaggacagccaactaataacatggcattacggcaacatatccttgagtattgacaaagggaaatcgacagcagtaatgcagtatcttcttgtaatctacacctatagacacatgaattcatgaaacatcattctgcgattatttgtcttgaattcttgatgcgtgaagttagctgctagaaggcaattcagttttcaactcctgaagccttcatggatcatcactaccgacttccatttcttcctcatatagtaattgattagacatcttagcagtcaggatgctgtcttcaccatcgacagctgcctcctctattgcatcggcagtgctatcgccaccctgttctacgagcaccttttttatggttccaaccctgcacgtacttggtgctgaccttgtactcccagtcctgaagggcactgagttcaagtaaacttaggccagatatatcatcagtcagatcttgtggctcaaaggacatcttcgccaacgccctactggcatctttaccagcaaacaatgcatatggtccaccaggtccatagaacaatctgctctgggagacgtcatagatctgccccttgatcgaaaaaaaaaacggctcctcggggtcggagctgtggtagtgcagcatctctccnnccgtgcgcacgcgtgg

SEQ ID NO: 386427 - DNA, 486 bp, Oryza sativa
aattatagtctcatatttgcaaaatgtattgcaaacaaactggaaaaggtacagaggtaaaaaaaaaaaaaggatgctgcattagctaagatttagtacattcaaaccgtacaattgaagaggaaattaaggccgacaactcatatagtttgtgctttgcggaccaaaaaaacaataactcaaaacatggaaactttgcatctgaatggctatgaactccattgtttcactcacagaattccgtcaatctcccagttatccttttcatcgtcacgagccctcctcgcggcctctgaatcagcatcgtcttctgggaacctaggctcctccatcatacgcctgcggcggttgcggcggccggcctcgcgggccttgcgcttgcgctcgtccttcttgctctcgtagcggcggcggcgcttgatctcctggagcacgccggccctcatcacctcccgccggaaccgccggaagatggactcctccccc

SEQ ID NO: 386428 - DNA, 672 bp, Oryza sativa
  unsure (1)..(672): unsure at all n locations
ttttcgctcgaaagtcacaggtaaattggatttagttactgggattggagatcggacaagcataattacacggcacccaaatgccatctgctcgagctaatgtattgaggggggtacccaggaacccggtcaagaaaaaatatagttatacctaacctattttcatcatgtgtgcacatctctcaatacaaatttaaatacccgtattagcttaaacttaatataaaacagagtaaattaaacaagtggcatccctccatctcgctctagctccgcccttgtgctcaattatatatagctcgatcgtcaccgagcttagctctgattaaccaagaagcctctgctatattttcaccatggttttacatgcacgagcttttgcaattctcatcggcggctgagcagcgggaaccaccagctctggaacgacgactggtacgacaccaagaacagcaccagcaccagcaccagcgccacgccccacggcgacgacgacgcgccgccgncgtcgncgtgccaacggccgtacggcgagccgccgccgtcgcccatgcccatcagctgcgcgaggaggtacatgaggcctccgccggcgccacggcggtcggcggcggcagcggcggcgcttggggtccatacctgcacggggactataagcaacaacggggagag

SEQ ID NO: 386429 - DNA, 418 bp, Oryza sativa
  unsure (1)..(418): unsure at all n locations
tacatgtatgccaaaaatatgatatgtgtccaattccataagttggcgatgcatgtacaattttaataattaactccattttgtacagctcatcagcaaactccatacacgtggcacgtagcgattggtctaacggtgtcgcgcaaggtagcttacctactcagctagcaacacgtctccatgccgccggctcgccacgccggccgccgtgggcaccggccgccggcggctcgggcttccgtatacgataatatctacggccgtgggccttgcggcggcggcggcggtgaccgtgatggtggtggccgtgatggtggtggtggtggtcgacntcnccgccggcgtcgtccgcggcgtcgtcggcgccgcgggtgctgtggcgtcgcttcatgaggaaggggatgcggaggtgggagtg

SEQ ID NO: 386430 - DNA, 882 bp, Oryza sativa
accacatattctgggcaatttaatatatatgccgacactcttttaactttacatattttgtgaagaacaataagctatagcacctctagaggataagacctgcatattgtacgctcatctgaaggatatggattgtttgaatacgtttcattttgatcattcttctattggctgcttggcttccttgcttctgtcttgacaagaaatctgatctcccggggcacgtctcagatacagtaatacagaacggctgagaaatccctatggttactcttatacaaaccatgccatctgacccctcaacaatagttcaggcatgagatacagaaacagaaactactgtacattctcaaaaacttcatatttatgttcctatgacttgatgtccatgccaaaaatcgttgatcctaatgttggcagtaagactgtcagagctgcaatggcaacaattttcaggggcaacccagtggccaccagatccttgatggtaatgtagccggtgctgaagccgacaacgtttgacggcgatccggtgggcaacaagtatgacaactgggccccgattgcgccggaaaccatgagcaaggcagggtgcacctcaatggatttggcaagttcagcgaacaatggcagcaccagcgtcgtggttgagtcgtcagaagtgaactctgtcatgatcccgctgaaaacgcaggcgacaggcacgatcaccagcgtcggcgcccctttcaggaacctgaggccgttggagaggatgtcggtgaggccgctcgtcttgaagccatcggcaatggcgaatcctgcgccgaggagaaggatgatgttccactggatcttcttgcacttgttccagtccatcagcttctcaccccggacgcgtgg

SEQ ID NO: 386431 - DNA, 812 bp, Oryza sativa
tttggtttctttacaagaggggatcatattgcaatcccaatattttaagaaaacacaaataggaactgaaatccagatccacacaatgctgaagtaactgaactgccgtttaacaaagataaagacagacttccccacaggttcaagttccaaaacacaccaagtacatactacatcacttgcagtctcagatataagatgccaaccaagttaagaaacgacgccgtcgctcagggtgagagcagctagctgatcagttggggtatttgcctgctgctgctgagcattacggagaacttccatagcctcagcgaccttggccttaagagcatcaggtgactcaatgagatggagaacttcagtctggtccatctccaaaagcatgccagtgaccttcgctgcctgatcatgctccagctgatcaaacaagcgggtataaactttcaccaagcatcagtctttgctgatctgggggtgaattggccagtgcagaggccaatgctccaattggaacctgcggtggtgcaccagcatcactgagaggcattcttcccatctcatatggggatggcactaaacctccaacaccacggaatgcattgtctggcatgccacgaccagaagcataacggtaaccaccacgactaccccttggaagcatttgctggtggcccattggcattggttgctgaattccaccagtgcctgcacgccttccagctggacgttgtggttgttgaccttgctggaccataggcatgacaaaatttggaattggtccaacactaggcctcataccaggaatgtatcga

SEQ ID NO: 386432 - DNA, 1252 bp, Oryza sativa
tttttttttttttttttttataggaaataggaagggatgtattcaggagcttgtccaactagaagtattatacaaatgaagcctagactgagagactacgaccaatttttctttttcacctatgttatgtatgatatacacagacactaactggattagaagtgaagtaacattcgtcctaagtttaaacaaaaaaagagctgatttttaatgtttggactttgaaccgaatgactgaatgatcatgtgaccggtatgtatatcgcatccaagcattttcctaatcctcctgttgctacttgctataaattagccaaagattggcaacaaaggtacaaaacagtgttggccagaacatttcatgtcatttgtctccttaatttcactccttccaccaaaaaagaccaaaccaatgtcgagagcagagcagttgctcattgtgcttccccatcaaatgacttctgccaaaccgactgaataagcatgagcttcaagagaggatccaccagggccaccaaggctggtcacaaactgggcaagtttcactccgctccatccactcaagtatgcagcaaagatgaaaatgatgctcacatttagtcatagagcggggattttcttcatcatattcttcaagacagattgggcaaacatcctcctcatcaggcttatcttcagagacacatttttgcaatgactcattatcatccatcattaaggactccttatgttcatgaattttcctcttgatgcctgtcttctccaaatcagggttatctttcaacactagaccaacatcataaggcaaaggtgtaggtggtgctcggtaagtgtcaggagtggatgtatccagatttttgtctattgcaacaattgtagaggccggattttgttgatgatagatataaactggtgctccgacggatgcagatcttgtcgatgaacaacaggcaaccagcccattctataattgttgaaagttacttcagtctatcctctagcagctgatatcactaaaatttcatctctcaaagaccagcgaagaagagctcggcagctgagcgagcgagctaggttggcgaacaagaccccctccgcctccctcctccgaactgcgctgcttcacccgaggacggcggcggcggcggcggaggaggaggagaagctgagccggcggcggcggcgagcggtggcgtgggggagtggaggagacagagaggaggaggatagttttgtgcactttcccctcccc

SEQ ID NO: 386433 - DNA, 495 bp, Oryza sativa
  unsure (1)..(495): unsure at all n locations
nnnnnnnnnnnnnnnnnnnnnnnnnnnnnnnnnnnnnnnnnnnnnnnnnnnnnnngtactatagtcagaatcttgttttattttactgagtcaggcatgtacagagtttctgatgcgcacaggtgaatcttgggctgaagaatagcctagttaatatatatacattgacagatggccactaatttctggagctggtgttcatggagatggcctggccaagtattgcagccattcttcaggcaacccttggctcctcttgagcgtcctgaatgcagcttttgtcaagggtactgcaagaatgtcaaattcctttggcgccttggggaccttgagtagcttcatgtttgcttgctccactgtcttctggcccttcctggagttgcatcttgagcatgcagtcaccagattttcccattcccattttcccccacgtgcagtcggaatgacatgatcaatcgttaggttatcaacagaagaacaatactggcaagtaaa

SEQ ID NO: 386434 - DNA, 2150 bp, Oryza sativa
tgggttttttttcagaaggggaattttattgtcatgtacatgttgatgtcatgttatgacaaggtgtaggcactacaacaatggcaccaattcagataattagaaacgcttcttgcatatatataccaagattgggctatctcaatctataaggaaagataaaaagtacttgatcattactgatgatcataaaataaagtacacttcaggaagaaggaatgacctaaaatggctccttcaacagaggaagaatagggctagacaaggtacacaaaggtaggcaaggccattgccgtcatcgttaacgttggcctcgatcagctgtctccgttctgctgcccgaagctgcatgatcctgagggcaagaaggagaagggattctcagagatgtcaaatccaggtcgagtgaagtcatcaagcccaccgaagcaaggatcaaagctcaatggcgagaaatagcgtggatcatcggccatcttcatgtcaagatttgggatgtcgtccgatgagctaccggggaagttatacccagcgctccccaccatggtgttcatcgcctcgctgccttgaggttgctctgatgctcctgttactttgatatcatccatagggagtgcaggcgtgtgcccttggaaaagagcaacatgcccaaataacttgtcttttcttgagaaggtagttccacacgagcatagccacttgtcgcggccacagtgcttttcatgagtcttcaagtccgcgataactgagaacttcttggtgttgcaacggctgcaggtgtagctcttgtcacagtggcttctcttgtagtggttcttcacacacaggattgtcttgagaggctggaacttcttgtgctctttgttccgcttgcagccaacatatgggcacgagtaccttgtaactggtgcagactctaagctagaatctttcgaaggtttcgcaagagctgcagcagttttgtactcgtctccatggcccctcatgtgcatcctaagattagcatctcttttaaaacccttgccacagatcaagcagaagtgagtatgtggtgctaaaatctcctccttctctaattgcaatactacataagacccaaggggggagattctctctctcaccaccatcatcactctccttcacatcatggtcttccattggaatcggttctgacccttccccaccacaaggattttggcagttcatcatctcatcgctttctgcctgagtagtattaaggctattcatcagctcctcatagtcatgggtcttgctaatgtcaggaattgtggcttcgtcgtttgcgcttggtcgcaggttacaattggtgcccaggatcataggagcacaaagtgtgttactgagatgtctgagtgccgggttgctgctgattgggttcttcatcgaaggaagcaaggaaccagctgttgaaataagctgaattataatacaagtgagatcagcagtgacaagctgctgctttgcttgtgcctcgctggaaccaccagcagcttggctctcacgattactcatagactgcacgatgtcttttacctgcttgatcttctgctcaaggaaggataagttgctcagcattgcctgagggtcccaatccattgtaggattattcggggaaggatttgattcgaactggttaccgattttagcttcaatgtcatcaggtaaatacaagctggaagactgaaccccaaagagtggaggaaaagcagggaacgattgaccaggtcttgcaaaacatggaggctggtccatggaactgaatcgaacaccctgttggtcaggatcagtattccttgttgcattacttgccattgatggcaaggctttcaaggatgtctctgaacttcttcccaagccactgtccatttagattcaccaaaggccaaattctacttcaatatgcccttctatctcatggaactacagtccttccaatcaggagctgatctatagggcagtcatgaaaacgcgagtagaatttgaggcggaatcagcaggacgaacgacgaagccccgcgccctgctcgcggtcgccgggatggattgggatcggatcggcggaggccacggcgacggcgagggcggcggcggcggcgagcggaggagtcgacggcgagcgaggggaaata

SEQ ID NO: 386435 - DNA, 724 bp, Oryza sativa
gagagggggcacttgcaacctgcatatcaactgcaatgtctcatctgaaatggtttgcttgctcttctgaagaacattctctagcgagaatagcaaggggtgatacaaatgtgaagcacttctctgaactactactatcaagaagagggctcagaagcctcgtcagattcagagttctctgaggtctcatcagattcaggcttctcaagctgcagaacaacactgaaactgaatgatgaacccggcgtaaacgatgactcgagctcttcttctgactgggttgtcttgatttcagggttcaccttcaggttttccttctttacaaaatcaccaacagtgatgctgagtatttcctgaagaacgaacttggtgacccggcttttgccaagcatctgcagcagaatgctgcttggtatatttgatgttctccctcctttggacttcctaaaacctggaactggcggtgcatcacgagccaagcttgtcaaggcttcatcaaacaccttctgtgtcgcctttccaggcaaatccactcttacattgatcgtttcatcgtcgcgtgacacaacggatgtcttggcgttctgcagcgacaagccactcttcctctcgtcctcagcaaccgatgagcccccgcctgatccaactgccgacactggcaggaccggacgcgtgggcggacgcgtgggcggacgcgtgggcggacgcgtgggcggacgcgtgg

SEQ ID NO: 386436 - DNA, 1518 bp, Oryza sativa
  unsure (1)..(1518): unsure at all n locations
nnnnnnnnnntttttttttttttttaaaaaaaaatgtgacctcagaactttatttattattcgcacacgtactgcgcacaaactaataaaaccacactttacaacaccactagctaggttttagacacaaacaagcataagcgatggtttaacaagagcgagcaacgcgtctgatacaatgaacacttatacaaaatctggtgtgtgctctgccatttgagctaaatttgaaccgggattttgtatttgaacatatgaaaacgtttactctgctttccaagacgacaatggaggggtctcagaatccttccaagtgccggccgtctgagcatagcggtcaccttgaacaacatctgtgctggcataggactcaagttcagtcatttccccaggggtgagcttcacagatagagctgctacattttgattgaaattctcgatttttgttgtcccaggtatggggcatacgtcgcttccctgatgatggacccaggccaatgcgagttgtgacggtgtgcatccttttctggctgccattgcgttaacacgctcaaatatttcagcattcttctcgagattcgctggttgaaatctaggaagatgcttgcgaacatcctgaacagatagactccactagtttagctccaccagaaaagaaccctctaccaagtgggctgtaagctactattccaattccaagttctctgaaatggaaataagaaaaatagttaaaatggggcatgtgatttttttcaatggataaactaatttggaattatatcttcttccacgtctctagaccataatgaccactcgagctgaactgcagtgatagggtgtacagcatgagcccttctgattgttgatgcagatgcttccgatagaccaatatattttatctttccttcttcaactagtttcttgagttcaccaatcgtgacctcgatgggcaccttcttgtcgacacggtgctggtagtaaaggtctacgcaatcgacgccgagccgccggaggctgccctcgcacgccgcccgcacgtacgccgggtcgccgcggatctccaccttcccgtcggcgaacgaagacggcgaatcttcgtggccacctccaccttctccctcacgccgccctgcagagccttgccgaggaggagctcgttggtgtgggggccgtacatgtcggaggtgtcgaggtgggtgacgccggcggcgacggcgtggtggatgagcgcaaccatgtcggcctccggcttgggtggcccgtagaaggcggacatgcccatgcagcccagcccctgcgccgagacctccagaccctgcgagcccagcttcatgcgccgcaccgccgccgtcgccggagcagcagctgccatggccggccggaatcggatcgatcgatcgatcgattaatttctctccgccgcgcgcgccaaccccggacgcgtgggcggacgcgtgggcggacgcgtgggcggacgcgtgggcggacgcgtgggcggacgcgtgggcggacgcgtgg

SEQ ID NO: 386437 - DNA, 1457 bp, Oryza sativa
  unsure (1)..(1457): unsure at all n locations
nnnnnnnnnnnnnnnnnnnnagtaacacaaaattagtgattgcaaaacattattttattatgagcacacgtactgcgtgcagtgcacaggcttatagaaccgcacttcacacaagtaggttgtaggcacaaacatgacgaaagcatagaacataacacaatacagacagacaggacatctcattccaaatatacgtgatgtataacaggagcaagcagcgtccagcgactgatgaatacgttctacaaaatcttgtgtgcgctctgccattcagctattttggaccaggactttgtatttgaacagatgaaaacaattactgagctttccaagatgacaagggaggggtctcagaattttgccaagtagtgttggccatcgcctgaggataccggtcgcctcgaacatcatctgtgcttgcgtaagactcgagttcagccatttcctcaggtgtgagcttcacagatagtgctccaatgttttggtttaaattctcgatttttgttgtcccgggtatggggcacacatcgcgcccctgatgatggacccaggccaatgcgagttgtgacggtgtgcatccttttctggctgccattgcgttaacacgctcaaatatttcagcattcttctcgagattccctggttgaaatctagggagatgcttgcgaacatcctggtctggtagacaatccactagtttagctccaccagaaaagaaccctctaccaagtgggctgtaagctactattccaattccaagttctagcatgagcccttctgattgttgatgcagatgcttccgatagaccaatatattttatctttccttcttcaactagtttcttgagttcaccaatcgtgacctcgatgggcaccttcttgtcgacacggtgctggtagtaaaggtctacgcagtcgacgccgagccgccggaggctgccctcgcacgccgcgcgcacgtacgccgggtccccgcggactccccgcttgccgtcttcgaacgcgatgccgaacttggtggccagctcaaccttatcccgcacgcacgccgccctgcagcgccttgccgaggaggagctcgttggtgtgggggccgtagatgtcggaggtgtcgaggagggtgacgccggcggcgacggcgtggtggatgagcgccaccatgtcgggctccggcttgggcgggccgtagaaggcggacatgcccatgcatcccagcccctgcgccgagacctccagaccctgcgagcccagcttcatgcgccgcaccgccgccgtcgccggagcagcagctgccatggccggccggaatcggatcgatcgatcgatcgattaatttctctccgccgcgcgcgcgattctcggtggtgatgctacgtgggctctggccactcacatacataggggttaatgctagtaccatacaactcactgcaagcatcgctgcacccacgcgtcca

SEQ ID NO: 386438 - DNA, 1001 bp, Oryza sativa
aacctgatgtaaaatgggttgttgttctcttcattgaattaatagatgctgaatgttttgttggattatatcttacagacaagagacttctgatttattttggtttttcctagtcagaacacttgcatttaaagatggtatgataggttcagacgttcagtacttcagttttgattcaaaaccacaagactgagactgaataccacaaaatcactgaaaatcaaagttttgttttctcttgagttgctgcataactgaactcatgtttctactctgtcaactgaacagccaggatggatggtatcttttccctcagtttttgtgttacagctacacgtactgtcattacacccgctgcaggtccagttaaccgaactttgccgacggattcatcaatctgaacaagatcaaggcttccacctccggtgccgaaaaggtatggtctgatctcatccagcaccttgtcaaggttgttgtggttgagctcgaggccggtctcggtgtcgacgatctgctcgacggcaaggatctcggggaccttgtcgcggaggcgcgtctcgatgcccatcttgagcgtcatggtggagctggggcacgacccgcaggcgccctgcagcttgagcacgacgacgaggccgtcgatctcgtgcagcgccacgttgccgccgtccgccatcaggctcggccgcacctggtccagcaccatctccacgttctcctccgtcagcggcagcacacgcaccgcccagcctgttcgtttcccgcggttgttcggtgactgcagcgacgtgtggctgaagctgagccggccatggataaggggagcagaagaattcttgaggagagctgcggcgaggggaggagcgccagtggccgcagcagccgccgccgccgcggcttgccggagatgaggggagaagggcctcatcggacgcacgatttttatcgtcggtcgcgaggcagaacgaaaaatccaaagccggcgcgaggctccctcaaca

SEQ ID NO: 386439 - DNA, 350 bp, Oryza sativa
  unsure (1)..(350): unsure at all n locations
nnnnnnnnnnnnnnnnnnnnnnnnnnnnnnnnnnnnnnnnnnnnnnnnnnnggtcaagcttaatatcccaatatgtattggaacttatcagcagagtatatttacacttacatacaagtactcagcttacattgcataaagagcagctatagtggaagtaaaaactatatacagacaaattaccctcggcgcttgctgaggcgccatgagtttggctcgttgtatctgtcatacagaggctcaatcctttcttggcgcttccgcttactgatcttcgttgggtctgcagatctgtagaaccctcggtgccagttcaacaaagccatttttgggncaatgggttgtcaacc

SEQ ID NO: 386440 - DNA, 1261 bp, Oryza sativa
tcgtgccgccctcgcccttttttttttttttttagtgttacacttaagcccaggtgcggaaggtatcatcatatcagaagtgttacatttcaatacactgatgttcttgaatacaagtcaatgataaaagtaaaaataaaaataataacattctccatgttatgctacctaataaggagaggcgaccaaatctggtggccccaaacagattgcggctatattccaaatatctgcaacaatacaatacctatatccatctatgttccaagaagaattgactgtcgaattcgcagtatctgtaaggctgatgtagttcatttcaccaaataatgtttcagtggactaaatttccaagtgactgcagtcccagaaatgacttataaagaatcatctacactgtctaatttaagcagtttcttcagctgtcttctttattttgagggcagctctgacaacagtcccccttgtgatcatcccaaccaatttaccagtgctatcaacaacaggcaatctgcgatatttggtttcaagtagcaaccttgtagcagcatcaaggttggtactttcacgaaccgcaagaggcgaataagtcatcacatcagcgatgactttgccattggttttgctcaagagtctctgtatctcgcgaaatgtcttccaagtactatccacctcaggaaacatgcttgtgtttgtgccagtcagtccacttcctgatattgagtcaagtgctaacagatcataatctgagacaacacccaccaactttccggtgtcatcaacaacagggaaaccagagatcttgtgttgcaccagcgtctcgagagcttcatcaaccgaggttgcaggtgtaacgacatggagattaggccttttggtcatgaagtcaccaactgtgtagactccgttgttgtgcgcggcgggcgcgggggcagcgggagcggcgtaggcgcggaggggcccgcaggcgcaggaggacgggagggggagggtactggggcggtggaggcgagggcgaggcggaggcgcagtggtggtggagcggacggcgacggcggcatcggcggagcggagcagcgtggcgtccatggctatggctaatccaattccaagtagcgcgcgaagggaagggaagggaagggaaggcgtaggtaatggaaaggccaaggcgtggtgggaggtggctatggcttcccggacgcgctgggttgcgcttggagcaaactaaacggaacggatggatggagcgaagcggtgaaat

SEQ ID NO: 386441 - DNA, 954 bp, Oryza sativa
  unsure (1)..(954): unsure at all n locations
nnnnnnnnnnnnnnnnnnnnnnnnnnnnnnnngggagattattttgcacgttgaaaatactaccattgaacaaagcaacaagttctacaactgcagttggaaaacacctgaacaatttaaaccagttctagcaatcagatatgcagatcacaggactgtcaaaacttttcgcatataggaaaccacagttatagtctattttaggaagagtagcagcatttgcggccaaagatagccgtcgactaactatgacatggtttacgcatctcggtcatggggtagtcgaacacgacgtccttcccacagagcctcctgtagacagagctgaaagtgtcgagcttgtactcggtgttgttgcgctcctttgggtccaggaagatcttcatgatttttctaccatccaagtggtatctgacacgcttcccaacaatctctgctggatacacaacatcctccaagatgccatcatgaacagcagtaagtgtgcgggtacgagggcgaacaacagctgagcctttctttgggggcctcactattcttctagttgcaaccagaaccacatccttcccactgaatttcttctcaagttccctaacaagcctcacatggatcttcttatatgccttccgcagcctgtatggaacataaataataacagccttcctgttgccaggtaaaatccatctgaactgctccattgatgtaaaaggtctttcaagtcactctttcagctcctgattcccatttctccaaaggtccaaaaaatggcctgagcaacagtggtcctccaaactcagtttgggtcccaagaaccttggtcctttctgggatcttccccctttggcggggaaaaaaacgttaacccttgaggcgcgcgagacggacggcggcgagctagcaccgtgcagcgaagagcggaggcggcggagaagggnttcgttcgcagtgcgctcc

SEQ ID NO: 386442 - DNA, 558 bp, Oryza sativa
ctaccatccaagtggtatctgacacgcttcccaacaatctctgctggatacacaacatcctccaagatgccatcatggacaacagtaagtgtgcgggtacgaggcgaacaacagctgagcctttctttgggggcctcactattcttctagttgcaaccagaaccacatccttcccactgaatttcttctcaagttccctaacaagcctcacatggatcttcttatatgccttccgcagcctgtatggaacataaataataacagccttcctgttgccaggtaaatccatctgaactgctccattgatgtaaaggtccttcaagtcactcttcagctcctgattcccattctcaaggtcaaaaaatgcctgagcaacagtgtcctcaaactcagttggctccagacccttgtccttctggatcttcctccttgctgtatacatcttgtgataacccttgaggcgcgcgagacggacggcggcgagctagcaccgtgcagcgaagagcggaggcggcggagaagggtttcgttcgcagtgcgctctgggcggacgcgtgg

SEQ ID NO: 386443 - DNA, 1052 bp, Oryza sativa
  unsure (1)..(1052): unsure at all n locations
nnnnnnnnnnnnnnnnnnnntatcataaacagagaaatatattaacagaaagaacaaagttactgcacttttgcgcagtctaatttacaacagagagaaatatatacatgtgaaaattcttttctattttggcatccaaataaacaacggattttgcgctattttcagctggtaagggatggcttgaagtacatgcacattggtgggtcaatcctcatgatggacaatatcgcagatggaacactccagatcccatcaccgcagatcaaaccagatgcaatcgcgcctgcaaagtcctcagattccttgcggttcaccctctcccagacaaacaggataaccgtcccaacgaacatgtcgatcgcaaagtacgccccaatgtagaatgggacagccatagccatcgggagcgggatgaacttggagacgctcttcggagtgacgtcccgcaggaggttgatcaaaatagctgcgacaaagaagaccgagcagatcgccaggcaatgttggggcagcgctgagaatccttcgacacccaggattgacatctcacggtagatgacggcatatggagccttgaacatgccatcaggattgccgatatcgaaagcagtccagtagagccaaaaggtcagaggggcgatgatgcagccaagggtggtcccaatcaactgtgacacaaacatggaccttggtgaagagagggtcaggtaaccagtcctgaagtcctgcatgagatcggcagcggtggatacgatggacatcataacaccgcaagctgctaggccagcaatcacgccaccgcttcggccaaccaaggaggcaaaaataaaaaggccaatctttccatacgtggacgcaaggttccagtctgtgaggccacagccgtatgagttgcagaaggcgagcaggggagctacaacataggcacacaggacaaggtaccacttgacctgcggcaagatcattggcacagttgctgttgagattgctgcaaggccaacataacctgatcctgctaaccatgatcggacgcgtgggcggacgcgtgg

SEQ ID NO: 386444 - DNA, 829 bp, Oryza sativa
  unsure (1)..(829): unsure at all n locations
ggggaactaacaatcagcatgcaaatatttcaagcctgatttgacaaagcagtcaacctttcgttaatatttcctatcctattatacaaaaacaaaattgtctcaaacgtgactaccttttgtatagggcactaacactggccatgtgaatactattcttcaactgttgtgaaaaagaacttgaataattggcaagtatctatctacataaactgttatagatgttcacaaatgaaacagcatgttggtccagcacgttgcttagttcgtggctactgtcttcccttcacaaacatcacatacaattgaaccaaggccttcacagtatggacacttcgtatcttcaccgacccactccaaaaactgtggttcaatgttcggctcacctgttccatcacattctacgcacatgaggcggccttcaccccgacaagagatgcacttcttagttgatgcattggtagcgctgctgattggtttattcttctgtgttagcctagatgggtcttcccacctgttttcaccgatgagaaacactctattttcagacaaccctactcctgagacaccatttcctttcacaacagtttgttgaatctctgcaatttctgttatggagggaatggctgctccatttatgccatcttttgttttcacatcctgcccaacttgtcctgtaaataacatgtcaagcagatctgatgtcataattccactctccgaaacccgtactgttgcctgccatgtcttcacagctcgttcggtgcccgatgagaagctggagaactccatgtcttcttcgcccgaatngtaacccngcttttccaat

SEQ ID NO: 386445 - DNA, 525 bp, Oryza sativa
ttttacattgtatgatagtaaagcacgcatggatattgtatatgaatacagataatgtgtatatacaacaccattctgtgtatagaccagatcgatattgtatccgatagtcacgcatacatgaatattctatatgtatacagataacgcatgcatggatattgcatatttattctagcgcacccgcaacagcggccatgtgcttgtatatatgtatttatacgctcgcacgtacctaagtacgtacgctatacatatgcaatctgagatcgctgcgccacacattatgtacggttggattaatacatttattgtaatatatctgtctgataccgccatctgtctgatgatcacttccatgcgtaccgcttcctcacgcgctacatatgtagatagagtttaagagtggaatcgcctatttgcgtggtggcgggaattagacacgcttatcttgatccctgggatcaccccatattgcccgcgtgaccgtggcgctgaagtgtcaaagtgcaagcggacgcgtgg

SEQ ID NO: 386446 - DNA, 1235 bp, Oryza sativa
  unsure (1)..(1235): unsure at all n locations
nnnnnnnnnnnnnnnnnnnnnnnnnnnnnnnnnnnactgaagaagaggagccaaaatgcaggaacagcatcactctattccatgcatccattgattaactgaaaacccaatagcaatacagcatggactacgttacacactgtagcttgcagttcaacggattgaaatccagcgtacagtagtagccccccaggcaattgcaacagctacgtcaaaagcatgagtagttgcttcaaagaatggaagcaaagataggtacaaccagatccgtatcatagtgtgtcttcttgacattcttcctataacagcaagacagggaacaaacaatgtcaaataataaacgatggaggccgagaaggcgaacgtctcctcaggagccgcagcatgcagatccagaagctgctggtttgtcggcaccctgatccgtcttgttgttaatcttgattgtcttgtcctcaggcttggagtcggtctcagcaagcctctgcttaatgtcacgtgcaatggagaaaaaaacttgctccacgttgaggtttgtcttcgcactagtttcgaaaaatttgatgccatactcatcagccagtgcttggcctttcgcagtagggacagcccttttactctcatccatatcagccttgttgccaaccaaaattttgttgacattatcagaggcatgttgctcaatattccgaatccagttccgaatgttgttgaaagatgactcgtcggtgacatcataaacaagcaggatacccatggctccacggtagtacgcagtggtaattgtccggaaacgttcttggccagctgtgtcccaaatttgtagcttaatacgcttcccgtccagctctattgttctaattttgaagtcaataccaattgtggtaataaagcttgtagtgaaggaaccatcagaaaaccgcaggagaaggcaactcttgccaacaccgctgtccccgatgaggaggagcttgatgaggtagtcgtagtccgcccgagccctcgccggcggcgcagccatctcgtcgcccgcttcacacccctcctcctcctccctccccctactccacagcccacccggcgcgcctcctccaccaatccccgaccggtaggcgcggcggaggatcgcgcggcggcggcggtggcggtgcggatctggagaacggggaggagggagttggtttttttttttctctccttttttcccttcgcttttttagtttgctggttgattc

SEQ ID NO: 386447 - DNA, 633 bp, Oryza sativa
  unsure (1)..(633): unsure at all n locations
aaganannnnngattgtaatacgactcactatagggcgaattgggtaccgggccccccctcgagtttttttttttttttttttaacacacatcaccttaggagtaaaatttatagccgcagcccgtggctccagacacttttagtcaatgtgcattgaatatgcaatagcgatggaaaacttgcattctacttaatgttgcattccaccggtctatgccccccaaaaacaaacttgaataaaaaaggaaaaaaattccatacaggtccaatgtatagagaaggtgaaatctattaacggggcaatggccaaaaaagacccaaaagggaaagaaaaaaaatattatgaacaccaaatagttgctgtcttctagcacttcctgctacacctccctgcacatccttcgcagcaaccagtcctataaagcatcgtgggcaggccggtactttgtcaacaaatctcatcagtcttcagggaccaacgccgatggttgatgcaggcaacaaatgaatctagtagcaggttatttaaaatccgccacatcccctcncctattgcactcccaagtttctgttcntaatccctgaatttctgccncggtgcngattaatgataacaatccaaactcttccct

SEQ ID NO: 386448 - DNA, 1127 bp, Oryza sativa
ggaaaacaaaaaaaaaaactagaacaaacctttatttcataacttttttttcagatctttttcctaacttctaaggatgaaaactaccagtaatcctctttttgtttcttttttactactattacatagggttgtgacaacaacagatatcagtaataatcataggatctaaataaataagaacaagcaatggagttgggaatcactcatcttcgtcgggcctgctcgcgaggcacagctcatggagctcattgagaatccactcctccccagtgtggccacccaggacaagaaccctggtgccgccaaccacgcatgtgctatgaccccaggcgaacttgggtggctggccagggacgttcaaaatcctccatgtcggcttctcctccgctgggtcgaggaggaacagctgtgagggcgagtgcagcccagcgatggagccaccgaatatgattatccgtccacaggggaggctgaccgcgacatgatcgagcctcggaggtggaccgatgctcgggaacccggttgtcgccagttgcctccattgtgggctgtcttcaccagcgtccatagtgtaggcatcacaggagcgtagccggagagagccgctctttgccaacccaccaaacatgaagagtttggtcttaccaaagacggacaaggtgtggccgaggcgccctggtggtgaccaggatgttgggatctccttccatgctggtttttccttggtgaggtcaagcaggaatgtgtcactgaggagcacaccggattcagtgcacccccctgagacaacaagctttgatccatccagggtacatgaactgtgccatgacctcggcaatggtgggccctcgcttgcaacctccctccaggtgggctgcttggcatcaaggtcaaggacaaagacatcattgagcaaaccttgctgtccacagcctccaaagaccactagccatgagccattcagccatgagagagtgtgcccccaccggccgggtggagaagctgaaactttgacacggcgccattcaggctttgcagattccaggttgagcacaaaggtatcatccattggctgcatgttgactccttcacctccaaacaggacaaggcgatcggacgcgtgg

SEQ ID NO: 386449 - DNA, 741 bp, Oryza sativa
  unsure (1)..(741): unsure at all n locations
nnnnnnnnnnnnnnnnnnnnnnnnnnnnnnnnnnnnnnnnnnggcacgaacaccatgagatcaatgaaatatccttgctcatcctgcagccttaattatatatattacatatggtacatacactgggaagaaaaataaaaaaaaataactccttgattaattcccccatttggttcacgcacaccacccaacccaaaagcggccacgaacacaacaagatacattttgctactgctcctccgacctccaatcgttcgatccgagcccatgcacgcgcccgatcgatgcaacagctagcgatcaaacacgaagcgcgcatgcaagcgaaacccaactctgtgtgtcagatccatggcgagcgagagcggggttgattgctcataggccgagggcgccgagcggcgtcttgccctggccggcctcgaagtagaagatgagcatggcgagcatggcgaggcgggcgtgcttgatctcggcgagcttgagccggtcgagcttgttggtttcggntttaaaacnnncnngttnnngcaaggcaanggnnnaaaatttnncggggnancttnccggggttnnnaattncgnggnngananggggnatcnncttgttcgntnaantnnccncttggtttactancnntnnaaattnnnttccntngggggtcaanaaggggtannttctngttnnaggnngtanaaaannnntntgtagttttnnnnaaaanananagnanaattagn

SEQ ID NO: 386450 - DNA, 1146 bp, Oryza sativa
aattaaatatccttgctcatcctgcagccttaattatatatattacatatggtacatacactgggaagaaaaataaaaaaaataactccttgattaattcccccatttgggtcacgcccaaccaacccaaccccaaaagcggccacgaacacaaacaagattacattttgctactgctcctccgaccttccaatcgttcgatccgagccccatgcacgcgcccgatcgatgcaacagctagcgatcaaacacgaagcgcgcatgcaagcgaaacccaactctgtgtgtcagatccatggcgagcgagagcggggttgattgctcataggccgagggcgccgagcggcgtcttgccctggccggcctcgaagtagaagatgagcatggcgagcatggcgaggcgggcgtgcttgatctcggcgagcttgagccggtcgagcttgtcggtgtccgggatgtagacgccgtccctggtctcgccgccgaggccgagcgggtcgaagaacttgccgccggggtagccctgctcgccggtggcgttggagaagttctcgtcggtgcgcgaccacggcgtggcccactaccaccgcctgcgagtccgggttgaagaagtcgacccaccgcttggactctacccagcccatgagcagcagctgcgtcccgaggagggagccgaaggagaagggcgcgatggcctccggctgcgcgccggcctcgaaccacggcacgccgctccacgcctgcccgacgaagatccccagcaccgccgccatcgcccaccgcccgtggatcagctccgcctccctgtaccacttgaggaacgccgggtccttgcccagccccagcgggtcgaagccgaagtcaccggggagcgagccatcgagccacggcgggttgatgaactcggcgtcgctcttgaaggccgggatccacgacttcttggccgacacgacgagcgcgcggcgcggcgcgggcttggcgcccgcgacgccgacggcattggcgagcgcgcgcttcgccccgaggaagggcgtcttgagcacggccgcggacgcggtggcggaggtggaggcgagcgccatggtcgtcgtcgtcgtaggggggctctctcttccggtggcggacggtgtgatcgcggacgcgtgg

SEQ ID NO: 386451 - DNA, 421 bp, Oryza sativa
  unsure (1)..(421): unsure at all n locations
aatttggntncaccggnacaatcaaacacaacccactcaaacccggacgcgcccgcccacccaaccaagatcacatttttgcttacttgctccctcccgaccctccaaatcggttcgatccgagccccatgcacgcgcccgatcagatgcaacagctagcgatcaaacccgaacgcgcgcatgcaagcgaaacccaactctgtgtgtcagatccatggcgagcgagagcggggttgattgctcataggccgagggcgccgagcggcgtcttgccctggccggcctcgaagtagaagatgagcagctgcgtcccgaggagggagccgaaggagaagggcgcgatgnctccgntgcgcgccggcctcgaaccacggcacgccgctccacgcctgcccgacgaagatccccagcaccgccgcca

SEQ ID NO: 386452 - DNA, 719 bp, Oryza sativa
  unsure (1)..(719): unsure at all n locations
tttcagatgttattggtatacaatctacagactacacttttttttttttgttaaactttctattgtgtgctcagcttgaaatcctgaaccattactctgcaagggcctaatttttttgtcggaacaacaaaaattcgataaaccatacatacaattggaaaaggagagcatgcatgcgagcaaaataatgtattcaagaggaaatacatttggatatgccaacaattccctacatattacacactgagcctaactttcttttcatcatgaaaagatctccccaagtccgcctaagttaaccttgcaatgggaacatgaatccccaagaggagaaccaaaatgcatgaaaagagatacaattctgatcacaatttgattccagccaagtcaaaaagcttttcagcctggtcagggaacaatgtgatgaaaaggtaggcacttatcaacacagttccaagaacagcggtaatcttcccttgcaccgtcacaagtcctgctttccctgcgttttgcagctcacttttgccaacagattcaaatgttcctggcttcagtgtctgaagccctgatttgatgcatgccagattttggaagccttctctctccaatacatcagcagctcccgtggacctgagcccttcttgacagaccaccagcagcttgctctccggcgagaacttatccttgaccatcttggtgaantctagggtccgtttggt

SEQ ID NO: 386453 - DNA, 422 bp, Oryza sativa
tttttttttttttttaaaattacacattgaagatcttattttattgactgacttcaaatctctttgacatacactcttgatagaactctccatcctaatgctagaaggcaacatcgcctccgatagcccatctgtacccatacacattaattctcaggcgtcggccatgctgtgcttgtacctttcctctttaacgtataatgacgtaatgtaacccctttttatagcctggtcttagcaacgatcattatgataaggtgactgcacttaagaaacgtgtaagctgaacctaaagtacattcagcaacacgcaaaatcttcatccgtgccgtgttgatcacatataaatcatagctatggcaccgacaaagcacggaataataaatatgattaggaaacgacttaaataacagaacagtcag

SEQ ID NO: 386454 - DNA, 821 bp, Oryza sativa
  unsure (1)..(821): unsure at all n locations
cccacgcgtccgttttttttagaatcccaaatagagtcatatacaggtacatggctcaataattacaacccaggaattacatacagaatccaagaataagaattacatggctaagtaggatgcaaacatcttctcaacctatataaaaaaactgaaaatacaaacaagactcatatatacacctaataattggtgtggatactcaatctcccgcttgacgctactcaattccctgttgggcatgacacatctgcgtttactacatttatacgacgatggaaggtaattcttaaatgttccgtgtttaatagaagctgaaagatgactccctattagaagcactagagtgatttctcatatttattttgctggtacatattgaacagcaacagagcaatttctaaccaaagaagtgtagctaatgaacttcgatgtaaggagtatcccttcagcaaacttaagtaagagagcagttttcagaacagggactgcttgctgccaacttggagccagattaagctgcccaagactgaagataactacgaatcaacaaaggccgacggcgggcgggaactgggacgtcgtggcctgcgggaacgcgagtgcaacatccaacgccagcagccccaccttgccgcctccatntccgccttcattgcggcttccgagacaacttcgggtgacatctcctctccatcttggccaccatntctgactccaatcagctcaacaaccagctccaaccacagtgacaacccacccaaccttgcaagcacaagctcgtgccgaattcggcacgagctcgtgccgaaggcttgcac

SEQ ID NO: 386455 - DNA, 554 bp, Oryza sativa
  unsure (1)..(554): unsure at all n locations
aatatctcattatttaaaagaatgggaaaccgagaacctgagaacaccgggaaagcaagagaggaggtctcaccggcgggcgggaactgggacgtcgtggcctgcgggaacgcgagtgcaacatccaacgccagcagccccaccttgccgccttccatctccgccttcattgcggcttccgagacaactttcgggtgacatctcctctccatcttggccaccatctctgactccaatcagctcaacaaccagctccaaccacagtgacaacccacccaaccttgcaagcacaagtaacatgctatcataagtgcaaaactacattataagaacagcacaaatacattaaaaacatatgaaaggcatactaacacggggaagaaggagacggcagggtgccgtggatgggcccgcgcgtgcagaagcggcggtggcagggaagccgcgaccacagtggacaccaccggatctggaccctcccgtcgtcgcccgccacggatcagcgtgcagcgggcccctgggcgaccgtnccagactagcaggtgcactcctcn

SEQ ID NO: 386456 - DNA, 784 bp, Oryza sativa
  unsure (1)..(784): unsure at all n locations
caaccaagcctcatatatacacctaataattggtgtggatactcattctcccgcttgacgctactcatttccctgttgggcatgacacatctgcgttttactacatttatacgacgatggaaggtaattcttaaatgttccgtgtttaatagaagctgaaagatgactccctattagaagcactagagtgatttctcatatttattttgctggtacatattgaacagcaacagagcaatttctaaccaaagaagtgtagctaatgaacttcgatgtaaggagtatcccttcagcaaacttaagtaagagagcagttttcagaacagggactgcttgctgccaacttggagccagattaagctgcccaagactgaagataactacgaatcaacaaaggccgactgcacagtgcacacacctctctcaaatactccaattagatggccaagacagtttcacccaatcataatatctcattatttaaaataatgggaaaccgagaacctgagaacaccgggaaagcaagagaggaggtctcaccggcgggcgggaactgggacgtcgtggcctgcgggaacgcgagtgcaacatccaacgccagcagccccaccttgccgcctccatctccgccttcattgcggcttccgagacaacttcgggtgacatctcctctccatcttggccaccatctctgactccaatcagctcaacaaccagctccaaccacagtgacaaccccgnacgcgtggcggacgcgtgggtcgacccggaatcgaaccggacg

SEQ ID NO: 386457 - DNA, 445 bp, Oryza sativa
  unsure (1)..(445): unsure at all n locations
nnnnnnnnnnnnnnnnnnttnttnttttnntttacagctaaaaatttccattctcccaagcattcaagcatcaaaaatatccacacatttaacaaaaaatttgaacaccaagcatcaatccaaatacaatgcttcacaaatatcatcacaaatattacaagcatcacaaatacagagaaccgctgtcgccggcgtcgtcgtccttgaagtcccctgcaccatcaccgttgccactaccgagccccgtcggcctcaaccgcctccgcctcgacgacgctgctgccgagccccggcgacctccaccgcctcgacgaccctgctgccgagccccggcgacctccaccgccttcgcctggccaccaccgctgtggatccgccgccttgcgccttcccgtcgccggatccgccacctcgcacctacccatcgacggatccgacacctcgc

SEQ ID NO: 386458 - DNA, 1707 bp, Oryza sativa
tttttttattaacaatgttcatcacattagatccagtgctcaacagcacaaacaatacaaacagtttcacagtttctctgcttaatatttgcagagtctgaatatcagagcagcagggaagggaggagcaagtagcatgcaggttcagacacaagactccaggcagttcgattacattgatccttataaaagaccagcaaccataactatgacgaagctaggcgaccagcgggtgaagactgaagaagactgatgagaagacgaaggcggcacagcgctttaccaggccgacaacctgttctaccgtctcactgaaggacgaggcagccttccgcgacagcaggaggggcaatggagacaggcgtgtaggtggcgtcctcgtcttcgctgacttcctcctcgtcggactgaaccagaccagcggcatcaaagatgtaggccttcacttcctcgaagcgttcctccgacagggaaacctcagcgagggagtctccacgcagaagcttctgatgcctcctcgtaatcactccttcgtttcagcacgatgtggccactgatctcccacacagctgggttaacctgcgtgtccagtagctcctggctcacttctcccagagcctgcttctcggcatagcactgagggaagaggaagatctttttgccgcagtcagagataagaacattgtaaggcacattgttgtcctgcagccagatacaagcgctggaaaccacattggccagatcgctcagtgagttgcctccctcaaaaaccagtcccctcacagggtagttcatcagcttggacacctttactccactattcattgtgccctcagcaaggaaaatcctcttggtagctgccttctcaacagggaaaggcactgtcaagtagtatgcctgaaagtggaggtggttgatggttgcaaaggcacccaaactattatagccaagcctgaagtatgggcttgcggcttcagcagccatgtgcagtgcaagcaagaagctctcctggtcaatcctctgaggcaggcggtccagtacacggggaatgagaagaacatggccatattcaattgggcttacattgattgcaacaacattaggagcacgatcagcaacactgattggggagctctccacaaagaagctgtcatcaccaccaccattctcaaattggaagagcacctcctcctggccaactttggtgaagttgaacttggcagcatcaaatggttgaagcacacggtccacgcggaattcagtagggcgcttcttgaggtggcgtccttcattcagttgtgcaacaaacccaaggttgcctgggataaccttggtctcacaggcagtgacatcatatcggaacaaacctcgggccatcctgtcttcccacaggccgagcaggagattgacaaagaactcatcgttggaagcatcctcctgcgaagacggctttttcggactcgccttgaaagcatacagcggaagcttggaatcgggcaagcagcaatccccgaggcaatccctcccgcagccggcgcgggggcgttcgccggcggtggcggcagcatcctcctggtagttggaaaccacggtgggcacccgcttgatggtcagcttcatctccatgattaaatctcaattccttcctctctaacggggtcagggtcaggtcagcagatgtctttatgtaagcgtgaggcgtggccc

SEQ ID NO: 386459 - DNA, 529 bp, Oryza sativa
caggcgtgtaggtggcgtcctcgtcttcgctgacttcctcctcgtcggactgaaccagaccagcggcatcaaagatgtaggccttcacttcctcgaagcgttcctccgacagggaaacctcagcgaggagtctccacgcagaagcttctgatgcctcctcgtaatcactccttcgtttcagcacgatgtggccactgatctcccacacagctgggttaacctgcgtgtccagtagctcctggctcacttctcccagagcctgcttctcggcatagcactgagggaagaggaagatctttttgccgcagtcagagataagaacattgtaaggcacattgttgtcctccagccagatacaagcgctggaaaccacattggccagatcgctcagtgagttgcctccctcaaaaaccagtcccctcacagggtagttcatcagcttgcacacctttactccactattcattgtgccctcagcaaggaaaatcctcttggtagctgccttccggacgcgtgggcggacgcgtgg

SEQ ID NO: 386460 - DNA, 858 bp, Oryza sativa
  unsure (1)..(858): unsure at all n locations
nnnnnnnnnnnnnnnnnnnngcacaaaagacaggccagttagcttattggaacattccaaatatacagggttcaagcaaaacatcttctagccaagaagcctcgagcattgcaaatatacaaggttcaagcaaagcatctactacttgagaattcagataatacatcaagcaaaatcacacaccagccatcagtgcttccatctttagcatcacagcctgaaagctcattccaccatcctccacatgcccatccatttgacatagttgcagagggcttaaaaggacgcgaaaacacgacgcagcgatgaactgcgggcttggctgcagactgcagcaagctccatcgcagcccagagcaaacatatgtacatatatgacacagcagacgacaaccttactacacaaaccatacacgactcaacatagtagacggcgagcagcagcaggcgtacttaattactagtagcatctacgttatatcacagtagtagaggtaagataggtagacaacactcgacttccatccgcttcggtctctgatatgtctctcctcctcctctgccttgtgtgtgcagtagacgctggcctaggagcaaaaacgagcgtgagcacgctgggggctcacacttcaaagggaggagggtgactggttgtcccaggtgttgccctctcatacgcgtcggacgatgatttccttctgaagcgaccaccggcgccggcgtcgtcccacagcttgtcgaggagacccatcacgtcgtcgtcgtcgtcgtcctcctcctcctctccgccaaaattaccgaactgccacggtgacccgaatggatagatccaaaagaggcttctcgcggacgcgtggg

SEQ ID NO: 386461 - DNA, 728 bp, Oryza sativa
tagtagacggcgaacaacagcaggcgaacttaattactagtagcatctacgttatatcacagtagtagaggtaagataggtagccaacactcgacttccatccgcttcggtctctgatatgtctctcctcctcctctgccttgtgtgtgcagtagacgctggcctaggagcaaaaacgagcgtgagcacgctgggggctcacacttcaaagggaggagggtgactggttgtcccaggtgttgccctctcatatgcgtcggacgatgatttccttctgaagcgaccaccggcgccggcgaacggcgagatgggaggggtggatccggcgggggaggccggcggcgtgctggccgcgctcctcggcgacgccgggtaccccgcggggcgcttgatcatgatgctgcgcgtcaccttcaccggcgcctcctccgccccggccggcgtcgtcggcgggacggccaccatcgccgcgtcccctgtcgggtcgttgatcttgacggcggcggggcgggcggcggcgtgcttgcggaggcggccgaggccggtgtcggggcggggccccgcgacggtgtcgtcccacagcttgtcgaggagacccatcacgtcgtcgtcgtcgtcgtcctcctcctcctctccgccaaaattaccgaactgccacggtgacccgaatggatagatccaaaagaggcttctccggacgcgtgggcggacgcgtggcggacgcgtgg

SEQ ID NO: 386462 - DNA, 430 bp, Oryza sativa
tttttttttttttttccaaaatccacccttaaaaccaaagccggcagttcagtacaatatcacacgagtatctgatcaaagcaccgcaaaaggcagctacaaatccaacgcgatttcatcacccaaagacccacaaatctagcgagctcattgtgtgagtgatagtacgtagcctagaactcgttgaagtgaatggcgccgagcttccagacgaggtacgtggtgccgaacatgacgacggtgatgagcgtgaaggaggcggcgatgacgatcacgtcggtgccgaacggcagcgcctcgaacgtccacccttccttgggcaggccgcgcttgctgtcgtcgaacatgttgctcggcgcctcgggcagccgcgacgaccgcttcttcccggccttcccgtccgtctcccgggagcgcgtccagcacccgg

SEQ ID NO: 386463 - DNA, 819 bp, Oryza sativa
ccgcccttttttttttttttttgataaaacaagtgtaccacatagataggacagaaaaatgtctgaactgagttcattcaggtcgtcccttacacatacaagcacgacataggagagaataaccgagggatcatagtcttgatacgggatcacactatatcaataaaatatgataattaccactattactcatatcccagcttattataataacatattatctgaaaattcagcttccatgctacctccttccgcatccggttgtttttgcacaccgtgcctcgttggcagtggcagcaccacatttgtcaaatagggagtttcggacttccttttgcttgaggatcccagcaacatcccaggctgtttctgttttctctttttacctggagcaggttgtggatagttggagatggtggtttgtatgaaggtggaacctatgccaagagtacgcggagcaccctcaaaaacagctggttcatgtatgagccttttcctcatgtcaacaggaatgacccatgccttgtaatcacggtggtcgaccttggccatgaagtaaacaacatcgccattgttgtccaaactgagcaagggatgacctatgtggagtctctccaaggttggggttgggtgacagtagttgggtagctcaggaggcatcagatgagagatgtcagaagcgttgagcttgcagtccatgtgccagcagcaatcgtcggattcagtattactgcagctccatttggcaaccgtccagccctgagagatgtaaccggttctatccgactcgtgttgaatagcatcgacccggacgcgtgg

SEQ ID NO: 386464 - DNA, 453 bp, Oryza sativa
  unsure (1)..(453): unsure at all n locations
ccacgcgtccgcggacgcgtgggttntttttttttttttttttttttttaaagggagtaccaattcagcagctttctgcctaggattggttacaaataaaattgcaatatatgtcaacatcgtgtagttaatcacgaaacgttaatcatttctccattgaggggcaaaaaggtaatcctagatatacaagcaagattaggttttgggaccctctatccatttgcctgtcaggcacgtccaaagctgtccgaattccaaataatccatttgccttttcctctcttctattgagaaagatcaaccaatccaattgtcacaagacatgcccagtgacctaagtcataattttgggtgttccactaacatcatgaagcgcgtcatcatctttcttcgcccattttccccctttctgaagtgtattcttgagaatcaaggacgtgtaatattgggatg

SEQ ID NO: 386465 - DNA, 692 bp, Oryza sativa
  unsure (1)..(692): unsure at all n locations
nnnnnnnnnnnnnnnnnnnnnnnnnnnnnnnnnnnnnnnnnnnnnnnnnnnnnnnnnnnnnaggccggaccaatcccaaactgtaacatccactaagtacatatccatatgtatcatcggtcatcaccactctaaacatcttatgtacattccctctgttctggtagcccaacaaacacatatgcacacatcaccagggaagcctggaaagtgggggaaaaaaggtctcgcacctctcatacaacaagcacacgcctcagcgtaatagcagtaacacacatattaagcctcggtggcaaatatactggtctaatctaataacccgctggtcactggctagtgttaggagtcgtctgcctgctatcccactgagcatgcaccgtgtcgggagataatggcgggtcaggtcccttcttgtctttgcctccatctttctccatcacgcataggtcctgtacccccttgagcccctcgagcacctccttgatcggcggcctcatctcgccgttctgctgcaggcaccggaaagccagctcggcgaccatggtcatcatcttcttcgtcgccgggtcggactcgtagccgagctcgaggtccacgagctcctcgagctggctcttctggatcccgttgatggccatgccggccaggttgatcttgattccctgccgggtgatgtccaccgccggctt

SEQ ID NO: 386466 - DNA, 854 bp, Oryza sativa
  unsure (1)..(854): unsure at all n locations
naatctgaaagtgggagcttacagtatgggtctatcagtaacaacaatatgtttgaataatgaataatagtacaaaccaaactggagaatatttcaaggggtccaataccaacatacaacttcactatcaatatatcatcatgtggtacccttttaaccgatataatgatatgtacaatcagttttttcttaaccggatactggtaactacagtagggctatgatctcttctagttgaaaattcttggttcagcttctacacttgtgtgaactccagtgcatttccgtccgggtcccgagcaaatattgctggtcgccctgatttgctaagtgtgtatttgattccggctttgtcaaagatttcttttaacttcaacacatctttgatcgccatacaggtatgacgatcacgtcccccatgctctggcgcccagtcaatggatcgggatttggcagctccatcaagtgaatcatctcagaaccaacccagagccaagcacctctgtaaggaagcttgtcggttggcctagcaggattcaccttaagaccaagcagatctttgtagaaggccattgacctttcaagattttcacataggatcccaacatggtgaatgctaacaactccataagcaggttcctgggacgcctcctgcgccgtgacgagttgctccccgccggtggccaccgaaaggcgggtcccgggacggcggcgaggggcggcggaggaggggacgggcggggaggccatggccgacaccttcccggagctggagggggagggggagaggagggcgagagaagagaggcacctcgccgccattgctgctgcctttggatttcttgattttcttc

SEQ ID NO: 386467 - DNA, 581 bp, Oryza sativa
tttttttttttttttttgacgacagtttagttcatgtacaatataaactttccaaagtgtttatacagtatatatagtcatagctatttcttaaacttttaataaatgcaaatatatacaatatttaaagaggcagactaaggagtataaaaaaggatgcttcacaacacgattgtcacaagatgaaaagttcatcttgctctccatggtagatacaaggaattgctttggtgcagctcctgtcctgcgaagtgatcttcaatcaagcctcagctgtttctgggagtgtaatcaatcgggatgcagaatcgtataccaatgaactgctacaatttgcacatttcacactgtttcttgcaccaccgctaggcacagacagtatagtcccaaagaaggaaagattttcattgccacagttcgggcacggtcccttcaaaattaaaaagtccttcactatggcactcgtaattgcctgtgctacccaaaatattagaggcagtgcggcaaaccatgtgaagatgaaactgaaaggctctggcaactcaagaagatatgtgatctcaaaacctgtcaaatcatct

SEQ ID NO: 386468 - DNA, 672 bp, Oryza sativa
gtcactaccgcacaaaatataataggtcaatcataccaatactgttcctaacacaaaaggctttgtttgagggttctaattctctcagcatatgaaaactaacggaatacaacatagctttcatgtgtagcttctacagcagactacggatgggttcagcgactaaaattacacagttggtccagttacgagataatttgatgaaactaaataaatgttctggtgccgctgattgagtaacccaagataaaacgctgattttccaggaggtgcacttattgtatcctagaaaaaactctcatgagttcactcatttcccatatggatggtacctgctggaaccccgcccaccagcacctcctgctccagctccaccataactgccatatcctccagcaccaccataggcacccggagcgccaccataggcaccaccaccataagcacctccgccataggcaccccctccataggcaccaccaccatatgccccataagcaccataggcacctccatacaaggagccaccataaccaccaccatatcctgatccaaatccagcattacctccatagccataccctcctctgccataaccatatgcagtactatcataataacctcctccagctgatcggtaaccagcaccatacccatagcccggacgcgtgg

SEQ ID NO: 386469 - DNA, 786 bp, Oryza sativa
tttttttttttttttttataaatatagcatgttttatacatactcatacgtatgcacgtcacatcctaatcaacatcagctaggtaaattaaccttgccaagccatttagatacaattatcagataatactaggttttatacaatttttgcaggtacaccaatgctctcgtacaaaatcaaggcgtagggtaggggcacagtaattgatatacacactaaatactctgcttaattacacactaattgcaaattaagtggtaattaatcactcaaagctaaggcagtgagcatgtaatcgcttcagctggacgagctctggagcttggacacgaagctggaggcggcgaaggcggtggagccaccgacgacgcaggcgagcgcgaccacggccttggacaacaggcccagccgctccaccgccgacagcgacagcccggcgcctccgccgccgacaggagccccgccttctccgccttcgtcagcagccgcagcttctccacgttcgtcagcagcttcaccggcggcgccgccgccttcccgctcgtcgtctgcctcggccccggctcccccaccgggaagtacaccgtcgtcccccttcttgtgccggaggtgggcttctgggtggccatggcggcgaccttgtgaaggcggcggctgctcggcctcgccgcgacggtggccggcgacagcgacggcatcgccaccgctctagctgcgtccatcaccatggatggattccctctcctaccaccacacgtacacctctcgttcttccggacgcgtgg

SEQ ID NO: 386470 - DNA, 930 bp, Oryza sativa
  unsure (1)..(930): unsure at all n locations
nnnnnnnnnnnnnnnnntggttttttagagaaaaaaatttataaatatagcatgttttatacatactcatacgtatgcacgtcacatcctaatcaacatcagctaggtaaattaaccttgccaagccatttagatacaattatcagataatactaggttttatacaatttttgcaggtacaccaatgctctcgtacaaaatcaaggcgtagggtaggggcacagtaattgatatacacactaaatactctgcttaattacacactaattgcaaattaagtggtaattaatcactcaaagctaaggcagtgagcatgtaatcgcttcagctggacgagctctggagcttggacacgaagctggaggcggcgaaggcggtggagccaccgacgacgcaggcgagcgcgaccacggcctggacggcgacctcccatgggtactcctccgggacgaggtagacgacggcggggccggcggcgagcagcagcagcgcgacgccgagcagcgcgccgggggtgcccgggtcggtcgccgccgacagcacctccagctcctccgccttggacaacaggcccagccgctccaccgccgacagcgacagccccgcgcgctccgccgccgacaggagccccgccttctccgccttcgtcagcagccgcagcttctccacgttcgtcagcagcttccccgccggcgccgccgccttcccgctcgtcgtctgcctcggccccggctcccccaccgggaagtacaccgtcgtcccccttcttgtgccggaggtgggcttctgggtggccatggcggcgaccttgtgaaggcggcggctgctcggcctcgccgcgacggtggccggcgacagcgacggcatcgccaccgctctagctgcgtccatcaccatggatggattccctctcctaccaccacacgtaca

SEQ ID NO: 386471 - DNA, 828 bp, Oryza sativa
  unsure (1)..(828): unsure at all n locations
nnnnnnnnnnnnnnnnnnnnnnnnnnnnnnnnnnnnnnnnnnnnnnnnnnnnnnnnnnaaaaaccgaaagggggggcgggggtcataataatctcttcagggcgacaaagaaggggtcatataataacagttccaatctgacaaaaacccctattcctcaacagagggggggggctgggaaactagaaagaaaagggagaaattgggggcgtgaagggccgctcattgcaacatacaaaaaagcccaacatgttacaaggggggctggttcaaaactaaataaatttcgcctcagccctacctagggactcaaaatttgcaagacatcgccattgccgcagcaacgttgatatgtctttggccctgaatctgtgttccgcagctaaatatcaatttcacaatttacataaaatgggagaagaaataaatcctagggaattcctaggccaaaagcaaagaatcgtgtagagctcaagtggacgtgtagctggagtgcttcagtaggttgttgagagcttctgggtaaaactttgctagcaaaaaggtagcatggtctctttgttccgttccacatacagggtgtcattgtcacaactttcttatcatcacttgtaatacggaagttctctttgatagccgttatgttcntcaatagtgcataggtaacatcaatagctctatacgaccttggatgccattttccttcagaccaatcaacatgtgncactgaccaattagagattccaccaggatctaccatattgaagagggttggcaaataatgctcatcancaatacagttgcgtccctctgctggcttgcaataca

SEQ ID NO: 386472 - DNA, 975 bp, Oryza sativa
aattttggaatccagctagtattatttcagcagtaatgcttaccaaacattcaacaatcacatgagagcaatgtatgttgcacttgcacaagagtaagagacaacaggaggagaggacctaagggccaaggcagcgccgccgggagggtggtggatgccgatcagacgtcgagggttactgcgggcatctcgaactcggaggtgatctcctcgatctgcttccggacgctcatgtcgatgaggctggacccgtcgcggccgtactggatggtgaagccggcgatgagctccgggtcgatgcgggtcttgacccggacgttcttcgcgccggtgagattctgcacctgctgcgcgatctgcgcgaggtcctgcgactcgagctgcacgacggaggtgacggtggccacctcggtgccggtgagcgagttgaaggcgttctcgaactcccgcacgatctgcgtcatgaggcccgcgcggccgttgtccaccacgacgttgaggaagttgacgacgtgcgcctggagctccgacgacttggcgatctcgtcgatgagctgggccttctcgtcgcgcggcaccgtcgggttgtcgaagaactcggcgatggcctcctccgcgaagatcttctccagcttctccaggtccgacacggtcgcctcgagcgtgccgttctccgaggccacctcggacagcgccgtcgcgtacccctccgccgcggcgtcggcggcggccctgcgcctggcgaggtccccgcggcggcgcggcggcgcgaggcggagcgaggggaacccgcgcgccgcggcgcgggcgaagttggcggaccgcggcccggcggcggacgagggggaggcggcgggccggaggccgacggaggtgaggcggagggtggccatctcgtcgggaggtggggagtggcggacgcgtgcgcggccgcgtggtggactccaggagtgcggcttggctcccacgcgtccg

SEQ ID NO: 386473 - DNA, 551 bp, Oryza sativa
  unsure (1)..(551): unsure at all n locations
atatttttttattttntggattattttttttttgatgaaaacaatggcactttctatacatatctgcaaactctatcggcaggtacataatggaggagcagcctcgctatagtttagtatttgaagcaaattacaagggcaacgaaagaaaagagaattacattggctccggccaaaaaatgaaaagaaatgcagaaaagaatgttgtcgtgatcgtcatatgtatttgagcctcctccattatatcttcagttctgaaggggatgaggaccagcattcttgacaagccttcgagattccctgtgacaatggagctaagggccaaggcagcgccgccgggagggtggtggatgccgatcagacgtcgagggttactgcgggcatctcgaacttcggaggtgatctccttcgatctgcttccggacgcttcatgtcgatgaggctggacccgtcgcggccgtactggatggtgaagccggcgatgagctccggtcgatgcgggtctggacccggacttnttcgcgccggctcnngggaatcntgcacccagg

SEQ ID NO: 386474 - DNA, 448 bp, Oryza sativa
  unsure (1)..(448): unsure at all n locations
nnnnnnnnnnnnnnnnnnnngcngcaaaacatcaggaaaatatgctattaatccatgccaaatgctcacacaaaaattgattcgacttgcagttgtaatcccctagacgagggtgtttaattgtacaactcgcaggggctccatgtataaaatctcaatcccctggcctataaccaaagtggctgaggagaccattgtacagttttgcgttggcttcatcatgtattggtaactactgctactatggtttcacttgaacatggaaatgtcgaagatgagggcagagccatccgtggacacggagacgatggagttgccatcagcagagacggcgagggactgcacgacgtcaccgtggccggcgaaggccctcacgcactccccggagaggctgtcccagattcgcaccatgccgtcgatgcaccccgacgccacgaacctggacggg

SEQ ID NO: 386475 - DNA, 1692 bp, Oryza sativa
aattgtaatacgactcactatagggcgaattgggtaccgggccccccctcgagtttttttttttttttttttttcaacggtaaaccccagagagcatgaaatctttcaaatatcttccttcgtaatttgacagccgttccagttacaccacaaattttgctatagtgaccctgtttatttcacttcccatgggaacaaatcaaattgtctcgaaactactcaaatctcaccaaaattcagattcaagcctactacccaaaaattgacggccagtgaccttcccggagaacaagtaactgtaacttagtcatcagtacccgtagccggagttgtccatcgggttggtgacgggcgcaggctcaggctccttgatctcgacgacgacgacatccgatgtgaggaatgtcttggccaccgacgcagcatgctcaagacaacatctcaccaccttagtggggtcaatgataccagcagccatcaaatcctcgtactgtccagttgcagcattgtaaccaaacttgaagttatcgttagagagaaccttctcggtaacaacgcttccattaacaccagcattcttagcaatcaatttaagcgggtagctcagcgctctccttacaatttcagctccaaccttctgctcatcattctccaggttgtccttgatggcgtcaactctagctgccagtctcagaagagtgcaccctccaccaacaacaataccttcctcaacagcagccttggtagcatttagggcatcctcaactctcaacttcttctcttttagttcggtctctgtttgtgctcccacctgaatgactgcaacaccaccagcaagctttgcaatcctctcattgagcttttccttctcgtattcttgttcggcagcctcgatgagattttttatttgtgcaaccctcttagtcacttcttcctgtgtactgccatcaccaacaattgttgttgactctttgttaaggaccacctttgcagccgttcctaaaactgatttgtctgccttgtcaagtgacagcccaacttcatccctgattacagttgctccagttagaatggcaatatcatccaagtactgggtcttgcgctcaccaaaaccaggggctttgatagcggcaattttcaatgaccctctaagcttgttgacaacaagagtagcaagagcctcctgctcaatatcctcagcaattatcagaattgggtatgcacctcttatggcctcctccaaaacattgataagatcccttgcgttggtgatttttttgtccaccaaaagaagcttgcagttctcatattctgcagacattttctcgctgtcagttacaaaatacggggagatataaccacgttcaaactgcattccctccacaacatagagattattctcagaacttctcccttcttcaagggtaaccacacccttcctgccaaccttgctcatagcctctgctatcatattaccgatttcataattgttgccagcactgactgcagcaacatccgcaagctcactgtcttcaacctcctttgacaatttctttagctcttcaactagtgctttcgcagttttctcgataccacgtgtaatttgcacaggattggcaccagctgcaacgaccttaacaccctcagcaatcagcccctgagcaagcacaacagaagtagttgtgccatctc

SEQ ID NO: 386476 - DNA, 797 bp, Oryza sativa
  unsure (1)..(797): unsure at all n locations
cccaccggggtggggtcccccttttttttttttttcaaacatttgtatttttcaccatgagttatgttatattatcatcatacgggaccagatgtatcatagctagcagaagagagcccgaaacatcttcggatcaagcaaccaactgcaacattgcttaatgcataacatgcttaaaggtagttttgttacatccgcacatagtgaagtaacacagacaggtagctggtttatcatttttcaggcattacagattggtatcagcctcatttcttcccgctcttcttcagaccagagcctcccagtgcacccttctgtcctgccttggccttaagctccttcagtgccttttcctcatctttcttcttctgcagatacgcgagatcactctcgtcgtactccttcttctcggccttgggcgccttgaggggcttggccttccctccttgcttcgacatggctgaccggatcggcgagggcgagtcgagaaaccctagctcgcgcgccgcgacgacgaggaggagatggaagcccacgcgtgggcggacgcgccggttcatggacgagcggcgtgaagtagagcttgtccggcgccaccatcagcagcaggaactcggtcgcgatcagcgggagcgtcaggttgaagtcgaacagcgccgccttctccatctgctccgccagcgccggtagcggcgccgcggccacggccacggccgccntcgccacgagccccggcagctgcttcaatcccctccgcggttgctgctgctgctgccgcctgggcggctgcacggacc

SEQ ID NO: 386477 - DNA, 1309 bp, Oryza sativa
ttttttttttttttttggtggacaatacatttgcaagcttcattgaacatttatgtagcgaacaaacagttcattgacaacattttgcaaagtaggtaggggtgctcaatcatagcagtagcacatggtgtccaaaccatttacacgaatagcattaacacacgtacaaagacttgggcacaatcaaatagagtttatgtccctaggagatttggcgaagctaacataacaagacacctttttttttaactttcacaatagcaaaccatgtagtacagaccataaggcagactccatcttaaaactgttagacttcttggttttcagaaaattccctacagtcatttgatctccatcttgcttttgactgtggggcagaaaccattctagttgcggtttttggacttatcaactgcccttggagcaagtccaattgcatctgaacctttcatgatcctgagtctgcgacaagagttggcaaacatctcccatggaacatcgccaacaagcatccagtctccatccttgtcttcataagtcagcacatattcaccatccttgcggctctcagataagccatccttgccagttgtgaagccaatgaacatcttctcaagcgcagttgacaggtccttgtagttcttggtaaggtcttgaggtccaccttcctgaggtagggggcaccatccatgctgaccttgacgtacaggaacccctggccctgttcgcttcagcatcctccttgctgctcttcagctggttagtagccatcgtgttcttgcggtagctgcgaattggtggccatccaaccacctgagccttggcagcaggcgcctgcggcgcggcggcgaccttcttgtcctcctcctccgcatcctcatcctcctcgccggccgccgccttcttgcccttcccggcggcggcggcggcggcggcggacgccggcagcggacgcgcctcgtcggagaacccgcgcttggcgcccttggcagcggggagaaggtcgagcgtggcggcgggcggggagcggtccggcgagtgggagccgggcaggccgaggcggagctcggtgcccttcaggtcgttgtcggcggcggcatcggcggcggcgggcaccggcggcgagaggcctatgtagtcgagctcgagtgggggcgacatggggagcagcaggacatgaaccggagagagagtgggggagtgggtgtgggtgtgtgttgtgtccagcgagccacagcgagacaagagaagagagtgtgtgtgtgtgtgtggaagaggagctgaggtggtgaagctgcttcttcttctt

SEQ ID NO: 386478 - DNA, 971 bp, Oryza sativa
  unsure (1)..(971): unsure at all n locations
nnnnnnnnnnnnnnnnnnnnnnnnnnnnnnnnnnnnnncacccccaattttgacattccacattccaataaaacttggccggcacagtccaggattcttgaaccaaaaggccaaaaaatctatctcaacctactgaccatgactttgtttcccctcatctctcttgcctgggcagattttagctgccaatgaggtctagttggatcaagaattcacatatccttgtcaacgcatttacaaaaggaaaacaaagtggtggaaagatccttccagatttgctcgccaaaggccaagacagcatagctaacaatgctagggttttatgttttccaaagatcgccaagaatgtgtcatatgaactgcttcaggaattcagttgccactaaccgaccacgtgtatttaccgaaagctttagctcactgatctccttgacgatgtcctccataaactgacccaatgaaatctatgagcttatgcttgtgcatgtcctcacagtggtagtttgttatcaggaaactgatatcataaccctgaactggttttctcctcagcacttggaatgcgtctgctctcattgataaaaacctaagaaacttctttgcaagaatattttctagctcatctgcctgtttgaccttcatgctaatacgaatagagttgattgaagtctctatcaaacacttttctgcttcattacggcaaatgagcactgggttcagcagaagttcagggctagtctttagctccacctccggtttgttgtgcctctcgacctcttggcaagggaaattctgcaggcacatggcagcctccagagtgttccttatgcaagtgagatacaatcgcagcgtattagccatggtaggcgcggcggcggcggcggcgcccgccgggggtcggagaggtagacggaacggcggcgggtggaggcgatcgagcggcggagttgaggcgggatggagatgatgaa

SEQ ID NO: 386479 - DNA, 374 bp, Oryza sativa
  unsure (1)..(374): unsure at all n locations
cggcgcggccgcgacnttcttgtcctcctcntccgcatcntcatcctcctcgccggccgcggacgcgcctcgtcggagaacccgcgcttggcgcccttggcagcggggagaaggtcgagcgtggcggcgggcggggagcggtccggcgagtgggagccgggcaggccgaggcggagctcggtgcccttcaggtcgttgtcggcggcggcatcggcggcggcgggcaccggcggcgagaggcctatgtagtcgagctcgagtgggggcgacatggggagcagcaggacatgaaccggagagagagtgggggagtgggtgtgggtgtgtgttgtgtccagcgagccacagcgagacaagagaagagagtgtgtgtg

SEQ ID NO: 386480 - DNA, 498 bp, Oryza sativa
  unsure (1)..(498): unsure at all n locations
ttattttttattggatctcccaatgctcttgtcatggcaagcataagcataacncaaagatgaaaaanaaatgtcaaaattggattgagcagcatgacaagagaaaaatggaattcttttttccaccttagctctcaatctctcattgtcctccagaaagttgtttcccattccttcacagttacacaaagctggagaacttgcaggattttgcgtacaaattgagcacgtaattattgcgagctaaatataatcaagctaggaaaattaagcagcaattaaggtagagagattcaaattaaaagagaaagaggctaggactagctatagctagcgccatgggagagcaacagatcttcgatctgtcgtctcaggcgtcatggaactccagcaccaccacggccttggccttctccttcctgccgccctcgccggcgccgcggagcagccgccgcaccgccgcgatgagccgctccgccgaggcgggggacctgcaac

SEQ ID NO: 386481 - DNA, 1019 bp, Oryza sativa
cattgacagtacgtaccatgatggtttaataaaaggaaattaacagggtctgaatgttaaaaatagaaataacaaaaagaaattacaatatctgagctgagcacagcatgtagctacatattttttcgaatcaaatattaattctggagagatatcacgtgaataatgattggcaactacaaatatagattaaatttcaaacttactacatacttttggtcatctctctgtctctctggtcgggtgcatctaatgacgactcatccatgtcttgtgtgcccatcttttgttgaaatcgctgcccagccaaagattatcacacagggccaatatgtaattagcgttcgaataagtagaatctgtgcaataactagcaatacccgattgcccctcctaacatatagtgctattgcaaaacgaacgccatttaaaggctccgtatataagcacagtgatgcaatcatcatcattgcacagattgcaattgcagtgcatcgagtcactggggccagcactaaatacatacctagtgcaaaggcagtacccaaacttgtcactgaactgaaggccaggagtagagatatgttaaagtgccgacggcgaagtggtagactaaccataggcattccagagtacatgaggttgatgatagccaagctcgagcaaatgaatgctattgtgttagccatgatgaatgcatcaactatctacttccagcaagtgttggtgtgccacacattattgtgatcgtctgctcggtaacctcctggtatggcaaacattacgccaaacgtgacagtaacaatcagcactgaggcaatacccaaagtttgtgttgaatttgtcattttgtccgattccctcacttcatctacttgtttttgatgaataatatattgttcctgcaggtgatctacccgacgacaaccacctcttgcattgcaaaacgttagtgcccgcaatatcagtttgttagggttccatccatagaaatatcctgcaagaatccggacgcgtgg

SEQ ID NO: 386482 - DNA, 493 bp, Oryza sativa
gatggcaaaccagtcaagtgacctattcgacagtgaagagttaaacatttaacagatgcagcggggcaggagctagcaaaacctggtaacctttagtacgacagatttgatggtaatcgttcatctcaggcctggagatgtccaggcctctacaggatgagactagcttagagtgattttttagtttacaacttgtaatatggtaaaagctacagccagtttagcgattagattagacgaaaaaggttcgatattatcgttatgattcctacaaattaactatcgatttccattttggcctccgccttaacagtgggtggctcctccttcactgcctctatgactggatcttgtactggaggcgtagcttctttggaagctgaccaaggcacctcggttgctggatcttttggagacgtggtctctttggagcttgcatctagcataacttcctctttgggagtggtaccattttcatgggatctcaagatgc

SEQ ID NO: 386483 - DNA, 988 bp, Oryza sativa
  unsure (1)..(988): unsure at all n locations
atgcagaaaagtatcacattgcgagggctacagtgggactggtttaatacactggaatcagacagcgacgaattattcagatactactgcaaaaggaaatccttttgatctaaatattcaaatcattatattatttatctacatattataaggggaacttgctctccctatctttctcaaacccacatagctatgtacaagttatctaatacagctactgggcttgcttgtagctatgttaagttatacaccctgacactccatctcccatacctactttacaatcctctaatgtacaaaatttcagctgtatcacgctatgtctttatagcagcagaaggcagcataaaaatttccaaggcgttgttcaagtcaagatccctcttggaaggtcaccgagcgtgttagggcagccgggttcccctgcatgaatggcaagctgctgatcgctgtgtgagttgatgcctttgcctcatcctttgactcaaaaacctttgcaagcttgcatcctctgccatgatctgctcccaccttgtcacccttgatcccaataagcgaccagatagagctcctggccacctcgtcgacatcgtcgatccgaaccgtcttcggcacccacaccttgccattacccttgctatccagttcctcatcaccatctctagggtgctttcctaatctgaagcagttggtcattgtggatactggagaagcagcacttgatgatgaaaccgattgggattgggactgcggtggccatggagcgttccaagctcctggaaccatgcagccccagtatgcagcaacagcagctgctgcagctggatagaatggaattgcaatgcttgaagtgtaataagcaggtggtggtgccacgccaaatggccacatggctcctccgttcatgcatgggtgttgtgcaacatttggagatctatctgctgaaactttctcctttaggttcgtttggttcgattcttctnttttc

SEQ ID NO: 386484 - DNA, 585 bp, Oryza sativa
  unsure (1)..(585): unsure at all n locations
ccccancnngntggnggtcnnncnttttttttttttttggagcagcaatttactttctagttgtgaataaaaggtgataataagttcagacaaattgttgctacagcttaagctacttgcaaacatcttttttcacagcacgacagacagcaaaattaaatactaggactaactcttccctcacttaatacagataacagtgagacatataagcaacaaatgaactgctgttaagcttgtctttttattccgtccgttcatcgactaccccttggaaccagctctacggaagggaagctgtaagagtgaagtgcatcgtcttggttagtgaatttgtaccgtgcaagtacaaaaaatgtaacacttcaaactcctcatcattatctttctggttgatcagaacttgatgctccattaggaggtgtggacaaagcgctggttgatccattctctgctggtggaggatttccccattttctctcagattccaaggggtcccattacttaaaacaccaccttcagtcaggcctagagcaaactgatttgcttccgaaggatgtgccgccacaacgaccggacgcgtgg

SEQ ID NO: 386485 - DNA, 653 bp, Oryza sativa
ttgggctgccgaaattcgaaacctcatgacttcagacttcagaattcggacaaaacagacgcatgtggcacaaacacacagacagaagaaagtaaaacaagactcgaaaagaaaaaaatcctgaagtctgtaccaaagttcagtattacacctcacagaaaatggcccgtgtctgcagctgtgtttcttcttcgacagtcatgcgttcctctgtcgaaggggaacaacgtacgggcagccaatccgagcacagtatatatagtatagcagttctgcccggggacagtcaatgtgtgtgcttcgttacattataggagtatatatttctgcacctacgcgagcccgtacttggacagtggtcttagttttcgtacactttgcactcgtcggtctccgggttgtccttgcagaagtcctccagtgggtcgccgctgccctgcaccgccgcgccgggccacttgctcgccaccagatgcgccagatcgaccacgcgttggctgtagccccactcgttgtcgtaccaggcgaccaccttgaccatgtcgtcgcccatgaccatggtgagcgaggcgtctatggtggaggagacgtccgagcagcggaagtcgaccgacaccagcggcacgtcgcaaacgtcgaggatgccgctgagt

SEQ ID NO: 386486 - DNA, 643 bp, Oryza sativa
  unsure (1)..(643): unsure at all n locations
cccacgcgtccggttctagatcgcgagctncgtcccttttttttttttttttaccaaagttcagtattacacctcacagaaaatggcccgtgtctgcagctgtgtttcttcttcgacaggcatgcgttcctctgtcgaaggggaacaacgtacgggcagccattttttgcacagggtgggggggatagcanntctgcccgggggcgggcaatgtgtgtgcttcggggcgtggtaggagtatatatttctgcgacctacgcgagcccgtacttggacaggggtcttagttttcgtacactttgcactcgaggaccaatgtccgtctggcccgaggaaacctttgcacgcctccgttaccttttgggaggcctacgccccatagaaactgtctacctgagactgtcccttggcccgcgggtctgacacaaggttagaatccgagctcttccagagtggtatctcactgatggctcgggcccccccggaagggggccttcttcgccttccacctaagctgcgcaggaaaggcccaaagccaatcccagggaacagtaaagcttcatagggtctttctgtccaggtgcaggtagtccgcatcttcacagacatgtctatttcaccccacgcgtccgcggacgcgtgg

SEQ ID NO: 386487 - DNA, 635 bp, Oryza sativa
attgcagtgcaaaaaaggcctggacggactatttattttcccttagatatacctgacctgcctgatacaaaccaaagtacccgtataaaattattctgcgccacggtatcagtccaaatcaagaaccagtcgctggtaggtatagttgcgtcgttggtgctacacccagagggcacccgcattgcgaagcagcgggacaaggttgccgctgaggtgcagcgacatgaccttgtcggtggagccgacgagcctcccgccgatgaacacccccggcacggcggggctgcggccgaggagcctcgccagcgccttctccatctccttccccctcgggtcctcgtccagctccaccaccgtcgggttcaccccgagctcgcagaagaggcgcgtcacggtgtggcacatgcagcacgagctcatgctgaagatcaccaccgcccgctgcgccgccagcctgttcaccctgtccattttcttcttgccttcttctcccaagagctaattaattaagctaaactgagagatttttcctctggaaaaatgcagctggtcgcctgctactgctagctaggtatttagcttgagtactagctagctagcttcttgtatgaggctttgattgtgcggacgcgtgg

SEQ ID NO: 386488 - DNA, 1073 bp, Oryza sativa
  unsure (1)..(1073): unsure at all n locations
nnnnnnnnnnnnnnnnnnnnnagtgtcaaaatttgcttaaattttggtacggtactaagccaaacaagcccataatcttccacatcttccctgatttgaacgtgcttatcgtaaaaaaaaaaccatgattaaattattgaactatggaggactggaggctataaattataatctaatttgagtttaattccaaaagaatattacgagcccttagcccggtcaaaatatcgggcgtggaaagccgccattctatatcagcttcatgctagagcacctctgctgttgattcagtaattcacttctaaatttctaggacaaaatttctatgtttcctttcctaaataatatgtggagctccagagtccagattccggccattggatcaagccatccgagcaccgtatcgcgtcattagccctgcacaatttcagaacttccagcaggaagaacacgggaagactatcgaagtgtgtactcagaaagcttatttgcaactgtcaacttgggagaattgcccttcaaagctattcgtcagcttctcggcagctgcttctaccctctgattgtccttcccaataaaactcacaaccaaaggcccagatcttgagatccggttaccaccctatgtttccatcagaaaaatctatgcatagttttgcaaccactggggcaattttaacatctaatagcgacgtgcagagatgctttgacacaaaagatttagccatcactaaaccgctctcttgtgtgtctagaagacaaccccactccgtttcaagctcatcccacattagttgcagcgagaatgaccacatttttgcatttgatcaatggcaacggtagcattttgtgatgcaataattccgtaataccttctggcaacaaagccatctcatttcgatcaccagtgtaattgtctcctatcagttgactaaggtattcttcaaactcttcatcaggagccagacgaactccaaatgcttttgcaacgccagccagcgaaatgtctgaatgtaaaggcccaagtcctccaacaagaaacaccatgtcatctgtagatttgcaacgttcaa

SEQ ID NO: 386489 - DNA, 670 bp, Oryza sativa
aaaaaacatcctgccaatttaccaactgccaacggctttaattaaagctgagttcacatgtacttgtactcacatcccaacccacatatacagaagtagaacacactgataaattcagttattgactaccaaagagaagggggtaaataagcacgtggataaatcccactgcaaggtacaatagacttaaaaatgccactgaaagtctcattggaagtcgatggcattttcataactaccatcagaccaccaattacagtggcattttactgatttacctagataaatactgacgtggtcagatcggcgaacaagtaaaatggtacaacatgaattaggcttggaaaaaaccctttcattatgaaataaaacaacacccaaatgcttgattgcttgaaagataattcaccaggggttctggtcctcaggaactggaggagactccttcatgacactccatggcttggctggctgatgctgccccattggaaagttccagaaggaatcggagcgctcgtagaacatatagaacaggatggctgacactaggaaaagagataagagtatgagccagacttgccattctttccagtcagcagggacattcagctttgtcagctctgctccccgaacgcgtgggcgaacgcgtgggcggacgcgtgggtcgacc

SEQ ID NO: 386490 - DNA, 585 bp, Oryza sativa
  unsure (1)..(585): unsure at all n locations
gtgggaaaccttgcatggtctataaaacttatggatctttatcttcaattctgtcagcaaaacaatccagtttttatccaagcgtttcaagctgacgaacgatgtcaaattcggtagctagatcgatacacatagatagataggttcgccaaaaaaaaaaacacatagagatagaaagtgttttcaagctgatgaacgatgccttatttcatagctagatagacacacatagcgttgtctattgcataccaccacctatagcaatactgatccacatcaaggattatgataataaccactgccaccaccaccgttttgaccgttgccaccacctccggtataggcaccacggtacccaggttgcatatagcctgaaccatacccctctggaagttgtggctccgatggccccgcttgttctgctgcatgcgctacatcgtgggagacgagaaggagagtggccaatatgacaccaagaagaattgggaacttcgcagccatttctgaacttctgtgagtgtgtagagctagcatagattcggcgagcggccgctcgcgatnnagnncnagcncnngacgnntgng

SEQ ID NO: 386491 - DNA, 1182 bp, Oryza sativa
catgaaaggcagggatctacaacatcactacataaaacagacatccatagtaacaactgacaagggcaggttatttgcaacagaactacattcaactgatcacagccggcctggagttcattcctgcttgaacaacaaaggtacagagatcatactacacacccagaacactgaagcacttgccatgcaggcagtacttctcttttatgaaaagatgatacagatcagttgcaactatgttacaccaccaccatgtacaacgaccggacaccgaaacatcatcctagtgcagagctgtgaggattgcagtggcgctctcaaccttgaaggttgcaccacagatctcttcttcatttgcaggaacagcagtcaccttgttctttgggttctcatagcacttcaagcctccaagagcattggaatagaagcaaccttgtgggaaaggtgcaagtgacttgccacatgatcctttaagcaggtcaatgtcgttagagaaggcaacagatccatcagcagttatcccccagaacagaggcaccttgccctctggatcagaggccacaaggagagaagaggtggacttgtcgaagagcacaaaggcgtagctgccggtgagctgcgagagcatgaagctagcagggtaaggtgctctgtctctcagcgtcttgtacgcctcgataaccaggagcacctcattggcgcccttggacaggccatactgctggctcagcctgcccagattgtccaggactccctcgaacaggcagaagatgtcatcttttgctgcaaatgaccttgggcggaggagggcttggttggcatgggagtaggcgaggtggccgaggtcgccgagctgcacggacacggccggctcggcgccgccgaggaagcggctgaccagctccgacgcccgcgtcttcggcgacggcgtccggctgccggcggccaccagctccgccggcacctccaccacgtcgccgctgaacactcccaacatcttctttactctccaactaattaaaccaactaatcaagctacgctagccactgaattaatcctactgctaatcaaattagcatagatataatcttggcgtgtggccttccacactccttggattgatgaaacaagaagaaaacgaagctaacaacacgcggacgcgtgggtcgacccggattccg

SEQ ID NO: 386492 - DNA, 1204 bp, Oryza sativa
  unsure (1)..(1204): unsure at all n locations
nnnnnnnnnnttggtttttttgataacaaacaagaaaaacttatttgcaacacaactacattcaactgacacagctgggcctgaagttcatttccgcctgaacagcataggatacagatcatacacacacccaaacactgaaaagtgctaaccatgctggcagcactagtctttacggaagatgatgatacagatcagatgcatgccttgcgactatgttacaccaccatttacagactacagagttttcctttcccaacaacagctggagatccaaaaatctcctaatgcagcgctgtgaggattgtagatccttccaccttgaaggttgcaccgcaaatttcttcttctttggcaggaactgcggtcaccttgtgctttgggttctcatagcacttcaagcctccaactccaagagcattggaatagaagcagccttgtgggaaaggtgcaagagacttgccacacgatcctttaagcaggtcaatgttgtcagagaaggcaacagatccatcagcagtaatcccccaatacagagacacctttccctccggatcagaggccaacaaggagggtggaggtggacttgtcgaagagcacaaaggcgtagctgccngcgagctgcgagagcatgaagctagcagggtaaggtgctctgtctctcagcgtcttgtacgcctcgatcacaaggagcacctcatggcgcccttggacaggccatactgctggctcagcctgcccagattgtccaggactccctcaaacaggcagaaaatgtcatcttttgatgcaaaggatcttgggccggaggagggattggttggcgtgggagtaggcgaggtggccaaggtcgccgagctgcagggacacggccggctcggcggcggcgaggaagcggccgaccagctccgacgcccgcgtcttgggcgacggcgtccggctgccggcggccaccagtccgccggcacctccaccaccgcgccgctgaacacagccaacatcctctactctactgtactgtctgtctaatcaaagctaattaagatcactacacacaaactatgaaactactccaatttaatccaatcctactgctaaaactctcctctgctaatgatcagattagcatagataaaaaaaaaatacgtgtggcgttccacactccttggatggatagatggatggagcaagaaacggagctcac

SEQ ID NO: 386493 - DNA, 979 bp, Oryza sativa
ttctcccactctttgaaaaggggtataccattaacttgctgtctgcacaaaggagagcttcatgttgacaaggaacctagtaccaacgtaccatatatacttgaagctccaattttactgacaaaaaacaatattactacaagcagtacaatacaatgacaacaatagcttagactagttacccatgttacagtacgagactttacaaagatctacatgacttgtcatgtacagtacatatgtacctacaaactatccagtaacttagtgcatgcagatgcaggtttggtttacttcaccaaccatatacagggtgctgcacttgaggcggcaggaggcccatgtccacgcagtgttgcttgtcgtagtcgcgcgtaccaggaatcgctcccgttgccagcctgagaacctcgctaccagttaggcagtggtgagcaaacgccaatcctccatccatggcgtccgacagattactctgaattgttcttctcgtcttgcttctgtgcacgccttctgtaacaggttggctgagaaccttgtcgaggtctgagtactccatgaacctctcggttgctgcctcccacgacaggttgtacctttgctccggggtgagaggctggggttccctggccatggcctcgttcaccctggcgacgaactcctccggggtcctgtacgtcaggcagttcgggaacgatcatgaagaactcgttcgatggatgctccgcgcagatgacgaacttccccatcgcgagagcttccgctgttgctgtgcacaggacatcactgatgctcgggttgatgaataccttgtacccatggagtgagtcatctgcatggtcccttcccttaaaaaagtttagattcaggttcagtttcttggcggtagattggacttcttgtgagtcctcgccacttccatatacatccaacttgaatccttgcaagtcgcttttacgtttatccaacaaatctaaca

SEQ ID NO: 386494 - DNA, 928 bp, Oryza sativa
ggaggaaatttagaacaacaaagaaaacggcaaagttcatttcatgagttagatggaagcgcctcacatctccagagacctaaccatttcttatactacaccatcaagggatacatagaacttcgcctactcaagagaactatctaaatagggagacatagccgaggcagcctttgtacagatcctaaacaccaaccatttcaaccaagaggggacctacatagctatcaaccaaactcccaactcaagctgcaggtgccttgcgggtcttcttcgcggccggcgaccggacggtcttgggcttggccttcgccttcgccgccggagacttcttgggcttggcgaccaccttcttctccggcgccttgcgcttggtgccagcggcgggggccttcttgggtttggcagcggcggcgtccttcttgggtttggcggcgtccttcgctggcttcggcgctgctgccttgggggcgggggcggcaggcttggccttgggcgagtccttggcggcgtcggagagcttgtaggaggccttaaccttgacgagcttgcccttggaagcgaacccgcgcagctggatggagagcatcttcttgtagttggccggcagcgacgccccgtgcttctcctccatgtacttggcgatggcgtgcgcgctcgagccggtcctctccttaagcaccgtgatcgcctccttgatcatctcgaaataaggcgggtgggaggagccaccggcggcggcggagggctttgccttctgcttcttcggcgccgacgcgggcttggcagcgcgggaggcgggcttggccatggcaggcatcgcaacttcgcaagcagaccgctctggaactaccactactctctcttgggtgtgcttttgatttcgagcgggcgcgcgcggccggatggggtgggacgagaatgcaga

SEQ ID NO: 386495 - DNA, 252 bp, Oryza sativa
cacaaagaaaacggcaaagttcatttcatgagttagatgcaagcccctcacatctccagagacctaaccatttcttatactacaccatcaaggggtacaaaggctgcctcggctatgtctccctatttagatagttctcttgagtaggcgaagttctatgtatcccttgatggtgtagtatcagaaatgggtaggcctttttggcctcacatctccagagacctaaccacccacccctccccggacccgtgg

SEQ ID NO: 386496 - DNA, 1162 bp, Oryza sativa
  unsure (1)..(1162): unsure at all n locations
nnnnnnnnnnnnnnnnnnnnnnnnnnnnnnnnnnnnnnnnnnnnnnnnnnnnnnnnnnnnnnnnnnaacccaaaacagaagcgatcttgaaacgcacttaacatgtatacatgtataacacgaccaaaacaaagccttatttgttagggaacaaagtaacagctggtggcgaacaagtaacaaaatccgatcagacgagcacacggtactacactttggagacgaaacgcaatggctctcgcgaaagcaaaaaaactccctacatccatcaccaggcatatgcatatgtgtgcttagatggccgcgaagtactccttgcttcccttggggtcaggcttcatcgacttgtcaccgggcttccatccggccgggcacacctcgtccgggttgtcctggacgtactgcaacgcctgaagggtcctcatggtctcatctacactgcgtccaatggcaaggttgttaatggtagagtgctgaatcactccctccttgtcaatgatgaaaagtcctctcagagcaattccctggtcagggatcaagacaccaaaggacttcgaaattgatttagtaacatctgaaatcaatgggtatttcagatcaccaagcccaccagatttcctgtctgtctgcacccatgcaagatgggagaacacactgtcaattgaaacaccgaggatctcagtgttcaacttctcgaactcatcgtatctgtcactgaaagcggtaatctcggtcgggcagacgaaggtgaagtccaacgggtagaagaagagaatgacgtacttcttcccgatgtagtcggacagcttcacgttgatgaactcctggtcgaagactgcctccgcatcgaagtcgggcgccttgttcccgaccagcggcgcatcgtccacaccgccggcgcgggcgacgaagctgctggcccgggcggatctggatgaggaggcggagaggcggaggggcctggcggcgggagcgcgggggagggagagggagtgcggcgcggcgggggggatgccggcgaggggcttggcggaggaggaggagacggcggtggcgagggaggagcagcaggcggccatggccgcagagcggagtggatgaggaggggattgggttggattgggtgcgattggtgcgctcgtgccgaatcctgcaccaaagg

SEQ ID NO: 386497 - DNA, 512 bp, Oryza sativa
gtgagtaatttttcttgggtgatatgtgctgaatccagcagatcccatccgtccgcatgacatactgccaatttctagaaaactcagcgaactgagctttagttcaataacctctttactaatttgtggcattctagtaactcaaacacactagcaaatgcctctcccgtggcaggcaggcatacacgggagctattagtgttggtacatgatcttagtgtacaaatcttaaccatctccaatcttgtcccaaatgcagctagctatcttagctagcgaaactcacatggagatgctgtttgggatgcccctcccggtgaccccgggcgtggagaacggcttgagcagctcgtacggcacgatgccggcgccgcacctgttcctgagctccgggtcggtggttccgctcgtcgaccatgccctcgatctccttcatcctccctgcgaacctctcgaacgccgccttgaccctcggctccggcagccacgccggctcggcgtgctcccccatg

SEQ ID NO: 386498 - DNA, 767 bp, Oryza sativa
tttttttttttttttttcaagaaagacttttttttttctattaatagaacacttgatatcactctatcctgtacatgaaagggacattgcttcttgaggggacaatggcgaaaacaagcttctcacattttgcacatacagttaaatattcattggtttctccaggcctgaagaaagcgaatcacgacggcaagagttaaggctgcttgtgctccattttcgcctcaaattactgccccaagacgcgagatacggaactcttgatgttgttcagaaacttttccctgtctggcttgaatagtaggttttgatatatgaacaaccatgcaaccaatatgcccaattaattcaaagagtagagggagaacaggaagcttgtcgatgacctctacaagatttatagaagcccataatgcggcaatccctgcaaatcctataccagctagagcaaagaggtcttcaggactgctgaacgaactctggacatacttcacaacgctcccggatgacggttctgaactgtcctgcgcagcctttgcagcgacgacattgcgactcctcatcctccctgaaacaaatctggtgcttggcactgcaggcagcatggggagattcccggtgatgctctcgctgccgccgcgcggaacgagagccgcaggccgagcaacggcgagagcagaggccatcgcggttagcttcccccgagaatacggtggaattgcggaggtcgcgagcggtggatattgggaagaactactgcttggcct

SEQ ID NO: 386499 - DNA, 807 bp, Oryza sativa
ccctcataatgagagtaacatatttttaaattgatagcttatggtccactaatggcagaatgccgaaggttacattattctttctgacttctgaacgtttggaacttttgcgatgtgaaatcccacaatgtatttacttacaattagtacatccgaaacttctccttagggtctctcgaagacttgttcagcaatcagggctccattgccatctgcccgccttatctccaagttggccttctggtagtaagcagttcccctcaaagcatcagcaatgaagtcatcgaatccaatggcaatagcagcttctgccttggctccatacaccagcctcttaatccgtgatagatgcacagcgccgaaacacattgggcaaggttcacatgatgcatacatttcacagtctgacaactcaatttttccaagctttttgcaagcctctcttattgcagttacttcagcatgcgcagttggatcagtgtaatccaaaaccatgttatggcaactaactactatctcatcattacggacaacaactgcaccaaatggacctccatggccacaatctactccttggtaagcttcttcaactgctttagacaaaaatttgtgatccctgtcttgtacggcttcctgatgaccagcaaatgctgaagcaactgagatcgttccgtccttggattccacaacctgagcctcctccatggcaggagcaggagcaggagcggagcgcgagatttgggggagaggagaggtgacgggtgtgatgagatgtgttcgtcgcttgcagggatggcggacgcgtgg

SEQ ID NO: 386500 - DNA, 853 bp, Oryza sativa
gggttggaagcagaattaccaactatgtttatttcagaatgatgcacaaacatggaagacattagctggtcattcgtatgacgtacgatccacatccaccgctagttcttaattcaagctatctaacagtgcaggagagctagctaattacagaatcaaggtgttctagctggcattcgcctgatcctccgttttcctagtgaaggtaacaccctgatccctcactggagtcagccgctgcttctcttcctctacttgctcgagcagaacttgcagttcagcctctgtcaagctctccaatcgtttctccatgacttgcttctcatagtccctgagctgctgggcgtaggtcatgtccttgttggccaccctgaacatgtacgtcgagatccaccccaccgtcatcccgagcacgatgatcagctggacggcgtttcctgcttgcaagggatcgactccgaccagctccagcccgtatttgaggccgtagcctaagagtgtcacgccgacgccgatgagcagcacgtccttcctcgtgtatccgaatggcgtcttctcttcggtggtggaattggtttcatctgagctgctgcttcggaccaccagacgcctccgctgtcgcagcactgatctgaacatctggttgggccgtaacacaactgcctcgccaatgggctgggctacaggtgagctggccatcctggcagagcggaggccggcggcggcggcggtgaccctcccggcggagctgggggaaatggacgcgatgggagcggctagcgctgccggcgccatggtgttgccgagctgtgctctcggctgccgctcggctttgccgggctccgaatcccga

SEQ ID NO: 386501 - DNA, 546 bp, Oryza sativa
cgagcggccgcccgggcaggtacgcaataacaccatatttacatggccaattatttagacagaagagggattatatgattctttacacggtgctacgcccgaattccaactctcacggtaaaaatcctatgccaaaattggttatcacagccgaaacgtcccaaagttacacgaaacatggacactgctgcaccaaacaaggtaaaaggtaaaaaccactcattatctgaaggtaaaacgctctccaggatcacgaactcttcaggtccgagagtgcagtcttggtggcggcggaaataacagcgtctgaagcattcggcaggtaatagtatttaccttgggcgacccttgcaatttccttggcaaatcctgtggatacaaacttgttctcggtatcaataacaagaagtgaaattccagccttgtatattttgccagccacctcaagtatctcatcctttaattcttgagaagaacgtcttggagcatctgaagtggcttctgggtcagtcgatttcttcagtgacacattagccggacgcgtgg

SEQ ID NO: 386502 - DNA, 489 bp, Oryza sativa
tggaagcataatatatatactttttttggaacattgccgtaatctaataatcaattacatttctacaagagaacatatgtacaacttacaccccacataaccagacctcagaaaagatggatatgaacattcctatttacattcttcaagccaccagacaaatcctccaactctcactattttcttgccatttcatatgtacactcaagaatacagaataaacaggagcattagccttctcataatctatattagctgtacaacaagaacgccattgatgtcatcttgtcagccactacactggaacagcatgaaggaggctatgtcagttcaatgtatgtccctcattgatttccactgggtaaaaatggtcaaagtttccccttaagcacatggctgaaggcgtgatgttgaaatagatttcatccaattgtcaaatgaaacataaatagcagtccaatcaaacttctgttctcgatttactgcata

SEQ ID NO: 386503 - DNA, 793 bp, Oryza sativa
tcccactcgacatggtcacctctcacaattttttttttcgcaccggcacaatttttactccctcttattccttttctttttgtaaatatatatatatatatatatataccttgtagtttatatgtggatgccttgataattatgttgtataaataagtcttgtaatttcaaaaggctacaactacagggagcttactgagaagacatagaaccagtagaggaagacaacagagaaggactgaacaagctgggttatggctgggccagtcataaatctagagaggaggtgctcagggatgatgagcaacaacatctacacaactaggacaacttctctaggagtctatcatcaagaacagataaaaactccttcttaccttgcaaaaagttatatgtttgttgtatatacttatgcagggtatgtcaacaaagggaagattgatgaccagcgaaaatttcggcagaacctccccttataaattaaccgatttcagagaaaattttggcagaacctccccaggaatattgatggacagagatgaaaattttggcagaatctccccttggaaaatggatggccagagaaattttttggcagaacttcccctctgaacactgaagagattcagaaacaaagactgaaacttcagaggaagattgagctgagttggcaggatgaagctgtcaatactcaaaggcagtagtaacaactaggaaataagtgaagatctgaatatgagcaaaaagagctcactggaagaaaacctaacaaaggagctgggcagacgcgtgg

SEQ ID NO: 386504 - DNA, 1354 bp, Oryza sativa
  unsure (1)..(1354): unsure at all n locations
ntttttttntttnttggtaggtatagaaaacaacttgagcaaataggggccgcagattgctacttaggctacaaaagtgtaatggcagcaaatcctgaaccatcatattcgcttgcacagccaaatacaaacgacaatagagatgaagtcactgacaggataacactatcgctagaacagtacatgcattttgaatgcaattctgatcaggcaaattattcaaaattcaatagccacatgtgattgctggcatcattttttcctgagctttgtcttcatcctctcaaccgcggctctcagcgtctcatcatccttgcaaaaggtgaacctcaccaagttcttcccatcctcagggttgagataaaatacactaggtggtatggcgacaacaccgacttcgcgaatcaaatactcgcagaactcaatatcattgtcgaaaccaaatggggtgtggtcgaccatgacgaagtatgttccacttgaaggatagacaatgaaacctgcatccttgagtccgttgactagcaatgccttcttagctccataatccctcctcagttcctcatagtagctatctggtgctctcagagctgcagctgcagctgcttgcattggtgtgcaggtcgcaaacgtgaggaatgagtgtgcctgccttacaccccatgtcaggtgtggcggtgcgattgcccaaccgatcttccatcctgtaagagagaatgtcttccccaagagagttcatggtcacggtcctctcatacatgcccaggaatagaagccattgatatatgatctgcctcaaaagctaacttgtcgtagacctcatcagcaaaaagcagcacatcattttccttgcagagagtggcaataaactcaagttcttccgtaaacattttcccagtaggattgtgcggggtgtttatcataatagctctggtgttccttcgagactgcagcctttagctcttcaagagggactgaaaaatctggaggacggagagtaatggcttttacgttggcaccagcccattgacagggtagcctcatatgaatcatagaatggagcaaacaatatcacttcatcgcctggattaattagacctaaaattgttgcagctatagcttctgtgcatccagatgtgacatgtaacttccttcatccggactcgacttgcagtcctgctgtccttcaggaatctttcagcaatagctgagttcagttcaggcacaccatatcctcttgcgtactgattcttcccagcattgatagcttgaatagcagcctcttttacaaagtcagggccatcgaaattcggaaaaccctggccaaggtttattgctccatgcttgatggcaa

SEQ ID NO: 386505 - DNA, 760 bp, Oryza sativa
  unsure (1)..(760): unsure at all n locations
nnnnnccacgcgtccgctttttttttttttttttttttgagaaacaatgtgccttatctcgcgaccgtaattccgtaccatatgttcattactaggccatacacacgcatacaccttttttttttctttcaagatgacagcacatttattcaaaaatgtttgccttcatccttatgatacatgctgcatagagtttgtgagcgttacacactatttcccgccagcaagaagcagagcagagacttcttcatgacaggttctttactacgagtacgcagggcactgcaacattcttcatgacagaacctctggcactcatgcttcggcagccttctcttcacccttttgtgctagcttcgccttctttgcttcatagtctttcacggcagctttaattgcatcctcagcaagcatgctacaatggagctttactggtggaagtgacaagtgcttggcaatctcagtgttttttatagtcactacttcctccatttgcttgccctttacccattcagtagcgacggaggaggacgcgatggcggatccgcacccaaaggtcttgaagcatgcgtcgacgatcttgccggagctctcgtcgacgcggatctgcagcttcatcacgtcgccgcaggccggcgcccccaccagccccgtcccgacgctggggtcgtcgttctcgaacgaccccacgttccgcgggttctcgtagtggtccaccacccgctcgtggtacgccttcgccccgcccacggccaccgga

SEQ ID NO: 386506 - DNA, 956 bp, Oryza sativa
  unsure (1)..(956): unsure at all n locations
nnnnnnnnnnnnnnnnnnnnnnnacactgtnaaaanggctcgaatacgaatttgaaattcaatctcccccaaattccatttcgttcaaaccatcgatctacaatgttcaaacacaagacacaacttagattacatcactactagtattacacaggcattaccggggaatatatccaaaccaccctgcctgatgggttgatggataatcttaaatggatggataagaggatgcacatccacatccaaccttattcatagatagctaatcaagtcattacacataatacagcacaggtacaaacacagacagacggacggacagacgacggtatatatgtcctaagattaatgtgcttacagcaagttaggcatgataagagatattatgagcatgatgggtagggtacacgtatgtatgtatgtatgttgctgtgccacaccacaatcataccatacatacaagcaagctaaactgatgcagagcctaataaccggctgtcacccagcaacgtcagttccttggtcgatttgattacacaatgcaaatgcgaatgattcctaaaaggcgtacatcacggacaaggggaggaggatgatgattcgttggggggtttcatcttcatcttcaggtgcacttcacggcagaggcaccagccggcagctgcccgttgttgacaggggatgactccttggcgggggcggcggcggaaggcggctggctgtcctggtgagggcctttgtccgcggagttctctactggagcagcagcagcagctttgggtgcggaaggctcagttgggttgcttggtggagcagctgctgcttcaggttcagctggctttgcatcctctttcttctctcctccttccgatggtgctggaggagcagcctcagattcagccggttttgcatcttccttctcggttccggctggtgtggagcaggagtgtcggcgt

SEQ ID NO: 386507 - DNA, 547 bp, Oryza sativa
ttttagtaaaatttcagttgctgtaaatttgtggttttcagttcttgagacagcaccaaatcaccgtcatatataaacaattgctacaaaatacttgctgggggttaaactaccagagtgccatacatgtgactacagttagcatgacaaaaacaaaataagacttttgccacatgaaaatttctggatagatacaggtacaaccaatcttatatatgtcttccttgtttgatcttcttgggaatgtactcttctgataaaaaggaaatggaacatgcagataacgcctcaatctcaaatttgacacccttttgcaacatggcttctaactccaacctccattgtggggcttccctgtgcaagtaacaccttgagagaattccttcagctttccttctgtcttcagacgacaagtgaagtaggcagcagtctggaaggcgataatcctcaaaatcagatgtgaagaccccaagccaccgaatatcaggcacacgcaggaaatttgcatcgtatgccaattgcttaaatagaatgagcggacgcgtgg

SEQ ID NO: 386508 - DNA, 664 bp, Oryza sativa
  unsure (1)..(664): unsure at all n locations
ttttttttttttttttggtataagaaacaattttatcgaaacgagataggcaaatcggcaggtataaacgagtgtattacataaggtgttacataagatcacatggactaatacatcatagttcagtactctgtaacttttaacttattccaaaaacaccactgatgacacacaacctaggtaaaaacagcagtacaactgatggacaatcgcatagaggtgcaataggttcaaatccacaacccagtcttacttgctatctgcagaggcctcgactatcttgacagcagaccaaactcgcctttccctcacgcagacttggatgcgatcattccggtcttccgggcataggcaaagatcccgcctgcctcaataaccggcccggcatcgccgataggcttcagcttgtactgcttgccggatctcgtgccgaattcctgcagcccnggggatccactaattctagaacnggcgccaccgcggtggactccacttttgttccttaatgaaggttaattcaacttggngttatcatgggcatactgttncngtgtgaaattgtatccgcnccattcccccacntncaacggaacntaatgtaagcngggtgcnatatgacnatccatatgttgncccgccnttcatcgaacnctccctcntatac

SEQ ID NO: 386509 - DNA, 1117 bp, Oryza sativa
taatgataatttctttggtataagaaacaatattatcgaaacgagataggcaaatcggcaggtataaacgagtgtattacataaggtgttacataagatcacatggactaatacatcatagttcagtactctgtaacttttaacttattccaaaaacaccactgatgacacacaacctaggtaaaaacagcagtacaactgatggacaatcgcatagaggtgcaataggttcaaatccacaacccagtcttacttgctatctgcagaggcctcgactatcttgacagcagaccaaactcgcctttccctcacgcagacttggatgcgatcattccggtcttccgggcataggcaaagatcccgcctgcctcaataaccggcccggcatcgccgataggcttcagcttgtactgcttgccggatgtgtggttgatcatgacgcaattatcaagttccaccgtgaccacatccccggtcttgcactccttccaggctccagtgtccgctagctccaacgggtagacctcaccgggggccacggggttgccgaagaagatgcgcgcgtagccctcggccacgacggcgcgggcgccggcggcgcccagggcgacgggcgcgtgctcgcgggaggagccgcagccgaagttggcgccgccgatgatgacggcgtagcgggtggtctcctcgccgggggcgacgaacggcgtcgggtaggccgcggtggggaggccgacgaaggcgaacgagccgagcttgcggtactcgtcgggcttggacgggaccagggtcaggtgctcggccgggatgatctggtcggtgtcgatgttatcccccacgacgaagcactcgccgtggaatacgccggccgacgtcgagtcccccgccgcagcggcagccgcagccgcggcgaccacggcggtcaggggacgactgtggtggcatttcagggcgggccggcagatagccgcgacccagctgcggcggcggaacgtcctcgagggcgtgggacacggtgccagaactgctgtcaccggcgccgcctcggccaaggatagagccggagccgccgccgccgccgccatggtgttcagtgtgtgagggagaacccgacgcgtgg

SEQ ID NO: 386510 - DNA, 432 bp, Oryza sativa
  unsure (1)..(432): unsure at all n locations
nnnnnnnnnnnnnnnnnnnnnnnnnnnnnnnnnnnnnnnnnnnggcaagcacaagtaggagtaattagccacaattgttcgtctgaaacaaggtaaacaagagtaaagttgaactagggtagggtacaattggttggcagatctagcaagaactcagcaagcagatccatatccctactactccactaagcttaggtttgtctttcttcatacacaaaaaaaaacatgtcatctgatccgatccgatccgatccgatctgatctgatgagagagaaagtaggggaacaagagaaagggggatggatcaggcggaggcggaggcggcggtgcgggaccggtaggagcttgccgaagacgtggagggcagtgacgaagcctatgaagcagagcgacatgacgagcaccatggtgggcgagaggcggaggccggg

SEQ ID NO: 386511 - DNA, 1081 bp, Oryza sativa
  unsure (1)..(1081): unsure at all n locations
nnnnnnnnnnnnnttttttttttttttttcaataaggtcacttttatatccatctttgaagcaccttggtggttttgttctgaaagataactaggcatattcattcatctatgttgttgtggagaccattcactaacgtaaattttttcacaggcatacaacactggaggtctcatagtgtgcttattgtacaaagaaaagctctccggttattttctcaggcttatcttggtgattcgcgctacaacactcttacagattagagatgcctgctattcaaaaacaccatggcatatatttacatatatacaacaaggccgaagcatatggaccactgcacgtctaaacctccagcagggcttccaactcgcgaagaacgtcagcacgggtaactatacctatcacttgtctgtcctgatttacaattggtaatctgtggatcttcttctttagcatcagagctgccgcatccattactgttttgtcagatggtagagtgatggctggagaggtcatcacttctgcaatcttcgtctttgacccatgagaagccctggcccggtcactcttgacgatcactccaacacatctgaggctggcatctataactgggagacctgagaccgtctcaaagtggcactcaacctcctccagcgtctgctcggcagtggctaccagcacaggcgccgacatggcttcactcaggagcgccacacgctggttgtcggcttgagcagcggcctcctgtgactggaggtaggcgcggagatcgtcgtagctgagcagggagaagttctccggccactcaccggagatgatggcttcagggttctcgtcgatctctagccggaggctcccgtccatgaacgtcgatgcccggcaccggaaggttggtgatcccctccctcctccgatcttggtaccattgatctttgctcccttgaggacggagcagctctggaatgtgttgatgcaggccattgtatcactgtgtctatactttttcttccttagccggtgggcggacgcgtgggcggacgcgtgggcggacgcgtgggcggacgcgtgggcggacgcgtgg

SEQ ID NO: 386512 - DNA, 406 bp, Oryza sativa
  unsure (1)..(406): unsure at all n locations
ctggtaaatcacaaacnatgcaacnagttcaagagtttagcaagatcttaagaagaagatcgacagttggtgatctgaagaagaagaatctatgtatatatggtgtgatcagtgcacctggttgtcggcttgagcagcggcctcctgtgactggaggtaggcgcggagatcgtcgtagctgagcagggagaagttctccggccactcaccggagatgatggcttcagggttctcgtcgatctctagccggaggctcccgtccatgaacgtcgatgcccggcaccggaaggttggtgatcccctccctcctccgatcttggtaccattgatctttgctcccttgaggacggagcagctctggaatgtgttgatgcaggccattgtatcactgtgtctatactttttc

SEQ ID NO: 386513 - DNA, 706 bp, Oryza sativa
  unsure (1)..(706): unsure at all n locations
nnnnnnnnnnnnnnaaaaacaatggtaaaaagagagaagcaattccattcatccaaaggtaaaccaagccatccatgatccatccgtccaccatacatcaagcaaattaacccaaatccaacatcacctccatatccatatagaatctaaatttgttcgcatttcctacgtagataagatcactaggttgaacacagcatgataaaagaccatcctacttggggcatctatacaattgttgtttttgggtacgcgactcatgataaaggcagagcattttcacattcactgatgaaaacgtatatgaacaccatgtgacgcgatgcgaggaactcagtcggctgccctgaagagggtcatgagggagaggaagaggttgatgacctccaggtagagggagacggcggcccagacctactggtcgtaggtgtagcgcttgatgatgttgtcccggtcgtagacgatgtagccactgaagatgagcgacgcgatcccgccatagatcatctgggagatcctgcccagcgggaataggatctgaatgaacgcaaacacgagcagcacaatgagggaggcgaagaggaaagggccaaggaagctgaagtcacggcccctctttgcagcccagaatgtgtaggcagtcaggctaaacacaacaacccacgcgtccgcccacgcgtccgcccacgcgtccgcggacgcgtgg

SEQ ID NO: 386514 - DNA, 468 bp, Oryza sativa
tgacgtcgaagtagagggagacggcggcccagacgtactggtcgtaggtgtagcgcttgatgatgttgtccgtgtcgtagacgatgtagccactgaagatgagcgacgcgatcccgccatagatcatctgggagatcctgcccagcgggaataggatgctgaatgaacgcaaacacgagcagcacaatgagggaggcgaagaggaaagggccaaggaagctgaagtcacggcccctctttgcagcccagaatgtgtagcgcagtcaggctaaacacaacaactgttgtaagaattgcagactcccagaaatgacccttgccactggtgaaggcgcaatgtcatcccaacccctctgcccgaagctgatggcgacggtgaagagaccgagcaggatcaggttgaccgggtgcttctggtggtagtagtacagcgggcagagcacgatgaaggggaggataatgagaaaa

SEQ ID NO: 386515 - DNA, 942 bp, Oryza sativa
gattaaaaacaacgatacagcacgtccataataaagaataataaaatattcaaggaatttacatgaaatacaggatttgatgctcaagtatttgacaccatactgtaggacagtgacaccaacgagaaaccatagattacaaggtagtcactttttaacttttggaccataaaactggagataaacaaactgaattcatatcagcacgcatcaagtgatagacatacacaaccctactttgctgttctggagtgcttgataagccaatcaatgacaacatctatgtttacagagtccttgcaagagatcatgtagcagcaaacttcccggtcctttatcaattccaggcctagttgatcaaccaacgcttgctttgaaacagcttctgacttgtcaattttgttgccaaggactagtaaaggaatcccagctaaagattgttttgtcagcaggtcatgcaattcacttttagctatcggaatgctatcccggtcagcagcatccaccacatataggattgcagaaactccacggcaatagcgctcccacatggtccggaatctccgttgccctccaagatcccaaagtttaatcgtaacattcccctttgtgacttttcgcatattaaatcctacagttggaatcatgtcttcgctgtagccacctgtagcaacagcattaactagtgatgttttcccagcattctgcaggccaaccagggagagctccatctcctgcttgaaaaacaagcttcggagccagttgaggagcgagtccccgggcccctggccgttcgccgccgtcggggtggtggtggtggtgaccgtcgccgccagccgcgcccggatctctctcgtcgagggaatccgcgatttggggggaagaggagggagagagaagaggaggacgggtcgaagaaggaaggaattgagaatgatatgg

SEQ ID NO: 386516 - DNA, 855 bp, Oryza sativa
  unsure (1)..(855): unsure at all n locations
ttacccatttgaaatgagtttgtgctgaattcatttgaaaatgtttacatagattctaatttcaaaaccacatggcattcgccgatttacaacagaccaactaccggactacattttatactaacaaaaaaatcatatcccaaacaatctttttacatggctgattatcaacgttgataaaatcctcgagggcaaaaagaaaataataattatacagcccttacaggcctacaagctgcacaagcatcttattactacctggcaatatatgcattctgcaaatgaaaccatctaaagagaccagactactaaaaggaattatctagcagaggctcatgggtcctcttgaccaagaacaatgactcatagaccagcccagcgagaggcccgccaatcagcggcccgagccagtagatccagtggtgggtccacactccagtggccagcgccggcccaaatgaccgggccgggttcattgacgcgccggagaagttgccaccagcgatggtgttggcaccgacgatgaggcccgtgagcagcgggccgaagcccgggaccgagctccgcgggtcaaggatggtcgcgtagacgacgaaaaggagggagaaggttaggatgatctccatgaccaggccctgcatgggccctatccctgagcccagagtgtgcaccggggtcgccatgccgccgcccaggtagcggaggaggatgcaggcgagggaggaagccagcagctgggcggcgangtanaccaccgacctgaacgccgtgatgtgcctccgcgccagcagcgccaccgtcaccgccgggttcaggtgcccgccggacacgtggaaccccgccgcggacgcgtgg

SEQ ID NO: 386517 - DNA, 655 bp, Oryza sativa
ggtgcaaaaggatcatttcagaagatgaaatgatccggatttattcatacgaatgaaggcacatagtagtagtagtaattaatgaggtacagaatgggtacacagaaaagaatgtccatcagcgagatcaagagcacaagaaccactcaacatcaaactaccctcactcaataatctctctctctctcccccaaagaagaaggaattataataaagaagaaagaaaccaactatgcatgatttgatcgcagctcgatcgacgcaaccaaatccggagccacgcgcgcgggagaagccggagtcgtcgcgtcgtcgtctactgcatgagcgccgccgcgagcagggtgacgagcgcggaggacgcgacggcgagcggggacgcgctcccgggcgccgccccggccatcggcgacggcgccggcgaggaggccggcgcgttgaattcctgcgccgacgccatcacgaggagcgatgaggccacggccatcagcagcaccgccacgcggggagccatcgtaaacccgacgaagaagaagaagaaaaacgtagcacgtagcccgacgcgagcgagaggagactcaaatcacaaagcgtcgcggacgcgtccgcccacgcgtccgcccacgcgtccgcccacgcgtccgcggacgcgtgg

SEQ ID NO: 386518 - DNA, 940 bp, Oryza sativa
  unsure (1)..(940): unsure at all n locations
nnnnnnnnnnnnnnnnnnnnnnnnnnnnnnnngttcccaaaacctccaacaaataaatttgcacagttcggatcaaggattgcatgtaatacaacagggcggactagcaaaacttacataatgtccatcaaacagctatacaaacaacgggtgtccatttcatactaataagctcgtcatgtggaccatcctggcctggtgcatcgctgagcccatttctttcatcagtaaacataaatatcaacagtactattgtacaagaccagccaagagaggcgtgttaccatctgtccagactggccaggcctcatggtccataagatgaacactccggacgacctccgctaggctagtcctccagctcgacaagctgagctcttctctcggcagctttcttcctcacaaagatgccccatcgcatagcggccttaatcttaagccacccaacaacagccttaccagacgggcgagcccggtcatcctcgtagttgaaggctggtgcaggagacggcatgaagggggagaatccatctccatgattcatgttggctgatgatccacccatgctcaggatgcgcagcatttgttgcatgtcctcttcgttctctagtatctcgtggctcctcacccgtatctcctccatcaagtagtcgtcaacgcctccacggttctcctgcaaccgggaccagtcatcaaaaggattgaggggagaaggctgcatggactgaccaagtgctgagaattcaaagttttgctgctgtgttggtcccaaggctagcatgtttgagcttcttgaagcttgagtttggattgaagaaccagcgaactgttcttcgggtctcaatgaactcatgtcatatggcatggtgatactttgtgagatgtcctgaggattggctgcatatcttgctgcttggctcccgttggaccggacgcgtgg

SEQ ID NO: 386519 - DNA, 591 bp, Oryza sativa
gggggactaggatatcaagtttattatgtcaccaatcaatattctaaaatatatgaaggtattagctgaaacattaattattacaaatggctaggcagttaaccaaactgatcatacaccactgcatacacaaagtaaacaaacaaacagattaagcatcgacaaccatgcaaaaattattacttgttacacacatattttgtgataagaattggatcctccaagggttgaagcatagagaaacggtgtataatgactttgtccagaggttaacattagtgtagacccccataggtcatggtagactttctcacattaaagttggacaattcaattccttcgagtacttgctagcagctacacatgttgctttggaaccaacaatagcttttctttcagacgcaccgacaacccaaactcttctgacatatcaacctccattgcatgtgcaggcagcgcccaatcaaatttccagagaaggttcgctagtgtgatctcgataactgccatggcaaagttcatcccgaggcacattctccttccagaaccaaatggcaagtattgatagttattcacccaaaagttgactga

SEQ ID NO: 386520 - DNA, 508 bp, Oryza sativa
ttttaataacagtcatgatcgagtaacaggaccgagtctgcttgaaactattacaagtacagagaagggatgatcacaaagcgcctgatgatggtatagtatttatgtttattggtacatatatgcagcactattgatggtgttgttcataatagcctaagaagtggatgcagaagcctcctccagcagctgcttcaccttggtgatgtaatcggccatagcttcctccttggatttcccttcaacggccttccaagcatcccatttgtatctgtctttcaggttgaaaatacctgggcgcccagtggtaaccgggccaacggttgcctgcttgtagaggccatagagaagcagcttgtcctcgttggaaattgtgtcaggcaaggtcttggccttctcggcgaactcctcaaactcctcctgcaaacccatggcagcgatggcgtctcgttctcgttggcgtcagtcgatttcttggagttggaggggggaggaagcggacgcgtgg

SEQ ID NO: 386521 - DNA, 491 bp, Oryza sativa
  unsure (1)..(491): unsure at all n locations
naggtggctggtaccctggagataacgtatcaagtgcttcttggataatgttatggcgatcattgatacatgccgggtggtctctaggggaagaaggccttcttccaaaggttcccaagtgtccgtgatgtcaattgattcagtagatgtaatctgatgaagaccaccgatccttctcttgatcaattcaacaaccatgactgtcttattgatggctcttcccatagctttgatgacaatctcatcatgcccattttcctcaagcaacgacatcccatagctgatatagttcctcatcctcccctgtgcagtgatcctgatctcattctcactaattggtgtctcattgcgaggcttctccaccctttggtatctatccatgccttccgattgggctcgcctcgcctcgctgcctcctcctccgcttcgtctatgcaactcctccgctgcgacctgcgagtcggagagagaagagaaaaaaaaaggaaaaa

SEQ ID NO: 386522 - DNA, 550 bp, Oryza sativa
  unsure (1)..(550): unsure at all n locations
ttttttttttttttnaaagggcaactcctcaatatccgataaaatcgngtaagtagagcattaacttacagagacgcggtatatcatcagatatgaagnngcaatcattaaccaataaccggtcantnntnncatgtnatgatttgtgaaaacgttaactacaatttagttctatcagtacagccatggtgtcaaacaggagcaacaacgcagcatctgatgaacagtagccaacaagcaatcttgcagatgatgatttgttgcggattatttctaggttacagtagtcagaagcaaatactagtcatctattttccctttccttttcccttccccttcttcgcgtcaagtttggcttggacacgagctgctgcagcagccttcgcttcttccctcttctttttctcttcctccttggtggcagcagctagctctcgctgcttctttagttcctctagcctggctttctcatcagaaacactgcccaggcttgaacctttcctaggcctacaagccactaactccacctcaaaaatgagtgttgcattgg

SEQ ID NO: 386523 - DNA, 708 bp, Oryza sativa
  unsure (1)..(708): unsure at all n locations
tttttttttttttttgttgaaaatgcccaaacttcaacattttcttttttttaacgaaacattatgggtcgaactggaatagtaccaaatacacatatggttgttcacataacacaaggattacacgaccaatttgcagcaattaacaagacccaacaaggcgatcacacattactaatagtacaagataataataattccataattcatccaaagctaagttctaagtagtattttggccacccacacggtgaagaatacgtgtggggtgggcttactgcgacgggatgggctgcatctccggcgccggcgaggtggcggcgtcggcgagcgggtagccgaacaccctggagaggcgctcggtggggacgagcgggaggtaggtggcgacggcgctgccgcgcttggcgccgtcggccactgccgtgttgtacctcgccgagaggctcgcggcggcggggagcacggcgcgggtcaccgacggcacgagcgggaggcggttcagcgccgcccacgcctccgccgccttgcgctccgccacgggctcgtaccgggtgtagaggtcccgcgccctgggctcggcgcgggcgatcgccgacttggccagccccgtcgccgtgccgacgagccccgcctgccgcacctccgccggccgccgacgggccaggcccggngcccttcttcaccaccggcgggacgccggcggtc

SEQ ID NO: 386524 - DNA, 433 bp, Oryza sativa
  unsure (1)..(433): unsure at all n locations
gnccccccntggagttttttttttttttttttttagtatgattaatttnacanacatatgttgaagtacagtttatggacatggccctcgtgttctatggacacaacaaaataggcttgtattctttacaaagttgactgcttgctttatttttctacagacgcaaataaatgtactatacattgcctgggcagatttttttgcatgtacacccttaaactttgttgtaaaactgtacaccgctcaggataattcaggcagcagaaagggccccaaggtctcctgctctagcaggaataatcttgcctccacatacatggatagaattgcagaaatctctcttcttcagaaacctcggccgatgctctagtatgattggtgcattttggatgatcaacttcttgcacttttgtacaaaattttctgcattggt

SEQ ID NO: 386525 - DNA, 348 bp, Oryza sativa
gtgagagagaatgctattgattgggttattgcaactgattgttatggtgctctacatcagctacaagcctacaaaaaacaactaagcccatggtagatgaactgtacagcatgtgaggtgaaaaaaaagggtgtacaagttgaattctacgcatggcttgggctaatagtaaccaatgactgtatcctaagtgtatattggattgaatcaaaacgccacagcgtcttcagggcattgcagagccctcttctgacgccaagcacacgcagcatgtgatgtaactttcccagctactttagaacatgccttggtcattatattgggtcaacttggaaatgggggtcaaac

SEQ ID NO: 386526 - DNA, 543 bp, Oryza sativa
  unsure (1)..(543): unsure at all n locations
tgacatgcgagacaaaatagtggtagggtacaatccatccataatcctgttttagattatacgagcaaaaatacataatttaacacaactacgaggtgtcatagtctgccaactacgaggtgtcatagtctgccaaatttctttccgaacatctataatttagcctaacatgcaggagctcacatcctggtcgttttgatgcatccaatccttcaaactggtaagacgattcctgaatctcctgtcatattcctagcttatcaacctcctgccttttgatggtttttctagacaggtaagatggcatttcgctggagatgaagganagcccctcagacatccttctggcagtagaagggcttcctttgttggaatatccggtacaatctagtagaaccttcttcttcatgtgcaccttgatcatcacgttgtggcattggggtcagcagtgtggtagcgctcgttcaacaagaagcaaacggcgtaagggttttccatgtcaacaacggggaattcaggttggatatttggaaggcggttctc

SEQ ID NO: 386527 - DNA, 477 bp, Oryza sativa
gatcttcaaggcaccatgtatttcagggaactacctcataatactattttactgaaacactccatatctctcaaaaatgtttagaaacactggaagtaaacgtgccaagataccatagctggcgattatgttcacaattcttgaccaaataaagcaaagccttacattaaagaaactagccagaacatccacaagactattgctttaaccaacttggtgtttctgacttctttgatcatgtctaattcaggagcaccacacacaattgccacttcttgtccaggtccgtaggccttaaattaaggagctccatacaatccggggcctacaccaacctcctacggtgccatgtgtgttccatagacgatatgatgcaaaatctcagtaatatgaactagaaccactaccgccatagtagccactgctgctacctacattacgccctgagtaaagtgatgaatatgaacttccaccaac

SEQ ID NO: 386528 - DNA, 492 bp, Oryza sativa
taattaaaaaatattttaaatttttctaatttttttttatttttttttttttttttttttttttttacacaatacaaacacacatctccatatatattgcatgcttgaggttaaactttacataatgcagaagctatccagcttactcggcaatcagctgggagcaataaacaacaagcctgtaaagtggaacaagggcatggcaacatccacaggctatcacattctggaaacaaacatgaaagatgcctgcactcctggagagatggagcctagacatctgcatggtcatggtgaggcttcagatccatttcgacctgatgaatcgtccattgcatgccctccagtttctttacaatctcatggtattgccttgcaattacatcaaagtgtggatctacaccttggtactcgcgcaaccgtgaaaccgcttcagtataagaattggatgcttctttcgtggcctctactagatatttcctgatcctatgt

SEQ ID NO: 386529 - DNA, 535 bp, Oryza sativa
ggcacaaaaaacctgacttttgttccaatcagggctgtccaccagcaagcacaacactcatcagatgatgcatataaagtaaatggcgctttaactgttaactattcgacaggctaataatggacgaagcatcactcttacgaccaaaactgtgaagaacacacataatgctcgttccatataacagtcatcagttcttacagccgtacaaaacgtaagctcgacttatctcaagtattcctgctataaatgactcgtacaacaatcaccatttgcatgcctgcctctcgattttggaattcatggtgccctttcccttgtacttgtatgcattccttgaggagataggccttctccgcccatgcgcggcagcaattgccctcttcctttgcttgttcagttgctttgccaaagcatcatcatcctcgccatcaggatcatctgatgagtcatcgtcactatcatcgttgtcttgtgattcagttggctccttagcgtccccattgctagaacccacgcgtccgcggacgcgtgg

SEQ ID NO: 386530 - DNA, 961 bp, Oryza sativa
  unsure (1)..(961): unsure at all n locations
nnnnnnnnnnnnnnnnnnnnnnnnnnnnnnnnnnnnnnnaaanggggactacatctctttgaaataaaacaacaacaatctatttgccgaaaactatcaactttatttgtaataacacactcgtccatatccatggacaaacgtttgtgctgaacttccattattcagctcataaactaagaagcccggaagctggtggaaggcttagccaagtggtgaaaaaaaacatcgatcttgcagagtgcacacacttttcatgatccaaagtactaaaagcacaaataactggccaattctgctttgtaataggcacagataatcgcttatggtaaacagatgaaaacttttgtctcctcaatcagaaaggtcgtgtagatggttggcattatcagtcccgatcaaacgattgtacatgcacaatcacttgcccgatgctttcaaactggcgtcttcccttcaggattgcctttgcacaattaagggcacgtcgctcacacgaagctctcttgctggcatcctcaatcgactcaaaatcctcaacatgagcaattccaacaattctcctgatcatttttgctgaaccaaatccaagactgtcatgaaataggcttgtcatgtacttcttctgtgcaaggcacaaaagctctgagctgttgtatatagggggcaggtatgcttccccattcccatctttgtgtttattccataattcgacaaacttcttgtggaacaaattccatgaatcttcaattgtcttcaagatccatttcttgtaagccttacgatcatttgcttgatcagcgtgtccatcttgtgaaaaatatgccaaaatcaagttccccaggaaggccccaatgtcgtaacccattgggccatagaaagcaaattctggatcaatcacttgagtagaatctggtgtcacnatgatggaaccagtgtggagatctnctctaccgttcnc

SEQ ID NO: 386531 - DNA, 693 bp, Oryza sativa
ggaaaaacgacagggttataattctgttatgatatcttcaaatactacgtacattggatcaacgaaagccacatgacacatgaagaataaactatctagcacttatggcagatatggtcatatcattaacactacatggctcagtaagaacagattgctcttcatttgccactctcacattgaaatatcccgggtgcttaggttcagccaggaccatcgtcttgctgtttagcattgcaacaacatctgacatggttggtcgatcagctgcattctcttgtacacacagcaatgctatgttaatgcacctcatgatttcattttctgcaggaggatatttggaaactaatgattcatcgatgagttcaagccatcttccctctccccatagtgaccatgcaaatccaaggagattgataaagtctccactatgatgggaaccagaattcttttttccactgataatctcaagaaatagaacaccaaagctgaatacgtcggatttgatagagaagaggcccacagaagcatactccggagccatgtagccgtatgtaccaaccactcttcttgttgtgtttccttctgtgttatttgagctaaatattcttgctaacccaaagtctgaaattttagggttcatttcgctatccaagagaatgttactcggtttaagatctcgcggacgcgtgg

SEQ ID NO: 386532 - DNA, 1333 bp, Oryza sativa
tttttccaggcgtcaaggggaggttatgatcgcattactactgcttggacaaatggacaagaagtcaataagctgatatcagatgaaacttgtattgtatttaaccattacaacagggccaatgcaaactcaaagagaagttcaacaatagctaagagggattccattgtggactagatattttagatcatagaatagaagtggtacactgaaggcttcaacttccgaacactgagaccagaccaaagattcaatcccatgtggccatcgtgctgacaccaactccttacaggaatggtggaagaatcacccatcgccgaggatacttcggcctcccttccttgccatcgaacaacttctttagacggcggtgctttccaagtgcccagttggtcatgatactcgctgccacaacaaggaaagatgtaacctgccacagtctgtgtggcaatgttgaacccaagccattgggtagatctcagtggtatagtttgcgcatgtcactatgttgaacaggaagccacgaggaatctgatagccaccgttaccactcggacttctgaggttcctcagcaggatatggcaataaaagtttgcaatttggcagagaatcccaaatccaaccccaatcttcatctgcaattcactcacaggggtgtaaagcgggtggttgcagtagtaagcaatgtaagctccaaaggtccagtagtaggcacagttcctgaagacatttgatacaggagaagtcgcgtggctgaagcggtgaacaaagaacgtctccatgatcctcttgaagtagtggaaacaccaatagtacatggcgtaagtctggacaggatgcatgacccgctctccctcgtatccgaaatatttgtagacaggcaagtaatagaacatggggtagataagaagaggacccaagtattcaaagaagaacagcgtgctgtagaagacctgtgggcctaaatccttaaagaccactgtcagggatccagaacccttttcgcagtattctgataggctggcctttgcactaaggacaactggctttcctgattttccaggttggatagggagggtgagccgctgcctagcagggtaatacttcttagtcttggcatagatggcatcctgcagatccgcgaccttagccgagtccttgagctcgacgccgcccctgaccacctcccggccgctccgggacacgacggacaccttcatcccgccgcccaccgcgagagagagagagagagctcgcgctgcggccgccgctgctgctgctgctgctcgtgcgcggacgcgtgggcggacgcgtgggcggacgcgtgaaaga

SEQ ID NO: 386533 - DNA, 770 bp, Oryza sativa
ggtgaaaagcagttcacattgcacatataagaagttaagtgctacaacattaacatccaaatatatcataaaaactcggaaggcagtggaaaaaggtctacttttaagtattaagcaagctgatacaaatagccaggcaggtactacactgccagcccaaatagacactacgctaatgtatcaagacatcgacaaaatgttataacaaaaacagtaccaggtacaactagccaagcaggcactacactgaattgacgttctagcatatgtgctgcccgtagactacgaagattattcaaacttgatggtggctacgagctccagggatgaataccatgaagcgcactgtgataagcaaaccgtatttgggtctgcatgctcaaaggtctctgaagtctggcttgtccatcatatagaagagagtagaactccaaatacgtttcttggacataaacaaggactaggaattattgatggtgccctaaaaaaggcataacactactagacacaattctagttgtagaggcatgaaagaaagataggagaggtctcacatggtagctatggaacaaactaaagaaaaggaaaggtgcatggataaaattagtagtgtcatatggagcaagaacatggaagattggagcttcatgaaatcccactgcgcctcttccttccaaaaaacagaagagacatctaggagagatcataatgttccttgcagaacaccagaagcaagagtagagtgagccagaggaaccaaggaataacga

SEQ ID NO: 386534 - DNA, 1358 bp, Oryza sativa
  unsure (1)..(1358): unsure at all n locations
agaacataactggttgttntccggtataaaatatcctttcaggcaagttaataacttattccacnttgggcgtctatcagtttttgaactgctagctagtgagttgaccaaacattngaaggacacaaaccactgttcttgtagatattagagagcacacagaagacggaataatatatgtccaaagtgcttttaaatagtgaagctatgtcatctccatataattccccatgaaatattgatagggtatatgtagacatgaaggaagtgttcgtatggctggatcatcactagaattctgttatttgaccctgatacttactatgaggccatgctgatgaagaacatagcaatcttacttgctcttcttagaagcctcgtataggtagctcacgataactacagctgcagcaacagctaccccgacagcactctgtgcgagtacagcaccagttgaaagatcagatttcgtagatgcagggccgctgctccgtggagtgaagccaagttcagaaagcttcttgtgcgattcagcgtagtccttgaagaaggtgtcttcatccctggcataaagatccacatagcgtctaaatgaaggatcttccaacaatgccttgtcagttgggagcttcagaagcccctcagattcccccttcagtagctcaagaaagtacgaattgtcaaacttcagaggctcctgagtccatgcgccttcaaatccagacctttcaggatgtgcccttcccagagtgtgacccccagataaagctactatatctttgtctgataagcccatccggtaaaagatgtccctcaagtgcagtgcacctttcttagcatcaggaagacgcccttcacgggggcaaactgacgaatcacgtcttccaggaatgaactcaacagttggacccccagtaacttcaactgcaacaactccagcaagctgataaaggtcagcatatgtgatcttagggctcttggctttaataggctcgagaagatcaatagcaatctttagaccagcatttgaaccgtgagtgtactcttcctcgtatctaattgaaccatttgcaccaccagtttttgtgttcacgtcataagtgcccgcgtcatgccatgcgaggcggagcatgatgggcgcgcatcccttggaggagatgagggcgcggaggtggcggcgcgccctgtcgacctggcggaggtactcggcgtccacgaccggggcggccatggcgtggcgtcgcgtcgccggcgaggttggaagccctagagagatcggccgcggcggcggagcggagcggaggcgtgcggcgtcaagccaagcgtgtgggtccgcccacgcgtccgcggacgcgtgg

SEQ ID NO: 386535 - DNA, 1336 bp, Oryza sativa
  unsure (1)..(1336): unsure at all n locations
nnnnnnnnnnnnnnnnnnnnnnnnnntactttttttttgggggcagggtgtcccttcttccaaaatttatttatcaggataacattactcataaaccatattcatatattctcttgagaatattacatgccattcgctttagttaaggaaagggcataccacagcactcatatcatcaggcaaaacatccaattcatgtgcaagcacaacggtacagaaaagtcttagccaacacaaacaacaaacgacatactactgtacatatagatcccattttgtacaaaccgttccatattaacttgaaggagcacaaccctcccgataacgaaaactcagcaccaaatcattttctcaaaacatcacttgtaactttgggtgctgaacagatacgacacatggcattgataggcttgcattgttgttacatggtgtgatgctttaattgaggtaaatctgtagagcggatcatgatctacacgatggaagagaaaggcctccacagaaagcagcgatgatcaagtaaagtagaagtactatgacagctgtcaacacagcaagaagcttggcatttttcatccaaagagctctcctgagcctcctggattgcttgcggaagtggaaagcactgtcttgcatggtggaggtcttgtcgacgagtagcgagatgcgctcacctctgtcgagaatcttctcaatgttgtcaaccatgccagtatgtatctcactgacttccccacggagacggttgagtgtgtcggcgctggggttgctggagaagtactccatttgctgatggaggaccctagagaactcatcgttcatggcataggcgagcgcattatgggcgattctgccatagttcttgatgaccctcatttggatgtcctcgaggtaaagaaagggaattcgtcttccgaaggtgtcgttgcccatgcagaggaaggtgagcccatcggcggcggcggggggaggggagcggaggacgtggaagatctagcggtcctgcgcgaagcacaggcgcgactcggcgtcgggcggaagcttctcgaggatgcgccggccgacggcgccggcgttcccggagacggcagagaactcggcgagaaccacggtgccacgcgccaccaccgcgtaaacgatcgccatggattctagatccaacaacttaggcttggatagttgaattgatctgattgatttggggttggggttgggcggcgagctcggcggccggcgcgggatgcgagcttggcggcggcggcgagcccggaggctggagggttccgccgccccgacgaggtcgtccttgtaaccggcaagcgaggagacggggcgg

SEQ ID NO: 386536 - DNA, 802 bp, Oryza sativa
ttttgctacaatgctcttatgattgagatgaaataataaataatggaatgctcctgtgatgaatctattaagtttagaacgttgatttgaactacaggagaaaggagagaatgttgagcaacatcccgagcctgactatatatctcatacgaatcctatcaattactatatctcacatgtattctgtagagacgatctacgagtctggcaatatcttgccgttgtacatcttgtcgagcagcttcttggcgtctggtcgccggagaagccccttgttgtttggcagtcctgttcctagacaaactggacacaccaatttccctcggccgtagcagtttgggcactctgtgaatagatagacatcttttgctctctttcggttgagggccttccattttccagtgccgccgcacatgtcacataatacagcaccgctaccgttgcaattccggcatacagcaggcttgctcatcatatccgaagcgagtccgtttggtgtaagcattgttggacctgatgcactgattaatgtcacagcacataggcaagcaaggcattttcgtctgcaaggagtggttttttcttcttccttgccattggtcaagggcctgcttgttgaacatgcctctgcgtcgtcgtgcctcgaccatcggctgatatgggctcgcgctttgcccgggcggtgggcgccgccgggtcggcgtatgcagtacaccggccgggacacgcagagcaggaagtggcagccgtcgcccgccatcgccgctcacctcgccccgccgcgcgtcttgcgcacccgcgg

SEQ ID NO: 386537 - DNA, 752 bp, Oryza sativa
  unsure (1)..(752): unsure at all n locations
gcagtacaaagcagtaggtgggcaaattggccaggttatcaatcaacaagtatacatgaaaaattagctccaaatctcacattggaataacagaattgcagtaaattttgagctacattttattcaccaatagaaacgacctaaaatttctccaaagaacatgtataatataaagctaacctcgctcacaagtcagggaatccccaaaatcgaaagtcctcccgcgtggattcggtcgtcgaaggagagcccccggccgctactcgtcgagctgcttgagctcggctttgagctgctccatcttgagccccatggatcggcggagcgagtcggcgtccggcggcgggaggcgcgcgagcagcgactcgaagcccgcgagggcctccccggcggcgtcgcgcgcgcaggcggcctcctcgtcgaagtagacggtctccttgctgtccatggcggcctcgatctcctcccgcgcctccgcgaacttgcggttcacctcgtcgacatccttgccgaagcccgccgtcgagaaggcgcgccggtgggggcacccctccgggaagaagaggggcgggcgccgcagaagaggagggagcgccggcgttgggtcgncggcggcgnagnagnagtagggcgtnagaaggagnncggcggcacggagaaggaggcgagggtttcggtgcatagtggcggcggcggcgacggcttggttacgggattctcttctccttccaagaattcgggggaacttaggc

SEQ ID NO: 386538 - DNA, 2327 bp, Oryza sativa
attgtccagtcagtccgcccgtatgaattccatagttccctttgtttatgagccattaaatttttgcattgcccaggttttttttttttttttttgatcataactttttttcttgtattcagcagtgtagcaatgctagtcaataaagctaatttcacctttgaacgggaatggggaagcaatggagtacagaattacaggagaaggtggcagctgaggagagaatcaggagctgtcacaactcacaaagctatatacaagttcagaagctgaacgagaagagagcatatgcttccctcctacaggaagcattatgacttcttggtgctgttttacaaatctgggtgattatcggaagatcgtcatgcggtagcagctgcagcttcttctgcgacttgggatccctgttgcagagtgcagatgaggttgcgatccccgatacacattgtccacgcgacatgttgttggccagaacttggcgccccgaagccacgctgcagggaacgcagcgtactccctggagtacggcttagtccatgagtcgctcatcagaagttggggcgggtgaggagcactcttgaggacattgttgttcacatctgctttgccactttcgatttctgcaatttcttccctgattgagattagagcatcacagaacctgtctagttcggccttgctttcactttcagtgggttcaatcataagtgtgcctggaacaggccatgacatagtaggtgcatggaatccatagtccatcaaacgctttgcaacatcctctggctctataccagcagtcgtcttaaatcctcttaaatcaatgatgaattcatgggcaacagttccattgactccacggaaaagaactgggtagtgtttctccagacgctttgccatgtagtttgcattcaagattgcaatctttgaagcatcagtgagacccttagaacccatcatggctatgtatgtgtaggaaattggcagaatcaacgctgatccccatggggcagcagaaatggtaccaagagggtcggttttctcagggagagggaagccaccagtggtgatcactggatgagatggtaaaaatggtgctaagtgcttcttaacaccaataggacccattccaggaccacccccaccatgtggaatgcagaatgtcttgtgaaggttaaggtggcaaacatctgctccaataaagccagggcttgtcaatccgacctgagcattcatgttagctccatccatgtagacctgcccaccgttctcatgaattatcctgcatatctcatcaatgccttcttcatagactccatgggtcgaaggataggtaaccataagagcagccaagttgtccttgtttgcttcagcagctttcctcaactcctcgatgttaatgttacctttggaatcagttccaacagcaacgatcttcattccacacatagcagcacttgcaggatttgtaccatgggctgacacaggaatgatacagacgtcccggtggtagtctcctcttgccctgtggtaagcacggataaccatcaatccggcatactcccctgaagcaccagcatttggttgcaaagagaaagaatcaaagccagtgatcttgcacagcagatcgcccaagtcatcaaacatttcatgatatcctgcggcttggtcagtaggtgcaaatgggtgcatgtttgcaaagttggggtaggtgacaggcatcatctccactgtagcatttagtttcatagtgcaagaaccaagagggatcatactgtggcacagtgaaaggaccttggattgcaacttgtacaggtagcggagaagctcgtgctctgtatggtacatgttaaaagatcgggtgggttaagtaggggctcttgcgcacaaggctactcggaattgagcttgacacctctgatgcgagggattcagcagtgaagttcactggcttgccaccattgaacaccttgaacagcttgtcgacatcctctaaggttgtggtctcatcaaaggccacggttatcgtggttgcatcaacaacacgaaggttcatctcgttcttgcaggcctcctgggcaatcgcattcgcatcagcgaccttgaccttgacagtgtcaaagaaccgcagttcctgcacagtcactgttccgagcttcttcagtccatgggcaaaggtaccagccagcccgtgtacacggtcggcaattgctctttagcccctcgggcccatggtagacagcactacatcgctcccatgttgcgagcaagggctcgtcagtacaaatgctcctggtgcccttgtatgttgatatgttccggacgcgtgg

SEQ ID NO: 386539 - DNA, 827 bp, Oryza sativa
  unsure (1)..(827): unsure at all n locations
caaaaaggaaagggcatcactcatccctaaatattcaaaaattttcttagggagggacccaaaagctaatagagaaataccccccatttcctttcctatttttctttttatttcccctatatatgggatagagcccatgcccaagatggaccataacttcttttcctgtactccagcagggtaccaatgctagtcaataaagcctaatttcacctttgaacgggaatggggaagcaatgaagtacagaattacaggagaaggtggcagctgaggagagaattaggagcctgtcacaactcacaaggctttatacaagttcagaagctgaacgagaagagagcatgcttccctcctacaggaagcattatgacttcttggtgctgttttacaaatctgggtgattattggaagatcatgctcgtgccgaattcctgcagcccgggggatccactagttctagagcggccgccaccgcggtggagctccagcttttgttccctttagtgagggttaatttcgagcttggcgtaatcatggtcatanctgtntcctgtgtgaaaattgttatcccgctcacaattccccacaacatacnaacccgtaagcataaantgtaaagcctggggtgcctaatgaattaactaactcncattaattgcnttgcccccctgcccgctttccantcgggaaacctntcgtgccacctgcnttantnatccgcccccccgggaaaaggggtttgntttttggccccctcccctcccccncntaatcctgccccggcttcggtgcggaaagtttctccctccangggnatcggttcccc

SEQ ID NO: 386540 - DNA, 1243 bp, Oryza sativa
  unsure (1)..(1243): unsure at all n locations
nnnnnnnnnnnnnnnnnnnnnnnnnnnaatttattattggattttcttcttcaaattttgcattttcatagtttctgcccagagatatcctttcattctccatgcttgggagaattcaagttaaagagaaaatgtacattgggtgagcacgattacaacgcacgcctcagtgctctctggtgtggcattattagtttattacccatatatacgtgaacttgacaacttaagacttacagctcccagattcatgcagatatgtagacttgttagcacagggatgaagctttgcttttattttgtacgctggatgctgtaccttgaagctatcttacagggcagaacctgcacgccgacgccttgttgcgttagaggtagcaatctgaccaagctgttcgccctggcttgctgggactcgttctctgacaggtgtgtaatgcctcagccaaacaccagtgtatacctgctgaggcctcataatcttagtgtctggatcatcaagtgactctttccaatgtgctaaccaaccagccatgcgaggaattgcaaacagaacagggaagaactctgtagggaatcccattgccctatatattaagccagagtaaaaatccacatttggatacagcttcctcttgacaaaataatcatctgacaatgctgccttctccaacgcaacagcaacctcgataagaggatcccgtccgacaatagagaagacctcctctgctagctttcggatgactttagcacggggatcataattcttgtaaacacggtgcccaaaacctgacatctttctcttcctgtttttcactccctcgatgaaatctggaatattctccacacttccaatttcatttaacattttaagtaccgcctcatttgcaccaccatgcagtggaccatatagagctccaacagcaccagaaagagcagtgaagacatcaacaccacttgaagcaaggtgcctagcagcagctgtagagcagttcatttcatgttcagcatggagaataaacaggatatctagaaccctagcaagtctaggatttggcttgtattctttgtcacccaaagagtctagcatatacaagaagttctctgaataagagagactatttgtaggaaggataggaggtcttccagctaatctcaagtacgctgcagctgcaattgttggtgccttcccaagtactcgcacaatctgcttatccctaacctgcttcgacttgtaaagatc

SEQ ID NO: 386541 - DNA, 758 bp, Oryza sativa
  unsure (1)..(758): unsure at all n locations
gannttntaaaaangnggcccagggaattnaaaaaggaattaattttggggggaatggggacccggcccccccttgggagnnnnnnnnnnnnnnnnnnnnnttcaatnggaaatttnattaaattcttccctaaaatatttnaataaatattttnaggggaggaaaacaaaagttaataggagtaataccccaccattttctttcctatctttcttttnaatttccccaaaaatgggatagggggccaggcgccaaggatggatcaataaattttttttccctgtaattcagcagtgtaagcaatgctagtcaataaagctaatttcacctttgaacgggaatggggaagcaatggagtagagaattacaggagaaggtggcagctgaggagagaatcaggagctgtcacaaagctatatacaagttgggaagctgaacgagaagagagcatatgcttccctcctacaggaagcattatgacttcttggtgctgttttacaaatctgggtgattatcggaagatcgtcatgcggtagcagctgcagcttcttctgcgacttgggatccctgttgcagagtgcagatgaggttgcgatcnccgtacacattgtccacgcgacatgttgttggccagaacttggcgcnccgaagccacgctgcagctgcaattgttggtgccttcccaagtactcgcacaatctgcttatccctaacctgcttcgacttgtaaagcggacgcgtgggcggacgcgtggcg

SEQ ID NO: 386542 - DNA, 549 bp, Oryza sativa
  unsure (1)..(549): unsure at all n locations
ctttcctatttttcttttgagttccctatatggatagagcgcatgcgcaagatgaatcataacttcttttcctgtactcagcagtgtagcaatgctagtcttttaagcctaatttcacctttgaacgggaatggggaagcaatggagtagagaattacaggagaaggtggcagctgaggagagaatcaggagctgtcacaaaggctatatacaagttgggaagctgaacgagaagagagcatatgcttccctcctacaggaagcattatgacttgttggtgctgttttacaaatctgggtgattatcggaagatcgtcatgcggtagcagctgcagcttcttctgcgacttgggatccctgtagtatccgtatgtatcaatgctgtgattncctgttcctcttgtactgtatatgtatagaaatgtacatgaatgtttgttagtacagactacagctttgagtcagcttgcagagctacaacnnntgtttcatcatcatcttcttgcttggtcttgttcttcntctttcaggacggctcgtgccgaatt

SEQ ID NO: 386543 - DNA, 512 bp, Oryza sativa
ctggtgcgagggattcagcagtgaagttcactggcttgccaccattgaacaccttgaacagcttgtcgacatcctccaaggttgtggtctcatcaaaggcaacggttatcgtggttgcatcaacgacacgaaggttcatctcgttcttgcaggcctcctgggcaatcgcattcgcgtcagcgaccttgaccttgacagtgtcgaagaacggcagctcctgcaccgtcactgttccgagcttcttcagtccgtgggcaaaggtaccagccaggccgtgtacacggtcggcaattgcctttagcccctcgggaccatggtagacagcatacatcgctgccatgttggcgagcaaggcctgggcagtgcagatgttgctggtggccttgtcgcggcggatgtgctgctcccgggtctgcatcgccatccggagcgcgggcttgccgctggaatcgacgctcacgccgatgatgcggccgggcatgaggcgcttgtactcctgggcggacgcgtgg

SEQ ID NO: 386544 - DNA, 863 bp, Oryza sativa
ggggggcaaaaatacaacatataccgatttactagtacgttttttcaaaaaaagaaaaaaattacaacagaaactacatggtgatcacagcaaaccagtagctccccaaaagcatccaaattctcgcttcctatacatgtacctggcatcaaaccactttggttcagaaagagccaatgaacattcatcgtcgacggaaaccgcgcattgcatccaggtctcgccgcctcagattgccatactttctccttcgctttccagtaccagcggcagcctgctcttctgccttgatggaatccatgaggccttccatatcaggggtgtcttgcccttgcatagcacccatcattttctgcatttgagcacgcattcggaagagctgcgcaaccaattggctcacctgtcgttcgttttttccggattccttggccactcttatcctcctctcgcgtgattcagcaagtagctctggtctttccctttcctcaggggtcattacgttgatcatggactccataaatttaaggtttttctccgcttcacgaatttgagcaggggtaaccttgttcatgcctggaatcatgccaattatacgactaaatgaacccatttgtgcgatagcttgtgtttgcttcaagaagtcattgaagttaaattttgcactcaggatcttcttctgtaattcctccgcacgcgtggcggacgctcttcttgacgcatcacttcctgtgccttttcaacaaatgaaagtacatctcccattcccaagattcgttgtgccatacgatcaggatagaaaggctcaagatcttccatgcgttctcctcgccctacaaacttgatgggctttcccggacgcgtgg

SEQ ID NO: 386545 - DNA, 501 bp, Oryza sativa
gccagcgccgcagtcgccggctcggcggctcggcgccggcgcacccgtacgcctcctcttgctcggctcccgtgtctagggtttgggtattaggtgattagggttagatggggaggagaattggggaaaatgtcgatatgggctgagttgctcctggccatcgtgtccagcatcggagctgctccggatcaagcgctgcaccaccatatggagcgctgctgtggattatgggaggcaacatcagatgaagcagcgagtggacggaggatgtagcggcggcgggaggcgatgcgaggcagcacacaggcgggaggtggtgcgggagtaccgtcgcggctgctttcggggtggggaagcctgccgccgacgcctagagaggtgccgacgccgatcagggctaccggccgcggaagcgagatgccgccgccgccgccgccgcgggtgtggggaatgccggacgcgtgggcggacgcgtgggcggacgcgtgggcggacgcgtgg

SEQ ID NO: 386546 - DNA, 986 bp, Oryza sativa
  unsure (1)..(986): unsure at all n locations
tatcgccntcaaagtagattctgacgacaccccacaacaacggataccttcccttcgtacctccgtaccagaanaaaaacctaacttcctaatgctgcaacagaagtgcntttttttaagcacggagggagtattaaggaacaaatgcattggaatgtaacttcacgaaaatatggaacaaaaaggatgctgcaacagagacggttacaggggccagataagcttacagatttgatatcctataagtctcatgttacaactatatacgtgcacatatatataaccggtgagtaattttacacaagaaaaaaatgatatataatcaagtaaaactctaattatgaggcaaggcatatgtacagaagagcttagctgaagtgtgacctctagtacttatgccgcaaggagtttctggatgtccttctcaatctggaatggtgaagttgtaggtgggtatctctcaacaacttttccagttttgtccaccaagaacttctcaaaattccatttcacaagatcacccaaaaatcctccagcactcgacttaagaaacttataaataggggctgtgttaggcccgttgacatcaaccttgtcaaaaataggaaattcagctttaaaccttgtacaagcaaactgcttaatctgcgggtttgacccaggttcttgtgcaccaaactgattgcaaggaaatgcaagaatctcaaatccttgagtcttgtacttctcataaagatgagatagttccgtgtaatttgctgttgtcagcccacactgagatgcaacattaacaattagcagcgcccttcccttgaacttgctaagcgcaacatcttttccatcaatgtccttgacggtgaagtcgtggacgctcttcccggtggcggcggtggcgtaggcgacccctggcgcccacctccgcgacggcgccgcgacgacgggaaccgccgcgctcccgtgagtagtcgccgcccccggacgcgtgg

SEQ ID NO: 386547 - DNA, 372 bp, Oryza sativa
  unsure (1)..(372): unsure at all n locations
nnnnnnnnnnnnnnnnnnnnnataattaagatcaatatttattgcatcaaatagacgaactgttcggattcccaaaatcattattacaagtgtacaacacgcttcaaatacttacatagaggtgaacatctctaatctatcgccatgctgcccagcgaggggatccaggatgctgacccatgtgctgtagtcaataggcgatccaccaccaggctgaaggaatccgttcacaaagaagaacggtgcaccggctactcctctcgtgcacccatacttgaaggaaaccctcgctgctaggtcagtcctgatatcgctgaagcctgactggaactcagacaccgaattaccgacaacccgtgcngccagctttga

SEQ ID NO: 386548 - DNA, 490 bp, Oryza sativa
ctctgtcaaaatggaaatccgatttgtctctgcgcaaattgtaatcccatttgactgaacaccgttgtgccagccactcgtgactcagttgcccacaactagctcgcggcgcgataaaaaatatgaagaaaatctggttggctgctactgctttcagaataatgggcgatacagctatgatcctaagctacatgcttatacattgagaataaggaaaacttgagaactcaagattcttgacgttgtctctgccgggtcagtgcgatggatacatggctccttctctgttcggtcccgatgtagttgatgctaaaggaaaccacaaaaccagggtgacttaagaagcaaatgaagcgattgcgtccatttcataacgcaggaggagcgcatcaatgaagatatccaagctctccccctccataacatcttctatggagtggtgcgtgatcccaacacgatgatcggtaacacgcccttgtggaaagttgta

SEQ ID NO: 386549 - DNA, 865 bp, Oryza sativa
  unsure (1)..(865): unsure at all n locations
nnnnnnnnnnnnnnnnnnnnctccaacacacatatgtgtgtagtatttcagttgagtcagatatcagtaaacatgtatgtactacattttatatactgtacacaacagcgcttaatagttagtagtatagaagtcgatctacatttcttactgtagtatatatacactctgcatgcaatttgtgaacacccatccgttacaataattccattttatttgttgtttcctacctgatcacctccttgtttgcatctctccatctggcatcgtaccttgaagaattcaccattcatttcattgcgatggttctggaagggtgatgagccgagatttcgagtcatataccatctccgtgctacaatctgcacatttcactttgtttgtttcaccgccactagacactgacaggatagtcccgaagaaggaaaggttttcagcgccacaattcggacatggccccttgaggattaagaagtcgttcactatggcattagttatcgactgtgctatgaacaatattagaggcaaagcagcaaaccatgtgaaaatgaaaccgaaaggctctggcagctggaatatgttgatctcaagcccagtcaactcatcgatgaagaagaacagtcctagagcaagagtagttcctggaacatttagcaggaacatctttaggtagtcaacggtcaaatcactgtacacctttcggctgcgtagactgcacctgggaccttcggtgacaatgtcacttccgtctttcttcaatctgagtttgagttggtcgaattcagcgtcagacatgatggggttgccggcagcataggctatggaggcttcgagcaggcgttcggacgcgtgggcggacgcgtgg

SEQ ID NO: 386550 - DNA, 618 bp, Oryza sativa
acaatgtcacttcctcttttcttcaatctgagtttgagttggtcgaattcagcgtcagacatgatggggttgccggcagcataggccatggaggcttcgagcaggcgttgttcgtcagggcttagcatgacaacgctgctgccttcccacatgagctcctccttgaggttgtcgaactcctcgttggacatgatggccttctggtcgtagtagaaggcctgaagagcctgaaggaactcctgctccatctcacccagcgacctcttctcggccttcttccccttcccgtcgatgctgcagtactggagcacgttgctgtccacaacctcatcaccatcttgtttgccttgctgctgctgctgatcggtggcgccaaggcggaggcgccgcccacgcgtggaggttgcgagtgcacaggaggagcggcgaggcaggcgggggagcccggaagcggagaagaaggcggcggtggaggagcggggagggtggaagaggcgggaagccggcgacagccacgcctcggaggccatcagcattaactcttctcttctcttctctttgatccaaccgaggagctagggaagcagcacagccagcagtggcagaagcgagagagag

SEQ ID NO: 386551 - DNA, 1510 bp, Oryza sativa
  unsure (1)..(1510): unsure at all n locations
nnnnnnnnnnnnnnnnnnnnnnnnnnnnnnnntttttttttttttttttttaaaaataactgagtataataccattgatgattcatttgattctggaagagaaacaattatcaaattacaacagtaaccaacatttattctacagatgccatcgctttctttgcttttttggcaacgcaagtaaaccatttcaccgtcacaccacccaccatatatgccacccaaataaaaatcaagaacccaaacaattcccctttaattaattcccgcttaattaataaacaccagccttaataataaagtaataaattaactaatggctcgttctttccagtcattttgccttagctgtggaggatggccgggctacagtacgggccgttgagccagccgtcagtgatctgcttgtaagctgcctcggtgaggtggatgccgtcccagctaagatgcgacgccgggttggagcacgctgatgcgcctgacatcccacacctcgcgttgttgttgtagttgaacttgccgccgcctgacccgcagcacgtctcgaacaccgtgctaaatccgtagttgccggggttgcggaccatgtcgtagacgccggagtagaagtcggcgtacatgatgcgggcggacttgtacttggattggagcgcggagatcttggtcttgagctgattgttgtggttggtggagaggtcgttgaacttcttgaggcagccgaggctgtcgtagtcggagctggaggaggtgccgtagatggtgaggtagatggggaagcagccgatggggagcacgccggggacgacgacgtcgacggcgcccatggcgatgagcttctcgacgccgttggagatggtgtccacgatctgcgacgtgtacgtgctcgcctggtccgcgctgtaccctccgaacagcatcgcattgtagtcgttgccgccgaactccccgaacacgaacagcgagttcgccaggtagctcttgcaattctggccgcagacggaggaggagatttgctggaaccactggatttgaaagctgatggggccgttgttccagatcttgtcggagaggccgagggagcggaagaagttggcgtccatggcggtggctccggtgatcgccatgttcgctcccttcttgaagtcggcgctcgtcgacttcgacggcggcaggaacggcagcccgaacttactcgcgaggaagtcgacgacgacgcggccgtcgcagcagcggcaggtaggggagccgaagtaggtctcgccgtagggaggctgggtgaaggtgatctgcgacggcctgccattggtgcacaggttgccggtgtccgtgatcgagtccccgaagttgtacaccgcattgtacttctgcgccgccgccgccgccaccaccatcgccgcgcacaccaccaccaccaccctcctcgccgccgacgagctctgcctccccatcattgcaaagaaattaaaacagagcacaagccaagaaaagaagaggagaagcagagcagtgg

SEQ ID NO: 386552 - DNA, 601 bp, Oryza sativa
  unsure (1)..(601): unsure at all n locations
gtctccttcgcctgttcgtccggtagccgcgccgcctgggctgcctgctgtgctagcgcctcggtggccccggcggcggaggcggaggcggtggtggaagagcccgaggggccgaggacgcggctcatcgcgcagaacatcccctgggactgcacggcggacgacatgcgcgcgctcttcgggaagcacggctctgtcgtcgatgtcgagctctcgatgtacaattcgaccagaaacagaggattggcgtttgtaaccatgggttcagaagaggaggctctttcagcactcaaccatctaaattcgactactctaaatgatagaacaattaaggtagactttactagatcgagaaagaagcagtatgttgggccatcagctcccatgccgaagcacagcgtttttgtgggtaatctgacgtggagagtgagatctcgccatcttcgtgaattatttgcatcaaccccaggtgttcaatcagttgaagttgtcttccataccacaagtccgaggcgtctgctggttatggatttgtttccttttcctcaaagaggcagcagagctnccatatctaccttcaatggcacggaatttatgggag

SEQ ID NO: 386553 - DNA, 393 bp, Oryza sativa
  unsure (1)..(393): unsure at all n locations
nnnnnnnnnnnnnnnnnnnnnnnnnntttcaacaaacaatatatgctgtgttgattagaatacttgtttacatcctttacatgctgttctttttccaatgcttggttagggagaattccatgtgaacaattatagtgatttggaaggtggcgtaccaagtgtaacatcatcatgtacttagacagtcaaggcccacctccaaaacgagcaagtaatcacaatagaacgcagctgcctgtcaccattgttcatatcttggtatctcccacaaacacaattcacaaacagcacgaagtttcagcactaagcacttcttaccacatgaaccttaaagctcactataattcctccaaacagctcggaattcttctctgaatgtattcaaacctgctt

SEQ ID NO: 386554 - DNA, 437 bp, Oryza sativa
agacaggggagtgatcactatttatagctatcgatcagcatcatcatccaaacattccccacatctgaaaaattagatgtccaactggaggaggaagagcctgacagtgagcaaacaactgcctggccatgttccctactctcttcagcctctctcatctctctcaccacacaaccgagacactctacacatgccacagctgcgggcattatgggataacacaaggcgctaggcttacttggtcacggttactgatcgatctcattcgtcgatgaactcggactcgtcctcgcggaggtggacgaagaacctgaccggcttgccctggccctccacgctgagatggaactccaccttgaaggggaaattggccgggatgcgcttccccttccagacggccacgtactgcttgacgacgccctccattcccttgatgt

SEQ ID NO: 386555 - DNA, 1152 bp, Oryza sativa
  unsure (1)..(1152): unsure at all n locations
nnnnnnnnnnnnngtgtgaaggaactaatttagaacatactatattgctatgcatgtgctcacatgcgaaactcttgctagaaacagaacaagtactgccaagccaatgctaaaataatagcacagtcacaacttccacacttgaacaaactcatgcgagggacatgagagtttgtggagcattcaccaggcaagagggttacgatccagattaattacaggcatcgcccctcaataggacgagttaaaaacagaactccaataaaagaacagtttaccacgtaatggacagcatcgcggactattttactctccaggaagaccgaacacattttgatctgccaatggatgaatagcagcatagctagtctgcacctaattaagcatttggtggccaaagctttggatcttgagttgtgtccacagcagttggaggcaaccactgccacattgccatcccttggaatgctgcgggcgtaggagcatttttgttgcccagagcttgataaggtggtataaatggagggaatgcagcgggatggaatgcagctggatgagggagatgaggaacaaatcctgtaggagcaacactcaatgctttaacttgctgttccagcctctccttctctgccttcagagtaactttctcatcacggagttcattcttctccaccttaaggtccttgattgtttctcgtagcttctcattagattctttaagcttttctgcctcgcctctgagttctgccaacagacgagctgcatcactcaagatatttgctttatccaacttagcttgcttgtcaggattgacaacggaagataactcaaggaacctgtcattcagtctatccctccgaattttctcacggccgcgtgggcggaagctttggactttggaccagatgatgatgattcatctctacctnttttccctaaaacagattggtcaaggcaacaagtatctccactgacatcatnaatcccaagtcctccatngcagggcagcgtcggcacaccgtngcagaagacgccgaggtcgccgtcctcgccgccgccgccgatgaggaactcgtnaacggggtctccgcctccgtccattgcccgcnatgngtgcgggagatcgggcctagggttcgnggcncacgtccg

SEQ ID NO: 386556 - DNA, 706 bp, Oryza sativa
tttccaaaataatgtcagctactattttactacgtatggagaactctgtgaatccagtcaatttacatgcatattacagccacattttcatttgtgcatgtgcacaaaagcacatgaaaaatgctatttctccgtcacacagactataaccagtagacagaaaagcagccatgatgcatataatggcagaactctgagaatactaacatcatatacacaaattagtggaacaagggaaaaaaacatttttctggtatattagcagaaaaggaaactgcgagtcctgtgtgtttcctaagtagtttctgagataagacgaacttcatatagatcatcaccaccttttccaatttctgccttaatcccaggaccaaaaaaggatgtgaatttggcctgtctcttctcaaaatcggatatctccaatgctttggcttcaaatacaagtactaaactgtacttcccatcatcagttacttcttcccgaatgttttgtaaaataggtgcactacgccttggaattccaccacccaaaccatattgaaagatcctcttcagtgcttcatccaggtgctgctcatcaccgtatctgtaacgtgtaacatcactcctgacctgattgaggataggggtagcacacttttctcttagagcaaaagcatcggcgtaggttgtgcaaggcaccggtttcagttcagcggacgcgtgg

SEQ ID NO: 386557 - DNA, 957 bp, Oryza sativa
  unsure (1)..(957): unsure at all n locations
ggtgcaagaaagatggatagcatatctggggctaaaattctcaagatgttaaaccaggatcagacagctgccagttccttgtgtaaatatcataagttagaaaacaatctcaagtgtgacaaaattctttttgcatgactaaaagctgtacttcccgaactagctaactgatgggatgcagcatcgtgaggggttttttctgtgcagattgagctccccgatgcagtatgatgtggacaagctccttcatgggtgattggatatcctgctaatatcttggtctgcttatctgcttctatgaggacctgacgtttcactgggcaaatcactaatcaatattccttgaaaatgatggcaacggagcgccttcttgtggccgcaggatgacaagaacgctaaacatcccaagcattggaagaagcacgagccatttcagaagcttgtaataatgcatgtggaaggtgagcgagaactcgtcagagaagtagaacccgtttttgtcaaccatttccacaagcacagttcctgtggttctcacaggaactggggggaaccttcatccgctgcttgcctgggtccatataagctgcattaacccacaatgcgcctttctccttgataattcccagggacaagtagagtaaccgtcacgttataaggagcttggttcccataaggaaccctgtacttgtccacaatctcaaactctacccagaaatgcttgccctcttcgtcacggaatgttctggaaccgtgtttaanataaataccttcacggttgtaacgatatgcagcattgtttcttccctggtttgatgatctccattccttaagtggatggtgcggagagggagtggagaagcagaagacattgccattcatggtagtaacaataagatcgaggtcatctctnnaatcaanattatcagcncnanancncgtccgcggannagtggg

SEQ ID NO: 386558 - DNA, 864 bp, Oryza sativa
  unsure (1)..(864): unsure at all n locations
ggatgaaagtacagggtttgccaatattattgtcaataaaactaggtcaaactcaacttacactgacgctggtattcatagaatcttttgctatataatatgccttcatatgttaacagtgatgaacactgtcgccatctcgctccatgtcaaatgggcaccatatcaacgtaaaagatcacatgtaacctttctctcctttcttccagggcgcccatggataaagcacaaaagacttttcagttctcagcgtttgtgctcctcactcgctgattccatacttaccaccattcattcatattccatgacatagaatacaaatgacaagaagtcctacagcaggaatgctaactttcgaatgtaaaatggattgattaagaacaatagttctgacccggaaaacaaaatttgtacatatgatttgacttcgctaacaaaatggattgcgcatctacatcgcttggaatgttgtaatctaatgctctattaaactaccaactgtggaatggtagatttgcatggcctatctacaaacctcagttcgaggtggtgtggcttttaccggatttcaagggcgcaagatgtcaaatcaaggggaaaaacctctgaatcatgtaccaagatgagatcattggcaaaaactcattcttccaactccttgaggaaatntacattatcaacaaatactgttttccagccatctggatctgtgcaagcagttatcttcgtattaattccaggtaatgggccaggttcacgagttatttgtccaccatttggtctaatgacttccgcagtcttgtagacatcatctnngctaatatcaatctgggnacaagcatttcctcttgcnaaaggcctgca

SEQ ID NO: 386559 - DNA, 504 bp, Oryza sativa
ttaattatatatggggcatccgagtaacaaggccttgttgacgctttcaatcatttacagctcaaagcactaccagcatcccgctcctgcttgccaggcgcaattctagtttgttttctttcttctttttgggaggagttcaaagttttcccataactaacatactaagtacagtagtatataataacatcatattatgtagtaactaactaggaggcctctagctagttgattgggtggtactgcgctgacacccgcttaggagggagcttccggaggatgaaaaggacaagagctgaaggcagtatctctgtcaacatatagtagaagaaatcaagaattggatggtccaaaacctccagagatacatcagaatcaaatgctgatatcgccaccactatgcaccttatcagggaaacaagcacagcagattgcagtcactgtcccaacctcataaagcttcttttttcggacgcgtgggcggacgcgtgggtcgacccggga

SEQ ID NO: 386560 - DNA, 446 bp, Oryza sativa
gaaatagtaaaaagagggggtgaattcctcctctaaaataacactataagtgatgaactaataaaataactgtccgatacaggaatgtcacgccgctttcaaactagagtctacaggaatacacgatcgaaaattcagataacaaacctgatatatattatacataataatgagatgggagctacaagaatcatctgcgctaatgtttcaccaacgctagagctaaagaatatgtttcgaataaacagaataaactcataagttaaacttctgaacaactgcctccatccacgcacggtacagccaactaggcgtctaggccaaatcaacatgagatgaacttgcatggtcagaattgcctgcttccaccttagaaaccgcaagaatcaatcactgtcgtgctcagcatcatcagcagatccatcggcagcttttccaacattatt

SEQ ID NO: 386561 - DNA, 850 bp, Oryza sativa
gggataagtgggtgatatcttccatgctcttttattacaagattacaactgcattaggaggtaagaatctcaacccccttcaatttagaggtacctatacaattactgcgattttgaaagaaacatagatctgctaaagaactaaaacatacatatatttagcccaaaatgatgcatagcaaggctagtagagcaagtaagataactatacaattagctattcctgacaagaattctgttgaggcacaccacaaatctagggagcaatattagagcttgcaatttgattttcatcttccatctggtgtcatgagctgggagaagatgttgcttggggtcagcccatcaaacttcacgctcgcaatgctacggtcagggatgctcaaagaaagtgtcgttgtagtggtagtagtcacgtcgggcgacggctcatctgaatgcagcctggccacaaccagcggcgacgtgctcgctgacgtcccctcggtcaggctgctactgtcctccgtgctctcctgcagctggagcgcaaactcgaggttccagagcacatcacccatggacggcctgtcgacgctgcgatcggccacacatttctccgcggtctcggcgaacttcaagaagcactggggagcgatcttccctttgaggagtgggtcaatgatctcgccaagaacacctttcttctggcaacgcagagcccagtctgcaaggctcacttgctccttcggaagtgatgggctcagggcgttgcgggcgcacaggacctcgaacagcacaactccgaaggagtagacatcagatttctcggtaagctgctgccgtcggaagtactcaggcggacgcgtgg

SEQ ID NO: 386562 - DNA, 523 bp, Oryza sativa
tttttttttttttttgttaatctaacatatttcttataaaacaatatcttccacagttatatttacatgatttatctacatatgtacaatgtggacatggcgaattcgagtatatttacaaatgatgatgatctataaacaacccctacactactattccattcctgcgccactccactggtaagtcttgaacagaatgaaggccctctctgtaacttcctgaattcttgggcctcttcgtcagctaagaattttcagtgcggttttcgggatcggctcatgagatcagcgcatgaacatcccgaaactgtagagagatctcggtcgaaacaggttggcgaagaggaaccatgtgggtgactctttcttctgtggctctgatggctcaggctggcctttcacctgaatgttctggcctatggcttgcctgatggagtctattgtcttctgatcaaccgtccctcctgtggaatcgcgaacatagaatgtgttgacagccatccttcctctcgcggacgcgtgg

SEQ ID NO: 386563 - DNA, 418 bp, Oryza sativa
  unsure (1)..(418): unsure at all n locations
aaggggtaacatcatatctcagcagcacagaaaacanaaatgttgtgagagcctgtcaggtgaggtgcccatacaagtacacacaacgtgttgtctatatgcatgtgaaaattgcaaaactaaagaatgctaatgtcaatatacttcttttatttacaagacgtgcaaaaataaaatgctaggatacatgtaggcgcaaggtgggaggaacctggcaaggtcgctgctttccgatgattttgtcctgcatcattcatctcacataaccaaatggtctgtttcgtgagaattccacaggatcattttgtaagaaaataatgtcattttcccttattttccattggcctcccactgatccaaacagggcccaaaaccttaaaaagtttgcctttttggggagctactgtaagctcacaaa

SEQ ID NO: 386564 - DNA, 772 bp, Oryza sativa
  unsure (1)..(772): unsure at all n locations
tttttttttttattttatncacagcgagaagatatcacaatatgaaacttatgttaacacaattagcagtaaagaatatgttacgtttacttaagatagggatgccatcctgtctccaggaataccgcagttatcacccacaagctttgaaaggctgaagtttttctgagtacattctcggtgattcataatttgaccccacaaacaacacccttcatcactcatttaacccactaatcatataggccttcctgctcccagccgtccacgaggaaatctaccatttcaccaagagggatcgcttgtggaaatggttttgtgcttcctagaaggctctcatatgtagcattccaacttatttttggctctcgaggttgttgacgctgagaattgtgccttctgtttccaacccactgttgcctagtctggttccacaggagaagtccttgatttacaaactcatttgggttggtgctacttccagctccatgctgatcgctcgattgtgctgccgtactgattgaagacatgctacgctgagattgcatggcactattctccattcccggcgggcttgaactccaaaagtcctccgacaaactccgctgctttattgagcgcccttgaattcttaaaccttttgaaggctcatcaacggctaattattgggagtagggttcgcacatccaaaacaatttctgctccaacgcaggcgacgaggcgaccccacgcgtccgcccacgcgtccgcccacgcgtccgcggacgcgtgg

SEQ ID NO: 386565 - DNA, 662 bp, Oryza sativa
gtttccaacccattgttgcctagtctggttccacaggagaagtccttgatttacaaactcatttgggttggtgctacttccagctccatgctgatcgctcgattgtgctgccgtactgattgaagacatgctacgctgagattgcatggcactattctccattcccggcgggcttgaactccaaaagtcctccgacaaactccgctgctttattgagcgcccttgaattcttaaaccttttgaaggctcatcaacggctattattggaagtaggtttcgcacatccaaaacaatttctgctccaacgcaggcgacgaggcgacgcacccacgacgtcagggaccaccagcctagcagcatagcattccggctccgcctcccccgcccccaccacggcgacagaagaatgaactgagctcaacctccccccacctccactcgaaaccctagcacaccccctcgaaaccctcctcctcctcctcctccacccgcgcccgatcaatcgatcgatccagagtacacgaacagacgaacacaaccacgaccgcgatggcgacggcgacggcgtgggcggcggcggaggcggaggcgggggggcttatctggtgcgagctatggaggggaggaggagggggggaatcattggagtagggtggggattg

SEQ ID NO: 386566 - DNA, 1262 bp, Oryza sativa
tttggaagaaattgtaataggctgcacgatgcatccaattaaactttttttcaagggcattccgtttgtctatggcgcatacgaacgacacaacactatgcagtacgcccgctatccacgcaggatttcgttttgttgctcgcaacaaacgtttttttttaatttagtacagtagcatgcggtgcatacccaagtgcaaaccaatcaagttcacacgcgtctatttgcgatctcctgtttgtttgggatagttgagttttactgacgttcgagcctcacctctgacctctccaaacacagttcttcgatccccatacggccatacggtttgcctattcggtctagtcctgagctggatacagtccgtttatggtcatgccgccgtcgaccgagatcgtctggccggtgatgtaggaagcgccgggcatgcacaggaacgcgaccagcgatgacacctcttctggttctcccacgcgcttcagcgctgttcgacgcacgacgctgtcagcgaagtccttccttgccaattcatcttccacaagtgaagtcttcatgtaccatggtgcaacagaattggttcttatattgtctttcgcccactcacatgccaggttcttggccagctggttcatggcaccttttgtcatcgcatagacagagccagaacttacagccaccactccagagactgacgatatgaagacaacgcttcctgacccagatgatttgagaagaggatgagcaagttggcacagatgatacgcagattcaagattggtggccattatgaacgagtaatcatctgcagagtactcccccccctgttttgaaaagtttgttcccacgttgttcacgaggatgtcgagcttgccaccgtagaggccggcgacctcgcggagcatgcgttcccgctgctcccgcacggagacgtcgcagactgagccggtgacgcggaagcccttcccctcccactccctgaggcgctcgcccagctcggcctccttcctggagcaggtgtgcacggccgcccccagcgccgccagctcgtccaccaccgcatgcccgatgccgcgggtcccgccggtgtcgagggccgtcttgccgcggagggtccatctccccgctgcgccgcttgcgaccgcctcggccatcggcctcgagggtgcggctgggaataattttgcgagaaaatccgtattatcagttcttcgggaaaaactcccaattcgggttcctggctcgtccccagtatacggcgttat

SEQ ID NO: 386567 - DNA, 650 bp, Oryza sativa
agggggggaaaagaaaagaaaagtaagaaggggagggaaggaaagagaaaaaggaaaaagaaaggaaggaggaggaagaaagggaaaaagagaagaggggggagggtaggagatggagaaagaggaagggaaaatggagaaaggggaaaataagaaaggaatagagggggaggggagaaaaaaaagaaaaaaagagggggagaagagagatagaaaagagaggggcaatgatggagaagaaaatgaggaagcaggagggaggaagaaaacatggagcctcaagggcggccgcccaatataggaaagaagtaagggaactaaaagttgcattttatttgaagactgaaactgtacagttggttgcgactgataaatacatcgggggctgatgagtgatgacaagttaagaaggattaaaaagatatttgcatttttttttttgtgcgcaagaaagcgcatgctatgtacacaaatgacatgagagcttagctgcatgcacaaggaggagaagcagaggtgtcaattgcttatgtcgaagtacttgggatcagcagggaagtcatgttccacacgcagctcgcctttatctgcatctgagtgcctttgaggaatacaactttaagatcattataaagggagaatctgcgatc

SEQ ID NO: 386568 - DNA, 828 bp, Oryza sativa
  unsure (1)..(828): unsure at all n locations
nnnnnnnnnnnnnnnnnnnnnnnnnnnnnnnnnnntttttttttttttttattattaattagtcgagacgcaattcggaattattattaattcgatctacacgtgaagacactgttattgcccatcaaggaaaggaacaaaacaaagcttcgcggtaccaaacactagtactctaaacaacgggttttggtctctgcaatgtgcgatccaaagaatcgttccaaaaaattggtgcagacgacggcattttttactctgtcccagcaatcctcttcttcaaagaatcgacgtcgtcggccaattccttcctgctttccttgaagaggaggtagcggtacacaaaccagcctgtgtacccgagcccgacgagctccatgaacttgggaagcagaggcacggagttgacggcgccgacgatgacggacgacagccagagggcgatgatggcgccgccggcgtacgtgaggacggtggacttgttctcaacggcgtcccacttagctttcaggtcttcgatgagctcgtcgccggtcgcggcggaggacgaggtgtcgtcggacgacgccctcgcccggagcagagatagcctcggtgcgtcatggaggcggagaggagaggggaagttgcgctgggggaggaggagaacggagggcggcggcaaggcggcgccgacggcggggaggcgagctccaccgagaagaggcgccgtggagcacgccgtggcggccatgtcagtcgtggaccctcttcggctctacctggctcttccctggcctctgctttcttttcccgggcgccgcggcggtcgccccggacgcgtggtcgacc

SEQ ID NO: 386569 - DNA, 529 bp, Oryza sativa
ttttcaagtaaaccctactcggaggaccattatttaatttattcttagctgctgagaactcacggccaatacattttacatttacaatacgcaggttaatttctcccggagtcgaaacaaagatgtctttcgaactctgcacaagttaaaaattaaacgagatgtccaagaaacgctaggccaaaagaaaaataaaaggacatgtcggcgaattttcccattttttggtgaactgaccagataagcaatcagtcagtaacggaaccatcaatctatcatgcaaatatcatccacacgctggaggaacgtttgctacgccttgcctctgcagctcgcccatcacactgtccactgaaggtggcttcagtccaagaggcaaaggcaaccacggtttcgataaaacatcaccgatagctgcgtcgatgctctcgcttgatggttgaacctggagttgaagctgtgcgtcctgctgattcttgctcgccagtgctggtggagtcaatggcctatacattggacacgggacaac

SEQ ID NO: 386570 - DNA, 1036 bp, Oryza sativa
  unsure (1)..(1036): unsure at all n locations
nnnnnttttttttttttttttttaagaaaccaataatcttataattcatcatcttccaagtccttagtaaacgccctatggaaaagcaaaaaaattttagaagctcgacataacaaatggtttgaggctaaatatccaacatggaacatcgtccccaattgttaaagcactgttttctcttcataccctccataccgtcatgatgattgttgtcgtgaagaacaaccaactgaaacaaacgagaaggaaaaaaaatcgctgggcagagtatgcaagtatgtcttgacaagggatctacttgatgtactgggagacccacttgaacccgtcaccatagcccatcttgcggacaacactgcacatgaacacttcgaggggccggacattggattcacctaggctgaccttgcccttcccagttgtgaagttgctaaggcctagatgataccgcagctcctcttcagaagcagcatatggaatgtcaatcttgttgccaaggataagaaacgggacagctgccaatgaatcatcagataggagtgcatcaagctccttttttgactcagcaaaacgttccttatcataagcatctaccaaatataccacagcatcaaccttggcgtagtagtccttccagacgcggcgggcgatctggtggccgccgaagatcgaagggccttgaacttgatcttgccgatgctcagctcctccgacgtcgggtactgcgtcggctggtgctgcacgagccgctcgtccttgagcatgtggaggagggtggtcttgccggcgttgtcgaggccgaggaagaggatcttggcctccttctgccacagccccagcgaggccagcaccccgtagaaccagtcaaccaggaacatctccggcgatccccctccccgcacagatcggtcgccgccgccgcctcgccgcctcggcctctccgcctcgggtgttttggtttggagagaaattgcgtttcgcttcgtgtgggggttgggctgggggatgggggtggggttctagatcggacgcgtgg

SEQ ID NO: 386571 - DNA, 752 bp, Oryza sativa
tttttttttttttttgaatgaaagcactgattattgatttccatgattcgagtaagatgcccgattcttcattaacccaggtgcatgtctaatccccaatactccccatgcctaaaccctagtttgttccaatcaaacaagagctgcttctgacccaaatcaccccatccgtcccccatgcctaaacctagtttgttccaatcaaacaagagctgcttctgacccaaatcatcccatccgtcccccatgcctaaaccctagtttgttccaatcaaacaagagctgcttccgacccaaatcaccccatccgtccctcaaggaataaaatcataaatccatcaacaagtagcacaaaagctgcagcaggagagggggaaaaaaagaaagagcggtagaattagaacagaggcgggcgatctggtggccgccgaggtcgaaggccttgaacttgttcttggcgacgctcagctctacgacgtcgggtactgcgtcggctggtgctgcacgagccgctcgtccttgagcaatgtgtcgggctcggggacggcggcttgaggtggcggcgggctccgaaatccgcatctgcacacgcgtcaactccccgacggtcgccggccaccgcggcggcgccgacttcgccccaccgcagccgccgctcctagggcttccacccttggacgacgcacaacgacctcagcccgagcgccttcttcatcttcggacgcgtgggcggacgcgtggcggacgcgtgg

SEQ ID NO: 386572 - DNA, 823 bp, Oryza sativa
ctattgacaattgaggagcagaagcccctctcatttgatgtactgggacatccatttgaagcattcgccgtagcccatcttgcggacgacgctgcacatgaagatctccagaggccgcacgttggagtcggctaggttcacgttgcccttaccggtggtgaagttgctcagaccaaggtagtaacggagttcctcctccgacgcggcgtatgggatgtcgatcttgtttcccagtatcaggaaaggcgcggttgctagggaatcgtctgcaaggagggcatcgagttccttcttagactccgcaaaccgttccttgtcagcggcatccaccaagtaaacaacagcatcgacccttggcgtaagtagtccttcaagacgcggcgggcgatctggtggccgccgaagatcgaaggccttgaacttgatcttcccgatgctgagctcctccgacgtcgggtgctgcgtcggctggtgctgcaccaacctctcgtccttgagcatgtggaggagggtggtcttgccggcgttgtcgaggccgaggaagaggatcttggcctccttctgccacagccccagcgacgcgagcacgccgtagaaccagtcccacaggaacatcttctctccccacgcctcttcctcctctgtaccgcgcgccctctcctctcctctcctcctctttacctagtgcagttgctgctgctagcggcggcggcggcggcggcggagatcgccggatcgatcgagggatgggtggacgagaggggagaagagaagacgcgggtggatctgaatctctctctctctatcaccctgtgtgtccgcc

SEQ ID NO: 386573 - DNA, 488 bp, Oryza sativa
gggtcgattgctaaatatgaagtaatgcgcagtgctttaatttggcgaagcttcgttttattcaaatttcaaagaacacataatgtacaacacacaattgcacgaataactacgtacaaacccgcatatcacaaacttccagcctatcttctcattcttcccctccctaagttgctggtgcacgttgtaacaacatgttcttacttctcctcaaactccacatcaataacatcaggccctgagcttcttgaactgctggctcgtccagaggacctattgtttggctgccacactatgttttggcaattcatgcaccgaatcacttggttgcggtaacccacaaacctccgtttgcacgctgggcatgtcccctcaatggcgacccgattaccaaatgtcccaaggagaagtggcgcaccaaaaggcaggacaaatgtaccaaaaatgaaaactctgaatagccatcctgacagtgcaaaaccaaatga

SEQ ID NO: 386574 - DNA, 889 bp, Oryza sativa
  unsure (1)..(889): unsure at all n locations
ttttttttttgttnttttttgaatccaggggaaactgtagtatatatagcttctttctgatgataacagaagtgatccttgactactgttagcgaagtatccccgatacagattttaatgggcaccaccagcataacagaaacggatgttttgagtatatgcatattattttcacaaaatgcaaaaaagcattatttggattttggggacaattttttcaactgctccagcagggggtgtagaagaaattccgaaagaaacacccggttcttgtcttgggtaaagccagagatttctgcagtacgtccagactccagagtgaactgagactggctcaaaggctgtagggcggttaatctaatctgtcgtcattatccttccagtgatgcagcagcatccttctgatcagaaaagtaatctttccttattttacgggaaagctgatacaagcctgtgccggccattgcaacgttaacactgaatagattccagttttttggtgttataaccatactgtagcgtgaccaaatgactccagtgcaagcaacagcaacttgctgtggataggatatcttttcaggtggcttagcaaagtctgcaacattggcaatactaataccccatttaaatgtcggagcccagaaatgaatggttttggggccagcaggatggttccaaaaggcttgaagctttgaagccatttaaactatcacaagattttctgttttgtgcgacttgtcttgtactgtccctggaagggatctggagagatggagggtaggtagctcgccaccggcgccgctcgccgtgttgttcgtcggcggcgacacgacccgatgaatgggaggttgggatctgggagtagggaattgggaattgggattcgcga

SEQ ID NO: 386575 - DNA, 741 bp, Oryza sativa
  unsure (1)..(741): unsure at all n locations
tttttttttttttttgtcaaaaagattatttgattttnttttttgggatgtaacattccaggatcgatccattaaattggtgccagagaaacatagaaaccaacggacagggtccctgtcttggagaaaacgacgcgtctctgcaattcagagtgagttgagtatcgctcaaaggttgtgggccgggttttcatcatgtcagtcatcattatccttccaatgatgcaacatcatccttctgatcagaaaagtaatctttccttattttacgggaaagctgatacaagcctgtgccggccattgcaacgttaacactgaatagattccagtttttcggtgtgataaccatactgtagcgagaccaaatgactccagtgcaagccacagcgacttgctgaggataggatatcttttcaggaggcttagcaaagtccgcaacattggcaatactgataccccatttaaatgttggagcccagaaatgaatagttttagggccagcaggatggttccaaaaggcttgaagctttgatgccatttagcaaatgaatgccttttctgtccttccacagaaactgtttacacttccactgcacccttgggaatagtcgtcgccggagttggggagggcggcggcgctcgcagagggtgggaggcggcgattcttcaccgagacgaggcggcggacgctcgcgcgagacagcagcggaggagcgatatgctccctaccgggggattatt

SEQ ID NO: 386576 - DNA, 485 bp, Oryza sativa
agtaatcgtgctttatcttacggaaagctggcacacgcctgtcacggccattgcagcattcacgctggagaggttccagtttataggtgtgatgaccatgccccaccgtgcccaaattactccactgcaagccacaacaacttgctgagggtaggatatcatttcaggaggtttggcaaagtcagcaacattggcaatactgataccccatttgaatgttggggcccagaaatgaattgttttggggccagcaggatggttccaaaaggcctgaagctttgaggcagccatattcagactgattcttttctgtcctcttgcacaacttgctttcaagttcaggttccaattgcagccctgtgcccctggcgctacctctcgccgccggcccgccggccgcccggtcgccggagcagaggaagccaagcaagtggttgagcagataggagtgctgtgtcagcacccacgcgtccgcggacgcgtgg

SEQ ID NO: 386577 - DNA, 501 bp, Oryza sativa
tttttaacggaacagtggtatatgtaaattttgggcagtgtttgtttacatgactgttttggtacgggttgaagctatgggcgtttatttacaccgtgagttcatctttagcttcccctctcaaatggctcatgaaatatagggttttcttgtacatgtacatgttacagatggcaagggatatcaatgcctgaatgggcgcgcgaccacttgcaaaccaatagttatgttgaggagatggtaatactggccaaattaaaactgctgatgcatagggcgcaccattgtctagtgtcaacttgaaccaaattcttcgttccatttctctagctcgtcccacttgctcttctgcaggcttggcctaatcacagtcatggctttcttgaaatcttcgtatttcaggggccgcaactgatttgcttttatagtgagaatattttgtggaccaagctctctgattggcatcatggcagcttcctcacacaatgctctcagatcact

SEQ ID NO: 386578 - DNA, 849 bp, Oryza sativa
  unsure (1)..(849): unsure at all n locations
tccgtgnntcacaactattcgcttgcttgatactactgcatatatcacgttttattcatgtgcaaacatagcagagtagtattacattttcgttcaggtacatacacatacagagcatattacgcacatcacacatcctctgagatgtgtgatcaaccttgcatatcagagacaaactgatcaacccatcctgtaaataagagggaatacatacgaaatcctttttagcaaggaccaactgtattcgagcatatttagtacttcagcatcaagagtaccctgattcgctttcctgataagcgataattatctagtagtcgtcagaactggtcttgcctcttccggttgcgtactcatcagtgctcgacttgttgtagccaccagtgtagtcaccggcgtcagacttgtcgtagccaccaccgctgccatagtcgccggtgccggacttgttgtagccgctctcatagttgtccgtgcttgatttgttgtagccgccgccgctgccatattcaccggtgccggacttgttgtagccactctcagagttgtctgtgcttgatttgttgtagccactgccaccatatccatcagtgttggaggcgttcttaccactgtcgtagtcgccggtgctcggcttgctgtagccgcttccgccatagccatcatcgttgctgcttgacttcttgtagccaccatcatagtcgtctgagcttgatttcttgtattcgtcaccccgaccatagtcgccggtgctggagtccttgtactcgctgccatagtcgccagcgctgtacttgttgtagccaccaccactgccactgtagtccggacgcgtgggcggacgcgtgg

SEQ ID NO: 386579 - DNA, 480 bp, Oryza sativa
gccaccaggggccagaagtttagtatatatatagtaatatgaacaccctgatacaaataatttgagaggataacgagcgttctacatacaaatcctcctcgagctgtcatgtgaacgattcttggatctcttcgagtgccttccctttagtttctggcactaaccttgccacgaacaacaccgtgaccaagctcgccgcagagaacagaaagaaggtacctgcagagttccaatccatgaggaaattgaatgagtaggaaattgcgaaggaaccaatccagctaaccagcgtcaccaagcttccagctattgcttttatttcaatggagaatatctcagacatgataacccaaggaacaggtcccattccaactgagtatgcagcgtaatataccgatatgccataaagagccaatgttggaaccagttgtgcatacactccttgtgccttgaagtagaacgataatcccggacgcgtgg

SEQ ID NO: 386580 - DNA, 1574 bp, Oryza sativa
  unsure (1)..(1574): unsure at all n locations
nttttctctaaccttcaactcattctccctcaatgcagttacccgacactgaagacttgaaacatttggttatatgtagtctgtaaatgtcatctagagtatgtactaatcatcataaaaatcccaaagcagaaaaaagaatgatgatgagagaagctcaaaaacatttttctcacgcctggatggatgggtggatttggatgttctaaaacggggataatcaccagtcttggtgaccactgtttgcaacccaatgtctcttgtgtgactggcatgtatcattaaaaacgggtcagtcatcttattgcggtggttcaggggcgtcgtcgtcgaactcgttcatgtggtccaagagatagtttgcggccaacagctcatccttgttgcacgcgaagaatacctccaggaccagatcgcgatcaaaccccatttgttccagacgttgtatggcttcgttctcctcaggtgtgacagccactgtttgaggcattcccgcagcaaactggtctagcaagttcccttcagctccctctgccaggttcgttgattaagcgcaggaactcagcctggttttcctgaatcagttgcaaaatctgtggattttgtttccccaactcttgaagcaaaggctgcagaatttgagggttagcctgcaccaaagaaagcaagccacggaactgtgaattgtttcgcagaacatcaagatttccaccaccagcatttgcagaagcatttggaaggacctgaggaaacaggtccaatggattggcattgggtccagatgatggaattgaaagttgagctgattggggagcctggcttgggtcaactggttgaactgcagcagggacaggaagtgcttgaactgcagcagggacaggaagtgcttgaactgcagcaggggcctcagcttgctcaggaaccccggtgtacaaatactccacagcccgttctggattgttgtatgcagctcgcagagcacgcataacagtgtcacggtcccaagctcctccacccatttcaagaattgactgaacagtcccttctaaaattcttccagcaacaaggttcgacgcagcttgaccataattatctgcttcggtggatgcagcggtgacagcagctgctggagctgaagcagttgttgcagttggaactggtgcagtcacaggctcgctaacaggtgctggtggagcaggtggttgggttgcaggcgcagtgggtatcgcccggtcaactcagggatgttttgtgggctctttagctgtacttgaagcagcacttgatggtcccttgttagataacatgatcacaatgaagttgttatgttcagctttggtctcttcaagtgttgtgtcgtttttaaggacattccctggatggatgagcatttgctgatcagcggggtagacattgtctccgtgcgtagcctcgatgagctttttaacatcactgaccttgctggtgggctcgaagtcgatctcgaagctggagcccttgagcgttttgatggagaccctcatcgcgtttctaaagccgccccgctgtagagctcgggagggggaggaggaaaa

SEQ ID NO: 386581 - DNA, 626 bp, Oryza sativa
aacaagcagcacaaaagggtactacgcggttgatcttgataggaatggcgagcaatgatattcgacatacataatatttttgtaccaagtataaaaatgccgagggcgtgcagtatctaatatctacattctatgagttgaggatgcattacctgaaatctacagtatattgtatggtactaaggtataatttgactgctgtgccatcccagcatccttcgatctaagtaaggctgttcttattgctggttatcttcaaaaatgcacagcttgcagttcctgatctcttgttgctaatggaggatttacacagcaagagcacggcatcttctgggtactacagcctccaattgctcaggaaattctggaactttgacggggggagccccatgaacgaatctaaatgctgcaccccaaaagctttatcatgagctcacacctgcggaagcttgtggaacaaatctcgaaccgatatctctgattcgcaaaccatttccccagtatgatgctagagtcaaaccaaatatggccatgataacaactgagcatgctgcaggaactgcctggctacttccaagaaattgtgtagcaagaagtccagcgagggtggagctccggacgcgtgg

SEQ ID NO: 386582 - DNA, 403 bp, Oryza sativa
  unsure (1)..(403): unsure at all n locations
tgctggtgaagcaggtggttgggttgaagccgcagtgggtatcgcccggtcaaactgagggctgttttgtgggctccttgccggtccttgaagcagcacttgatgatcccttcttagataacattatcacaatgaagttgttctcaacaactttgttctcttcaagtgttgtgtcgtttttaaggacattcccttgatggatcagcatttgctgatcagcggggtagacattatctccttgcgtaacctcgatgagctttttaacatcactgaccttgctggtgggctcgacgtcgatctcgaagctggagcccttgagcgttttgatggagaccttcatcgcgccgccgccgccgcccgccgccgagctcgcgagggggaggaggagcggngtannncgtcc

SEQ ID NO: 386583 - DNA, 1165 bp, Oryza sativa
aatggtcgaaagaattgcatgccctgccctttactcctataataactgaactgaaatggctacccagtagtctcctgatggacaacttctggaaaccgtaacatcagctccaccaatcttattgtgctacagcaaagttacttttttttaccagtgtaagtcacaactgaacacagaagtccgaataccagcaattgcaattttaacgtaaaggaggcacgaggataggtcacaagaaaggcaaaggataaaagttacaagcgttgtatgatactatgatcactattttatcttccatccgacaacataacactcacgatccacagcatgcagatttctgcaaagttgtggcctcagcatcaccctctggtttgttgatcttgatcgtgcgatcctcagtcttggaatcagtctccgcaagtctttgcttaatatcccttgctattgaaaagaaaacctgctcgacattcaggtttgtctttgcactcgtttcaaagaacttgatgccatattcatcagcaagtgcttgcccctttgaagttggtacggcccttttgctttcatccatgtcagctttgttgcctaccaaaatcttgttcacattatcggaagcatgttgctctatgttcctaatccagtttcttatattattaaatgatgactcgtcggtgacatcataaacaagcaaaatacccattgctcccctgtagtaggcagttgtaatagttcggaaacgttcttgaccagctgtatcccagatttgaagtttaatccgtttaccatccagttcgattgttcttattttgaaatcaatcccgatggtggtaataaaactggtggtgaaggaaccatcagagaaccgtaggaggagacaacttttcccaacaccgctgtcgccgatgaggagcagcttgatgaggtaatcgtagtcggcccgagccctcgccggcggcgccgccatcgattcccccaatccccacactagagcgtcccctccccctcaacggatcgaactgggctggcggactggcgcgcgggaggcgaaccggatcgagcgatctcgctacaggcggaggcggcggcggcggcggcgggttccggcctctcctcctccggtcgccgagccctcgacgctggctgcggcggcgaggggacaagacacggc

SEQ ID NO: 386584 - DNA, 1141 bp, Oryza sativa
  unsure (1)..(1141): unsure at all n locations
nnnnnnnnnnnnnnnnnnnnnnngaacactgcagaaacgcaattaactacataaaaaaatttgcatacttctatgttatctactggctgtagcctcaacatcagcacagccaacccaattctatatgcgctcatcattatcaagagcaagagttactttccaccaatattcaaagtaattgttctcacttaacacccatttgtccaaatcaagacaattgcaataagttaaataacgcacaaagagagtagctgacaaagaatgaaatgataaaaattacaagcaccatttcaccaccattttatccatgtagtgagaacccttctaagatccacagcaagctgatttctgagccgccgctgcctcggcttccccttccgatttgatcttgatggttcggtcctcaggcttggaatcagtctctgagagtctttgtttgatatctcttgctatagaaaagaaaacctgctcaacattcaggtttgtctttgcactcgtttcaaagaacttgattccgtattcatcagcaagagcctgtccctttgaagtgggtacagcccttttgctttcatccatatcagctttgttccccaccaaaattttgttcacattatcagaggcatgttgttcgatgtttctgatccaatttcttatgttgttgaatgaagattcatcggtgacatcataaacgagtaaaatgcccattgctcccctgtagtaagcagtggtaatagttcgaaagcgttcttggccagcagtatcccagatttgcaatttaatccgtttaccatccaactcaacggtccttatcttgaagtcaataccaattgtggtaatgaaactagtcgtgaaagagccatctgagaaccgtaggaggagacaactttttcctacaccgctgtcgccaatgaggagcagcttgatgagataatcgtagtcggcccgagccctagccggcggcgccgccatcgctaccaatcaatcccccaagcccgtggtacacgcgcggcgggggggcgcggccgtccgaggcggcggcggcggcggcggcgatctcctccggcgtcgtctccccctcacgagcagcggcagcgcaggcggcgagttgcgtgggggaggggaggagattcgcgagaaaaag

SEQ ID NO: 386585 - DNA, 510 bp, Oryza sativa
  unsure (1)..(510): unsure at all n locations
gagcgngnanctgtgtgatcgctgcttcgtcagttgcaaatgccggaaaattattagcaacgtgtgtttaagtgaaaatgttaatgttcacatagcgtcatttagcgccgcatttcccgtggcagcgtacaactgcaagtgtagtagctcacaaaatttctgagttcttcgcggatatctcagaaggttatttgaaaggtattcctaaaaaatggggttgcgctaatcaagctgtttacaacaattacgattcgcctcatcgcaatcttcttgagcgttcatcctactgctcggcggatctttctgatgacatacggtaaaatgccaccattgtcgtagtatgcaagctccacctcagtgtcaaatcgaagtgtgcaagtgaaggacttcccattatcagtcgtcacagtaacatcttgcccaggcttgatctcacttacattggccgggaggtgaaccgtgaaagcttcatggccagtcaatccaagggtgtcggcgtccttccctgac

SEQ ID NO: 386586 - DNA, 1977 bp, Oryza sativa
ttatgttgtgcggccttttttttttttttttgggcaagaaaaatcagccacagtacatcaccgttattggatcacaaaaaagccaacaaaacaagcagatgtgatgcgaccgaggcagctttattcaacttgtccagaaccacttctctaccgactatcacttttgcatgggtaaaattaactaggtaccacgggttgattgtacagtatttctcaatgggacagacatgccgaaacatcaactatttcccccactctcactactctccatctcaccgtctttcagaaccttggcaaaatctggcgttggagctgtcaaacatgttagccgtcaggtcccgtctcctccatgtctacagccacaagcatccatgccctctcctactcacttgtttagagctcatccttgagaggctcggctggggccgactctgccttctccttcgcctgaccagcggtttccttgttcttcttaatgaagtcgacgatctcgtcggctgtcctgccgctttcatagggaaccatctttccactgggggtgacgaagtacagggtggggtaaccttgcacatcgaactcgcttggcacatcgttcgcagttgcatccatcttagcgatgacaacatccttgtcgcttttaagcgtcgtagctgcctcatccaagattggagccagcttcttgcagtgtccgccatggtgcatagaattcaacaaggacgtttttgccagacttgaagacaaaatcatggacgttatcagcgaccacaaccttaacaggctcgtcgttgacctcaggaataggttcagacttcctgaatggagacaatttaccatcaaagtattccttcaaccaagaaacaatttggtcaggctcaacgtgtgccttcaaaaatttcttggactcaccatcctggatgatgatgagtggtacctgatcctccctcagcccaaagtactggaaggcaccttgactggcctcaatgtcaccaatgaggaacttaatttccttgtccttgaactcctcagcagcaccataataaactgacttgaaagactcaaacggtccagtggagaagttcaaaaatagcatagccttggcagctgagctttggaaaaatttcagaaggtaaggatggttgtcagggttcttgtcaaaagtaacaactttaggggtgctgctagcatcaatgaacttctccaaagcagtaacatcaaaatccttgctgtcaacaacaagctcatcaaagggcttgaatagcctaaccaatggtctctcaactgcagcatcaccgcgtggaaggtggttggcatgcaaggtgtggccaaagtcataatcagatctcagcttctcagcaacctctatgaagtttgtatactcagtgccacttaattctgagaagattccaacaatgtagattttcttgtcatcaataaggttggttgcgtcttctggtgacttgatctcctggaagcaggaccaacctgcttcttcaagtattcaacaatgccctcagcctccctcgggcccttgtattcctgaatgttcttgccctggttcctgaatatcttgagtgtcgggaaaccctggatctcatacttggtagcaagaggcttgttcttctcgtcgttggcatcaaccttggcaagaacaatcggtggatcgtgcttgcttagctcttgtgcagctttctcatactctggagcgagcttcttgcagtgtccacaccacggggcgtagaactcgacgaccatgaacgggtgcttggcgacggcctcatcgaagccgtccgcgtcaagcgtcagcacggcctccgccgccgcatcgcccccctcctccgcagccgccgcctcctccgccctcgccgccggcgccgacagcaccacggcgagcgcgagcagcagcgagatccaagccttcgagatcgccatgaggaggagacggagagtgtgggcggacgcgtccgcccacgaagtccg

SEQ ID NO: 386587 - DNA, 1245 bp, Oryza sativa
tttttttttttttttttgaataacaaactgagcgtatagaaccatgccattgcaccgaggaaaagattgatataaacgctacagaataaacttaggacaaaagtagaaagcttaacatataccacacatcttgccgagctcaccctcacagcattgttgttcgaaatagggacggacaaacaacacaggttcagctagaaattcctaaaaacagttgagttcatggtgtagctatagatgatcacattggattttgggtgttcattcatgcctcgggaaatatttaacttaagctgcggaagacatctcaaagtgattgcctagcctaatcccagccttgagcagctggttgagctgccgggtcccatccagtaggcgcaaccggtggaacgacggcggcttcagtggctacgggtgctcctgcttgatcccatccttcggcagcagcaactggagctggagctgcgccccaatcaccaacagtagcagctgggggagcagccacatcagaggtccactggtcagcagaccattgttcaggtgcggtgtaatcagtgatggcagcaaagtcttgtgctggagcttcctcctcctgctccttggcctcctcaggtctctgtagaaaaacagatcaaccataacatcccacttgtggccagggaggatagtacccctcatctgcagaaccatcctagcccaggctggtgatcggtccttgggtcagtgaggatgagcagacggggctcgctgaaggaggtctggagctgattggtaaatgtaccaggcgtatgccttccagcaatggcgtgcgcgccagtgtactgcgcgaacttgaggacggcgcgctggccgtaggggcgggccgactggacaatgatgtcctgggggttctcaatggcaacaatcaccctcgccgcgagctgcagcttctcccatgtcttgccgaggttgatgatgtagataccatcggagcggcgcttgtagacgtagcgctccatctggaagtcgcagttcttggtgccgaggtggacgtcggcggcgagcatcatctgcacgtcctgctccgcctgcgacagcgcccgcgctgcgcctcctgccactgccgccatggtcgcgtgtgtgggggtggcgcgcgcgaagggaagacgggggaggaggagaggcgagagctcggagagagtggcggcgcgaaggagaagggaggaggaaggagaggggcttttatgtcattatatctccgccccc

SEQ ID NO: 386588 - DNA, 1307 bp, Oryza sativa
  unsure (1)..(1307): unsure at all n locations
nnnnnnnnnnnnnnnnnnnntttttttttttgacatcagaagatatacaagaaaaattaccagagttgcaagtcatagcatttgctcacaaaatgcacttgaagcaatgttatccatgaacgttgacaggaaggaagctaacacgcagtaaccagatgcatcggcattcaaaattgattctcacttaacattatgcaatactttaacatggagctacttaaacagatctaccaaatacattacataatgttaagtaactcagttttcctccagtagctgacgaatgatgatccgcacatttcctaccagccagtaggtgccggagcactgccttcctcccatccaggggcggcaggaggtgcaacagcagcagcagcggcaggaggaacagcaactgcatcccacccttctgcagccacaggagctggagcagcaccccattccccagtcggtgcagcagggagggcaggaggctggacctctccaccccattgctggtcaccccaattgtcagttggagcagcaccatactcagcaactgcagcatattcaggacctactgcagcctcctcttcctcctgctccttagcttcctctggatctctataaaagaaaagatcaaccatgacatcccacttgtgcccagggagaattgtgccacgcatctgaagaaccatcctagcaagcagccagaagaggcaaccaatgctctgcttccccttgttgttggcaggaataccaatgtcgacatagcgcatgggggaatcggtgtcacagaaggcaatggtcgggatgtttcccagagcagactccttgattggctggtgatcggtccttgggtcagtgaggatgagcagacggggctcgctgaaggaggtctggagctgattggtaaatgtaccaggcgtatgccttccagcaatggcgtgcgcgccagtgtactgcgcgaacttgaggacggcgcgctggccgtaggggcgggccgactggacaatgatgtcctgggggttctcaatggcaacaatcaccctcgccgcgagctgcagcttctcccatgtcttgccgaggttgatgatgtagataccatcggagcggcgcttgtagacgtagcgctccatctggaagtcgcagttcttggtgccgaggtggacgtcggcggcgagcatcatctgcacgtcctgctccgcctgcgacagcgcccgcgctgcgcctcctgccactgccgccatggtcgcgtgtgtgggggtggcgcgcgcgaagggaagacgggggaggaggagaggcgagagctcggagagagtgaccga

SEQ ID NO: 386589 - DNA, 635 bp, Oryza sativa
ttgcggccgtcgactagcgagctttggtgacccttgtggtttcggctctctccaaaaagccgggccatagtaattaactgatgtctaaaaaaaagttcactaagtgtttcgagtgtacttttaatcaactttcaccttttcaaaccaccgcagtccagctccgaggctccaaacactactggtttcggttacataccggtgctgtttttactatcggtctcatgcaacacacaaaatgtcaaaattgttgtacatcgcaagtgtactctagcacttacacatatccgccaattttcagctcaatgttatctaaccttgcaaattctggtttcccttttttccaccagtagcaaagccatgaacagggatatctcatcatcggccacaaagttggtagttgcactcttgagctgaaggttgcattcagtcggggtaactgtggtgttttccgtaaccaggtggacgaaattaatagagctccaggaacatctatgatggagggtcttcctttaccatggataacatggtgcacgagcttgtctggtaatctctttgttgcctggaaatgtcgcatatgcaaaatgggctcacacccaacctctgcaaccaatttttccagaggagtcttagcattg

SEQ ID NO: 386590 - DNA, 949 bp, Oryza sativa
  unsure (1)..(949): unsure at all n locations
aaaattggnntggggggngtttaanngaggggccntttccccngannanagggtttttncccccntttgnaggggggttcaaantttttagaaaggggaatttngnttccaanggggaaaaaanttcancccattttggtnnattttntggngttaaaaagggnntttcccnggtttggccncntggntnaaaannggggnggtttaannaaanatttnaaggggattttaanaaaaaattaanggntaannattnccattttcccatttgggggggccaaangnntggnagggcgantngngncggcctttttggtaaaaacccnngcggcggaaaggggnantgnngccagggtnntnanttgggaaanncaggggtttncccgttaagaanntgnnaaaaggcnncccgnggantgtnaaaagaannaanttaggggggaangggnaccnggcccccccccggnagattttttttttntttatnttnngttgnnnnnnntttttttncnttnnttttnttntttttnttngttntctttntnnatntttttttttcngacgcgaccgaggcagctttattcaacttgtccagaaccacttctctaccgactaccacttttgcatgggtaaaattaaccaggtaccacgggttgattgtacagtattctcctcgatgcgtatcacttacctgcctgaacatctactatttgcagctacttaaacagacttaccaaatacattgcataatgttaagtaactaagttttgctccagtagctgacgaatgatgatccgcacatttcctaccagccagtaggtgccggagcactgccttcctgccatccaggggcggcaggaggtgcaacagcagcaggagcggcaggaggaacagcaactgcatcccacccttctgcagccacaggagctggagcagcaccccatttccc

SEQ ID NO: 386591 - DNA, 1042 bp, Oryza sativa
aagacatctcagagtgattgcctagtctaatcccagccttgagcagctggttgagctgccgggtcccatccagtagccgcaaccggtggaacgacggcggcttcagtggctacgggtgctcctgcttgatcccatccttcggcagcagcaactggagctggagctgcgccccaatcaccaacagtagcagctgggggagcagccacatcagaggtccactggtcagcagaccattgttcaggtgcggtgtaatcagtgatggcagcaaagtcttgtgctggagcttcctcctcctgctccttggcctcctcagggtctctgtagaaaaacagatcaaccataacatcccacttgtggccagggaggatagtacccctcatctgcagaaccatcctagccaagagccagaacaggcacccaatgctgttcctccccttgttgttggccgggatgccgatatcgacataccgcattggggaatcggtgtcacagaaggcaatggtggggatgttccaagagcagactccttgattggctgatgatctgtcctggggtcagtaaggatgagaagacgtggctcactgaatgaggtttgcagttggttggtaaatgtaccaggagtgtgcctgccagcaatggcatgagctccggtgtactgtgcaaacttgaggacagccctctgaccataaggcctagcagactgcacgatgatgtcctgtgggttctcaatggcaacaatcactctggcagccagctgaagcttctcccaggttttgccaaggttaatgatgaaaatgccgtcggatcggcgcttgtagacgtagcgctccatctggaagtcgcagttcttggtgccgaggtggacgtccgccgcgagcatcatctggatgtcctgctcccgctgggagagcgcccgcggggcgccgccgccgccgccgcctgccgcagccgccgccatcgtcgatgtcgccgccggggaaggagggggagctagctagggttggggagaggtggcggcgcgatgggaggatcggacgcgtgg

SEQ ID NO: 386592 - DNA, 524 bp, Oryza sativa
tggtaggaatgtttccaagtgcagactccttaattggctgatgatcagtcctggggtcagtcaggataagaaggcgtggctcactgaatgaggtctgcagctggttggtaaatgtaccaggagtgtgcctaccagcaatggcgtgagcaccagtgtactgagcaaacttgagaacagccctctggccatagggcctcgcagactgcacaatgatgtcctgagggttttcaattgcaacaatgaccctcgcagccaactggagcttctcccaggtcttgccaaggttaataatgtagataccgtcagtgcggcgcttgtagacgtagcgctccatctggaagtcgcagttcttggtgccgaggtggacgtccgcggcgagcatcatctggatgtcctgctcccgctgggacagcgcccgagcggcggcaccgccttccgccgccatcttcgccgccggggggtctagggcttcgggcgcgtgcgccgtgcgcgagagagcggaggaggtggaggaggacggcggc

SEQ ID NO: 386593 - DNA, 655 bp, Oryza sativa
  unsure (1)..(655): unsure at all n locations
cgtctcctccatgtctacagccacaagcatccatgccctctcctactcantgcacatcataaccagtttaagaatagtaatattgtggtgaaaaggatgctcactgctcaggcgatcagtgtacaaaccttgtttagagctcatccttgagaggctcggctggggccgactctgccttctccttcgcctgaccagcggtttccttgttcttcttaatgaagtcgacgatctcgtcggctgtcctgccgctttcatagggaaccatctttcctctgggggtgacgaagtacagggtggggtaaccttgcacatcgaactcgcttggcacatcgttcgcagttgcatcctgcttagcgatgacaacatccttgtcgcttttaagcgtcgtagctgcctcatccaagattggagccagcttcttgcagtgtacgccccatggtggataggatttatcaagcacgttttggtctgtccctcagacctaatcatgtcagtcatcaacgaccacaacgttaacaggctagtcgttgacctccgcaataggttcagacttcctgaatggagacaatttaccatcaaagtattccttcaaccaagaaacaatttggtcaggctcaacgtgtgcgcgacgcgtggagtcgatccgggaatcggg

SEQ ID NO: 386594 - DNA, 525 bp, Oryza sativa
tttagctaaacaaatattcatcgacaggttcacaccatagaatcaaacattcattaaaagttcacatcacagaatttcaaaactagataaaaaaaatacaccaattaattatagtggagaacttcccccgctgctgttgctcactgggaaagtgtcgtcgcttgccgccatcgagcaagccacctctgagccaggagggacgaggttgccgcaagctgccacacgtcgccggaaaaggagggggaagaacaaggcttcaaatgggaaagatctctccacacatgggaaaaggagaggctgctactgccaccgcacaaggagaagggaaggccgtggggaggcgtcgccgaggagaggcaaggtggatgccgcctcctcccgctcgccctgtcacttaggggaggcactgttgaaaggaggtgccgccgaggggagatgaggtgtatgccgccttctcccgtttgctccgctaccaccaaatgtggcggtcgcgggggcggttgagcaggacagagaggacgagcc

SEQ ID NO: 386595 - DNA, 465 bp, Oryza sativa
gacaagaactcacatgatctacagttgtacagctcaacgcgacatgaattcttccaaattcaccgcaccgaaatggcgcagacgattcggagaaaaggatatcagaattagaacaaaatgtacacagtttgctcgcattatacagaggaataattggcaatgcagctcgtgcaatcacaatcaccggcactggacatggaagaaagggaaaaaaaaaacttgtgcttaaagcagcacgaaggaacacacggccgcggctaatgcgccgagcactactgaccgcaacgcgacggcggacgacgccttcatttccttgtgatccgccggcttcgacggcgcgtcggccggcggcggcgccggcggagacgcgtccgcgaccgacggcgacggggcgggcgccgcgtcgtccgggctcggggccgccgccggcgcgtcgccgaagagctcgaccggcatgaggaggtt

SEQ ID NO: 386596 - DNA, 2109 bp, Oryza sativa
  unsure (1)..(2109): unsure at all n locations
nnnnnnnnnnnnnnnnnnnnnnnnnnnnnnnnnnnnnnnnnnnnnnnngactagttagaaaggaaacacaactcattttttattgatatatgttggatgaatccaataaaaccgatacaagtcacgaaaaatcagactagatgaatccttcgagatcacatgagcaaaagctttcgacgaaagctgtcctatagtcgtggaagcaataacacttgataaagataggaattcagacacgagaggttgcagactataagatgtcatcaaatctccttgaacgccgcgaagagatcaccgttgatgtagtcgttgtccacaagactaaccaagaagtagctcttctggaccttgtctagtatctccctagatgagtcgccctcagggaacaggcaagcccaaccctttgaccaaatttcgaaagcttcgtctttccaaaccataaagctggctgagtcaacgacagttggctggactatttccttgccagggaaaacaccccatgtgaccgcattcacagcgtttgtgggaatgtttgagaatgactctccgtccttgttcacggcaatgtatgtaagagaagggaatgccttgctcttctcaattagctgatccagcttctcttttgaacagaagaactcaagataggccttctggtaaacatagcctccagggccaccccccaccaacacttgttgaatcagatctctctccattaacagcaggttggctgttaatggtaaggaagcccttctggttaatcttcaccaattggtcgtctattatctttgtctcaggttgaaggccatcaagctcagaccatgggctgcttgtaagttttccttgacagaagttcatgaatcgctcgttaatgtcttcaacagatttcactggaaccgcccattcctcttggagcttcttacccctcccacgtggtcgagtgaactggtagtcagtaagtgctccatacgatgggttccgggaatcaccccaccgcccatgtgggtattgatcccaaccaagggtccttgaaatatagctctttggtctgttagcccagaatatagggcggacatcctccttgacacggaaaacatttgttgggggcctccaaggcaatgaccttgagatcttggactcctcaattaatccaaggttcatcaatattcctagagcagacttctccatgtttagcgtgtaaaggtgcaaggtcttgattccagtagctaaaattttcttgcacatttcagtaccaaggtggattccatatgctttgaccgcctcctcgttatctttaataggttccagtgcagcagtgatctcagctggtatcttagttttgcagaaccctgtcatgcgcaggaaacctttgtagttatttataggcattatgccaggaacaatggggcaagttatgccaatttggcggcagtcattcacaaacttgagaaagatatcagtgtcatagaaaagctgtgtaatgataaggtcagcaccagcatcaaccttttgcttcaaataagcaagatcattgctgtatgcttctggtgtagccccttccgtactttgtattgcatccgggtgggcctctggataaccagcaacagtaataccaaaataatcaccatacttggctctaatgtgttgtaccaaatcaagagcacaagcgaatccaccagcaacttgaacaaatttgtcctgaccatgtggaggatcacccctaagagccagaacattttgaatcccattagactttattgttgttaaggcatcatcaatcttctcaactggcatattggtgcatgtcaggtgcatcattgtttccacacacaccatgttctgcatccggttggcgatctcgagggtgaggtcggcggtggatcccccggcgccccaggtgatgtcgcagaagttggggccgtgcgccaccatgcgatccatccgctcgaacaggttgtcgagcccctcctccgtcttgggcgggaagtactcgaacgagaacaccgtccgcccatccgccgccgcctcctggatcttctcgatcaccttcatctcggaagaagcttctagaagcttctagacccttcccctgatgctgctgctgcggaccga

SEQ ID NO: 386597 - DNA, 1608 bp, Oryza sativa
  unsure (1)..(1608): unsure at all n locations
nnnnnnnnnnnnttttttttttttttttaaccgaaaattgtaaatattcatatggctcaaaatgatcattaagaaaagtagagtacatgcggacgatgcagaacacaatacgatactaccacagcgcgcaacctatatagcatctacgaatctgagcagcacaagagcaaatggtagctactcaaacttctaggccagcttcaaagggattgtgctattgtctcaagctatacaaagtgcgggcgcgaaaaacaaagtaccaaaagttaagttcacacaaacagatagctcatcaaatagcacaagcaagcaaacccatggcgtaaatgttaatcaaaaaccgatcgacagaaaatgtagagcctactggaagtgcttgtcgccaaggccctagcacaataaactccatagtcttcaaaagcatcatcaatagtcagaaggcgagataacatcatcgatcttgagaatcatcttcaccacctgggttgccagtaagatctgctgctgcttgcctatcagtgtttcaaaaacattttgttccttcatgtggtttgtcccaacatcgttccagtcaatgccacagtgagggttgctctcctttccttgttgagattttactgctgtcagtgtatcaataggagacgaaaccactgttttcggccaaggctagtggaatagcatccaacgcatcagcaaatgacctgattgcatactgttcaactcctgggtaccgatctgcagcagcttcaacagcaactgagcaagatatttctgctgaaccaccaccatacacaattgaattattacggataagattccttgcaacacaaagagcatcatgaagacttcgcttggtctcctcaatcatcattttgttgccaccacgtatgaagatagttacagctctggagttggcacactgttcaatgtaaagcatgcgatcttttgttgttccaaatgatttctctctgactattccagccttcccaagcttttcaggactcaactcttggaacctcggaacaatccgccctcctgtagcaatggcaatcaattctaattcaacaccaccaacccatctgacagctggcaaatttctatgcatcagcagatgattggcttcatcatcaaagccccattggcaaataactagggttgctccaacatccttgcatttctgaaccatttcatcaaaagtatttttgctctttgtcacgcagcatctggaacttctctacagtatcaatgtcaaccttatgctttgtcttaggcttcgggggctnaaatgggcaggtcaggatggcaatcttagcatcctcaatcctctttggcatttgagggtggctcatatctttgtcgacaatgattccatatactagctcagtatcctctagtttcccgcctaccttaccttccactttgatcaagtccaagtttacatccttcctttccaaatcagccacagcaaggaccgctttcacagcaatctcagcaagagtcctcttacaacggttaacaattttcgatnacagggttgtcatgcaggtctgcaccagaggctctatattggtagcactaaantnaaacttgtgggagatgtgctcaang

SEQ ID NO: 386598 - DNA, 661 bp, Oryza sativa
ggccggcggcgccaccgccggcggcggccacctcgtcgtcgtcgtcctccgcctcgccggacatctcctccagcgacttccccttcgactccggcacgaggaacgtgcagatgaacccgagcaggttgcatccggcgagcacgaacagcgagttcctcaccccgatcccgggtttgtacccggcgtcgggcttgtgcgggtcctgcgccgcgtacaggaacccgaacgatccgatgatggcgccggccttccccgccgccgccgagatgccgtggcaggtggaacgcagcctcgccgggaagatctccgccggcacgatgaaggtggtggagttggggccgaagttggcgaagaagaaggtgaaggcgtacatgacgacgaagccgatgtggttccccttcgtcgtccagtggtggtacggcacggcgaggccgagcatgaacacggtcatcatgaaaaaccctagcagctggatggcgaagcggccgacgatgtcgatgaggaagacggtgaaccagtagcccgggacggtgccgcacagggcgatgagcgtctgggcgcgcgcgatgcggaacacctcctccagcgccgacaaggtaaaggccttggggatccagttgatgctggtgaagatgtccttctggaacaggttctggcggac

SEQ ID NO: 386599 - DNA, 930 bp, Oryza sativa
aaacacacgagcagattgacacggccaacgacagactcacgttcagtacatgtccaatccacacggccagaagttgtacatgaaaaggcagaaaagaaaaaaagagctaaaacacagacgcaaatctctctatcactctaagcaaagataccacgaacatatgccctcaggtcatttggtcaacctgaagaactatgtagcaagacacacctggtattgttctcaaaatgtgtctcgacaagcacggacagtagtaacactggagctcgaagaagtcgcaatggcgtctgatgctcagagttgaacttccctaccatatacccagctgaaaggcaatgtaccagctttcttggctctcgattgggccctctcatccagccttctgatcctagcagcaagggtgcaaaggtagtcttgcgccttgtttccctcgctagataggccagtcaggtcagatatcttccacctgctaacgaggaactcaaggatgtcggcgtagtcctgtggcggtgtaaacaccaagcctctgtgcaacccatggagaagtgctcaaagagcttatcatcctccccatcgaacatcaggtgggcaggcatcgagatacttcttcttcatcatgtcagcaaaagcaagcacagtgcccgatcagggtcaatctcaaacagcttctcaacaaccttggtgtatgcagtctcatgacgcttctcatctgaggcgatgatgccacagatctgtgcaagttttaggtcgccaaagtctttggcatggcgagcagtgttcccatgtgagatgaaggtcgcacgctcttgaaaggaggtgtagatgaatccaagataaggattgttctctgtcctagggtccattccagagccaataagatactgaattgtcttctcaatttgtctcatgtccaccctaccagtgaggtag

SEQ ID NO: 386600 - DNA, 592 bp, Oryza sativa
  unsure (1)..(592): unsure at all n locations
ttaggcagtgaaatacaacaattaaatagcgtctggtatcggaacgatgtcacatatgaaaaaggtggcaatgtttacatacatcatttcaggcactatactgtcaaggcccttttagtggctctgcaacacgttacacgttacacttcgaacgagggcaaaccatcctcttaaaatggagagtaatggtatggtaaactcatgctacacattccaatcggggcgataattttacaatttggctgaaatgccttattgtgcttcttcagacacctcacacaaatttcaactacagccaatttaattcaagtatagcctccattttagctgtctcagtagtcatgctgcaaatcagaaaccacgcgctgattgaggaactcaaaaacatggctaaacagtcggggcctcctcattggtacccaactttttcgtcaccatatcgatagacggtatctactgctggcagggtcaaccttaaataatacaggggcatcttccgtcgtggcgacattacccctgcatacttcgatgcatcangacctcctgcattttcaggacatgtnngggtggcaatcngttggccggatcctgc

SEQ ID NO: 386601 - DNA, 990 bp, Oryza sativa
aaacaaaataaacttttatgtaaatattgctaaccatatcattacagtttggtcttgatactgctctacagttatgagtaacatcaattacaataaatagaatcgagaagagttctaaatgaaacaatgaccgccccagccttcaattttcttccctccaaaacacatgttagctttcaattcttcagacatctttttttccaaaaacaaaacaaactattggaatggccagaaccagtacaagtgcattttactctacaggttggccaatgatttgtatgcgtcaatttttctttggatccgagcttccgttcaggtagccttcaagaattgtgttgcaggcattcatggctcgcgcatccagtagactgtggttccagagtttgaccataaaaaacctccaacaccatagtagagctggattttgtacaagttcttgtccatgaaactgcgagaaatgcttcgcatgcccagggaatatggccatccgctagtaccctttgtttccgaacaaatgaattccacatatgcataataagtttctcgtctttggtaacatcaacaaaatcatcaagcattcttctatcttcaaaatcagcaatgtcatcatcaacttcatcttcactatcacgatctgagaaaacttgctcccaatgccattggttgagccctgtgagaatgaaagaactggcgtttttgtaggagctgccgatttctgggatcagctcgttcaacagacagctttcttgtcttcccaaactgtaacactgttggtgctgaaagattgctaccgtgtaatgaattagcaggatcaacagaagcgtgtgctacagaactaccattttccctctgcacgtaatcgtcttcagatcctgcctgggcatcttcaggtgatcctgaatccacaatatgtggatgtacatgcctaattttatcacttgagatttccacccttttacgcttcttaaatcttgagcggtacgaaaatgt

SEQ ID NO: 386602 - DNA, 455 bp, Oryza sativa
tttttaccagctgaaaactaccttttattcatcatcttaaacacacgcgcagcgtagcgcgctgttattgctagtatttataaaacaacaacctattgaagtattgataggatcgtgtaacaattaccaatactcatctataaaacaagaaaaatactactacagaacgggacaggatgatgcctccgaggtgatatcttgcatcagccgattactactactatttgactattgtgtactcaactactgtactactactgttgagctggtccctgcagctgagtggttctggttcggtggttccccaaccaactgatgcggctcgcttattctctcctccgcgccgccaccagccatcgccaccggcgctccacctccacgccggccggatacaccgaaagcgacgacgacggcgaagcgccgccgcagctccgtcggcagcgacgagacggcga

SEQ ID NO: 386603 - DNA, 681 bp, Oryza sativa
ttttttttttttttttccatccaaaactgagttctgcaaatttatcttgttaagttgccagatgcgtgcacaatcccccatggagaaagtactttatctgatgctaaaacatctctcagaataggaacagtttagatacaacacagccatgtacgttctcctcaaattacaccgttcacaaccaccatgtttacatgtatagaggctctctagagcgagaggccgccggactcctcgtcctcctcgaggtcggaggtgtagatggtgtagagcgaccagatgaggccgaacaccccgagcaggatccaccccagcaggttgttgctcagcccgaggctgagcccggtgccctccgtcgacatcctctcgtcgacgagcgccatcgcgggcgccgccgtcgccgccatcgccagtagcgacgcgccggctcccttgacggccgccgccggtgtcgccgcctccttggagtagttgcacctcaccctctcgctcctcctcgccctcatctgcggcagcccaagtggcccggcgaggacggcgcgggcaacgacggaggtcgccgcggcggcgctgacggtggccatggcggttgccttgcctcgatctctcgctggctgctttgccgctgctggggagtggtgtgtaccgcgcgtgtgtgcggacgcgtgggcggacgcgtgg

SEQ ID NO: 386604 - DNA, 941 bp, Oryza sativa
ggcacgagcaagactcgaatagccgtggattactaacgcaggcaagatttcagcaatcagaatgaactgctttgcttacagctcagagaactgaagatagtcctgggctggttgaaatgttaccgtagagacgcaaagtttgttcatgtgtttgagtatgtaccctggcaaaaaaagcctccttttgttgtatatatagccttataatcaggaaagttctacatcagtaagacagaaaagagggaaatctgtagtgggggatgtgttcagggtggttctttgttcaatttgtttttgtagtcagcagtcagcagcacaaaaatgtacatctcggaatagttttgggacagataaataagaatcaatcaccccaggtttcagatttttaaccatggtattaccaacaaagtttattatatcctgtctgctgctctgtcttgttgggagaaggcttgcaatttcattgcatgaacccctggttttgaatgagctcccctcatacatactttccagatcattagtgcatcatatatgtccatctggatgatcattggccagcaatgcaatgtcccagtttccagttccacttattcactgaagaataaagcagtgaaggtcttctgcatttgatgttcctgaccgtttttcttggcagattcagctatagttggaccagtactcagctacaagcttacagaaggcagagtcctcattctccatcagccttgatggcctatcatactctatgagtttcccgtatgaaagaaccatgaccatgtcactgtcagtgacagtgggaaccctgtgagctatggtgatcacagtgcaccctgagaactcctgcttgatgactctctgcaggacggagacgagtagacgagtcgatggacgccgtcgcctcgtcgaggaccaggatcttgttcctcggagcggacgcgtgg

SEQ ID NO: 386605 - DNA, 854 bp, Oryza sativa
tggttttcctaaattcgtccatgtgataccattgtgttatatattaatatcactttaatttgtaacgaacaaatatacagtcaaattgatgagtacatacaatacctacctattaatcgaaaaacggcagcaacattgtaaacaagctacattcaaaatgaagaagaaattacaatagaaacgagcactgtaagtctataaactttgctctcctcttcttggtaagggaacccagacgcatagcctcatgtactaactggacaatattacagtgaactggaagatgtgaggctacgttagggtaccaaataggcaatgtaaaaacgatagtacaatacccagaaaacaaatatcaagccttcattcttcttcttttattctcgtttcggcctttttgaaattacaattgtaggtctgcaggataatcaccggtgctttccagggaggccgcctccgcccttgcggatgaaggcgtttctatttttcggctttggtatgtcgtggatatccatcacttgaattgtcctctgcttttttgcattttgtgcttcctggtagttttcctggagtctctttctggcagaatcaagcttctcaagatccataagattatctttctgctcccttacagtcctaactggagcagaggaggaagtagtagaatagccgatgctgttgttctgtttgttgttatgatatgtaggtgctgggcttgttctgcgcttctcaatcattgattcgacgccattattattgctagatctctctgaactcaaaccattatgtctctgtgggctgggagaatacttgaagtctgaaacctgagcattttctcgtgcagagtcctgcaaccc

SEQ ID NO: 386606 - DNA, 691 bp, Oryza sativa
aactcggtaagcacgtttttcagacaagcaatgttctacctcattgagttaaaaccatactatcaaaattacattgggactctgaaaggaaacaacattactgcctttaacggttttcataatacaaagtgtgctctaaatggcccccttaatctccactgttctggtgattccttcctgaccaaacatggtgcacaaacttccatccatgggcaacatgtcatcagaggagcttctcaaaagtgaaccaaactgtatatgagtgtccatgaaagcaggaaaagagtgaaagaggcaaacattccctcctgaagtagtgctccatggcctccaaagtcttcctcatcaatcttcaacaggtatgcatagtaccagtaaacgagcccagtagaaacccacgcgtccggccaggcgtacgtggcgccaacgagggggacggctccccagagcaggccgcaggcgaggccgagcacctgccggatccagtgcacggcgtccagcagttgatccttgtcccagtaggccaccgggtggaagtacctggcaagcttggagtgtccggcgccaccgttctgctacgcctgcgcgcgcgactgcttggacggattcgtcttcctcatctcgctcgacgacgacgccggcgtcgaagaagaccccatcgcgaggtagcagtcaccaagtctaaaatcga

SEQ ID NO: 386607 - DNA, 392 bp, Oryza sativa
  unsure (1)..(392): unsure at all n locations
tgaattattgcctccatggcctccaaagtcttcctcatcaatcttcaacaggtatnccatagtaccagtaaacgagccccagtagaaatagtcacaaacagtgcgatccagatggcgcccgacgagggggacggctccccagagcaggccgcaggcgaggccgagcacctgccggatccagtgcacggcgtccagcagttgatccttgtcccaggaggcctccgggtcgaagtacctggcgagcttggagtgctccggcgccgccgttcctgctngcctgcgcgcgcgactgcttcgacggcttcgtcttcctcatctcgctcggcggcggcggcggcggcggcggagatgggatcgcgagggagcagtcaacaagtctatggatggagctg

SEQ ID NO: 386608 - DNA, 556 bp, Oryza sativa
  unsure (1)..(556): unsure at all n locations
ccgcctgncgacgtccttagagctgctatttcaatagtacgatgttcataaataaatcagttatcctttgaataactaaggtganatagcaaagctcaagataattctataatgaatataacattttttatagaattaaaggtaaatcagtacctgtaaagaggctcaaaacgatgccaaacaaacatgtatatttgttgctgaaagacaataagctttccaaataaatctatttaacctggctgcatgtatattccgacgacacaatgtggctagatgaagtaggagtagcatgtattgtagagcattgatcagtcatatttatgtgatctctagtcatacccctgcagtttttttatcggaagcttttagctccaaaagttaactaattgatgggaacaagggctaaaatagttgacatgaaaacatgatgaggattgttgtgaccgatgaacaacctccggcaaacatttaggtaagatccataagcacttggtgctctgacatcgacagctacctcactgaaaaaatttgtaggcaacactaaataatgttt

SEQ ID NO: 386609 - DNA, 1047 bp, Oryza sativa
aaagactaacagactttgtaacggatgatcagtacaaatcagagacatgttgagagttacagcacgccaacaaacatttctacagagttacaaacttcagaagctaatagagcagcatacacggtacaactgaagacaaccacaaaacacaaaccaggttagttcttgcacccaaagcggttcaagattttttttttttgttagctaccctcttttgtcatgtggtcacctggagcaagtcatttccagagcttgacaaacctatcatggcttactgaggcaaccttgcctgttgcgctcgatgctgctagcgctgcaactaaaccatcatgagcactgtggaccgtcatggcgttcttctccctaatgtcccagagttccaaagactcgtagcatccaattactagcaaatatgggtaagaggggtgaaaaacgcatgactggaacttgttcccgctgcaactcaactcattcacaaattcaccgtcatgtccaggagcaaacgaccatattctgacactatcttcactgacagaagccagattgtcaccggtagaatcccaacaaagtgagtgaatattctttgtgtgcccctgcagagggtttctacaagcaagttgtgtctctccatcaagtatgtagatggccttctctgaggcagctgcaagatattttcccttttgaggttgaaatcgcatctgagtagcacctcccttaaagaccttaacaaaggtcaggcagctaccattatttatgctccagctgcggacttcaccatcaccatcacaggagcaaatcatatcttctttgttcggatggaagtcaagtgacataacagatgctgaatgacccgtgaaagtacggagtgaataacttgtattgtcagcatcccaaacccgcacggttttgtcaaaggaagatgtagcaagccgtgacatgcttggactaaatcgaacatccgtaatcaatgccgaatgttcttctaatgaagatgtaggctttagagcaggctctgtacaccataaaagaaccttttcggacgcgtgg

SEQ ID NO: 386610 - DNA, 407 bp, Oryza sativa
aaatcgcatctgagtagccccccccttaaagaccttaacaaaggtcaggcagctaccattatttatgctccagctgcggacttccccatcaccatcacaggagcaaatcatatcttctttgttcggatggaagtcaagtgacataacagatgctgaatgacccgtgaaagtacggagtgaataacttgtattgtcagcatcccaaacccgcacggttttgtcaaaggaagatgtagcaagccgtgacatgcttggactaaatcgaacatccgtaatcaatgccgaatgttcttctaatgaagatgtaggctttagagcaggctctgtacaccataaaagaacctttttatcatgtccaccagtagcgagcagtttgccatcagaggagaagtgacacggacgcgtgg

SEQ ID NO: 386611 - DNA, 523 bp, Oryza sativa
ttaacttattgtatatattactcttttaattaaagctgctctggttccgtacagttaagatatccaaactgaaaggcagtactacaacctcttctgaaagaagagattaacgctagcaacttccggaaaagaaaacaagaaagcaaagaagagaaaagacaagaagatacagttacacacacatccccaagcagaagaggagaagaaatttggaagaagcaaggcagttactactataattaagcatccataatacgtgtaggataggagcgatgagattattactacatacaagtgattgtagaggtgcacgtaggggagtgatttagagtaattacaagtggtggtgcggatcgaggttgttgacgagggcgagggcgttgctggtggcctgggagacggcgccgacgcgcttcctgagggcgtcgacgtcgatgccgccggcggcgtaggtggcgagggagtcgaggcaggtggaggcgtcggtgagcgcggcgctggcccaggtctgccggacgcgtgg

SEQ ID NO: 386612 - DNA, 976 bp, Oryza sativa
ggcagacggacgctcaacaagggcaaataagttaagaaaaaccgctttgtcaatatgggactatgacagccatcggtagaatctccaaatgcacacatttgacaaacagaaacagttcatcgactagaaaatttcaaataggagtagcagaactgggatgcataacaacggtttaaacaccttgattgtactatcatgagtcaccatactactaggaataagggggcacatgtttcacaaaactgatgatgcacgaaagcaaagcttctcagtatttgatcggagcaagaatctccagctgaggacccagcttctcctcggctgccttctcagccttgacacgcagcttcgccagttgcttcctcctgtcataggcaaccttggccttctccttcctcttctcctcaagctccctgatggtgtcatagtagttccagccaacctccttggagagctggccgaggaggcagtacttgtgcccaggctggcagcctcagaaccttgagcgcgtcggggatgaccatgcgcttggtcctgtcgtacggcggcggcacgccctcgtacgccttcagccttgccagcgccgcctctcccctcttggtcttgtgcgggatcatgccgcggacggtgcgccagaggatcttggcgggggagcggaagtggatggggccatgggagggcttggtgttcatcctcttgcggaggaagcggaggtacttcatcttctggcggacgaggccgccggacatgcagatctcctcgcagcggacgaccaccacgcgctgcccgttgaggagctccttggcgatgatggaggccaggcggccgagcatgtggtggcgcgcgtccaccaccacgcgcggcgcgcacacgccggagccggacaccatcttcgacttacctctcctctcctggaggcggcggaggcggcggagctagggtttggacgggcggcggggcgtgggcggacgcgtgg

SEQ ID NO: 386613 - DNA, 1307 bp, Oryza sativa
  unsure (1)..(1307): unsure at all n locations
nnnnnnnnnnnnnnnnnnnnnnnnnnnnnnnnnnnnnggcataaagtgtctgacattaaaatattcaggcataaagtgtctgacattaaaatattcaggaggagtattgattctatctatattatacagtctataatctggtgttctgcacaaacaattttaaaaaaatacacaacagagctaattacacggtacaattggtgaatagaaaggaagaaatgagcaagcgaaggtgctagggctaggggataaaacgtagtagaaggaacctagccgagcataatattaacagacatcattgcaaagaatgagaaaattagttccgaaccacagggtaaaaatcacaggccaaattactccctcgttaagtaggatcaaaataacccagaacaaaccagaggggtcatttgtccagttaggagagttcaaggttgaaaattcaagagggaaaatcagatcaagccaatataactctctagtattcaattggaacaaaattatcatgtttcgacagacatatcatttcacttctcatggtaccgataagcagaaatattataaaggcgaaaagaaaattgatgacaatcaggccaatcaatatttgattggggccaaaatatctatctgagaacccagcttctcctcagcagctttctcagccttgacacgaagccttgttaattgcttcctcctctcgtatgcaaccttagccttctcctttctcttctcctccaattccctgatggtgtcgtggtagttccagccgacctccttggagagctggccgaggaggcagtacttgtggccgggctggaggcgaagaaccttgagggcgtcggggacgaccatgcgcttggtgcggtcgtagggaggggggacgccgtcgaaggccttgaggttggcgagggcggcctcgccgcggggggtcttgtgggggatcatgccgcggacggtgcgccagaagatgcgggagggggcgcggaagtggatggggccatgggagggcttggtgttcatccgcttgcggaggaaccggaggtacttcatcttctgccggacgagcccgccggagatgcacatctcctcgcaccgcaccaccaccacccgctgcccgttcaggagctccttcgccaccagcgacgccagccgccccagcatgtggtgccgcgcgtccaccaccacccgccgcgtgcacagccccgaacccgacaccatcttcctctcctttttcttcttcttctccggtgggggtggtaggtggtggaacgcggcggcggcggcggcggctgcggcccacgcgtccgcgc

SEQ ID NO: 386614 - DNA, 412 bp, Oryza sativa
  unsure (1)..(412): unsure at all n locations
nnnnnnnnnnnnnnnnnnnnnnnnnnncagtattagaacagaacaatatgatcataacacgtcatcataacctatagccaagatgttacagactttacaatcagttatcgcgcatttgcaaagggtaaagccgtcctctcttgctcaaggcaaaaacagataaactcccctttaactttggcaaaaagaaggggttgctcaatttggggccgccaggggttttttaacagtggaccaaaatgtttttgggggaaatcaagccaaaataattccacttaaaaaggatttggggttcccaacttcagacccctgaaatatgtcatgagcaccgttcattttgggccagcaaaaaataaacttggtgttggtatactacaaataggtaattatttgacagatgcttttacaggtt

SEQ ID NO: 386615 - DNA, 914 bp, Oryza sativa
gtggggaagagaaggccagtatatcccctaaacttcgaacagaagttcatctatcaccctgaatttggtttcgactttcgacaaatatgtcaaacaggaagctccaccaaaaataagctcagcgcttttatagtttttgtcaactagttcccctacacttgtatttaagtatactgatcggataaagcagcgtttgaaatgatgtatctatttttcattccagaagccgcttggtgtatacaaaatggcaaaatatacagcgtcacctcttcatcaggacaccaccgtcataaccatgcgtgctgctaactcatgcgtgggaacatactttctcttgtctagaactgccgcagcacaaacggtcgtcatcaacataagtagtattcagccccatcatccatgaacctactgatatgtcatcatgggcatagctctgtagcgatgcactgtttatgttaatgtagcgtgccaaattgttagagaggataaacaaggcaccggaagcatggcgaaaatacgtttttgaatctccaaacttccacccattcaggttcataccattgttgaccctcttcacttacaacacctcctgatttcatggcaacccatgtacagtccttggctacctcgacgggcttcaagcatctcaattaatccagccaggtccaggttaatgttgtcatcgactttcacatagaactctgcgtcccaagcttcaattgctggcactgaagaaaaacttaactttgcttggtaactcctctggcagcttcctcatgactttcaagaatcaagaaatctttcgtcccaccattttcatcatcgatgttgcggtccaagctatcacctcgatttgcactccgaccaatgacaaaacgaatgaccacacccttactgcccggatgcatgcgtcg

SEQ ID NO: 386616 - DNA, 605 bp, Oryza sativa
tttttttttttttttaacataaatatctgaaaggtttttgaaaccttatctggaagggaaaaattggtgtgctcagtttatgcttctatcatacatgttcaggtagaaggctgttttaaacagaaattatatctaggagacaaggcacacttaaaagatactggatatgaaaggaggggtcacatatcgatatttattgagatgtggtgaggctcgaacctagtcgactaacccacctacttatgatgccaggactcattttattctttctcaagagacactaaaagcagaaaggaaaaatactactttctcctaacaaaacaactcattttattccaaagaaaaaccgataaatgacattgttgtaatctagctcgctcccaactcccaagctccagctacttcacaagcatatcagttcgacgccaccgctctcgagtctttttctgatgtggtcttcaacaactcacgcagctccggctttacatgtatcaggcctagaaagacaaccaatgacacaacacaaagcagttgatcaatcaatccagacagaagcttagaccctttgccccggacgcgtgggcggacgcgtggcggacgcgtgg

SEQ ID NO: 386617 - DNA, 743 bp, Oryza sativa
tttttttttttttttttttttggttgctagcagcaacatgctgctactatcatgttactgaagagacacatagttacatatcacatatgggcacatcaggtagtctagtactatcacctcgctatgtatgatgattacacacatatgtccggcgctaacacagactcatcagtagcacactctcacggtctcacaccgacctgcaggcagggttgcagctactactatattacaggcaagagatccgacgagagtgaaacacggtttgcttattagtttttgctttgttaggagatttgatgaatcgggtcagacacttggaagttggaactctacaccgcccccagacaaaagtgctcccctcctcctctaggcctcttagacccccgagcctccaggccggttcctccgttcacctgcgcctggtcgtgttcgccggcgcccacaggtcggcgccgttgctctgcgtcagctgcagcgtctggtccactggaaccaggcagaggccacggttcctcaggctgtagtggtcgggatcctcaggcgcagcgccaggcaccggaggagcacgcatgtaaggggagctaagaacctcgagctgctggtgaagaaacttgatgtaccctgaggcctcctgaagaacagaagcagtgtccgtcttcccaaatgggtgacactagctgctgcagtgcagccactctctcaccgttcttatccttcttctcctgatcaattgcaatttc

SEQ ID NO: 386618 - DNA, 748 bp, Oryza sativa
cagcaaaacatcactgcatgtttttctagttctcaagtgaactaatttgttctcccatacaatacaatggcagtatgtcacctatgtctgccgtactagggaggaggaaccgagcaacactagttacagataattacatcacatgtctataaaaccagctgtagaggcctctggcaatgatacccaaaacatgtatatatttacatattatattacatcttctcttgtgcccacatcagaaagaccaaagttaattttggttatttcttcatctcagcaggcgaacatacaccattccttggattgcagttgcagcggcgctgcagaaagtcgatcacgagttgttcttcttcgacgaagcacaggtagaaagatctcttcatccttcactggccattgacctgacactgaagtagcgaactaacacgacgaattgctactgatatctgtagcttctaccgtgaccatattacggtgtttagcttatccctgaatcgcgcgggcgagctgcccatagcgagctcagcgctcggaagcgctggaagtagtcccccagcgcgaggagccccctcgccgcctgccgcgtcgtcaggatcctgtgcatctcctgcagcgtctgctgccggagatgatctgggtaacgaacttggacgagggatctgagctgctccacggcgttggccatgtgcaccatgtaggcctcgggggagtcgaacgggtcggccgccgtcagggagtccgcgatcgt

SEQ ID NO: 386619 - DNA, 590 bp, Oryza sativa
  unsure (1)..(590): unsure at all n locations
nnnnnnnnnnnnnnnnnnnnnnnnnnttttttttttttttttttaggaaaacagattctgctatttcataatctgagcatgaacactctattaagctttcagaaataaaggtacaatcggctaggctattacaaaactgacaaggtataacggatccatcccttgcacatgaattacgactgggcataggttctgcactaattcaacttctcaattaattcattgattttatcttcgcggttccctgagtcaccaccatccttgaagggtttcttcttcatctgcaacctcctctctggacacttgagcttgaagggcatgaggaaatttgaagcttctctgaagtgtgggccaactgatgcgatttcatgcacaagatcttccaaacatatgatgccatattctcccagagccttctcaatgagatcattgctggtagnggggaaaggttcctttgtccaggaacccacggcccttcttgtaaataagatccttcacattcttcaaatttgggaacccataagtgataaacggctccacaacaagaagcctcttcatagtagcgtcagnggccttgaggaacacgccgt

SEQ ID NO: 386620 - DNA, 789 bp, Oryza sativa
  unsure (1)..(789): unsure at all n locations
aaacagccattgnttgtcccaaagcaaccacccaggagccataagggccaggnctctttaacgaattccacctttttggtgccccatcccaagcaatcaggtgctccttagctgccttcgtcttgatgaaagattccgcggctaaacagagcctctgtgtaagcatgaacattggttaggtcttccgggatcttccagcctttgaaatgctccagagcaacctggagatggtagagctttggtgccaggctaaggtcagcagctgaaatgttctgcccgttgataaaggggccatgagctttcagatgctcctcgagtgcctgcagttcagtaagaagtgccttctctgaaccatcatttggatccttgctcttcaagaacgttgtgaagcatgagaaaatttttgatcccactgatgcatactcaggaggggtgacaagagacggggttgggtacttctcctcaatgacttgagtgatcacatcagaatcaggaatccatttgccatcaccaccgttaaacacaggcaccttcccctctgggctgatcttcagaaaccagtcgggcttgttctggacgtcgatgagcttcatctcgtagggcaccttcttctcctccagagtcagcagcaccctctgcgagaatggacagtcgccgagcgtgtccgggtggccgacggcggccttgacgcacacctccacgcccatggcggcgacgacgacctggcgcttctcacgtacgggaagagaagattttgggtttcgacggcggcgagctacggacgcgtgg

SEQ ID NO: 386621 - DNA, 702 bp, Oryza sativa
  unsure (1)..(702): unsure at all n locations
nnnnnnnnnnnnnnnnnnnnnnnnnnaaaagctccaagcaagagcagctgcaggctgcatctccattattcatataacatattgtactagcaaaggttccattacagtatatgcactctcttagttgaacataaggccaaaccgacccacggtttcgacttaagccagcaggagatagttcatagaaaaagtgcacacttgcaacaaccatatcaaggtactcaacggatgaggctacattattccaacccaatcatgcacccaagctacacaagagtagtagtagtgcccaccactgacatggaccgatcagataaacagcatggtgtccaagcagcaccagagcataagggcaggctcttacgcattcacttttggtgcccatccagcaatcaggtgctccttagctgccttcgtcttgatgaaagattcgcggctaaacagagcctctgtgtaagcatgaacattggttaggtcttccgggatcttccagcctttgaaatgctccagagcaacctggagatggtagagctttggtgccaggctaaggtcagcagctgaaatgttctgcccgttgataaaggggccatgagctttcagatgctcctcgagtgcctgcagttcagtaagaagtgccttctctgaaccatcatttggatccttgctcttcaagaacgttgtgaagcatgagaaaattttttg

SEQ ID NO: 386622 - DNA, 976 bp, Oryza sativa
tttcagaccaatgctaataataaaccaggacatatgattacatatacatgaacatatgtatgcacgatgacatggcaagattaagcacaatgaattatttttttagctggcgaaacatgcagtttatgagctggtgttgttttgacattttgtaggcgatggtgccaacagaaatactactatacccacagcaaagaggcccctcggttggtaaaaatggttttattctgggccatgcaagggggggcaccatctttggcacatgaacaagaggagaaaaatatcactagggtcgttgtgatgccgcaagttcttccatcctctggcgcatcttgtattgcagcatggctggagcacaatccaaaggagtttccccttgtccatttttgctctgaatatttgctccattatccatgagaataagagcaatctctgtctggttaaatagtgcagccaaatgtagcaaagcaaatccttgcttatcgcagtaattagaatccactccccgggctgagaagtttcttgacagctttaatatccccactcttaattgcttccctcagtccctccccagtaacatcatattcagaaggacccttatcattagtatcattgctcatcaggccaagatttaagaatgagcttgagttgctgcttgaagtggccgaagccttcttgacacttgattcagcagattgttgattggtagaagatttttttggcctaggattcgactgtgcacttgaggaagttgtgctgatactctgctttacaggcacaggttctggtttcggagcctcgcatatacacaaaggcattccacatttgcactcaataacagcaggtgcactgtgaaacgctgaatttttcataggtgatgaagcatcatcttcccccaagtttacccctgaaaaggagtcagctgcactagatacactcccaggtgaaccggccggacgcgtgggcggacgcgtgg

SEQ ID NO: 386623 - DNA, 598 bp, Oryza sativa
tttaataacacaacttttttttagatcaacaggcacgatttgttcatggcagggcagaactctctcttagaacagcacaatatccagacacaatccttggatgcctaaaaccaacaagggaaagaaaagaagcttaaaaccatttggtgcagctaaaggccccaacgtcaagcttgttcagtcagtctcacagcatggtacagcaaaagacaaagcatcggcctacaggagaagacagaacaggattcacatctaaagttcaatgctttcctaaataaaacttgctactcgtcatccgattagctggataagtttccccacgatgagtttctatatgctctgcatctgggagaatgagatcctgatcgtgttaccctccagcgaggtggcatgttttgatacaagggcttcggtcgcctcctcttcgctctcgaactggatgagcgcctgcctcttgccgttcacctcaaacagctttgtgtttacaacagaaccatgctctgaaacatggttaagaatcgcatcctccgtgatctcttgtgggagggctgaaatgtgcatcattttggttggagcgcagcagtgacggatagttaat

SEQ ID NO: 386624 - DNA, 1479 bp, Oryza sativa
  unsure (1)..(1479): unsure at all n locations
nnnnnnnnnnnnnnnnnnnnnnnnnnnnnnnnnnnnnggggggagagaatatcagcccatgttaaccactagtaagtatatattccagggtaaaacaggtaaaacctgtgatacaaagcagtcacataactgaaaaagcgcacgatagtttgtgctactacaacagtaaaccaggacagaacacatccaacacgatgacgacgaggtcatgggggtttcgacgatagcaatactggcagtacgaattcgaggtgccgcacaacggcgcaccacattcacttcagcagggttttaacgatggatttgacattgagcttcttgaggtcagtgtaagactgaccacagccaacgaacatgactggagctccagatatataaaccattgaaagtgcagctccaaccttgtcgtcgatggtgtcaaacttggtgagcaggatgccatctatcaatctggtagtagggacagcggaaaggtctgctaatttctggttaaatttagtgagttgatcaacagcatcattaccaaccaatgcttccccaacaaataaaactagatctgggctattgagattgatgagcttggagagtgctctcatgagtggctcattatcctgcatacgtccagcagtgtcgacaagaacaacatctgacttattacgagtagcttcctgaatagcctcctttgcgacaaccgctggatctttttcatatcccttctcaaatataggtatctgaagcctgcgagcatgagtacgcagttgctcaacagcaccagatctaaaggtgtcacatgctgccaggcttacactgaggttatgctgaagaagccaataagcaacctttgcaagattggtagatttgccaactccattcactccaacaaaaacaataacatatggcttcccacgctctttggcagcatgtacatcccttaatatgtcaatagatcgccttggggttaagatgcgaagaagagcctcctccatagctgtctgaacagtagaggatatccttgtgaaggatcccagctttttgccctcaaggctagctgccactgattcacaaagtttctctgcaatttcttcagccacattcttagtcatcagcctatctttaagcgctttgagtgcaggttggatgtcagacttctcaagcacattgttacctgcaatgctcttgaacatcgaggagaaccatcctttcttcttttgggaagctccagaattttcctctccatcttcctcttcttcatcactatcactgctcacgacatcatccttatccatcatgctttccccctgcttgacaaccacctggtctatcacctcatcccctctctcatcagctgggtctgtgaaatccagcttcttcttgtcatcaggtgtgtcatcccaaaccctatttttcttcaaattcttctttgtgttagccttagaggtgttcttggccacattactagcaacctcattcttcttgtta

SEQ ID NO: 386625 - DNA, 657 bp, Oryza sativa
  unsure (1)..(657): unsure at all n locations
gnaattgtaatacgactcactatagggcgaattgggtaccgggccccccctcgagtttgttctttttgggttcgctgtgttaaccactagtaagtatatattccagggctaaaacaggtaaaacctgtgatacaaagcagtcacataactgaaaaagcgcacgatagtttgtgctactacaacagtaaaccaggacagaacacatccaacacgatgacgacgaggtcatgggggtttcgacgatagcaatactggcagtacgaattcgaggtgccgcacaacggcgcaccacattcacttcagcagggttttaacgatggatttgacattgagcttcttgaggtcagtgtaagactgaccacagccaacgaacatgactggagctccagatatataaaccattgaaagtgcagctccaancttgtcgtcgatggtgtcaaacttggtgancangatgccatctatcaatctggtaatagggacagcggaaaggtctgctaattctggttaattagtganttgatcaacancatcattaccaaccaatgcttcccccacaaataaaataaattnggctntgaaatgatnactggaaatccnctaattggcntanccgctctccccanncaaaaaanacngaatnttnattctccnatt

SEQ ID NO: 386626 - DNA, 1387 bp, Oryza sativa
  unsure (1)..(1387): unsure at all n locations
ttttttttttttttttanncnccattaacactggaaaattgctagttaaaaattggttaaatctgcgtatatgtgtataatttctatacaacgtttagctgtacaatcttctatgagttctatcatcatttgtgatgtattgtttgcaaaaaagggagaaataactgtttgcaatctcccgtcggaagtaagaaaaatcacttcacaaaaatgcctcccggatcaaccgtgcaaatactcgcgatgacaaccggctcatgacctctggtaggatcttcgacgaaatgctcggcaacacaggtagaagctcttgtacaagatacacaacatttacatccccatcaattgttgttggattgttcccagctgtcaaaaacttcacaaccttctcaacattgttcaagatgaccctgtcttcctctgtgattgtaggaagcagtgctctagctctgacaggaaccatgctgaaaactggggtagcatttcctagcccaaaagatgcagcaatttgtatcagttgctcccttgaaactgcatctatggctttgacaatctcatcaagaatgaactccctaaaaaagtcgcccctctcagagagtagaaaagaaagagcagcccgagctttgactggttgctcaggctgtgatatggccattggaaatgcaggaactaaacttgtgcttggtagagttcctatctcagccagctcagccatgctgcctttcaagttctccccaccaccactctttgctgcacgaataaaattctcgaaagcttgcatgacatcaatgaatctttctgcgtcgaatacacctgttttgccatatattgtgtatcgcaaggcgctccttagacgaggtgactcatctgttagtagtctctgcgcaatatatgggtatgcttcatccacaatggcaaatttcagggtcacccaccaaagctataccctccaatactccaatggctctgataatcaaagcaaagtacggaggtatcctgaatgggtaatcaaatgttatctgtgctagatctgctgctaactcttgaaagtttatattctttgcgccacctccttcaagtgcttgatcaaaaactttggccaatacaggcaagattgggtccaagttaactccctcagggatgaaaccaagcttcacaaagtccttgactatcgcatcataatcacgatgaatgaggtgggctattgcttcaatcattccgtacttttggtcatctgtcaatttagttacaagcccaaaatcaagaatagctagttttccatctggtgtcctaatcatattgccaggatgtggatcagcatggaaaaatccagtatcaagcaactgttttaggtagcatatgactcctacactgaccatgacccaac

SEQ ID NO: 386627 - DNA, 533 bp, Oryza sativa
ctcactaaccaaatcttaattacttgaaatgatatttctattagagcaaataccaaagtataagaaatagaaaaggatctccgataactccggaattcctccgatttcttctacgaccttaatctttccctaattctagtatacaataaaatacaatagagcctcttataattcagctcaagattggagtgtgtgatatgaagtgaggatgagagctccttaaataagtaggtatgatggttgtagagcatgcgaatgatcggaaatgccctgcaactgccatcaggagtaaatcaagagcgtccatgccaaaccctgagatcaacagcgatgatcaggatttggccgaaacctggcttggcccaactggcccaagttttggcctgggcctccttctcagtctgccttatccatttcgcaggtttttgggcttgcattttggtgttaaaatggagttaaaaagcccaacacttgtatggatgaaaatttccttcaacttagtctagatttcctcctaattcggtggtttatta

SEQ ID NO: 386628 - DNA, 526 bp, Oryza sativa
  unsure (1)..(526): unsure at all n locations
tttttttttttttttctgctacagcctcctctccacaaatcctgggagaagctggaactaccttggaaaagattatacactgtttttacttttacacattgcagcctcctgggtcaagctaacagactccaggcagcagaacagactccccccagcttacagaacttggtgggggtgttgttccggtttctgcggctgcgaagaattagggttgtatttacaatgaattgaattaggttggacaacattgtacaatgatgcggtggggctgttaagattgtcgaagtactgtcaccgcctcgagctgccaccccgggtggcgagggcgaatccgccacggtcgtacatgcgctgaatctcctcccggtaattggggagcgactcgtgaggaagggccggtgtcagctccaccacatcccccatgctgagcttccggttcagatcgcttatgggctcgtggttaaccttcggtcgcagatcttccttcatggggatgcggtanggactccatcttggagtgttggnc

SEQ ID NO: 386629 - DNA, 1133 bp, Oryza sativa
ttttacatcaaatgtgtgtagggctttatttccaaatggcagaaatatatgctttattctttaaatataacaaacagtgttttacattaaccatctgctttgaattttgtcgtacaaattgaggcgaatactctttttagacaatgagatgtctgaaacctctaacaacaatggaagcaattttggagcatagcaatcagaacatcttaccagttccatctttgcgtggaacagattcttcaagatccattctgcgccaactcccactcaaagatgataactcatcaaccttatcatacaaaccaagaagaccacctgtatgtacaaaaagaatttttcgcccttcccacttagctggattagcacccatgtctttcagcattccatatgctgcctttccactgtagactggatcaaggacaatgcctgttgctgtagctatatctttaacaaacttaagctcctcagctgtgttcatggcataacctaagcccttagcattttcaatgttgactaaatcatgtgaacgcaaatcagaatgaagtccatcaatcaggtcttgaacataggaatggaaatatccaggatcatcacaaacagagaaagcatggacttttgcctttaagctactcaattttgatcctaaagcaagaccagcaatggttccaccgctgccacatgcaacaacaatgtcgtcaaactgaacatcacctgatatctgaatttgatgttcaatctcccttattgcttctatatatccccaagttcctagagagtttgatccaccaacaggaataacatatggttttcggccttcttccaaaagcttctttttcagcaagtccgctaaagccacactgccaatttttccatattcttcttttgaaacaagatcaatatgcgctcccaccaatctctcaacaaggagattcccaaccaaaccagggtccttatccacaagaagcttggatgtgcgcagtatcagataacaatcaagatttatatactttgcagccactgcggtggcacggcagtgattgctctggatgccacctacagttataacgcagtcagcgccctgcgcgacggcatctgccatcaggaaccggtacgcgtgggtcgaaactgcgatt

SEQ ID NO: 386630 - DNA, 455 bp, Oryza sativa
tccaacatagttatattgaccattagaaatttgccaaaaaaaagtgatgccctaatgtttattcaaatacaacctaatctcttcttttctgatagactgatggcaaaccccatcccatgaataataatagtccctgaggaatattcaaagtatgctataaacgcacaaagaaattgaaaatgcaaaaatggttcaatagttaggattgaacagaaaacaataccaagttcctagagagtttgatccaccaacaggaataacatatggttttcggccttcttccaaaagcttctttttcagcaagtccgctaaagccacactgccaatttttccatattcttcttttgaaacaagatcaatatgcgctcccaccaatctctcaacaaggagattcccaaccaaaccagggtccttatccacaagaagctgaatgtgaacatgcccggacgcgtggg

SEQ ID NO: 386631 - DNA, 1391 bp, Oryza sativa
  unsure (1)..(1391): unsure at all n locations
nnttttgaaaaggaaaaacttttgctgcaatgtaagctattagtttcttcgataaatagtgaggtatatccttgagcactattggacaatgccatactataacttactggaactttgcaggatgtaattgaagtactttgaaggcaaacaagtttacctgaaacgaaaaactaaagaggcaacctatgtgaaaaaacctcatgaaaaagtcaggcatcttatgaaggttcactactctcagaattttagactcatcacaaagctctcattattcccacgttggcattgatgaccaattgcagttctcttcttcatttgagttactgaggaatcatcaccgtaaattctgcgaatagtagaccgatgggtttatgtaaccagccggagattgcacatagaatggatttgacatgtaaggatgtgctacttctgcgttgtttccttgacttgatgagctaacaccaacaattgggttaatgtttgtgaatacaggcaggggtccaacagcactctcccttggtaaaagctggttttgggatggaaggcagtaaaatggccttgatgccacagtgttcgggaccgagattgtagctggagaaggtgcagaaggaagaagcatactgatttgtggatcgcttctgtgctcaggagagtcatcaatcatgattacttctttcatcatgtaggatggatgatgcatgactggaaggaggttcctgtatggcttttgtggagaatgataatcagattgcaccatggaaccattatgcaacgtaggagcagaaaagttgccagcttgtacacttgacagaggaatttgatgattggctgttgacggtgttgtgttcataaatgcaggatcaccaatatgttggtagttttgaggcataaaacaaccaggtgccatgtaatttcctctcatgatgtaatctgaactgggtgcctgaggatgtccactctcctcactgttcatcaccatcaagttcttgcccatcaatctcaaaataggatttgatggtgaaggaagctgagtttgtattgatgggctcatacaatctgtcgtataagatgggtgggtcatggtaggctcagctgaaaccttaccagctaatgtctgatcatgtgaatctaagcaaggatttgcctttgtgctggttctttgatatgtgctgaacgatgaagacgcacgcaaacctatgttcaactgtggaaccggccttccagtaaaagctggcactggtctagccatcgcactttgatcgtgcacctgagaatccctggaaatgctctcccgacaattgcaacaacaggacttttcaggcaactgttcaccttctctggcaagaggtgtcgacttggtttcttgattcgagctcccagaaaccaattaa

SEQ ID NO: 386632 - DNA, 504 bp, Oryza sativa
gattacccgatatttccagttgaccagaaaagtatcaaccttacatcttatcataatcatcatcatttctggaatgtcttactcaccgataaactattagcaacaaaagaaatgcccagatatttcagcagcaacaagtggtaatcatacgaaaattgtttgtgtgtggtataattctagctttactgaagaaagtatgatgtatagtttatagtttatcagagtgccttacttttacagctacaatttaacccatgacctttgggcgccatccagcaatgacatcctcttgcagagctatagtcttgacaaatgaatccattgaaaagatagtcttcatatattttttcacatgtgaaagtgaatctggaacagaccaattcttatagtgacctagagctatctccatgtgatatagtttgggggcaagagagagatcagcagcagatattgtttcaccgttaataaatggaccattgtcttttaaatagctatcgaatgaag

SEQ ID NO: 386633 - DNA, 735 bp, Oryza sativa
tttcagttcaagaacaaataaaaaacaaaaaaaacataggagtccaggttcaggttcacatacaaatcaggttcaaaagcacaggagtccaggaacaaataaaaaacaaaaaataacacatgagtctaggttcaggttcacgcacaaatcaggttcaaaatagaacacaggaatatacccacgtcagggaatttgcccagccgacgtcaggagtcagattctaccccgagttagattatatcccgcttttctttcgtcgagtcaggctggttcccccacactgtttcctactccagctttcaggagtcagattctatcccgagtcagattctatccagctttttttccgctatttttagctagcactcccactaacatgattgtacagattttttttctcaggccaaaatacaagaaaatatagatcgtaaggctcttcctctaggacgtcaaggcacctccaatcaatgtcgattccaggttctcaatgacctcaaccctgcaaagggcaatgcagttgtgcagtgcagggattgaggactgtctgctcataccaatatgtatccaaatctttttccattgtttttgagaagatacatcctgcttttgttgttgataatgtttatctatagcttcaacttccaagatagatgttgatgccacataaatgtttggcaaacttgtgttacagcacaatagcccaacaaaatccatgtgcttatctcggacgcgtgg

SEQ ID NO: 386634 - DNA, 274 bp, Oryza sativa
atatttttttaataattttttttttttaaacaacaaataatctattcttcatctgttaatcagcatctgtattttgtatgattcgtatatcaagcctactttggagttccaatttgtttaagaatcgaaccagctattagcaactaacaacatgacaagtaaattttttttggtcgtttttctgcaacgagcgaaaagtaaatctcaactttacaccgcgatggacatcgtctggagtgaccgggcgtctcttcggtccggcggacgcgtgggt

SEQ ID NO: 386635 - DNA, 526 bp, Oryza sativa
ttttttttttttttttttgagaaaattgtgagagcagcacaaacggtagaattatcccaaacaagcgatatatatttcataatgaacataaatctgcttctacaatatactccatcagtaacatgagcaccaaccacaaggtttattagagacaatgccagccccatgctaggacaagcttatttcagctgttcttcctcctcctcttcttcttcttcatcatcatcatcataatcttatcgccataatttatcgccattttcgcatccgtccataagattatacctatttcttccccagttctgaaatgtccaaacatctatgtgtttacaaccacgcggcgttcttgatcggcgtgacgacggccttgacctgcaggtagttcttcaggctgtcgatgcccttctccctcccgatgccgctctgcttgtatccgccgaacgggatcgcggcgtcgaagacgtcgaagcagttcacccacacggtcccgaccctgagcgcgcgggtcagggtgttggccgtgttc

SEQ ID NO: 386636 - DNA, 1585 bp, Oryza sativa
  unsure (1)..(1585): unsure at all n locations
gaaaatatattcggtcatccaatccaatctgttgagcacccttctgtcaaaatgacccaatttcctgaagacctatcaagaactaagacgagcatctccatgtttttctatgttttttttttgtaacatttttcatgaataatgtcttacacccttccccatatataacttgggtccaaaatggtagtagtggtagccaacttaaccatgcaactcaccaagtctgtaccaaccagaacaacaatgtttggcttcaaaacacatgacaataccataacagacggttccaaaacacttggcctaggcacacacccatcaaaatcaagtaaaccatgttccgaaaagagaagacctccaaccatctctatcaacaccagcactcgccgccgcataccctatcgtgacgatgaatagggttcaaggctcgacggctgcacacagaaccggtagaaacggttgcggcttccctctgcccaaggtgaaaccccgcgtgccatctggcatgcgagggccgggaggctgcttggtggctccaattggcagctgcgggtgctgctcaggcttggtttgctgttgattgggcggagtcccaacatgatgagcgccaccacggttgccaccttggtggtggtggttgttggcgtggtgattgtggtgctgaccgttgtggtagttctggttgttgaaatggttgttgttatgctgatggtagccacgccctcgccctctgccaccacgtccacgacctctgccacgtcttggaccttccttatcattggaactgtcatcaaacaagtgatctggcaacatatctgacaattgagagggttcttcgagttgcttctcatttgattggtttgaagtggagacatcctcctcgccatttccatcagcttcatgcactccctttttccctttgcctgccccctttgtcatgcaagtattcaataacctaactctaagcccatttctccagttcttctcatcattaagctccagaatcgctttctcagcatcttcaagggtctcatactccacaaaagcatgcagcttgttggcaaacagcatatctagcttggcagatctattagtagcaggactattgccatttgaagattgaggataacaggttcgaatggtcttcacactgccaacagttgaaaagatcttcataagattctgataacagggatcaccaggaagattttctgcaacaactattcgggactgcaggtcctgcatatcagatacagtaaatgactgcagcctctttactctttttccatcatcacttacaacaagttttgatgaggttcgaagagcggcggcaagcattgaattattatgcactaaagcttttattttattgaagccggcaattactgttattggcacatatccctcagggtccttggtaataaatctcatcaagtgttctgttgttgctaggtttatatcactgaaatagtactccacctgcttggtaatcttgtgcaccacctcgtcgnngaacccgtcgacccagtgctccgccgcctccgtcgcatccgggtccacttccgcctcctgctcctcggcggcggcg

SEQ ID NO: 386637 - DNA, 1013 bp, Oryza sativa
  unsure (1)..(1013): unsure at all n locations
nnnnnnnnnnnnnttgttttttttttttttttactacgcaaaaaagttgtcattccattcgacgtttagttattccgccatgaacaccacaagcgttttacaacagcaagcaacggacggagccaactcaatgacagacaaaccgcacaagacacgtcgtccacacggacgccgaccatgacaacacctaaaccgaacaatggcggagggaaaaaaacgatggaaataacacgacagggaccaaggctgcgacaccggagctcagcagctgacacatacatagactacaaatccacaggcatgacacacgcctgatccgcctactttgcacttgatggcaactctagcaatggcactgcaatagccttcctctgtgcccaagtgccctctcctatctaaagagactaaccatagatagatgcatggatagatagacgattgttcatgggttggatggatggatggatacttgctacgacgatttccgaagacactatcttctcttcccttgtaatcttcttcttcaaatttgtttgctgcttggctatggatgtgtgatgctgatttcacagcagcagcagttagaacttgttgttgtaccagaagacgcccttgttgtcctcaggctcgacgtagatgcactccttggcctcgcgccatgtcgccttggcgacgggcgtcgggtcgaactggtagtactcgccgaggatggggcggatcgccttagtggcctccatggcgtggtagtccggcatggtggagaagaggtggtgcgcgacgtgcgtgtccgtgatgttgtggaacaccttgttgaggatgccgtagtcgcggtccacggtggccagcgcgccgcggagccagtcccactcgctcgagtcgtagtgcggcagcgccgggtgggtgtgctgcaggtaggtgatgagcaccagccacgcgttcacgatcagcagcggcacgccgtagacgcgcaccacccaccagaacccgaacgccgacgacagcttgaacaggga

SEQ ID NO: 386638 - DNA, 286 bp, Oryza sativa
acaatatgaagattaataatataaaacggagggagtaagtcggttaatttaggcacatcaaaacagcatcggacatcaagacagtatatttgtacatactcttgcgttgaatggatgcaaagtaattgatgccatctcgacgaaaagcttagaacataatcaaatcagcagaatgtagttcgttagcataggttctaaaccagtcgttgaagtaggcaggtgttccaccggattcgaagaaccttaaccaatttcagttgcaccggacgcgtgggcggacgcgtgg

SEQ ID NO: 386639 - DNA, 334 bp, Oryza sativa
  unsure (1)..(334): unsure at all n locations
nnnnnnntattttnattnttggatatggaaatatcggattgcttaaaatcgtacggtattaggtacatgatatgtaatcaacaagaactatgacttagaaacacaaacttttggaggaagtaaattacaaaaaattttacactccattccccaaacagacagatgcatcacattccaaagattggacaaaatctcgaggggaggaatttacgtgagattgttgtgtctttcttagtctccacaggaattatctacttctcagacttctgtattcttttatccttgataggcagtggaacaggtttttgagcctcatggggatgttctggttcct

SEQ ID NO: 386640 - DNA, 436 bp, Oryza sativa
cattgaacaagcaaatatataaacgcccaatagttaaggttgcaccgtgattgatgccagcactccagattaagatgataaaatgaacaagagaaatagaacagaagaaatcaacttcgctcactagacgaggcagcatctacggccatcttagcatggagaaattttacaacgatgcatgttatattgtcggtgcttccacgggcaaaagcaatctctgccagcttccgggctgcggcctcagggccctcctccgcctttacaaatgcaacggcatgctcattggacaccacatcccacagcccatcactagccaaaatcagaaactccaaatcatcatctatttcttgttcctggacctcaggctcagcaacaacgaatcgcttcaagaaacgattacccggacgcgtgggcggacgcgtgggcggacgcgtgg

SEQ ID NO: 386641 - DNA, 672 bp, Oryza sativa
  unsure (1)..(672): unsure at all n locations
gnaattgtaatacgactcactatagggcgaattgggtaccgggccccccctcgagtagggagaacggaatattgtagctggactatagtcaaatgtaaatattaccaaaaccagtccccaattgaatcaggctcaacttgatgaatcatctaaggagtgatccaacaaaacaaacgtaaatggaaaagcagtgcttattacaggcctaaaataccactcacgctccaatgcaggcatccctctcccttcattattccaagctttgggcacaagaccttcatggcttcatgtatactgttccttggcatcaacgatgacaaaaactcaaaacgcgcggtttgaatcttacaggctctttgctgttgcgatgacgttctccgcggtgatgccatactcctggtagatctttccagcaggagcacttgcaccgaatttgtcgatgccaatagccttgcctttgcttccgacgtacttctgccatccaagattaaacctgcttcaaggtgaatcttgcattaacagctccgggaaaaaactctccttgttctcaacccaatggtcctccaaaacccccccaaacaatgaacaaacggaagtctccccccttcctcaatcatcanaacctnggaaaattctattcaaacatgccntccataatcgntntgcatnatt

SEQ ID NO: 386642 - DNA, 1819 bp, Oryza sativa
ctagcaacatttgtgcaagactatagtgaatagcaaactaacacactgagaggagatgactttagggagaacggaatattgtagctggactatagtcaaatgtaaatattaccaaaacccagtccccaatgtgaatcaggctcaacttgatgaatcatctaaggagtgatccaacaaaacaaacgtaaatggaaaagcagtgcttattacaggcctaaaataccactcacgctccaatgcaggcatccctctcccttcattattccaagctttgggcacaagaccttcatggcttcatgtatactgttccttggcatcaacgatgacaaaaactcaaaacgcgcggtttgaatcttacaggctctttgctgttgcgatgacgttctccgcggtgatgccatactcctggtagatctttccagcaggagcacttgcaccgaatttgtccatgccaatagccttgcctttgcttcagacgtacttctgccatccaagagtagaccctgcttcaaggctgactcttgcagtaacagcctcagggagaacactctccttgtactcagccgactgttcatcgaaaagctcccagcaaacaaatgacacgacacggacagtcttcccctccttcctcaactcatcagcagccttggcgacaatctctagttcagagccagtgctcatcacaatgaagtcaggcttgttgccagttgagttgtcagagacgatgtacccacccttctcaacaccctcaatcgaggtaccaggcagctgagcaagcttttgcctggagagagcaaggacggatggcctcttcctgttgaggaccgcgattttgtatgccccagcagtctcgttaccatcagcaggacgaagcatcagaatgttgggcatcgcacggaagctcaccaagtgctcaatgggctgatgggttggaccatcttctccaagaccaatagagtcatgggtcataacatagataactccggcttcacacaaggctgagatcctcatggcagctctcatgtaatcagtgaaaacaaagaaagtagcacagtatggaatgagtcctgggctgtgcagagcaatgccgttgcaaatggcgcccattccatgctccctgactccaaatcggacattgcgctcctcaggcgtatccttctggaagtcaccgaacatcttaagcaatgtcatgttggaggatgcaagatcagcacttcctccaagaagaccaggaacaactttagcaagtgcgtttaagcactgctgtgacagattcctggtggcatctgcagggctctctggagtgtatttaggaagagcgtcagcccagccagcaggcaactcccctgagacaatgctcttcaaggtcgctgcatcttctgggtacttcttctcatacctcggcgaacttagcattccagtcagcctcaaaagcagcaccttgaggcacatggcggctccagtggctcttcacatcctcaggcacaaagaatggctcatagggccatccaaggttctctctggttgcttcaacctctttggtacccaaagcacttccgtggacgctgtatgagttggccttgttgggtgatccaaaaccgattgtggtggtcaccttgattagtgttggcttgtcagttaccgcctttgcttccttaatggcggcacgaatctcatcatagccatcgtttccattcttaacccagattgtatgccacccaagagcctcaaagcgagcactcacatcctcagtgaatgcaatctctgtgtctccgtcaatggaaatgtggttgtcatcatagaatgcaatcagcttgcc

SEQ ID NO: 386643 - DNA, 1030 bp, Oryza sativa
  unsure (1)..(1030): unsure at all n locations
nnnnnnnnnnnnnnnnnnnnnnggacaggaagaatcagagaaagcatgttaagctgaaacatggggcattggaacagagtctgaacagtatggttcgaccacatttactgatttacagtcaccaagaaactcaaaaagaaaaatgtattgctgcacttgcaggaagccactgaggctattattcagctaagggaatgtcccaaaatttgcaactacacaattgtgccccaaattgcaatccattccagaaacgcttatgacagacccatgactttgccagtggctgtgtcgacgtcgatttcgtagaagcagggccttgtaggaagaccaggcattgtgctcatggtgccaaccagtgggtagatgaaaccggctccaatgctggccctcacatccctgataggaagcacgaagccagacggcgcgcccttcatggatggaacatgcgaaaacgagtactgagttttcgccatgcatattgggaggtttgagaagccttgcttggtatacatttcaatctgcttctccgcctgttcagagtattcaacgccgctagcaccatagaacttagctattgactcaatcttctcctttatgccagattctaaaggatacaaaaatttcagagggtctgcctggctctcacatgcccgttgaaccgcgagtccaagatcaaccgctcctttaccaccatgcgcatggtgagtgcagacaacagcatcaaaagcaccagcagccaaagacgcatttcgcaccacgtccatttctgcttcagtatctgatgcaaacttgttgattgcaactacaacattaactccataactctttgtgtttgcgatatgtttagcaagattgacgcatccagcttcaacaagagccacattttcactcacatatgcatgatccaaaggcttcccagccacaacatcagcgcccccaccatgcattttaacccctctaattgtggccacaataatagcacactgaggcattaatccactatatctacactttatatccatgaatatct

SEQ ID NO: 386644 - DNA, 1778 bp, Oryza sativa
aggggcaagaacgataacgccttttcatcatcggtgcaatgcaatcgtagtcatcatgtaatagtacatatctacgtcgctgcttattgctgagatatttatcaaaaattgatcatcaattggttctacacatacacggacaaaagctggcactctgtagtctgtacccgtatacacacggacagttcgtacctataccattaccattacacccactctcaagtctcaactggaactagccaagctccgtacgcgtaaaccgggggagctcgccgcgccgaggcccaagcgaccaccgtccatccttgcacgccggcgtcgccacgacgccaccgccttcgcggtgcgccgggcacggcaatgcgaggctgctccggcgagaccggcagaacggcggtgggcggtgagctatatgacgcgggcgccgtcaccgggctcgcagaccagcacgcggcggcccggcgggatcttgctcaccagctccggctgcgccttctcgtactcggcccggacgaacgccgccgccgcctccgcgtggccgctctccacgacggcgaggcagcagcctctgaagccggcgccgctgaaccgcgcgccgaggacgccgggtgccttgaggaggatctcgtacagctggatcatctccttgctcccgcattcatagttcagtatggagctgcgaccagatgcagagatcagctggccaaactcacgaagatctccacgagcccacgcatctcttcccttgacaactcgcttcatctcagagaagtagtgctcagctctcctagcgagattttcttctaatatacacttctgagcctcgtatatggctgggttaacattacgaagaatacttgatgcatcttcacagcctgaagcacataaaagagcacgggcagcctctttgcactcaaaaacctcgcgtattatatccactcttcttcggtaggttatgttgcagccctgaaaaggctaacaaaatcttgaatggtagttctccttgacattgctgacttttactcaacactgagaagtagacgtaggaatgtgtggcggtcttgcagtccatgaaggtgagatagccataccgtgagagcaaaatagctgatggatccagaataccattttcaagacccaaatatttattttcgatggacttgtccaactgaatgttgtccactggtgatacaaccagatcattcacattttctaaagccatcaaataggcaatcccgactgctgcagatgaactgagccctgaactgtcaagtcctttcacaccagaaatatatcctataatacccttcttgagatcatatccaaaattttgcagggcataagcagcgcctcttgcatagctctcccagtttatgttttctgggttttcaatgggcttttccaagtcatcaactatgaatcggatcacaccttcgaattgaccagattggagtgaaatctcggcatcatcagaggccacaaacccgagaagtacaccataattaatggtcatagctgtgacagttccaccctgatgatcgatgtgagcccccagagggcaaatcctgtaggggcaagcaaccaccctgacctctcctgcaccccttccactaatctccactacctttgctcgaacaacatcaagctccccctccgacggccacgacgccgcccctcctcctccgccgccgggcgccaccattgctcctctcgccgtcggcgatccacccgcgccgcgccgccgctgcacgtgcggcccgcgaatgagtgtgcttttg

SEQ ID NO: 386645 - DNA, 466 bp, Oryza sativa
tcgattgccagatggagtgaatctcggcatcatcagaggccacaaaaccgagaagtccccataattaatggtcatagctgtgacagtccaccctgatgatcgatgtgagcccccagagggcaaatcctgtaggggcaagcaaccaccctgacctctcctgcaccccttccactaatctccactacctttgctcgaacaacatcaagctgcatcatcagaaacaattgagaaggataagatgaccatacataacaggatgaacctagttgagtactctaagctactcctatcatagatgtatagtaacgtgtaagttcaacaatgtagttaaaaggaaattaaaggatattcaaggccatgcaactttcactagagcaatttaaattccgcatgtcagattggttatatcaaaactcgagctgataccaggcaaactcattgctccttggctagaactatcttcaag

SEQ ID NO: 386646 - DNA, 567 bp, Oryza sativa
agatgaaaccatgcccatcaaatgccaagggccatatctcaaacagttaaattcacaagaatcaggtaagattgccgaattcctaaacttgttaactacaaactttacagaaatacgatgttcaagaaaattgtgtaacaagtcaaaaataataggggtgtacggtggatggtggattcttcatctaagctgtacagaaatacctatacttacagagtcctaaaaaactggctgttggtaattgctcaactcaaacctcttgcacatgcttcatttgcaaaattgtgcgaagatcctgaatcatgtgaaaaattcgaacacttgaaacttcttctgccaagaattgcatgtctaacgctgcgcggaaaagtttgcagtctgtagttctgtttctgcaaagagttgagcttcacatggaatggatgttgatcgaatgcaattctcatctcaccagttactgaaccgtatgtactttccattttgaactgtaagcaggctatatacaagcatcaatcgataattttttcaccggtcgagaataggtcggacgcgtgggcggacgcgtgg

SEQ ID NO: 386647 - DNA, 757 bp, Oryza sativa
  unsure (1)..(757): unsure at all n locations
nnnnnnnnnnnnnnnnnnnnnnnnnnnnnnnnnagactggaaagagtattgataattaatggatgattggtatccacaccaatcaacttgtcattgatgtaccaattgacatgtaaattatgttccgacactcgagtttcgaacaatattacagtttttagtcaacaacaccccaccacaactccataagcttacagctcttgtactaagggccactcaacggcagcgtggggcaaaatatagcttagtaacggtatttagtggagtagtccttgggagcaatcaccaaaccacgccctttgcgagcacctctgtagacggtctccacaatgtcgatgaactcctgcttgtccttcaaggcccagttgatcttgttgttgtttcctgtccccagatcaatcatgatgtgcttgttgcggaagaagaacatcaccgtcgacggatcatacagctcgtacatggtgttgaagtctggaacctcggtgatgtcgaccaggtagatgaccgcaaagttctttatggtctcagctactgccgctagcacctcatccatctgcatgcacgtctcgtcccagtcgtggccgaagcggatgatgacgaggcgctcctcctccgcgaggatggcctggtccaccgcccaccccgagtgcagatgcggcagaaggtacgacatctccgcctcgccgccgccgccgcaagctgctgcttcttcctccgcttcggcgactcgctgatggattcacgagcggacgcgtgg

SEQ ID NO: 386648 - DNA, 781 bp, Oryza sativa
  unsure (1)..(781): unsure at all n locations
nnnnnnnnnnnnnnnnnnnnnnnnnnnngcatnaaaccggaaaaacagtttacatcattcagccgtttcaattgatagatgaatatttcaacaatcatgtcaagcattacaagcttgtgagatgccaatacatagctaaccaacattttgcaagtccacagaccgcagtgctttgcctttggtgtcacttacctgattgctagcagcattttacctaacagagtaggctagaaactgcaacaggcaaaacacaaatgcctcaataacggtatttcgtggagtaatcctttggagcgatcacccagaccccgccccttccgagcacccctgagacagtctccacaatgtcgatgaactcctgcttgtccttcagggcccagttgattcttgttgttgtttcctgtccccaagatcaatcatgatgtgcttgttgcggaaagaagaacatcaccgtcgacggatcatacagctcgtacatggtgttgaagtctggaacctcggtgatgtcgaccaggtagatgaccgcgaagttctttatggtctcagccactgccgccagcacctcatccatctgcatgcacgtctcgtcccagtcgtggccgaagcggatgatgacgaggcgctcctcctccgcgaggatggcctggtccaccgcccaccccgagtgcaggtgcggcagcaggtacgacatctccgcgtnacnnctgccgcngcgnnaantttcttatttcggctcccttgaacaagaagattttcaagcctattccatctgaattttcgg

SEQ ID NO: 386649 - DNA, 377 bp, Oryza sativa
ttttgcaaaagactatatattcatatgaactttatacactttacatttcttgtgaaaatgttgattaaaatctactgctactttttcatgcttatctctcaagtctttcattcattcttcttttcctcccttcttttcagcttctggtgatgagatatcctgctcgtagatgacctgagcaaccaaaccaatgaatattagacccagagctgcaaccttcctccactccacctcaggtgttgcgaagacggcatttgcaattgtaagcccgagtattgccatgagcccaaggtaaatgttcatcctagtttttgatcctgcactttcttttgcaatatctttgaccttttgtgcttctagcctgggtattggtttta

SEQ ID NO: 386650 - DNA, 767 bp, Oryza sativa
ttttttttttttttttacagagtgtgcaaattgcaatatctccattttatatcgatgtcaaagagtacaggcagagaacaaacagttcgataccacaaatatgatcacacgtatccactgagaacaccgatcgaacacctagagagcaatgcgaatgcacgtgtaacgagaggcgcaagcaagaggagctaatccattttacgcaattcccaaaatcaaccaagagaaaccgcaccggcgaggccggcggcggaggcgagaggcgaagcgggggctcagctggcgccggcggatccctcctcctccgggtcgaactccgggtcgccgtcggggtgcatctccctccactggtcctcgggccagtactccttgatgtggccccacttcttgcggaacttctcgatctggctgtccatgacgaccatcgccgacgtgtcgccgacgtagtaggggtggttccccgaccacacgtccaccgtgtactccggcttggttccccccgtcaccagcaccagctccccgttgcagtacaccttcgcgtcctcgtagatctccgggtgcagccccttcttccgcatcgagcaccgcatcctctgggaggggacgagggagcggagggtggtcctcgtggccgccgcggcggcttgggtcgggaggaaggaggtggagagggagagcgccatggctgctgcttcctcgcgcgctcgcgtcgcactttgctccggattcccctgtttcgtgtcccttatcggtttccggacgcgtgg

SEQ ID NO: 386651 - DNA, 377 bp, Oryza sativa
ttcttgaattatataccttttcttcatagcggatgaacagcttctgcctataaatctagcaaatatatgcatcacaatatcacatgattggacacatcaaattggcgcacagctgcgattcaagccactaagcaagcgattacattaccaagcagtcgataatttatcgcatacaagccactaaatcttcttttgcaaacagctacccaactattacagtaccattattgattctataaataagcaaacccctaacatagatacactgatgcacaccactaaactggatctagcacctaggctaccacctaatgagagtcacttatgtacaatctggaggagacaagagttttggtagcccttctggaagcactgga

SEQ ID NO: 386652 - DNA, 762 bp, Oryza sativa
ggctattcaaagccagggggcttttctttcacagtgcagttctccagcaagaacctcatcaactatcaaaattgcctacatatgagtatacatcacctaaactaaaaatgcagagcttccgcttgcactcctgtagttgtcctaatggtggtgatgattcatgcttttggccaaatctagatgaagacattggaatgtacacaagtttggatgttacaaagattaggtggttcactccacataatccatcacatccctgaaggtcacacgtccatggctgacggcctcccggtgcgacgaaatgccagctacattcttgagcaatcttactacttcaccagcatcgtcgacatagtactttgccttagctgggtttctgaccaactgaacaggcaaagacttctggaactgcagggaatgcggagctggaggtcatgctgtcgatgcttttgaacatgtcctcatcagatcgatcgttaccaatgcacactacgaaatcaggcgtcttcccgttgttcatcaatctgtgaattaccttgtccacaacaagtcccttgctaactccctgtggtttgacttcaacaatgtaatgaccacacttcacaacaacaggttcatttgatagcaccctttcaagatgacccagtagttcctttgcttggcaggaaccgaagtcatggtctgcatccaaataatgccatactagagcactttcctttggctctatggaggacccatcagttgtttcggtcggacgcgtgg

SEQ ID NO: 386653 - DNA, 564 bp, Oryza sativa
  unsure (1)..(564): unsure at all n locations
ttttttttttttttttatcactaaagtgggcattatgcaataaatgcagctctaaggacaggcaatatacattgtggaggtagtccatatggcattaattgctaaagcagtctttagctatatgggctggccacaaggaaataaaatacaatactttttcagttcactgtgtacaaatgaatataaaatctaaagcagttggtgctggtgcgtgagcagccgagcaggtgtccgttgaagtagccattgctgctgggtgttggctctccttctccatgctccaaatcaggggtttggaactgcaaaccaccaagcaatatttgcactgcaacacccctcagttagagccactcccaacagttctttccatgggtcggagtcatcgactccctgcccaattggacagaagaggagaacttacggttaattagtgcttggttgagcaactcggttgatcctacagatggaaaatgacaaaaanggagagtattattggaagggatgtgngctgatggagttcaataacaaccgtcctacaaatgggccacaagaggacagttcaag

SEQ ID NO: 386654 - DNA, 464 bp, Oryza sativa
  unsure (1)..(464): unsure at all n locations
tttttttttttttttttaattctaagatatatactaggatactactctatttgacctgttacaaattacaaggagtaaatacttttatcatcatacatacttcagaataattaagttccactattagctccgtcttacatttacatacaatcatttcaaaccaagatcacctgcaggttgcagcattcaccttccatcatgactagatccggtgattgttggcgacatggtgagagggtcgatctccttctgcctgctgaactctgaggtggtagattctgagttggtgctgtttccatctctatattgccactcagtgatgtagctcggtttcgtcaccatctcaactacctcagcatctccagtgagcactgccatcggacgcgtgggtcgaccttcgagggggggnccggtacccanttcgccctatagtggagtcgtataacgcgcggttcatgggcntc

SEQ ID NO: 386655 - DNA, 437 bp, Oryza sativa
aaactgaaaccccagccttttaaaggatgttcattttggtagctttacctgatacatgctcaaggctcttttccctacttatctattccatcctgtcatgcttcagtaagcgcaataggagaattatgggatacctcaacatgtaatttcaaacaccatggaaccatgtgatttaactaccgctgaaatctcttcctccacacgaccgaaattcctcccgctccaaacttcagtgcagctgcacgtgtcttttcttatgaatgtactcccgagaaccttttccaggtctgatattctcgcggttatcttcctgctcatggagtcaaggttgaagaacgccaggtatatttctcctttactcccagttgctatccatgcacgtgctactgctcctgtagttacaactcctttattgttggattccaccggacgcgtgg

SEQ ID NO: 386656 - DNA, 579 bp, Oryza sativa
  unsure (1)..(579): unsure at all n locations
ttttttttttttttttttccacaaaagtgttcgttcaatatcccttaacgtgtaggagtaccaggtaagatcagagcagggctataaccaaaaaaaaaggaagacaaatttcttctaaattatcaaccgaaagggcgacattttttctcaacgattgcagcgaaaaaccaatctcctcccatggcagtaggattcttgtatgatataaacatattccccaaaacatggaaacctgagtccaggtggtgaaactgatcttaaaaggctttccgcttgcggaccttgaaactggttgagcggatgacatcgtcgtcagcattgagcctcatttgcagagcatccagggattcaggcttggtgaagtatgtcacaaggaggtagattccgtcctagtaagtggatggcaaaccaatcctgctgttcctcttcctgatgctgtntgccaatnggataatcctccggttgaananctcgtgccaatcctgcagcccggggattcntnattctaaacggcgccccgcggngacncccttttgtcccttaatnaggttatttcaactgggtatcnggtctactntt

SEQ ID NO: 386657 - DNA, 1163 bp, Oryza sativa
  unsure (1)..(1163): unsure at all n locations
nnnnnnnnnttttttttttttttttgctcgaaccatatcaatagaatcagcataaagtatcatcattcaccaatactccatatcgtagtggcaccgagggccataaaaggaatatcactctttgttgtgctactagtagtttctacttgtgctgttactacttgaaatgtgaataataccggtgtatatcacacaccaacaaaataatagtatttgttcataaggtgataatatctccacaattttcgtcaacatccatcctctcggtccaggaagcggcacaagtctacctcctcaagccctccacgatgtaagtagcatagagatccatggagtgctttatggcctcataagcagcacttgcaggcaggaagtcattgacagcaacctccttgttctcattcttcttgtagtcctcaaaaaagcgcctgatttcagccaagcggtgaggtgggagctccttgatatcattgtaatgcttgtactcaggatcatcagcacaaacggcaataatcttgtcatctgcctctccctggtcaatcataggcatgagaccaatggcctttgctcgtaggaagcatcctggtataacgggctcctgcattataaccagcacatccaacggatcactgtcttcacacagcgtgcgaggaatgaatccatagttgtgagggtacacaactgatgaatagagcacacggtccaccactatcagtccagttttcttgtcaagttcatatttaaccttgctgcccctaggaatctcaatgacgcagttgaatatagttggtgcaccaggtccaatctcaagatcatgccatggatgtgctgcaatagatctccgggacatagatgacagtatcctttcattcagagcaggggccttgacgggggctgagcctgtcttcttctccacggcttcaacagcgggagccatggcaacaaccttggtagtaggagtaggagtagatctgaatctggggacgaagaggcgaggcggcgcggtgcgaggaagaggaaaccctagaaggcacgagaagagaagaggctttgccacgacacacaaggagaaggggggattggaagcttttaaagaagagcaggagcagaagcaggaggaagatgaagaccgacagagagagagagagagaggagtattgtac

SEQ ID NO: 386658 - DNA, 580 bp, Oryza sativa
  unsure (1)..(580): unsure at all n locations
ggattcggcacgaggaagcnnccaatacggcacgagtttnttntttttttttttaatagatcttcaatcagcacggtaaggcagcctataaatgaaatgccatggcgtacaggaaatgagccctgattttgttaacagcataacttgttccagaggccccagcaggccatgctccacaaaagtgttcgttcaatatcccttaacgtgtaggagtaccaggtaagatcagagcagtgctataacgaaaaaaaaaggaagacaaatttcttctaaattatcaacagaaagggcgacattttttctcaacgattgcagcgaaaaaccaatctcctcccatggcggtaggattcttgtatgatataaacatattccccnaaacatggaaacctgantccanaaaaaaaaaaaactccagggggggnccggtncccaattcnccctatagtgagtcgtattacaattcactggccgtcgttttacaacgtcntgactgggaaaaacctggcgtttccccacttaatccccttgcancanatccccctttccccanctggggtttttancnaaaaaaggccncccc

SEQ ID NO: 386659 - DNA, 479 bp, Oryza sativa
tttttttttttttttagtcaggtaaaagatttgatttactataagtaatacacaattctgtggaatacaatgtacaggctgaactttctttaccctatgatatatggtacaaatcacatgtacatacatttttgctagaagagtgttagtgtacacactaggcagggcagggccttcacccctcctgcaggttacagctacgccgagcttccaaggaaatatttgctgaaagcttcttcgtccttgcaatgctcggacatgacctcgtagactttaattagcagctttgggaatcggcttgagaaatactgaacaaatccctccggcagcgacccaagtagctccttgagatcatctgaaaattctctgtaatgtcctgatttgtttctgatcaatcttagaaggtcacgagtggactcaaaactatattttctataacgtcccatgtctgcaagcagggcagcatctaatttctctcc

SEQ ID NO: 386660 - DNA, 195 bp, Oryza sativa
aagtcaggtaaaagatttgatttactataagtaatacacaattctgtggaatacaatgtacaggctgaactttctttaccctatgatatatgggacaaatcacatgtacatacatttttgctagaagagtgttagtcggacccgtgggcggacccgtgggcggacccgtgggcggacccgtgggcggacccgtgg

SEQ ID NO: 386661 - DNA, 1437 bp, Oryza sativa
  unsure (1)..(1437): unsure at all n locations
tttttttttttttttttcgtggaagagataagtatctttcatcttcgtattttaatagcatcacagattacagatatccaaaaacctcaatacatccaagagctcaggacaggattaaaatgcagagaatttcagcagattgcaaatatgtaggatctttttaaggttaagtctagagaattgcataagcgaaaaactaagcaatcccaacaagtctaggaagacggtccagggcctagcagcaatggtggatccttcttggcgctctcagactctgaatcttctttgggaggtggccttgatgctgcccaagcgcgaagcggcgggctcaaacatgctgccaacgacatccggtggtggctgttgaggtgcatcctctccaggaagcacaacaagacccttctccctgagagacgacggctcgttgtaacactccttccagagggagtccacaagctgtcgctcctcacgatgtgcggagagatcgtcggcatccattgtgctgatgccttcgattcggctcttaaggacatctttcagcttgtcttggtcaggtagcacgtttccagcaccggatgtattgtcccgcgccagctcgagaagaccacctaaggcagcctcccggactccagaatcatcactcgatgccaggtgcatcatcagctttggaagaccaagctctgtagcaacactcctatcagccttgttgtcgtgcagtaggtactgtaggagatggagagctttcctctgaagtctagcatcatcagaaccaagagcgtctctcagtgcagagtagccatttcccaggcggaatgcagcaactcctggctggttatgacgaattagagatgatattgctccaagagcttttgtgcgtgaattcgtgcttgcatcggaactgaagtttgtcaacagtggctccaggccattagattccatgacaagttgctggctcttggggttattttgcacaatcgtgctcacaacctctgcagcctttgctctgatgccagcatgtgaatttttcaagtaaacccaagtaggggatctaatccaccaaatagagtgcagatcatttgccatgtcaatggattcaacatgctcctgtaactcatccaacatatcttcgatgttctctggagtcacaccttgagactgtagtacatcatctggagttttcatcacttgggtgatctccttcatcctcttaacaacatccattgtattagcttgcattgcctccataaaccatttcttgtcctcctcactgagcgagcgcggcttggcggtgccgtcgccatgggcgaggctccacttgagcaggccgttccagtcgggccctcctccgtccttggccatctcctcctctaccaactccggcgagggttcacggcgagacagttggttcaggcgtcggtgcgcggcggcgggaaaana

SEQ ID NO: 386662 - DNA, 1179 bp, Oryza sativa
aaaacacaataagaaggatgatcacaagaagcacagccataggctagctaataaagatccccaaagatgaccacaggtagcagcagaggtgagcatcagttacactaagaaaatggctaaagataaaaacgagtacaaacacatacaagtgtggataggacattaggaattgctacgagcgtacaagcaaccacccagctccatacacacctgggggctgggcaaagctttcatcctctttctggccttgggatcaatcccctccagcatccatgacatcgacggtgaactcgtactcctgatcgcagcccagataagaatcggacatcaggtagatcatgtactcctttctcccagcttctgaagcagcggtgaactcaagcttcactcgagccctcttctgaagtgcaaccctcttgattgcaagcaactgattggtagagctatcaccaattaccagccaccagccttcttccttgggctttgggtacctgggggcatgaactggccccacctcagaaggcaagttcgtcatgtcacgctccagggtcacctgtacagttacattgtcaccagccctgatatcatcaccctcgcgaacttcgtaagccatatcgacattggggaaacgcttgaagaattcaatgatatcctgcagctgagggtttgattgctgcaacagatcccgcatctcatcgatgctcatctcagccagatcaaagatgctctcaatgggcctcccttcattctcctgacatctccgtgccaactccttggtgaaatgtggaagttgtaaaagaacagaatcacgatcccacatgccttgtgtcaccatttgactcagctccattgcattaagagcaagcgtaagccatccattgctggagataacatcaaccattgcctggagcaatctatgagcagaaaggagtatctcccgctggtcggctgccaggttccctaagatagtgtgccttgaaaaatgagcttgcagcagtgcgttagccttgacatgtggatcaccatacttgggcttctcgatggaaaatctctggtggcgaacaagcttctcaatgaaatcctcctcaccagggcgactgggaagctcagcatattctgaagcagaggctagaatctccaggagccctttcatcttagtcttttgagttagcattgaac

SEQ ID NO: 386663 - DNA, 613 bp, Oryza sativa
  unsure (1)..(613): unsure at all n locations
gaaactataacattacaaaatcattttttcgagataatacaagagttccatgcagcttatactctcaacaagctctatatagttctatgctgtacattcaaaagttagatgacacacaagtccatcatatacctcaatttacagtagtgtagtttttttttgtgtgtgtgtctaaattaactctaatatttcaccaaaccatgttttgcctgtctgatactctgatcttgaactttggtaccttcccaattcacagctagcttaacaaaaatttgcattcgcaggagtttccagtagagaactctagccacatcactaacagcactactcgtgtttgtgtattatgcaaattccttgctggtgacatcatcttattcaaactcattctgatacccaatcacatttagaggagaacatcatcgttgtcatctccaaggattgacagagagaatggtgcaattgcgacattgaatgtagacgacccagctttgtcgatgtgcttcatctcanaatcacatccagttctcccatatggtgtgtttcatgcgcatgcataatgagtgctctgtcatcaggccttgattctatgacagagcgctctccggacgcgtgg

SEQ ID NO: 386664 - DNA, 1276 bp, Oryza sativa
  unsure (1)..(1276): unsure at all n locations
nnnnnnnnnnnnnnnnnnnnnnnnnntcttgcggccgcctttttttttttttttttttttttttggacgggaaaccgaaattttactactcgttagcacgggaaacccaaccctaaacgaagctactggttgtagccgaagtaaccagaaaaaatcaaatcaagacacgaacttgatagatacagtaggacgatggcatgcgatgggttggtcgggaggtagagacttttattacgccttggtgggcagcaccggcacgacgaagtgctgcgcgacgatgcggcgctggatcttgccggtggccgtcttgggaagctcgtcggcgatgtacaccttcttgggcaccttgaacgcggccaggttcctccggcagtaggccagcacctcctcttccccgagcgacacgccctcccgggggatcaccgcgcagttgatctcctccccgtacttggcgtcgggcaccccgaacgccacggcctgcgcgatggccgggtgcccgagcagcaccgagtccacctcgatcggcgatatcttctcgccgccgcggttgatcagctccttgatccgccccaccagccgcaggtacccctcctcgtccacgacgccgatgtcgccggtgtggaaccacccgaaccggaacgccgcctcgttcgcctccgggttccccttgtacccgctcgtcacgttggcgccgcgcacgcacacctcgccgctcttcccggcctccacccgccgcccttcctcgtccaggatcgccatctcctgacccaccgcgcgccccaccgacccggccttcctcgccccgtcctccggcagcgggttcgacgtcatcaggtgcgacgcctccgtcatcgcgtacgcctccaccaccggcgccccgaacgccgcctccagcttctccatgatcgccggcgccagcgacgcgctgcagctgcggatgaaccgcagcgccgggtactcccctccggcttcgaggtgtgccggtcgatgatgatctggtggatcgtcggcaccgccgtgtaccacgtcgcgccggcgccgcgcatgtcggcccagaaggtggacgccgagaagcgccccgccgccgggagcgtcacggacgcgccggacgccagggaggcgaggaggccgcagaggaggccgtggacgtggaagagcgggagcacgatcaccgtcgcgtcgcctcggtgaggcggtacacggcgcggatgttctggacggacgggtcgttggcgaagtccttggccgcggcggcggcggaggcggggaagccggc

SEQ ID NO: 386665 - DNA, 1065 bp, Oryza sativa
  unsure (1)..(1065): unsure at all n locations
nnnnnnnnnnnnnnnnnnnnnnnnnnnnnnnnnnnnnnnnnnnnnnnnnnnnnnnnnnnnnnnnnggacgggaaaccgaaattttactactcgttagcacgggaaacccaaccctaaacgaagctactggttgtagccgaagtaaccagaaaaaatcaaatcaagacacgaacttgatagatacagtaggacgatgatgatctggtggatcgtcggcaccgcctgtaccacgtcgcgccggcgccgcgcatgtcggcccagaaggtggacgccgagaagcgccccgccgccgggaggtcacggacgcgccggacgccagggaggcgaggaggccgcagaggaggccgtggacgtggaagagcgggagcacgatcaccgtcgcgtccgcctcggtgaggcggtacacggcgcggatgttctggacggacgccgccaggttgcgctgcgtgagcggcacgcccttgggccggctcgtggtgccggaggtgtgcaggaacagcgccacgtcggacgggtcgttggcgaagtccttggccgcggcggcggcggaggcggggaagccggcgaggtggacttggccggcggcgtccttgaggctggcggtggtgtgggcgaggcccagcttggaggcggccgcctgcgcggcgacgttgccctcggggttggtgatgaggagacgcgccccggagtcggagaggtagaactcgaactcctcctgcgtgtacgccgggttcagcggcgccgccaccgcgcgcgctcggatcaccgccaagaacatgatcaccagctcgacggtgttggggaaggcgagcgcgacgacgtggccggggagcacgcccgcatcggcggcgaggcgcgcggccgcggcgtcgacgagcgcgtcgagcgccgcgtgcgacaggtcgaccttgcccgggacggcgagggcgcggcgcgaggggaacgtggccaccgccgccttgagcagcgtggtcagagtcggggtctccattgggtcgcccgctgcaggtgcttcacgtaccaatctctcgtgcgtcgcgttggtttgtgtgtgtggggagaaag

SEQ ID NO: 386666 - DNA, 428 bp, Oryza sativa
gaagaaaacagagattgtaagctgtgcagtttgatgcctgagtttcactgaagcagtcataatggaactatattacaaactgcaatttttagttacatcggcaaccaatttttctccaaaccatccaacatattttctcagaattctttcgtctcgctaaaaatctctgaattcgatgaagccatccgactatgaagcatcgatttcagcagtttctaatgaggaaatttcaggctgctgctgctgaagctgaacccacgaatggtagtctctcagcagctgctcccccagcaagggcacgagcctgtccaggaggccttgcatcagcaggttgcctggtgtctccactgctgacaatggaagcatgctgaatggcttcgtgtaaacctccagagtgacctccaaattgacatcaatgtccaagcatg

SEQ ID NO: 386667 - DNA, 734 bp, Oryza sativa
caacaagcaaaagttcagttcggtagcttattattgcaaccattaggaatagaggtaatttttcagccgctcatacagccatgctatactatgcagggcaagaagaacacaggtgcagagcagctgccattattcgcgagacacatcacacatacagagagttcgatcgatcggagttggttgatgagattagagataagataattagaacatgtccttgagtgtggggagcttcatctcgccgctggtggagagcgggatggtgaagttgccgacgatggggaggtcgatggtgaggccgacgtcgagctggtagtcgatgtcccagtcccggcccacgtccttcaccagcgagatgaggaagtcgtaggggatcttggccggtatctccagcttcgtcgtgtcgctcgccgcgatccaccccggatcgggcatcgtgccggacgccacaacgttgccggcgcacttgagggtgtaggtgagctcgcagatggggaggcggtggtcgtaggggttggagacgttgacgttgctgtgcacggtgatgcactcgcggctcatccccttgaacgacaagctgtccagcgacgcctccggctttgggatgtgcgcgatcttctccgccacgaaccctttcgccttgtccatcaagctcgacatggccgacgcaccctggagtgaaattatcttggatcgagacggacgcgtgggcggacgcgtgggcggacgcgtgg

SEQ ID NO: 386668 - DNA, 1902 bp, Oryza sativa
tttttttttttttttttttatctttaaaggcaagaatattattcataaatgacgcatgatttttatcaaaacgcttgcaaatgatatcagataagtagagtcaacaagacaaaactgtatctgccaaagcacacctccccaactccacccaattacgccattatttctgggcaaaagcaaacggcttcccattcctccccttcaccagtctcaaaccataaaccccacaacaaatcctcctaagtgacggcatataagatgatgaaaacaaagcaggatactccagagtcgtcatggcgaacttcaagttgacacttctcatgccacagccgctagtcgtgctgggcagcctagtaccggtagtgcgcgggcttgtagggaccctcaactggaacgctgatgtagtcagcctgcgacttggagagcttggtcagcctggcaccaagcttgcccaagtggagggcggccaccttctcgtcgaggtgcttgggaagaacgtacaccttcttctcgtacttgccagtgctcttctccttccacagctcaagctgagcaatgacctggttagtgaatgagcaggacatgacaaaactggggtggccagtagcgcacccaaggttcatgagacgaccctcagcaaggacaatgatgccagtgttggtctcagggaagacccagcggtcggtctgaggcttgatggtgatgcgcttgacaccagggtaggtctcaaggccgagcatgtcaatctcattgtcaaagtgaccaatgttgcaaacgatggcattgttcttcatcttcctcatgtggtcaaccattatgatgtccttgttgccagtggtggtcacaaagatgtcagcctccgagacaacatcctccaaggtgaggacctggagaccctccataagggcctggagggcacagatggggtcaatctcagtaacaatgacacgggcaccagcctgcttgagagcagcagcacagcccttgccaacatcaccataaccgcagaccacggcaaccttgccagcgatcataacatcggtagccctcatgagaccatcagggagagagtggcggcaaccatacaggttgtcaaacttgctcttggtgacggagtcgttgacgttgatggcggggaagaggagggcgccggtctcctgcatctggtagagcctcttgacaccggtggtggtctcctcggagactccgacgagcctctccttcatcttgcggtacttgctggggtcggacttgaggccgtcgcggatgatggtgagcacgatcttgaactcggcgttgtcggtggactccgggtcggggaccttgcctgacttctcgaactcctcctcggccttgacgccctcgtggatgagcagcgtggcgtcgccgccgtcgtcgacgatgaggtcggggccgccgccgacgccccagtcgaggcagcgctcggtgcaccaccagtactcctcgagggtctcccccttccaggcgaacacggcggcggagtccctggcgatggcggcggcggcgtggtcctgcgtggagaagatgttgcaggagcaccagcggacctcggcgccaagggcggtgagggtctcgatgaggacggcggtctggatggtcatgtggagggacccggagatccgggcgcccttgaacggctgggaggggccgaactcggcgcggcacgccatgagccccggcatctcgacctcggcgagctcgatctcgaggcggccgaagtccgcctgggagaggtccttcaccttgtactccctccccgacgaggtcttctccacggagagcgccatggcagcggcggcggcgagctcttcctggatcggatctgcgacggcgagagggtgggtgggtacgcgtccgcccacgcgtccgcccacgcgtcca

SEQ ID NO: 386669 - DNA, 745 bp, Oryza sativa
tttttttttttttttaagtagagtcaacaagacaaaactgtatctgccaaagcacacctccccaactccacaacaaatcctcctaagtgacggcatataagatgatgaaaacaaagcaggatactccagagtcgtcatggcgaacttcaagttgacacttctcatgccacagccgctagtcgtgctgggcagcctagtaccggtagtgcgcgggcttgtagggaccctcaactggaacgctgatgtagtcagcctgcgacttggagagcttggtcagcctggcaccaagcttgcccaagtggagggcggccaccttctcgtcgaggtgcttgggaagaacgtacaccttcttctcgtacttgccagtgctcttctccttccacagctcaagctgagcaatgacctggttagtgaatgagcagaacatgacaaaactggggtggccagtagcgcacccaaggttcatgagacgaccctcagcaaggtcaatgatgccagtgttggtctcagggaagacccagcggtcggtctcaggcttgatagtgatgcgcttgacaccagggtacgtccctggccgtagcagtatcactctcagtatcagactgctcaatcgtacgaccgtatgtgctgtgtatccgtaatattcctcatgtggtcctcccttattatatccgtatccccagtggcggtaacgaatatatcaccccccgacctcaccatcatccgccctggtcaaaacatacag

SEQ ID NO: 386670 - DNA, 507 bp, Oryza sativa
atacgtgcggaacgtgtcttgcacatgcactattactagtgaagctaaaggtattcgcagatcaattcatctaaagctttgccatgtatatgtggagacacataatgcatttagggtggggagaggacttaaatgtaggattatccccactgacagatacaactgaaaatgaactcaagaaatggagaaagaaaaatattggagggaatttaaggttgatttatttgattatttccatagctgctccattggaagcccgcgctctgcagcaacatccttgaactgcctcatcatttgggtcgccttgatggtagctcttgcattgttgagggggttcttgctcctcagctgtttccccagagcattttcaaccccagccatctccagcacgaccctcacagctccacctgcaattacaccagatccagggcaagcaggcctcaacatgaccctggctgctccatagtctgcatctgctctatgcgggaaggtcgaatacttggtgag

SEQ ID NO: 386671 - DNA, 546 bp, Oryza sativa
ttttttttttttttttttgctatggctacttccatattttttttaatgtaatgagcctatcctctaccctctcttttctgtttatatttcaatataccgaaacccatataagactagataaatattaagaggactcttccgcctagataaaaatctatcgtgggcagcaaagttgtttttttatttgtatttgccctttagttaaaattttcaatttcattaagaaaaactaaatagaaaaatggaaaatgaaaatggatagaattcctacttttttcttcaaatccaaaaactttctccttttttatacataggtcgtcgattcggcattggataaaaaagggcagggtgccccttctagtaaatagttcaaaccattttatcgatatgagtgttctatatcagataaattctacattagctatttcctgtttaaagcatttggtactaatactaatatagttgtagaaagagtacccccttttgcctagacttcaagcagtttagctttaaccgtgttaatggtctcatattattggtctataa

SEQ ID NO: 386672 - DNA, 682 bp, Oryza sativa
aattaattgtgacaaaactaattattaattgtcactgcataacgcatggatgattgattcgtgccacggaatcagtcaagcaatggctccaaaccacaaagtacaagactccaaagctagctacacacgtgctcatgggtctcgtataattaaataactaaacactcacttgcaattaaaccagccacgcttattttaatatatatcacacacacccgatcgatcgcacacgtacgtatatacgcatacgttatacctgtacagaattacaaatcatatgatatacaatcattcattacctgaattgagattcatacaatacacacatacgattgtaggcgccatggcggcgtgtctggcctgagcccggagtcgaggaaggtcatatcgatgatgatcaaagcatagacatcgatgcgatcatggcggggaagcagtggtggcggcgtcacggacctcgaagacggtgcgggtcttgacgacgacgtcgtacatgtggacgagcttgaggcgggagaagtcgcggggcacggagatgaggtggacggtggagcgctggtggaactggaggaggcacgggtcgttgaggtacctctcccacccgagctcccgcagccgcctctccagaacctcgtagctcgtcaccacctcgctgctcgcggacgcgtgggcgaacgcgtgg

SEQ ID NO: 386673 - DNA, 862 bp, Oryza sativa
tggccacagggaaagagagaccgagcaaggttatgtgtacagattacaatatttaaaatgtcgtgcaaatcatatgtgaaaaaactggtacataatttgtattgagacaatccaaattattccaaattaaacagtaaaaaggtacggttgagagtagggcatcggcgatccccttttctgcttgatctctggcagaatctctgcaacctgcatgttgcccccggccccctatgtatgtacttatatatgtatgcatgtgtacatataaatataagtatgcatacacatgttgtgctctctattgatgcattatttatgcagaaatatacccaaaagccaattaacctatagcaatgtcctcaccggcgcaacatctaatccaaaagctgcaacgccggcaggagaaaccccaaatcgatcgagctatagatctcgatctagtgatctgtgcatgctgatcatttgtgtgtacatcgatccttgatcgatcacacgcataccagtatatatatacatacttacactcttataatagcaggcaggcaagctcatgtggactgctgtagctataagctgtcgtctgatcgatggatggatggatctcggatcagcagctaggtcgccggtgagacggcgggggcagcggcgtcgcggacctcgaagacgttgcgggtcttgacgacgatgtcgtacatgtggacgagcttgaacttggagaagtcgcgggggacagagatgaggtgcacggtggagcgctggtggaactgcaggaggcacgggtcggtgaggtacctctcccacccgagctcccgcagccgccgctccagcacctcgtatgacgccaccacctccccgctcggca

SEQ ID NO: 386674 - DNA, 701 bp, Oryza sativa
gacaaaattgttcgaaattacacgcaaagacacaccgatcgatgactagaagcgcaaagaatcaacttctctctgatgacaaatgtgctactcgagctagctagactgacgtctcttcttcatcaaacagaagtggcgatggtttcagagcaagaagaagaagaagaagaagatcagatatcaggcggcggcggggggctttgccgccgccgccggcgacgagcttgtcgatgaggtcggcggcgtcctggatggtggtgatgctctgggcgttgtcctcctccacggtgatcccgaactcctcctccagcgccatcacgatctccaccgtgtccagcgagtccgctcccagctccgtgaactgcgactccggcgccagcttcgcctcctcccccggcgccagctgctgcttcactatctgcatcaccttccccaccgtctccgccttcgccgcgcagaagacgcggaagcgaggggatctgagggagacgaggcctctccttgctgtcatcgtcttcatggagaccaggtttctgcttgaaattctgcttcccttccagctaccgagcgccgccgccggcgggcagccgagcttggcggagacgacggcggacagcgcggcgcccatggccggaggcggaacgacgaaaggaggaggaggaggaggcactgactgagtgctcgaccgagcggacgcgtgg

SEQ ID NO: 386675 - DNA, 755 bp, Oryza sativa
tcaaaattgcactaaacagcgggatttatttggaaacgaaaacagaggtagtactataataatagtaatttctgaacaagaaagatctctataattttaacaccggtacagtttgacccctccctatgaaacacatctccccacacacacgcatcacgcaaaacgcaccaagaacacggagaccaatggagtgacgccattggcccattggtaagcagcaagaagctgcgtcgtcggcggcgatcgtccgatcagtcctgcgacgccgactggaagatgaggaacgcggtggcgactccgaccaccccggtgagcgccagcgccaccgtcggcaccggcgacgtcagccccacgttctggagcacgcctttgccggtggtcagctcgacggtgatggcggcgacgaagccgagcatggcgccgcggctgagccacacgtccagcccaccgccgccgccgccgccgccgcccttggctccctgctcgcaccggacggtcagggacctcgccttctgcctcctcatgctcaccagcgaccctgcccgttcgaaacaatagaattaagctctcaagatgcccagaaatggggacggaatcacgaaagaaagagaaaaatcgagaagaaatctgctaccgggagcggcagagcatgctgacgtcacggacaagcgggagacgccatggcctgaagaggaggagaagcaagctggcgtggcggcgagatggaggcggggaggagcggagcggacgcgtgg

SEQ ID NO: 386676 - DNA, 525 bp, Oryza sativa
  unsure (1)..(525): unsure at all n locations
nnnnnnnnnnnnnnnnnnnnnnnaaacaaaccaaactttggtagatatatattaaaaaattgagccacatcacagattggaattagtcaacaagttcagggaatgaactcagaaatgaaccggtacaaccgagaatattaagttcaggtacatcccaggataagatcagaaaatactatagcaaatgttccaaattttgtttctgaattctccttaatccacatgaattgtccttaatacaatccaggataagatcagaaaacaagacctctcttacaagcaataccgcatatattatttgtcaagacaaagccaagtgcataatccacatcaggttatcctctagatggatactccagccatgctccctggtcctccaaaaacaaccaggctcaatagtccaatgcataatgtaaataacagggccggcagaagaatctgaacatggtaatcttaaagcggaccttatataatctgcacaaataatattggaaattatttgaaatactatcaagtgacaggagc

SEQ ID NO: 386677 - DNA, 1601 bp, Oryza sativa
  unsure (1)..(1601): unsure at all n locations
tttggtttttttactattttgatccaaaatctgagacattgcacaaaaatcaaccagttcaaaaggtataccaggtcaaataaacagcaagtaacaaaactccaccaaaaaggcaactgttttaactccgaattcaagtcctaaatagtacttttgcaactgatgattttgcttctaaacattgtgctgctcacttgaagcattttgcatccagcaagtcctcgccctcgaacggctcctggtcctcaatcatggcattgacacgctctttctgggcctcatcagagaggtcaaccttggtccactcatagagctccatgtcgtagacctcatccatgacgaacttggggatgtcctgaccacggaagagccagagtcccttgaccttgaagggcggtgtggagccaatgaccagcatcttgccaaaagcatacttgcggcacagatccatccgctgcaggaacccaccgaccttgttcatcgtcacaaacgatacggtgttctcatcgttgtacttgtagtcacagaaccacagagagtaaccctgtgggtcatacatgtcccagaaacctttaatggcaatttcacggaagttggtttttgtgtttgagtatagcctcttccactcatcaagaatcatcttgcttggtggcagtagatcaagaggattctttggctttggctttggtgcctcctcttcctctgaagcctcaacctttggtttaggggcctccttcggagcctccttcttggcctcctttgcttttgattccttagggggagcagcctttttctgaacgggaggcacagactctgcttgcttgaaatcaccaatgaccttcttgaagttgggctggttaaccattgtccagaagtaccgctcaacatgagggaactcggaggtgaaactcttgatcaagatccgaacaaacccataatataggttgcatgtcatcacaatatcagctagagtaactgaatgcccaacaaggtatgtgtttgaagcaaggtgtgtgttcagagcacccaatgacctcttcaatgaggtaatagcaaattcctcaagcacaggaacataagggccaaaaccaagccttgggtacaaccaccttccaatattggcatcaacctctgttgctgagaagtccatccattgttcaatgtgagaatagtcgataagagaagaaccacaaagagagctgttgtccttcaagcgagcaacatagcgcgcgatagcattgctctcaaaaacagcaccttcaggagtctccagaacaggaatcttcccaagggggttcatcttgagaaactcaggggtcttgtttgagacacccatctcaaaattcttggtcagctcgaccttgactccagtgtactctgcagcaataagtgccttaaaggcatttttgttgccacttccgcaatgcaacacaagcgccatgccgactggagccgccggcctcgcgcccgatccaaatctcagatgccgagagagaggcggtgcgagacgagatcgtcgccggcggcggcggcggcgagaaccccagcggagagagaagggggtttagttggtacgggagacgaggatttatggcggcncg

SEQ ID NO: 386678 - DNA, 415 bp, Oryza sativa
  unsure (1)..(415): unsure at all n locations
tttttntttttaaaggaagcaagcgacagttgactcgtaaacctgccagtaaaaagaaccaaggcaggtatgagggtttttgtacagttgtttttattacacgtgttatgtacgaatcaccccgacccattttaaactgaagcataacatagtttacacattaaaactcgccgaaaataaaaggaagcctaactatagtgcagagcacgtatggcacatttgccaacaaaacatgaaggactgttttcaggatgaacaagtccgtcatggcagcgtaatttacagaaagatgaggagtgcattccagtccagctgtccatcgtgaaacttaagaagcagctgggctctgttgcgctcgcatcaccaattcttcagtagtggtgcctaatatcttatttgcacgcttcaatgagac

SEQ ID NO: 386679 - DNA, 652 bp, Oryza sativa
  unsure (1)..(652): unsure at all n locations
cacatactacggaagaccattctgttgcatattattagtgtcacatagcaacacaatacatatgtcttcttttacttagccacatgtgtgcatggcggtatcctctcccagttccagaagttacaattttttttgtgaacagtatcagagggcatatgcatgtcattcaatgtagcgcatcgcatcctccaactgtccaacttgccaagcggttgtgtccgaactcaagcagccacggtggaaaggtgtttctacttcttcctcctgtaaatcttcttcagaaacgacttcaaaatatcccgaattgcacggtcagtctcggcgtcgatggtcgaaaccaggtgcttgtaaactcttgactcgtactccaaaaatatgtcctgaagatcaagctccctgtaaacgctcttcacttctgctacgcattttgggtcagacttcccgtagttctcatatagtattttcatctcattctcatgggcgagttccatagcctgtactattagccagggacacttgtagtttttcaaggtttgttccaacctngncaatcantttgtgggtcaccaaagcaatccaagtagtcatccngtatctgaaagtatacgcccattcgacggcacgagctcaagcngaatcctgcacccaaggt

SEQ ID NO: 386680 - DNA, 1431 bp, Oryza sativa
ggacacatgagactttatttacagggacatttaactcgctgtctatgacatgtgggccctcatgtgtctatgacatatgggtctagtagcaaataatttagcaccactcgtaagagtggcaaatagttaattattccttatttacacaaagggtgtgcacaaggtacattggctatttggcaaatctatcttgctagcaatactgtggtacaagcaaatatgtgtgtccggtgcttattagggttcaagaatgaaaaaaaagaggggtacagtgtcatgcttgctcactttgtgctgggtgaacagcacacagtgactagacgcagacaagtagaaatgtaaacagtggaagaagaaaaaaaggaaaaactaaaaacaggacacagtacggtagcacatgatctacacgacctcattttacaggtacatgctgattgatcaaaatacaattaacccagaaaaaatgatacgcacacaaactcatattcttttttttttgttctgtttttataaagcacgaattgggctcgccatcgacagcactacttatatatgctcggcgaaaatatcgataggactctgatttctatctgtgatatataggtagcgatcgatctcgtgatctcttctcaccggatatatttaatttcgacctccaatttgatcgagatgttaccacacacagggcgtctgacaaatgccaaacagccagaaagccctatcaagtattttgcctatccctcaataggctttttttcatcggagtggaggaagaatgcgtagaaccctccaagcacagttgctgcggccatggcccaaaccagcacctgaaccgggaaaggcatgatggccgccactttatatgaaaacacggcggtgagcatcgtcgtcaggagccacaccgccgtcttgatgtggtggcggcgaggcgactccggcggcgtcttctcaaataatcggaggaagtagaagagcgatacgaggtcaacgtaggagaagaccacgaagaagatggttgccaagtctctatctgatctgtacactgccattcccgagttgaaggtcaggaaggcgaagccgaggagcgtcaggggagataaccccatgtcatgctgctccgccggcgcctgcggatcgcgcagaggttgctctagatggccctgctccatggatttcagaggtgatgttactagctttgaactcattagcacgttcaggttagtcctcctaggtgggttggatcctttcttgatcggggctgttacagatcggaagaagataaccgccgccgccgaagcagctagcaggcacaaggcgcaagatcaagctcgctcgcgcgacgccggtgccgtctggtaatcgacgaagctggaagtaaacctacactatatgtgtcacaaaagaaaaacggacgcgaaaaaccgtcactaa

SEQ ID NO: 386681 - DNA, 579 bp, Oryza sativa
  unsure (1)..(579): unsure at all n locations
aaggtaacccggaaaaaatgatacgccccaacactcagagtcttaagcatgtgttctgttcttataaagcacgaattgggctcgccatcgacagcactacttatatatgctcggcgaaaatatcgataggcctctgatttctatctgtgatatataggtagcgatcgatctcgtgatctcttctcaccggatatattgaatttcgacctccaatttgatcgagatgttaccacacacagggcgtctgacaaatgccaaacagccagaaagccctatcaagtattttgcctatcccatagcatctccactcgggcaagacagttcatgtgtgcaattcctcccattctccaattttcatagaccactcttgaaatttatgcagttccgcgggcacatctgtttcagagccattagagcagaattggcacaaggtaatcaatcaataggtccctttcgtttggtttctgtgaaatattcttccagtgatcgatcacatctcatgatgaagttcctcgtgccgaattcctgcagcccgggggatccactagttctagagcggccgcaccgcggtgtacnnaa

SEQ ID NO: 386682 - DNA, 773 bp, Oryza sativa
cggggtggcgacgattcggcacaatgagaattcaatttgttgtcaataatataggggatggatatcttcacccctaaaaaagtgtagtttcttctctaagatacagaaacttgccatggatttcctagaagcatataacagcacgtttgaaaagaaggcaaaatttaaaactctttgatgcttttcccccactgcagtggatcgatcatctcgtatgtttctccatctagtagacactgttcaagtagaagaacaagccggccaatgcaagtatcccgacggcgataccgataggcaacgcttgcccgacggcttcgtcctttttcagctgctccttcctagccttgcgggcatcggtggcgttggcgttcttggccaccttaggctcgtacggcttgaaccttctctttggtgctccacaaacggggcagaagtacttgtcgggaagcttgtcgaagggggtcctgtcgctgtagatgtacccgcagtcgcggcagatgtaggcctgcttggacgcgacgccgaagcgcatcgtgatcctcgccgacgccgtcgacgccctggcgccgcgccgcggcggcgccggcgccggcagcgacagcggcgtgcagaacgatgacgaccggagcggcgccgcggcggcggcgggcgcgcgcagcgcctgcagctgcagggcggccatcaccaccgctcaccgcagcacaagaaacaggcgcgtggcgagctcgagatccgagcccagaagaagagaaggtaggaaagcggacgcgtgg

SEQ ID NO: 386683 - DNA, 558 bp, Oryza sativa
  unsure (1)..(558): unsure at all n locations
atgcgcactantgctacgctaggtataattgataactagagtttttttttcatttttgatggcatagcccctataaaattacttgcaagaatatatactggaaaacacattttcacatccaccaaaattgccttttctcatgcgggttcagtatgctccttgacctgagatatgggcgcgtgcacaacgactgccctctctgctgcttgtcgccaccttcgatcggtggccatcgccagcagatctgctgctaccgacagagacgtagccaggaaattttccttagtagtcctagttcgcacggtatgtcacgtggtaaaattttcttttgcaccataaaactgatatacaaatacaaatttagtgaaaatgtgatagaaataatatcttccaacatccataagcagcttacttaacaagcaagttcaaaatgtgcaaatattcacgtactcactaatctctagtcacaattcacaactcgatttaaccatttaggcagctattcgttaccttcacaactcgatttatccatttaggcagctattcgcggacgcgtgg

SEQ ID NO: 386684 - DNA, 2164 bp, Oryza sativa
ttgaattagtggataattccaccaagcagagcacataattccagaattctgcagtactgggactatctcaactccaacatatatatgccataggctatatattaaacaaaagcaaattattttaactagacattaggagtaaattatgtcataagtcgtcagggaaattaacagattttcacactggccactcagcacacacaggagtggtcgaactaatttaagctaggcagtctagctagtggattgatacaactacagcacatagtagcagcaggttaaaagctagtacatagttaggaaagagcacattacgctctctccatcagtggatatatggtacctggtactgaacctgatagccattaccataatatgttgtgtgggcaggtgacatgccatagggagctgagcttatcattgttgggtgatgatgggcctcagcaccatatacatactgcctctcgtaagggtaggaatgcctctgtggcgcagcggcctggtagaagcttttgtcagaaaagctagtaatatgtggcgcatatactgatccgttggcacgaggcctcttagactgtggctttccagcttcaacagccctcctcttgtctgccttggctttctctagctggatgactcttctctgaagcgggtcgatcggatatttctcatcaagtttgtgctcctcaatacatttgataacagctttcaaggcagacaactcgcgttcattaatttcattctgtactcccggagacatctttccggtcttgacatgtgacatactcttgacctccttcagataagctttcagtaattcgactggttcaaactgatcagtcagctcaaatgcataagccaaattaattgcatcaatagttctcccattttcaaccagaactccaatgacacctggcatgttctgggacaatccaagtattctacaaagctcaggtgtctgacgacgacgactgactgagggaagtagcttacacagctcatcttgtgcaaattcagcaaatataccaaaggtagccaggagttgaagaaacgcatgtgcttccaggcagttcccattgctagcatcaaagtcaaggctatccaacttggatttccactcaagagcaatcttttttgcacgctccttgatacttgcagtaagcatttgaccttccgatatgaaaccagtagtagcatcagtttgcagctgagcaagtgattccatcaacatgaggcagtcttccgtacacccagaaggtttccatcctttttgccatccaatataagattgtctccaaaatagaagtcttctagagaagctaacaccaagccatatggatcagttgctcccctaagtgcaacagggatttcctcacggatggatgttaagtctttgcgattgtctgatatgaacttatgaagcccgttaacattcatctcttcacagaggacaacaagttgagaacgaggcttcacagcagtgttttcatcttgcaggtatgcaccatgcgcagttgcaggtttgggccacttaacagaaagactaccaccgatgtttccatttaacacagcattgttattcacggatttgctgattgggttgataagaggcgtagacaagttcagcttggacttgccaaagatcacagccaacgcggcatcccttttctgctgcagtttttcaagagaagtcagttcctttgccacgacaacagcctcttgttgctccagcatctgctctgactttgcaaccgtctcctcgaactcctcttcctgccttttcagatcatcaaactttttcttgagcgactgctcaagcccatggaaatggtcctccagttgcttccactttaagttcaaggaaacagcgctctggctctcgagctctgcaaatgcacgctgaagctgctgcagctctcgtgccgaattgcttggagcctgtggactccataagtgtagccatggactccatgtcggacatggtggcagatttcaggaagcagcagtgacgatgtgcgttgacggacggatgctagctcccccgcccccgccaccacctatggcggctcggggaggagatcgaggggggtcggcggcggcggcggcggcggccggaggagcggcggaaccctagacgtggtggtgggttgtgggcgctcgtgcc

SEQ ID NO: 386685 - DNA, 1094 bp, Oryza sativa
gtctttaggcgtacaataatatgtgctttttaggcgtacaaataatgttgtgctgtgcaagcccctgtatcgttctgtcaatattaaagctggaatagtttctactaccaacggtcagagttccgtgataattataaaaacagctgcggttgctgccaattacagcatcaccaaccttctcgtgactgaacgctggtacagcgagaaagcacggaggattcaagaggcttctgcaacctagcagcaacagcaacttcttggctagggagtataattctttacataagcatcaataccttataaattcatcaaataggtagccactacattgggaaaacaagtaggggaaggcaggggatcaagctcaggaattacaacaactgaagattttttatgtttttagtaggtgatacagaccgggaaagccagaattgcatatctttaggagaagcttgttgcagaaactgcaactcaatcatgtccttggcttagtcggccgtccagctctgctccacaatctcgcggactttgcggttgtactcgcgcttgttctcgctgaacagtctggctgcttcggagtttgcaggggagtttgggtttggatcacagagcagggactggatagaggtcaatatcgcagcaacatcatatatagggctccattgattttgtaggatatccaagcagatacttccatctgcataaatatttgggtgaaacatccttgagacaaaccgaacaactggtggtttgttgggataatcttctgtaaattgtagtgtcagcttgaacgtgcctccatcccacggcgtgtcatccggtccgaatatgacggcgttccagagcatgatgttgttgtcgtgcggcgcgccgctgattccggcgggcgggtcctgctgcagccgcttgaagtcccgcatcagccgcttcctcgccggcgtcgacatccccgccgccgccgcgcgcaaaccctagctagggtttcgatctccccctctcgcccaccgctcgctgagtcccctctctctctctctctctctctctgagagaatcgtggagtctgtggtcgcgggtggcggtgggggtggaatcgc

SEQ ID NO: 386686 - DNA, 955 bp, Oryza sativa
gtgcaagcagactcaaatctcatgacccatttcgcttccattcacatattatgatgataatcccctttttacatgagcagaatgccctagtgcatgagaggtcaacaccactacataaaagcagccaagagtaactgggacatgggaacacaaaaacatcaacggactacaagcaatcactggagatcttataatgttttaagatgacagcaaatctggagagccagaaacgcacaggtttttcacggttgcttattgcatctttctggcatggtggataccacccgttgccctgctgcatgccctagtcagctgtccagctctgctccacgatctcacgaaccttgcggttgtactctcgcttgttctcactaaacagtctggcagcttctgagtttgctggagagttggggtttggatcacacagcaaagactgaattgaagtcaatatggcagcaacatcatatatagggctccattgattttgtaggatatccaagcagatacttccatctgcataaatatttgggtgaaacatccttgagacaaaccgaacaactggtggtttgttgggataatcttctgtaaattgtagtgtcagcttgaacgtgcctccatcccacggcgtgtcatccggtccgaatatgacggcgttccagagcatgatgttgttgtcgtgcggcgcgccgctgattccggcgggcgggtcctgctgcagccgcttgaagtcccgcatcagccgcttcctcgccggcgtcgacatctctcctcaccccctcctcctcctcctcctcctcctcagccgccgcctctctgaacggccgaaccctagccccccggccctggtctctctcccgacgaacgccccaccgccgcctcctcctctcgccggagttgagagagaggagagaagcttcggcgcgccaggtgagcggacgcgtgggcggacgcgtgg

SEQ ID NO: 386687 - DNA, 704 bp, Oryza sativa
gtgctaatctcaaaatcatattcatttcatgtaaacacgacacataaaggatctcatattaatagcatatactcattgatcaataataatgatatctatctcagaaaatggagtaccatgtactttattcacgaattcacatagtatatgatatgataatttctatgattacttcaagggcgtatcactaaccaacactttctttgattataaatagaaatacaacgagtatggttttgtttggttacctttaagaaagctatacattgccacaataaaatgttgctaccatgttatttatgtatttttttgacgcttcttgtgaagtgagtccgcatgctgaaaattcttctcatcatcacaatacaaaacaatgtttacaaaccttctataagggggtatccgtgattcccatgcgactaactcaaagtcctcctttggtacaacaatggagtcagctatcaggtcactgaacatcaccttggttaacctcctcttcgacccatagccttcacaatgaggaggcataagacgaagtggagaggatgacgatgcaagtttggttatatctataagatgttctttctccaaaagaagcttagggtgttcactgaactctgagaaatttttcagcaccgtatttctatatttttttaagacatggagccataagtgaacattttgattctttctgaaaatatctg

SEQ ID NO: 386688 - DNA, 760 bp, Oryza sativa
  unsure (1)..(760): unsure at all n locations
nnnnnnnnnnnnnnnnnnnnnnatataactattcattccattacctaaaaaccatatacataaatactgtatacaccagtatataacagtacaacagtacaagagattgtacatctggttcccagttttcactagcttcttcagagtaatactattatttggagaaagatgtctgccaatgcccttgtatatgacccagtttgatatattagtgccgtagtgccacagatcatcagaaactactgatggttcatcaaaatgacacagcaaactactcctatggtctgccatagttcaacaaaaaaacccaggcaacttatttgcttacatctatgcatcatcttcttcaggtccaacttgaacattcagagattgctcgtcagccatgtcggtaagcaccatggaaccgggaagctgaagcacagagcaggcttgggagctggctgttcttgctctgcaacaaggatgtagagcaggcccatgacgccggtgtgctggcggtcactgctgtagttggagacgacggtcagcacctcgccatcactgaccttgactgatcccggcttcgggtagcatgttgacatgccgacgatgtagttatcttcattgccagcctcttcccccttgccatagctcggaatcgatgcacaaagcagacgtccatcctggccgtgtaaagaggcaccaattccacctgaatgctgatgcgcgacaccaaacacgatatcggctccacagggtattacgtctttgggtactt

SEQ ID NO: 386689 - DNA, 544 bp, Oryza sativa
agcatctctccgctgacagaattcagaaattttagatagctcgactgagaaatcctgaaccagaagacatctctacacaagtcctggcctcaaatgtgattacaaaaactcctatgtcagataatgggtgggaaatgtcaagaggcaaagatcacaacaaggtgtcgactacagtggagattgcctgaggtcctcctcgctcaagtaaagccaatgcaagatcgtgctcattccaactccgaagcccagacgctatcttctttagcgtgtccagtttaatgtcccgcaaccatgacgggacaaacttcaccaccaggaacacaaagcgcgatacatatgccttccaggtgccatggtcacaacccagaagaatgtgcccatccaatacacccgccatgaaatccatatggtttcccaccactcgtggccttcttgacaggaaagacaatttcatgacaggagaagttctttccgctccccagagcagactaccacagaagaagagcatgttggccatggcgtaaccttggagtgtgcttgaaac

SEQ ID NO: 386690 - DNA, 1554 bp, Oryza sativa
tttttttttttttttggaacaattatcagaggctcctctggattatttatttataaccaaaaaacaagggccccgtacaggcagtgacaattcacaaacaaggttttgcattccggccgggctgacccacacagaagcacaatttttatgtcaaacatatatggcctacaaaaaggtcaaaaccatcccataaaggccacgcagcgtgtgaaaatggaaattacaaccatcaatgtgctaatctctctccctccctcctaattccatctaatcgatcttcacattcgaatacaggagggtgtccctggtaagtggcatattcataagcaagcaaaccccaatgagagtagagacaagaagaatgatccctgtaatccatgccaaactctttctaacaagtatctcagaagaggctattgtagtgttagtttggcttgtctcttttagccatctcgaaatgtgcagtgaagatgctggacccactaaggatggtgaagcctcctttgtggatattactaacccaacaatttttccattatatgctccacgtagtaaatcaaatgctttggtgacagctgtccggactacatcagttccctgcttaacaatttctgtggaaccatattcttcttccaaagccttaatgcctttgaagtggcatactaataactctgcagggctcatgacacctcctgagaaatcttcatgaacctgaatacccctttttatagttttacgaagggagatcaagctggatgcaaattccatgtctgcttcctttgtaataagcaaagtaagactttctccactctccaagggaatgatcaatttgccatcaaccttctcataggacccaccaagccagtttgccaagtcagtgagatcactatcaaaatactcagaacctgaatcaacagctggagattcatctgaatgaacaataactagatcatccttatctgtaagccctgtagcagaatcgctttagacccatcaatagtggttttgaagatgctaccagcttcagatgtgatgctttcaacggaggcatggaatccatcgatttgcagcaagaaaacagcccgtggtctgtcaaatgggttagggagtaacagcttgtctaactttgaagaagattgtgcaggtagcgagggtggtggtgcaaaaccaagcaagacagaaacagcccgcagaaacttggtctagtgacattgaagcggcctggtcgtggtgttgctgatcccgcaggtagcggcgcgacgcggcatcgacgaaggcggccagcgccggagcagcagcggaagcggaggcggaggcaagggcgaggagcagcgccgacgagagaagaagaatagcagggagatggcgagccatggccgccatcgagatccggatgggatcgtcgagcgcagcagcagcagcagcacaaggatcgattggaattggatctcgccgccgctcctcttctcttttcgatcgatgtagaagagacggttcgatgatttcgatcggaggatttcccttttcttttctgcggatgtcaaacgggcgaag

SEQ ID NO: 386691 - DNA, 814 bp, Oryza sativa
tttttttttttttttaacataataatgctggtgttattgcctgtaatacttgctgcccccaaacacaaatctgtgatcgaagcacaagttcttgggagtacaacacggttaacaccacaagaaactccttgcagaacagtaaagatgcatgtgtcctatgtgaataaccaagtgtggcttctttatatgctggtggaatgcatacatctggctgtacgtgtagtcatgtagagcgcgcgttgctcagctgtcacttctgttgggcttgtctgacgccggatacaccgtgtcagctgatgggatccactcgtttgtagcaggatttcccttgcaggaggcatggcgctccgatgcatctgggtcatcagacagatgaaacgaggcgtccgccgagggcttgtccatcttgatgaaccctgttccagtcgtgtggtgctgcttgccgacgcagccgagatccttgtagtactccgtctccacgaactcatcccctgccttgccaccctcgcacaccaatttctcggtgtgggcttcgagctgctggaacctgtcgagctcggggtgggagtcgtcggggacgagcgcgtcggtgtagacggcggagggctcgctgcgggagggcttggagtggcgcttgggcgccgcctcgtcgtagtactcccgcacctcggcctccatcgccgcctccccctccggggacaggtgcgcgtcgctcctggccggcctcgacatttcttccgatctttcgcgcgaagcgcgctgtgccttcgttagctagcgctcgtgtaagccggacgcgtgggcggacgcgtgg

SEQ ID NO: 386692 - DNA, 855 bp, Oryza sativa
ttcggccgcatcgacgccgagctcgctcgcctccgcctccagccgcctcacgacgccgcggctgcctctgcacaccgggactgatccgccgaagtgctcgcgatagcaacatctggaagtgttgatgtgtactccaccctgtaatttgctaatccaatttggtactttttttttgttgcttttatcattttcctcgccgatctgttttggttgcgggaaaagggtttggataagcagtgtatccaaaattagtgtggctaggcagtggctgcttatcaaaataatgaccagctactagaccataacataataatgctgtttttatttcctgtaatacttgctgcccccaaacacaaatctgtgatcgaagcacaagttcttgggagtacaacacggttaacaccacaagaaactccttgcagaacagtaaagatgcatgtgtcctatgtgaataaccaagtgtggcttctttatatgctggtggaatgcatacatctggctgtacgtgtagtcatgtagagcgcgcgttgctcagctgtcacttctgttgggcttgtctgacgccggatacacctgaaaccaacaactggttgcttgcttactgatgcttcttgaacagaatttcaaccaaactctgttgataattgctgaagaacaggcatgtatacagcattggacaacttacacaagtacagttaccgtgtcagctgatgggatccactcgtttgtagcaggatttcccttgcaggaggcatggcgctccgatgcatctgggtcatcagacagatgaaacgaggcgtccgccgagggcttgtccatcttgatgaaccctgttccagtctgccggacgcgtgg

SEQ ID NO: 386693 - DNA, 1240 bp, Oryza sativa
  unsure (1)..(1240): unsure at all n locations
nnnnnnnnnnnnnnnnnnnnnnngaactttccacgtacccgatcaacttgataattgtaattagtaaaacagagtatatttaagctggcttgcgatgctgtacaaataccataaattcaaacaagccatggtgttattgaattctcacatatatgagagaattcgactaagcaaagcaagctgccaaaccataaaccaacataaatatttataaaatttaggtatactccgttacagatagcgtttcaggaattcatcaatgcgggtgtactgaacctctgggtacagtatagttgcttcggctccattgtcaccaatgtcaaagtttgttaagcaaccctcgtagaaaatgtggtagaaatgtgttattcccacttgaaaagcaaattgcatatctttcattggagccaaaaattcttcagcaggtatgtggaatttcgtaagactttttccagagagtttttcccacattgcgatcagctcgttatgagtgaggcaattatcttgtggtcttatgtatattgtcttgttcaaggtgcgaggatcatcgattgatttgattgtatatgttcccacatcatcttcatccacaaaaaacgctttgacgttaccatccccatacacattaactctctctttgggagggaggaaggaggtcagctggctgagattaggacagaagtaagcagcaaagcagttggaagaaacatatgtgtgggggatgtttgcatcctcaattgctctccttatcaccatcttctcatcaaatgaaaccctcccaggttctagagcgtcccccatccttgatggatccatgccgaattcagatggcaggaatcgcttgacatttccagcatctttgatggcctcgacgagcttgagctggagcatgaggttgtggctgcggaagtggacgccggacatggcggagacgacgacgtccgcctgccggacggcggcgacgaggccgtcgtggtcgtcgagcgacgcctcgaggagccgcgcgccccgcgccttgaaggccagcagcatctggagcttgtcgatgtcgaggccgatctccggccggagcaggacgtaggtcgggtggcccgccgccaagctcgccgccacgacccgccgaccgacgaagccggtgccgccgacgacgaggacccggctcttctccatggccatggctccctctgctcgatctgacgagccatgcaaaaacccacgcgtccgcggacgcgtgggtcga

SEQ ID NO: 386694 - DNA, 475 bp, Oryza sativa
aaagcaaggaataatccatatatagcaggaatatgagagaattcaatgttccaaagtgccggtctgaacatgaacatgctaaccatcgtttgaactttccacccatccaacttgatagtacaacagagtcaacaaacaagaggggatgtactagactactagtaccataaattcgagcaggcatattgtcgttgaacaattctggtaggggaagatcgaccagggatgctcatttgcggattacaatctttaaatttgacaagcagatgctttaaatttgaaccggttagatatagcgtttcaggtactcatccatgcgggtgtactgaacctctgggtagagctgagttgcctcggcaccattgtcaccaatctcgaagtttgccaggcagccctcgtaaaagatgtggtaataatgtcctattcctacttgactagcaaaatccaaatctttcatagaagccaaaaattcatc

SEQ ID NO: 386695 - DNA, 689 bp, Oryza sativa
  unsure (1)..(689): unsure at all n locations
gaaattgtaatacgactcactatagggcgaattgggtaccgggccccccctcgagttttttttttttttttttgagaaatggaagcattgatcatactgaatgccaggcagcaaactgtatactagtagtataatttatgacctttgttctggttacacaaacagtgacactggtacagtgagagtgggcgggacagcacatgcaaactttgcctcctccttatcccactctcaacctcaagacaccgagcgatgtctatatgacacccaacaaccgacgtctcacctactcaaaacgaactcctgatgacagattaatgaaccatccatgcaaatccatacaataccgagggagagctaatcaatacccgagcagataaaaatggccaaacgatcgatctcaaatgtcgtacgtagaggtatgtatagtagctaatgctgcttctgctgctgctatagtaggcatgaattatgcttgttcttgatcattggcttagctgctgtactggacgaaagaacggtagacggccatgggggcccagttggccgggatgacctggctggcgacgagctgcttgccggactcgttggtgatgcggacgagaagggcgccaaggcggggttggatcaacccccaatggaccccaaaccccncggntccaaaagggattggcccaaaatccccgccc

SEQ ID NO: 386696 - DNA, 471 bp, Oryza sativa
acataaacaccatcttgatgtaataataattgccttaattactttagcaattgggttgttacatagactgctccggcgagcaatgatcaccaggaaatttcttctggtgatcccttgatccttgatcatttatccacaacacaatcacatacactgcacccgaggctttcatcagggtgctctttggctcaatttactacgggcattttcggtgacagcagcagctgatcatgcaaccggcggccacatcacggggtccttggacgtgtcgagggacgtcggcggtatccactgccagaacgcggccggcggcgcgtagctggtggcgtacggcacgtacttgccgccggcctgcgcgaacgccgccggatggtacgccggtgcggccgccaccgccgcggcgtggtgcgggacgaacggcgctggagccgccggtgtggcggcgccgacgcccttgagcatttgctccag

SEQ ID NO: 386697 - DNA, 620 bp, Oryza sativa
ttttttttttttttttttggcacgaatgtgatgtcacatttaaaacaaatgcgtcgacacatgtttacactgaccgcacttggaactatggtatgtaatacaaaataaaatatgccttaaatcaggatccgttaagtatgctaagatgacaaaattcataacattcctgatggtcaatccttagaaaatggatgatgaatgcccataaagctgggagtatacatatttggcacaaacatcagctgggatttttcctatcagatttgaggtaggcaggcagccttttgaaactgattatcatcactcttcagacgtacccatcgtcttcattggattctgcaaccacctgaatctggccctcgcctaacattcccatatgcagagagttcaagaagatccatatcacgtcctgagaccctacaataggcactcttctgtatgagctcagatttggataactctgttttgttccctttagaccggtttacagtagcctgcaaaacctggcagttctccaatgtgctcttcccacccttggagtaggggacgatgtggtcgtagtcgtggcagaggcatccggggcagccgacgagcttgcggaagacgacgcggacgcgtgg

SEQ ID NO: 386698 - DNA, 776 bp, Oryza sativa
  unsure (1)..(776): unsure at all n locations
nnnnnnnnnnnnnnntttttttttttggtcaagcaaaaaatctaacagctttatttaggcagatccacctctctacatcatcatagtcatagtacaagaactcgacgaattcagaagaaacattggcagctacacctagagaaagaaaaatgaaaagaaaagaagatctaatatattacaagggatccttggatatatgctcatagcattgttacatcccgagcaccgagtcgcgacttgtggcgaaaacgggtgccatttccatgcttatgccattactgcttcgcctgagagtagatgaaagttccgagaatcgcaatggcggctccgagggcgttgatgggctggaccggcgtgtggaagatgatgatggaggcgacaatgacggagatccgcttcatggtgttgccgatgctgaatgtcagtggtgagatctcgtccaatgacatgtaggacacttggttgtacaagtggtagaacacactctgcgccgccacccaccagacgaagtttggaccgatctcggcgacggctttttgccagccggcagcccacaccttgggcccctccatggcgaaggcgaaagggaggaggatgaccagcgagagcatggagaggcaggcgtagtagttcatcccgctcaccgacttgcccttcatccccttcttggagaatatgttccggaacacgaatgccaggttcgagatcatcgcccccatgaatccaatcatattgaaattgagctcggtgatggcggcgagggcgcatccaaccaa

SEQ ID NO: 386699 - DNA, 435 bp, Oryza sativa
tatgacgcacgctgcccgcagacgggagcctgtatagtggacagcgctcgttcttttttttttttttatgattggtaaaacttggtatgagactattatatgtgctgactagtagattaacagtggatggtgtgccaatttttagagctagcagttgactatacaattaaacttgctcttaaaaaaatgcagcagcattaagccgccggcgacgataccggcgtcagcgcggtggtggaggggagggtgtctagccatgggagcagcttggcgtggacgaggtccgggcggtcgtcgtgggggcagtggccgacgccctccagcatgtggagcgtcacgttggggagctcgctggggagcgcggagaaatacctccccaccggcccgtcgatcggggtgaaggggtcccggttcccccacagaaccagcaccggc

SEQ ID NO: 386700 - DNA, 768 bp, Oryza sativa
  unsure (1)..(768): unsure at all n locations
ttaaggggggatagaaaattattttatttccattcaaagcagagtagtctccagtttgataagcgtagcagagaggtacgttgccacctgtgatacgtacacgtacaccgacacctcgacacacacggacacggtacacgtgaagagtaaaaaaaaaaaaaaacaagcccgatccgatgcaacggttgcgatgacgtggccggcgtcacttggcgtcggcggcggcggcggcatcggcggcgcgctgggcgtcgatcttggcggcgatggaggcggcctcgtgctcggcggcctcgaggaggaagctgcccccctcgtcgtcgacggcgacctggagcggctgggagccgaggccgtcggcgacggcgagcatgatgcggcgcatctggtcgcggaacctcggcgcggtcgacggcgccgctgtggtcggcgtcgaactgctcgaagacggagtcgtagagcgcggagacctcggcggggagcggggccggctgcggagccgaacccggcgccgtcgaggaggcggaaggactcgagcgcgcggcggagctcggcgcgggacagcacgccggtcccgttggcgtccagcgcctcgaagcgcgcgtcgacgctgcgggcgaaggcgtcgtcgtccgccacgaagccccgcaccgtcganccgtccaggatcaccacgctcatggcgatcgatcgatcgatctgcttctgctgctgctgcttgctgatgctgatgtggtggttggagtggnagggagctcgtgccgaatt

SEQ ID NO: 386701 - DNA, 752 bp, Oryza sativa
  unsure (1)..(752): unsure at all n locations
cactgtaatactagtagggcataattagatttaccnacagtntacacaagatagataattgtagacaccccacaagaatatcagatttttgcgatctattttcttcatcattcaccaggagttaattctttctggacaaaacagaaaatatgccatctcggtcgattttacatgatcaggtcttcaaggtggcagacaatgtgaatatgcatccaaccaacacggcaatcagtagtactacaaacgccattagaatgctgaaactgctgccatgcgtcttcctcgaaccattctgtccagagttcatctctttcagaccaggctctgaaggcgcttttgacaaagctccaggtaccacatcccaaaacgatcctagcgtggcagccgatgcactttctggttctacgattgaatagtttcccatatctgcttcaagcgacatcacttccttgcagcgctccatggcatcctccgttgtttctgattgttgcaagtagtcacaaatataggagccagccaaccaaggtatcagaattcttctagggaatgggaaactgtaaggtgctctcaactcatgaaaaacaacttgggtggccttctgagacagtgaattctccaaattgttagtagtagagtcatcatctgcctcatctagtccgatgtccaatctgcttctcaggcttgtgatgatgtccagctgaatacgcacaggtcgaccggacgcgtgggcggacgcgtgggcgcacgcgtgg

SEQ ID NO: 386702 - DNA, 676 bp, Oryza sativa
ttttttttttttttttatcaaaaatagaattttcatagaattttcagatttgaaaatatgcttatacggagggagggagtactactcatagcacgacataaaaatactactacttttcactgaaacagtgtagcacacggattgacatgcaaagattcctatagccaaaacttttccaaactactgctattattcaccgaaaccgactgctatgactgtcaccgaaaccgactgctttgacgatcggattcacatcccacagccaacaacaaatcaagtcaatagcaaacaacatgacaaccagtggcaatcatcaaatttgctggcaatcagaacagcgagatagcagaagtcgccgggatttgcttagcagctccaaatcatcaaatttgctggcaatcagaacagcgagatagcaaaagtcgccggatttgcttagggggtgtttagatggggctaaaactttttagcccaagtcacatcagatgtttgaacgctaatttagagtattaaacatagactaataaaaaaactaatttcataaatgagagctaatccgcgagacgatttttttgagcctaattaatccataattattcaaaagtttactgtaggcatcacattgtcaaaatcatgacatacggacgcgtgggcgcacgcgtgggcggacgcgtgg

SEQ ID NO: 386703 - DNA, 564 bp, Oryza sativa
tttaaggataatttccattcggattgctgtttagggagggggagaaagtacaattggatgaacacgaatttccatttaaaatgtgaagttgcttcatgcttcaaagaagcagagtccaacacatatataatcatcgaaaaagaaaggaaaatcctctcaaaactctaatgcctgttactcacacagtaacatgttacaatcacaaaatgtacaattgcagcacaggcaatttgcatccttgtcgcctgggctctgcaatttcagacaaccatttttttcttctgttcctgtctgcactcgccgccaatcagatcagcacccagacaaggcagcagcagggcctcaacctcaagttcgccatgctgacgatttctcctgatcaacattctcttcccaccaagtagcattcttgtatcctcttctgagaaattctagtgagcttccttgttcttcttgcaaaccaagaactcttaacagttcttccttagcctgtcccaaagtgaaccgagctgcactctctgcaacacatgcataagaaccacggacgcgtgggcggacgcgtgg

SEQ ID NO: 386704 - DNA, 566 bp, Oryza sativa
cttctgttcctgtctgcactcgccgccaatcagatcagcacccagacaaggcagcagcagggcctcaacctcaagttcgccatgctgacgatttctcctgatcaacattctcttcccccaggagcccaggtatcatatataccgccaaaataaagagctttgagtacatagaagaaaagctcctttaccttacaaatttaggtgagtacccaaaattgtagtcattgtatttctatctttccgcacataaccaaagaatggaaaagattcttcaagagtctccggtcccagaagcgcgtgataaatgccaccgaagcctaagactgcggaggaaattagatgaagtactccagatccaaagtacggaaaagtatctagaacttctcccccgggccctactccccaacctagagtagctaagtgcggaagtaaaatcaacccttgttcatacatgggtttttctggtacgaaatgggccacttcaaataggttcattgctccggcccagaatgcgattaatcctgcatgggctaagtgagctccaagtagtttacccgacaaattga

SEQ ID NO: 386705 - DNA, 472 bp, Oryza sativa
tttcacaattgatctgggtcgggacaacccgacatgctcacaaatccacaagatcaattcattgttcccgtcctggcgattaaagcattcacagttaatttacagatcgaatccaactctttccttttcttttgatgaaaagcagaattcaattcaacttgtgaatttgtgatatacgcaaagctcaaatcaatttagcagaattcatcatctacaagtagcgagtcccgggttgggggtacaagctgtacggcgctcccgccgcttcttgatccggcaaccacgccgccggcggggggtagcacggcgcgcccggcggcggcggacgccgcgacatgtacgacggcagcgcacggtccaccgagcgatcgcagcatggcgccgatcttggcagtggtggtggatactgcgatgaggctgactccggcggcggcggtggcgggtaggtgctcgtcggaaaggggaaactggg

SEQ ID NO: 386706 - DNA, 2647 bp, Oryza sativa
  unsure (1)..(2647): unsure at all n locations
tttttaaatcggagcaatagctcgctgagaaaaacatggttagaacatcagaagataatgcccaaattatgttctacaggcagatgattcctatcctacaacataatcggtcaacagaacctagctaaagttctttttcacatgctattgtgcatgtatgggtgctttcaaattatctaggggatacaaaaagacttgttttcttggataatgctacgcaaagatctgagcggctgagcatcattgcattaatgaatgctccaaaacagactaaataattctattatacttacacaaggtgcaagtacaaaatttgatcatttctatgggaaagacaaataaatagctaaaaataaacaagtctctggccatatcaataaattaattcctaataaacaccttccacatgaatcatgatcaagttaaattgaatttagtcagtatattgtgtgctcaattgacaagtggcatgcagctaaaatgtccattatgtagagtttataaattgttttatactttaattagatatgtgcagatagatggtttaaaatcaattgcataggacatggccaacgctttgcaaatttacacggataataaatgtatgactaaatcagttatgggacattacgaagtggtatctgcagaaatcctctcctgttggagaaatgtcagcatgccacttaccaaatgaagtattattaccatgttacctcagttgtaagaaacaggtatatccagctgctgagctcacacgttcaggaacatattggatagctcgatctcccaccaaaaaggggttgtgttgagagttccctggaaacataaaagtagaaatgcacactcccttcgcaggcattatcctgttcaggttcaaagggactttctcagcccaattcacaacaatccaggccaagaggccttcagatcgttgagaatacaggcacccctggtgccacttttattactaacaacccacagtgatgcaaagagtagaaaatttgacccgggaggatcacatttagagtttaattttattacaagccacgacagaattaacaaattgagctaagcaacaccagctttattcaaggcacttatactgcttaccacctcctaacataggatggtgaggagtgctgctgataaacgctccacccggagtagatggacaccaagacgatcttatttgcgagctgtatagctttctggaacatatatctcccctccagcttcaccatgttgctccccactgactgttttccttgcagctgaaaactcagcactcatagcattcattccttgtatcaccgcttcctccactgtcccgtaaccatgttcatcagcatattttctaatatcctctgtgattttcatcgaacaaaactttgggccacacattgagcagaaatgtgccactttggcaccctccgatggtaatgtttcatcatggaaagacatagcggtcacaggatccagagatagagcaaattgatccaaccatctaaactcaaatcttgccttgcttagtgtatcgtcccatgcttgtgcatagggatggccctttgccaaatcagcagcatgagcagcaattttgtaggatatcacgcctgtcttaacatcatcacggttaggcaatccaaggtgctcctttggtgttacataacagagaagtgcagtgccaagagccccaatgttggcagcaccaatggcggaggtgatgtgatcataaccaggtgcaatatcagttgtcagtggccccagtgtgtagaaaggtgcttcattgcaccactccagttgcttctccatgttttcaggaattttatgcatcggaatgtgccctgggccttcattcattacctgcacatcttttgcccaagctcggcgtgtgagttccccttgagtcagcaattctgcaaactgagcgctatcatttgcatcataaatagaacctggtctcaaaccatcgccaatggataatgccacatcatactgattgcaaatatcaagaatttcatcccagtgctcataggcaaagttctccttatgatatgttaggcaccattttgcatggatagagccaccacgtgaaactatgccggtcattctctttgccgtaagaggaatgtaacgcagaagcacgccagcatggattgtgaagtaatcaacaccctgctcagcttgttcgattaaagtatctctaaagacttcccagcttagattttcagcaataccattaactttctcaagtgcttggnaaataggcaccgtcccaatagggantgaagaattacgaaggatccattcccgggtctcatggatangacgccctgttgaaaggtccangacagtatcagctccccacattgtagcccactggagntngtgnacttcctcntcgatggagctcacaacagcagaattcccnatgttggcattcacttttacnnggaagtttcntccaacaatcaggggtnccaattctcaggtgcntcttgtnggaaggaatnatagntcgtccacgggcaacctctgaccggacaaattnaggactaaggttctcacgnntggcacagtacaacatntcctcngtgantganntcggggnnngagntagaccgaattcggcacgagctcggccgaatcc

SEQ ID NO: 386707 - DNA, 911 bp, Oryza sativa
agatttacgaaggatccattcccgggtctcatggatatgacgccctgttgaaaggtccatggcagtatcagctccccacattgtagcccactggagcttgtgtacttcctcctcgatggagctcacaacagcagaattcccaatgtttgcattcacttttacaaggaagtttcgtccaacaatcatgggttccaattccaggtgcctcttgttggaaggaattatagctcgtccacgggcaacctctgaccggacaaattcaggactaaggttctcacgtgtagcacagtacaacatctcctctgttatgattccctgcttagcgtaatacatttgtgtgtaccgaggaccacctaacttctccctcctgtcaatccattccttccttatctttggaagtccaatccttggactaatgttttgtggaccactggtgtcgtatgtgtcaaaatgcttctcgtctccggtcaaatggattctcctaaatgggatcttgaggacatggccagattcctcgtgcacaatttctctggattcttttgtgctccttggaaagcattcttcaaatgatgggagtggcagaaattctggagcagaaggatcaacagtgtgcttgttttgcctgggttttgctggctctgctgttgactggtcagtcactgaagctgctctaggccttgaacaagtgaagttagcgctcctgtcctgcacatcttgaggacgtgcaataccaccaaatccaggtaaaactgcagttttgggtaacttcagacttttcatagccattgctgaagagaatgagggttgcagggcagccatttcctcggggcggcggcggcggtagccgggagccgggagggagaggagagcaggggcgacgcgggcggaggaggaagtgaggaactcgtaaa

SEQ ID NO: 386708 - DNA, 741 bp, Oryza sativa
aaaaaaaagatttatagaaggacaatatggatagctcgtcctcccgccaaaaaaggggttgtgttgagagtgccctgaaaccataaaagtagaaatgcacactcccttcgcaggcattatcctgttcaggttcaaagggactttctcagcccaattcccaacaatccaggccaagaggccttcagatcgttgagaatacaggcaccccacctcctaacataggatggtgaggagtgctgctgataaacgctccacccggagtagatggacaccaagacgatcttatttgcgagctgtatagctttctggaacatatatctcccctccagcttcaccatgttgctccccactgattgttttccttgcagctgaaaactcagcactcatagcattcattccttgtatcaccgcttcctccactgtcccgtaaccatgttcatcagcatattttctaatatcctctgtgattttcatcgaacaaaactttgggccacacattgagcagaaatgtgccactttggcaccctccgatggtaatgtttcatcatggaaagacatagcggtcacaggatccagagatagagcaaattgatccaaccatctaaactcaaatcttgccttgcttagtgtatcgtcccatgcttgtgcatagggatggccctttgccaaatcagcagcatgagcagaaattttgcccacgcgtccgcccacgcgtccgcccacgcgtccgcggacgcgtgg

SEQ ID NO: 386709 - DNA, 708 bp, Oryza sativa
  unsure (1)..(708): unsure at all n locations
nnnnnnnnnnnnnnnnnnnnnnnnnnnnnnnnnnnnnnaactgcacaacggtgatcactgaaaaaccatcgactgtatgggcaacatttttcagtgccagatggtaatgtttattctggcacatagcacactttctcaagccttatctgcagcgtaagatttacatccatgcgcgcataaatcgacctattactaacctctgaacggttgccactgtgccctccttgctcatgctggaacttcatctgaagaagggaatgactcaagaacataaactggatcgccgaccttgatgatccttccttcatcttttgccgacagagattccttgcagactaaattttgcccaaaatagacccggcgtttatttttgtggctcggccgcaacacttcatcagaccggagtgcttgtagagcttccgttggttcctcaccaggaatcccattatcttgattaatagtaggcaccttgcaacgatcacataacttgacacctaaaaatgtcagtttccctatctttatggtcttccacagatcctccgagtatggatgacatccatcaactataaatatttgggtctggaagcggattcattgggtacagggtcttttaagggatactgtttagtgcatccactgagccctggggaggncancaggaatgggaagtcgtcagcaaacagaactttgtaaccttgagcatagtca

SEQ ID NO: 386710 - DNA, 2038 bp, Oryza sativa
  unsure (1)..(2038): unsure at all n locations
nnnnnnnnnnnnnnnnnagctgcatccatcacaaattggttaatgagagattttgaactctgaatgttaaggtgcataaacagtcagtacagccattattaacctcgccagaagttttaggcccatcattatatgccagacaaaccattacctatatgatgagatcagattaaaaagccctaattctcatcgtgctcatttgctcattacatctgcattgcaccatccaagatccatatctgcatatccatagctgatacagctccatcgtgaaaacgtttattcctctacaaggttttgcatgctactactaatgcactatacctttagacattcccaggttacaataccgagtaaacaagctgcctaacaaacattacaatacttgatatgttgtatgatcctgaaggccctagccaagcaattcaagcagactcggcgaacccaatcctgtttttgccaaagtcgaagacagtgtggtatgcagccatgaacacgtctccaagaatccagagtgggccgcgtggaggtggcacgtcgaacgccatgaacccgctgatgcaaacagtttgaccttgctgctccagcttcactacgtactgctctggtgtcaaggtgaaggtcttgtttgctatggtgaatgaaaggttcggcatgtttgagatctcatcgcagtcgactgccgattcgccattggggcttgggagacgctcgcagagctggtcagcatattgcaaaatgagctcccttgtttggttatgtcggagctgattctgtatccagacaacagccatctcgcaagcagtgcaggaaagatctgagcccaccttttctttatcaacaacagactctatattgtttctgacagaacgagtaccatcaaatgcacagagaccaatctgagagcacagtttcatggggcttgcctgtgctatgagcatctcgaggatcatgtccccgtagtcccgcacaacttgtttgcattccatactaacaattccctcagctccaattgcgtgattaatttgagcaacaatagttgttgggccaccgagcaatgaagtccctgaatccgcaatagcggcgcaaccaccagaacagaacccagttgagtagtcatcaataagaagatcccccatctcaaactgccagtagcctttgcgggtaccaggaacatatgtatggctccccttgtaatgatttgggtctacaccaccaaagattaactcaccccctgtcggtgcatcaggatcgcggttgagccagaaggagaatacatccttctcgatcagttgctgctctttcattccctgccaaattggaggggctcctcccacagagatctccggaaatccaagtccaagaattccatcaaacttcccgatgatgaaagtaaggctcggttccctggttgtctcaatgaacatctgatttttcacagcaagatccccaactagcacgctatcctcactgaagaaaccagcaattgatccagacccataggaaatgctgcaagattctccattctttttgtaactgctcgacccttttgacttgtacctgtggtgtaagtagcatgctatcgaaaaataacatttcactgatggaacccacaagttggagcttccagtgtcgaatatcacagtgaagttctgtggtggagtgccgatgccgatctctccaaagtactgcgtgtccaggtagttgtccaaaggaactatgtcatcacctaaaccgtcggctctcagacgatggctttcctcccttgccaattttgcaccgtccaaggtcttcttgtccaatctcttcttattcaggctaattctcagcaatccatcaggagaagcatgaagcagaactgcgcatgacagaatccacaagcaagtgaccaggcaaagatggttccgtcccatcgtgcttgaaccacctttcttgcgcagacagttagctgcttccctggtccggagaggaggggaaagaagccggtgaagaactcgaggggaaagagtggccctctctcagtggtaggagtaatagg

SEQ ID NO: 386711 - DNA, 413 bp, Oryza sativa
cccaccacaaattggttaatcagagatttgaaactcttattgttaaggggccaaaacagtgggcccagccattattaacctccccagagggcaacagcctttctttattggccagacaaaccattccctccgtgcggagtcaggtttaaaacggcttaatccctatggtgctcatttgctcattacatctgcattgcaccatccaagacccatatctgcatatccatagctgatacaggtccatcgtgaaaacgttttattcctctacaaggattttgcatgctactactaatgcactatacctttagacatttcccagggttacaataccgagtaaacaagccttgcctaacaatacattcccattctcgttgatattgttgttattgatcccttgaagggcccttagccaa

SEQ ID NO: 386712 - DNA, 872 bp, Oryza sativa
actgaagataataatattgcaaattatatccaaaaccacgaattgtattacgccatagcagctggttattattgactagctagtattaccattgggttcccatctcttagccccaaccttgaaacgcatactaacgaaagacaacattcaaaaccaccatcaaagtccgatttaattgagagttgagacaactggtacacacgatggaccttgccgacgacattgagagttttttgcctcttggcagaaaattttcaagaaaaagcaccttagtaaaggtctccttccttgtgagtatggatgacgcagtcggacttagggtaggagacacatgtcagcacatagccttcttcctgctgcgcatcatcaaggaatgatccatccgactggtcgacggagccagcctcgatcttaccggcacaggtagagcatgctccagcacggcatgagtagggaagctctactccagcggtctcggcggcatcaaggatgtaggtgtcatccggagcctcgaactcgtgctcttgcccttctggtgtgatgagcttaaccttgtaggtagccattgccgagacgtcaagcttcttggaggaggccttcaggcttggaaactgcatgccttggctgaagaagcttagagatgccgggctcttgaccgccgccaccttggaggcctgagttctagcattgctcaaggacacacatgaagttgcaagtgtgcacgtcgccatcttgaaacctcgcgaccgatcggaaggcgaaggggaaggcgacggcggaagcctctctcgcttggcttcgctttcctcctcgcgagagtagtgggaaggagaggagaggagttgggagcccacgcgtccgcggacgcgtgg

SEQ ID NO: 386713 - DNA, 1481 bp, Oryza sativa
  unsure (1)..(1481): unsure at all n locations
nnnnnnnnnnnnnnnnnnnnnnnnnnnnnnnnnnnnnnnnnnnnnnnnnnnnnnnnnnnnnnnnnnnnntttttgggttttttgagtgaagcaaactctttcttattcatcattcatagtatgtaccatgacatgccacccgcgaccgagaatatacattgccgagaggcgagagcccaaagatggacataaaaatttaaaaagaagaggtgaaaattaagtaaaaacaccgcagaaaaatagattggcgcgcttccacgctagctgcaaatatcgctctaataatctgcatgcttcggacggagaagcacatcggatatagagaggaggaagaagaggaggaagagatgagcggcggcggcaaacggcgaggaggccggcggcgagggcaggcgcacggcgacgagacgacggcgtacggagcgccatcatcaggcggcagcgtcgtcccaggtggcggcccagttggtggcgctgccgacgcggggcatggagttgatcttggtgaaggtgtcgaccttgaaggtggcgccgcacatgacgccctcgctgtccacccgcggcatcgccttcagccggttcatcgggtgctcgaagctcttgagccccccctcgctgtggaacatgcaccccaccgggaacggcgcgtacgacttgccgcaccctcccttcacgatctccctctcgtcgcagatcaccaccgacccatccgccgcgatcccccaatacaacggcacctccccatccgtactcagggcggcgaagacggcgccggacttgttgtcgaagacgacgaaggcgaaggagccggagagatccttgacgacctggtcggcggggtaggggccgcggtcgcggaagggtgcggtaggccctcgatgacgagcagcgcctcgttggtggagcggctgcacagcccgtactgccggatcaggctgctcaggttgtccagcctccccatgaacacgcagtagatgtcatccagcccacagaacatcctctcgtagccagagaggccattgcgggcgtggccggcgacgcaggcgagggcggcgccgccgccgaaggaggtggagaaggcctcgatggggtggagggcgtggaagtccctgaggatctcgtcggggttcttgggcttcgccgcgctgctccgcgggctgttcagctccgccggcgcgtgcgccacctgcttctggaatatggccaacattttcttcttcctcttgctagctagctccgacgaatcaaactccggcgccgacgaagacgaaagaacacgtagtactttagcttagcttagcttgagctgctgctgctgttcgttgcgtgaagatgagagacgtgtcgggttggcgagcgggtggaatggaatggaggtgaggatagagatgtgcacggctttatagacgggatttaggatggcacgaacgcgaacgaaaatatcctatccatccctcgctcgcgcgcgctgtttgatgagc

SEQ ID NO: 386714 - DNA, 791 bp, Oryza sativa
caaaaaaaataattttggtgggaaataataataacccctttaattagccaggtcatgccacgctaggatccaaggccaccccgtgtgatagatcgatcgatcctagagccggagaacccggcgaaggctgtcgccggcgcccgcctcggcgttgcatgacggggcgggcggcggagccggcaccaccttgttgccggcggcgggggacgacgacgacgacgtgatcacgaacctgggcagcggcaggctgctcggcggcggcgcgagcacgtgcagcaggtcctggacgaagttgcgggccacctcctgctccaggtcgtccagggcctccgccaccgccggcgccggcggcagcggcgttgcccgctccagcggcttcttcttctgtgttcctcccttcgtcgtctccgtcgacggcggcggcctcgacggcttcctcctcctgtccctctggcgcgtcgacggagtactagctctgccgctgcgcggcggctgctgcggcggaggcgggtacgggaaagtggcgtacttggtggcggcgggtgggagcggcaggagaggtggctggttggacggcaggagaggcagagacggcgacgagtacagcggaggcctcgcgtacgggagcgcgggtagtgatgcatggctccacgcgccacctttgtattgctggcgtggcgccatcgccggcgtcgcgccgccgccgaggtgccccggccggaatccgccgcctctcctcgggaactcgaagctcccggaagaccggcgatccagaagaacgttgtccataa

SEQ ID NO: 386715 - DNA, 872 bp, Oryza sativa
  unsure (1)..(872): unsure at all n locations
nnnnnnnnnnnnnnnnnnnnnnnnnnnnnaacaaatgcagtggagaatatatatttcaatccgtggagtaaataatccatttcaacaatcccaccatgaataatatgaaaactaacagggtcttatatcttcttgcttgaattccaaataacatagtactgctctttatagagagccaactaaacaactccattctaatttcatggaatggaaacaaccaaaacaactggtagatagatagatagatagatagatagatagataaactgataatttcacccactctgttgcatcgcctattgttcgtgtgctcccttgttgggcttacgatgatagattgcaggtgatactgaacgaccataattacatgatgagtaagacgcctgagttagttcatcaccatcgtatttcgagcgctgcttgattaggatagtccttaagtgcctctctaacaacagccttgctgcttgaataaatggttgcatgccgaagggagtggagattctccaaacctaaatcatttaagccacccctccttaggctggtccaaatacgaagataaagcctttcaaggtggggcatagctcctggttgaaacgatggcatcatggggctataaaagtgaaaatcttttaaactccgaaatacacatgcacctctgtggatagtgagcttttcctatagttgttccgaaacaaatgctaactgtagcctgagaaagcgaagagatggaagctcagcgaggcgatcaaggtggtcagactgtagatattcccaacacagccaaatggataaggtggtgaggcgggagagcatcgacgaattgatccaacatgggaatgctttcatatacgaatggtcgtgggtcgtgg

SEQ ID NO: 386716 - DNA, 755 bp, Oryza sativa
  unsure (1)..(755): unsure at all n locations
cccacgcgtccgcccacgcgtccgcggacgcgtgggttttttttttctaaaagaagcatcagccgttaaaaactccacaaacaatccccaaacatggccagaggctttgcttatgttcagcgtctgacttgtgaaaacgcccaggattcccaaactacagcggcaaatccatctaattaaacatcaagactcgtctcaacaacaacctgccacaattcacaaacagcaggctgctgcacaagacggtgtacacggttcattttatttgggtgttcgtttccaccatcagattgatataatacacgcgaacaagcagaaacattcggcaacaatttctccaggaaaatcgcggcctatttcgtcatcatcccgagcgagcgttatttggaagagggagtctttttcagacaggcacagcctcaatggcaggagcgagtgaccaacgtcgacgtcggcgtcctagtagccaccctggatgtaggcgttgagccggttcagctcttcccggtgctcgctgaccacggcgcggacaatgtctccaatggagaccatcccaaccatgcccgtgccgtcgatcaccgggatgtgcctgatgcgcttctctgtcatcagctgcattgcttgcaggactctggtatcaggcttcaccgtgatcagctggttctcttcagtcatcaaatcaanncgggaagcgtggggcgaactcgaaggggggggnnggnaancaattcggncnanangnagtngnattanaa

SEQ ID NO: 386717 - DNA, 941 bp, Oryza sativa
atttgggtgttcgtttccaccatcagattgatataatacacgcgaacaagcagaaacattcggcaacaatttctccaggaaaatcgcggcctatttcgtcatcatcccgagcgagcgttatttggaagagggagtctttttcagacaggcacagcctcaatggcaggagcgagtgaccaacgtcgacgtcggcgtcctagtagccaccctggatgtaggcgttgagccggttcagctcttcccggtgctcgctgaccacggcgcggacaatgtctccaatggagaccatcccaaccatgcccgtgccgtcgatcaccgggatgtgcctgatgcgcttctctgtcatcagctgcattgcttgcaggactctggtatcaggcttcaccgtgatcagctggttctcttcagtcatgatgtctccaactttagttgacttggaagatcgtccctgcactatgattttcctgaggtaatctctctcagtaacaataccagcaattgatttatcctgtccaggtttaacaaccaccagagctccaacattgtgttgcgtcatagatttgacagcatcatagacagagtcatcagtagtgcaccagagccaagatccatcagcactcttccccttagacttcaaaatatctgccacagtggcagtctcaaatccactctcctctatttgagcagatgaaactgacatggagcgtgaatatacagcaggtaaaatagatggttttggagcactgatgtgtcgcagaacagcagacttgaggagactgccatgtgacccgatagcttgaattgcccgttgcattctgcgaggaggaggaggaggaggaggacgccgacccggatgcagtggttggggaggatgaggaggaaggaggacacttggtatgatgtgaggcgagaggcgtggtgatgagctctaattaaagtga

SEQ ID NO: 386718 - DNA, 1651 bp, Oryza sativa
gaattgaaccgtttacctcagtttgtgcgtgcacttctttaaacagaaccaaaacatcctaaacacactacacaactctgaaaaaacaaaacaatactcgagtgatttttaccaaaacaatagagcccttcaaaatttgacttggtgttttctgccctacaaaagacttcatcagcttacttttagctcattattaactacataataaactcaaatcaaacataaccttgtgaaaaacgtcagctaatatagtagtgtaactcatcgtgtaaaataaaaacgagtgtcttatccttttggtataacatgtagccgccatgctgtttacacgacccaaattacagccatttacctccggattgacctcaagaaaacaaaccttccgcagcagagacggaactgttatccagaacctccatggtgctcaactctcaccgaagaaatttataatgatacatctggcaattagtccaaacaaggttggcaccccagacttcaaagctgcaacagcttaatccagcataccggaaagtcggtccaacaataaccatgaaaattgatgagcaccaacaattaccaacattagacaagtcattcctgaagcaccatgtaatgagcacaggtgatcacagcaaaacatcatcatcttgcttcagatgtcaagcttcagatgtcaagatcccagacggccacctcaaccaagtttgattcgcaagaatactcctttcttcgggtgacttcaggttgaacttgtcttcaggtcaccttaaaacgacgagagaatgctacaatttcttggttgttgcgctgtagctccacgtttagattcacgcgcgatcgttgaacgatgtagtcgcagtgggatctgaggacaaccaggggacaacgggacacaagattggggggagaacccggggctaaacaaaataacccccgtgcgaactccccccaggacacaaaaagatcatctttattacggtggcctgccatgcgagcgcacccaacatggcaaaggccaatcttgcgatgtcacatctctcgtttttttttcgtctctttttcttttgaccctcagacacaagcacctcgcttgttacatgttctcttaccttgccgccttcatctcagcacacggctccctcgaacaacatctcttagatctaataattatcgaaagttcatcgaataattatcaatacaaagagacatcatcgcgcgaggccccgatggagaggatccaggcgacgaccagcctcctccctcgccccgccgcttcatccacgccagctcgtacggagcatgccccaaccggacctctaagaggtcagatcggctccagatctgactcgccgaacgcgaggacgagcagcagcagcagcttccgccgatagatccatggccgccgaaggatgagcaagtccatccaagatctgaaacctgcgcaacagaaaaaacaaacgcgtgttgtccatataaagggagggaaaacctcaccgttccggcatcggaggcgacggattcgacccggaatcaaacggaagtcctaccatggaagggattcggggtggcgaaattctagttctgggaggaggagatggggaaagcggcgctagggttgcttggctaccccacgcgtccgcccacgcgtccg

SEQ ID NO: 386719 - DNA, 1533 bp, Oryza sativa
  unsure (1)..(1533): unsure at all n locations
accattagacaagtcattcctgaagcaccatgtattgagcacaggtgattcacagcaaaacatcatcatcttgctccagatgtcaagcttcagatgtcaagatcccagacgcccacctcaaccaagtttgattcgcaagaatactcctttcttcgggtgacttcaggttgaacttgtcttcaggtcaccttaaaacgacgagagaatgctacaatttctacatagtacaaactatgatgaatagacaaatgctaaataactttttgcttcaagaacataaattctcgtacttcaacgtacagaaactaacataatgctaaggaggacaacatatgatcatattctacagcttgcaaaagaggttacattgctgactatccaagaaaagaaattctcacagtgcaaatatataaaacattactagccttctcgtacatgcataaatacagaaagggcaaagtgaaagagctgagcggttaaatcatacacaattagttgatattaaggcgcaggagcgctgtaaattctgggcaagaacaagagcttatttcacttaaattggacaagagttctccaatcgtatgctggaaacatcataatagtatttgaccaacataacatacttccaaactgatagttgacagttcggagtatagctgagcacataatctcggaagcaaatattaccactacaccgacttatggatatatttaagtatacaaagcaagtactagatattcgttagaacaattgcgtagtattccagctgctcttaaaccaattaccaagcgtaactttaatcaacttgagtcaatatgtgagatgcacttctagggatgataatactgctgtttatcagggatattaattggcaatgataataataattaagtaattcaagcaatttaaagtaaatccaggaatattatgtgactagggatattttaaggcagtgataattatgaaacgctgaatgatatggaaatttgattacgactaatattgcacatgtagattatcttttgtaccttggttgttgcgctgtagctccacgtttagattcacgcgcgatcgttgaacgatgtagtcgcagtgggatctgaggacaaccaggggacaacgggacacaagattggggggagaacccggggctaaacaaaataacccccgtgcgaactccccccaggacacaaaaagatcatctttattacggtggcctgccatgcgagcgcacccaacatggcaaaggccaatcttgcgatgtcacatctctcgtttttttttcgtctctttttcttttgaccctcagacacaagcacctcgcttgttacatgttctcttaccttgccgccttcatctcagcacacggctccctcgaacaacatctcttagatctaataattatcgaaagttcatcgaataattatcaatacaaagagacatcatcgcgcgaggccccgatggagagganccaggcgaaattctagttctgggaggaggagatggggaaagcggctagggttgcttggcta

SEQ ID NO: 386720 - DNA, 650 bp, Oryza sativa
tcagcacggttttaacgttctgtttcactacccgctgggggttcatttcccctctccctttacggtattattttgtttttggtctttttggagttttttatccttttttttttttttaacacaaaagtaataccactgtattcatatttcaatggaaaaaaaacatattttacaaggcaaaaatattcccaaagttcaacatatacatatatagaagacctaataattgaaatacagtcacgcttcattagaagaaaactaattaaacagagaggatgtagatggagtgtattgtatccttgagcgaacttggatgagtgtatgcatcttggtcgtccttgtagacgaaatccaccacgcgtgtggcgttgacgacggcctccagcagcggcggcggctgatccgccctcggaccaggagacactccccggcgatgtccatccatgactcctccacgagctccctcagcttcgcgtaggcttcctccttcgtgatgccgccgtgctccctcatgcaggcttccaccgtcgacgacgacgacgacgaagacccttgctctctctcatgtgaagctatgtcattgagtaatcggccaacgatgcaggaagatgtgatgatcttggggtaggccatgccccctggacgcgtgg

SEQ ID NO: 386721 - DNA, 551 bp, Oryza sativa
aaacggaacgaaagaatgggctgtgacaaaaattaaacacgatatatgaacttggtcgtaatacaaaaagtacagcagcctggtgtctcctagatcctcaagcacaaggaacaaaagcacaaaccaaatgacacctcacagctgcgttgatctatgaatgacctagaacggggtaaaatcagctatatatgccccaagataggggaggatcaccaactgggagtaaaggagaaatatgagtatgataagtagatgatcaggactatttggaccatgcaaccgcatcaatttctgcttgagcactccgatatagctccagcctcttcgcaagattagtcctccgttccatgacggccgggtcttcatcaagaagcttagaaagttgtttaatctctcttgctcccaattcagtaaagaagtgatcgagcagtgagcgctttgcctcccgcacttgacagtagacaatagatttcggaatagagttcctcaaggttgaacataccatgttaatatatgccagaaaccgttgttcaattcgtctaagataagaa

SEQ ID NO: 386722 - DNA, 458 bp, Oryza sativa
tgacacggtaggcaactgtctaccaatgtatgctatacccagctgagcatgggggaaattattgatctattccactgatgaaaacccagcggacttatactgcagaccttaaaacacacatacagatgtacgcggctctgctgtgaacttaactgctccaccttcgagtatcattgctcacagacacctatgatcaagtgctatgatgactgggcacgcaggaacgcctataatattgtatgggaaaccatgaacttgatctttatacttctcgcatagcacggacagcttatgagcgctaacaaatacaatgtgaatgacagttaacaaattggaccagcccccattaacagccgcataccacataacaacgattgccagtacaaagtgctcaaaagtttctttcccaacacacatcctgaataaaactcttgaacttatttacttgggtaccaact

SEQ ID NO: 386723 - DNA, 877 bp, Oryza sativa
aaaaaagatctatcttttcgtggcgcaatttatatatatatagttccaaacttctctatgtccaatcatctggtaagaacgggtgccatcctagcagaaatccagactcctgttagtgcactcgacgaccgattcgctagctggctgaagtcttcgttcttctcagagacatgtacgctagaaccctgtagccgatgatcatcgcgaccagagctacaacttctgtcacgccgttgtcaagaggtatggcattgatcagaatgtccgggacaggatgatattgcaccttcagcagtagcctgtacgtgtggtagttgaatgacaggtagcggagccaggatatgaatggtggaactctctttacaaagaaccctcctgctagcatgaatgtcatgactgtaactgaagctagagttgttgccttcttgatatccaagaggctagctccaagtgccaatcctaatccctgaacagcaatgatgctgaggaagacggtcaacatgctaataaagaaatgtgcggcagttgctctgaggcctgccatgaagtagccaatcacccataaatatgactggaaggaaaaggtccagtggcagatcacttagtcgttctggccaagaagtatgcactgagcttgtacatgtcagctgcacgctccttgttccggaacattgccctttcttgtgggaatgtgaagatggcagtaaacacaggaaagaaaccccaaaacacagctatgaaaaacagtaagccggcctgatcttgtagaccttttggtgtcgagggatcagagtgccaccatagtagacctaagataactgatgttgctatgacctgggtgattctcatccagctcaaataatcatgtcgccgttct

SEQ ID NO: 386724 - DNA, 634 bp, Oryza sativa
ggggggaggaaatcaagcgattttcaattgataatagacagtcccacaccacttctagttcttacatgcatatcctaatggcataaattggccgatcgcttatggcagtttaagcattcacaagggcaaactttaactaccctaaatgaatgacataacatgaactaattttttgatttaattagattaacattctcattttcagcctatgcttgctgcccatgttgttggctgactgcttcttcatgctgaagtagcaatggtagctctgcaacgccctgctcactgaacacccaacgtccgtgcgtaaagactggattttcttttgttagttcctgagatcttgtcaggtttcagaataaagcatttgctagtaagttcagttgatgccagctactgaagtttctaaattcatcacctttagctcaatctcacctctgatgaaacaaggggtggcttcataagctgcttgccctctgcacgcaaccgctatggaaccacgacagtgtgttccgtcacctgttactgtgtctcattctggaactgaatctggcaaggggggtagtactttggtcagatatttgaacctcagacctgcacccacgcgtccgcccacgcgtccgcggacgcgtgg

SEQ ID NO: 386725 - DNA, 816 bp, Oryza sativa
  unsure (1)..(816): unsure at all n locations
gagcctatgaaatttttttctacatttcagagttcaaacaggggagagagcagggtctgtctctcatctctttgcttttgacgaaagaatattctattacaacacacatcgactttgcacaaataacaaagcacactgcaagtgatacaaagaacaaaacttatcatttcaccgtagcgcatgataaatatatcgaggctagtgaaatttcacgactgagcaatcacgtactataagttatataactgtatagtccacactgtcactgggacacgacaatgggtgccaagattttagttcttcgaccattccataactgcactatggaacatctcggcttcctgcatgagtctgacggatcatgtctttaaatatcttgggttccattccaagaatcgaagctgcagatgaagccatgttcgcacatcagagaggtgcatggtgcggcttcttcagaaggcagaatctgtgcctgtggcatcaagcgccgcgtcagagaaaggctcaggtctcactaaaccgccagagttcatgctgctgccctcgctcgagccactgctctttgatagatatcttcgtactgggaagctgaagaggcccagctgaaatctatcctcatgtccttctgcaccagctgtttccagaccgcaggctttctattgtagtagttgaacgctctctccattgcaccacttagagccttttcatcaggatgcacacccgtcccagccattccgcagctccttaggtatcgtttcgtcgtcgnnntcgnagcctctgtcattgggtacgcctggcgtcggcacttgcgattcg

SEQ ID NO: 386726 - DNA, 1332 bp, Oryza sativa
  unsure (1)..(1332): unsure at all n locations
nnnnnnnnnnnnnnnnnnnnnnnnnnnnnnnnnnnnnnnnnnnnnnnntggcaagaagagagcaatccttatattaaacatcggtggctaacttgcaccactcactttgtacactatacaacatcctaacctacgcttgtatgaagaacagagcatgttcctctaactctaaccaaaatgatccagggcggcaattcttcaaaaaccaggcagagaagatccgctgtcgaagctctctagatcatcctccagcgactccgtcctctgaatctgctctgtcttgcacactcctagctcatctgatagcctctcacatagctgtctatacaatataggatctccatgggatttcttcaattcgacaacatataaggatggcccgagctcgactacctcagtacagaccaagaatgatgatggattcctgaggttctttgaacccctgccatttttcatgacctttagcttgctattacccctctggacttggaatcccatctccgtcacaacattctcaatcttgtcgaataaatcttttggtgaatgtgttgatgtgaaccttatctttctttgagacgcatcctcttcctcaaagaaacctgaaagatcaagggcagaagccattccaatcaactgaaaagcattgatatgagtaggcttttcctgctttgcttcatcaattggctctttgattgggagaactgagtcaagataattgtcatcatcgtcgtcatatggaacaacaggagtgtaatccttctgaaaccactcatgctctttgatccctgctatgttgatcctcttcatcgggttcggttcaagaatccttcgaagaagatcccgtgcactaggtgaaagccactttgggatttgagtgtcccccttgaaaatcttctggtacaggacaacaagatttcggtcatcaaagggaaggtatccgacgagcattacatagagaattactccacaagaccagatatctgacaatgagccatcgtaacctcggttctgcaaaacctcaggagcaatataattggggctgccacatgttgtgtgcagcaatccatcattcccaagatgttgaggcaaagcacttaggccaaagtcagagatcttgatattgcctcttcgatccacaagaacattttcgggcttaaggtctctgtggtagacacctttatcatggcaatagctcacagcatcgattaactgctggaaaagtctccttccttcatgttcagagagttttccttttacggcaatcttgtcaaagagctcgcctccattgacatattcaagcaccatgtaaatcttagttttgctagcagccac

SEQ ID NO: 386727 - DNA, 1155 bp, Oryza sativa
  unsure (1)..(1155): unsure at all n locations
ttaatgaatggcgagcgcgatgcattatattattccgcatacgaaaatttgtacatggctagataattaagctgcacaatatatatatatacccagtataataattaccacgacaacatacgcacacatattgacataattaagcctgctacgtaacaaagcatcatccataaacacgcgtaccgtgccgtgcatgcatacagatacatacaggcactccacttattttacaaccattcacactctcacactgaaagtcccaaataaaactgacaacagacgcatgcatcgatcatatcatatgcatgatcgtccatagtcgtagattgtaaattgaacaacgaaatcaagaacaattaatcaagcagctgatcgatctctcgtatcaaatgaacatcgtcgtcttcctcacgccgtcacgctggtgctcctgaacgagctgagcgccttggcggcctcgccgcgcagcaccagcttgtggtacgccgccgccaagaacgccccgatcaccggccccacccagaagatccagtggtctttccaagctgcgtgctggttgtacagcacggcggcgccgaggctcctcgccgggttgatgcccgtgccggtgatcggaatcgtcgccaggtgcacgacgaacaccgcgaaccctccagcgactccgtcctctgaatctgctctgtcttgcacactcctagctcatctgatagcctctcacatagctgtctatacaatataggatctccatgggatttcttcaattcgacaacatataaggatggcccgagctcgactacctcagtacagaccaagaatgatgatggattcntgaggttctttgaacccctgccatttttcatgacctttagcttgctattacccctctggacttggaatcccatctccgtcacaacattctcaatcttgtcgaataaatcttttggtgaatgtgttgatgtgaaccttatctttctttgagacgcatcctcttcctcaaagaaacctgaaagatcaagggcagaagccattccaatcaactgaaaagcattgatatgagtaggcttttcctgctttgcttcatcaatttgcttcaagaaacagaaattaccaatcagaaattcagcatcaacaaatactgagaaaccggacgcgtgg

SEQ ID NO: 386728 - DNA, 1199 bp, Oryza sativa
gctacgtaacaaagcatcatgcataaacacgcgtaccgtgccgtgcatgcatacagatacatacaggcactccacttattttacaaccattcacactctcacactgaaagtcccaaataaaactgacaacagacgcatgcatcgatcatatcatatgcatgatcgtccatagtcgtagattgtaaattgaacaacgaaatcaagaacaattaatcaagcagctgatcgatctctcgtatcaaatgaacatcgtcgtcttcctcacgccgtcacgctggtgctcctgaacgagctgagcgccttggcggcctcgccgcgcagcaccagcttgtggtacgccgccgccaagaacgccccgatcaccggccccacccagaagatccagtggtctttccaagctgcgtgctggttgtacagcacggcggcgccgaggctcctcgccgggttgatgcccgtgccggtgatcggaatcgtcgccaggtgcacgacgaacaccgcgaacccgatcggcagcggcacgagtacggggatgaaggagtcgcgggcggtgcgcttggggtcggtggcggagaagacggtgtagacgaggatgaacgtgccgacgatctcggcgccgagggcgccggcggcggagtagccgtcgctgacggtgttggcgccgccgccgagcgcgtcgtaggggcgcttcatgatccccttgacgatgccggcgccggcgatggcgccgaggcactgcgccacgacgtacagcacggtgcggacgagcgacagcttccgcccgaagaagaggcccagcgtcaccgcggggttgatgtgcccgccggagacgccgccggtgcagtagacgaggacgaatatggtggcaccgaacgaccacgccacgccgaggtagccgacgccggtgcacgcgtcgacggtggccctctggttcttgtacccgatcacggtggcgatgctcacgtagaggaagatgagcgtcgccatgaactccgcgatgagggcacggtacagcgaccacttacccagctcgctcgtgtccagcagcggcgccggcggcgggtcccagtacggcgccttcgccgccgccgctccgccctccaccgtctccacggccacctcctccttcgacgccatggccttctctcctactcccgaacgcgtgggcggacgcgtgggcggacgcgtgggcggacgcgtgg

SEQ ID NO: 386729 - DNA, 575 bp, Oryza sativa
ttttaattaaaaaacacgacagataaaggagctgcaaactgcatatagtctggggcttttgtagagaaattgccaaagttatgtcattacactgagaatgatatgtatacaccgagaattccctatttgtctagacgatacaccatttattgaggtaatattattgtataccaagaataacataactcttcaatgatattttcaaatcttcttgttatgagagttcaatagcacatgatagattgggtctcggtacgacacttggaaaagttgtatgacaatgtagccacatgtcgtgatgcttccaaagcatattaacaagcatatccagatggcagtagatatccagtttgactccttgtgagcaacccataccgatattgcgaagacatttatatagaagtcaattaaggttgccgccatccacggggtcaacaagtccttcctgaaaggtagtccatcagtgatgacagtataaattacgactgcagccatcattgcccccaaaatgctgaaaataattctcccaattatgacaaaagaggactttctttcggatagatccggacgcgtgg

SEQ ID NO: 386730 - DNA, 1136 bp, Oryza sativa
  unsure (1)..(1136): unsure at all n locations
nnnnnnnnnnnnnnnnnnnnnnnnnnttaatctcctttttttattttactcttattgaatcgcggtaaagtattctaattcaataaaaatttcgcgggcgaatatttactctttcctgtcttatttgttaattcataaccttatcaaataagacaatttttttggtttgttccgccatcccacccaatgaagtattgggattcttttcaagaaaatcctatccagtcataggttctgtcgttcccactgcttctcctttaatggttaggtttgaatctcgcaatggagcttccaaaaaatttctttccgagtcaatttctcagttttattaactcgggacgctctttgttattccttgaaatttgtatttcttgtttcaatcaaattacgatttcgaattctctgttatttttattatattgatgctttatcacattgctttttatgatgtaattcatagaccatacatattggaatcctatatctttcttatttctcttccttctttctatcatccttccttttatctacatcccctttagttttgcttcacaacttagaatcctatttttttttaaagaaaaaattgcagttgctacacgtatatgatagatttactcatttatgatagatgtatttattcatatagtgactgtttcttagttaggatctcgacaatacgaagcaataggttggttattagttcattttctataattacatagtagggttcattctatttttttttaatcccctttttgaaccctaaaaaaaaactaacgagtcacacactaagcatagcaattttattaaaagatttctcaattttcattaaatcttatagaaagaggtagaatttcttctttttttcagggattttagggaaaataaggctcttgtcattttttattctattactgaacagaatgggaagacagggttggttattcttcgtctacgaatatccaaattttaactcctaatactccatagatagttcgaattggatagcagcaataatcaattttagcgcgcattgtctggaggggaagtctaccttttttgatgcactcggcacgcgcaatttcttttcccgcgagacggcctgcaatttttacttttactcggacgcgtgg

SEQ ID NO: 386731 - DNA, 385 bp, Oryza sativa
  unsure (1)..(385): unsure at all n locations
nnnnnnnnnnnnnnnnnnnnnnatcaccaattcacaagtcgagtactatatgggcatttggggcatgaaccatcgtagtagaaggtactaccagttacaaagcctgaagaacacagcacgtacggtaccgctatgctcaaattgaagctcgtacatcagcgttccccagttgataacgtagcatggatgacatgacactatatatatcttaggagattcctatacattgctctagttatgaagctcatggttcgtctcatggccagaggaggaagacgaggacgggcggcttcagttgttaccgccaccgtccttctgctgtgtcttgccgccgccgccgcggaagctcccgcgcttgctccagtttgcaccgacatcgccgccg

SEQ ID NO: 386732 - DNA, 1072 bp, Oryza sativa
  unsure (1)..(1072): unsure at all n locations
nnnnnnnnnnnnnnttttttttttttttattgtcgaaatatttatgactcagattatcccggggcacaaatcaaaaggaagagcgttattccacatttgacaaaagagaaaagggagagagctacacggcacgaacagacttgtcctggccaaaacatcttgtgaatgtgatgatgatgatgatgatgatttcaccaaacaattcgacaccccaactgaaaaggaaacgacgatgaccagttttcttattctaaattgcccactaaacttttgtatatcattggccctagctggccgctttgccaccaccaaactcctccgaaatcctcgtgtcatctcatcctcagggggatgagaatgcaagggaataaatgatttaagatgagttcttgagaacccactcaaccagggtggagacgccgaatccggtggccgcccgcttcttgtcgttccacactggcccggccatgtcaatgtgcatccactgcaccttctcatccacaaactgtttcaggaagagtgcagcagtaatagaaccaccctgccggccaccggtgttaaccatgtcagcaacaccagacttcatcgactcccagtagctttcctcgagtggcattctccagaacttctctcctgatatctcagatgccgcagcaacttccttagctagttcatcacttggcgtgaaaattccagcaatgctaggcccaagtgcaacgacacatgcaccagtaagtgttgccagatcaataatcttgtcaacaccttgattacaagcgtacaccaaagcatcagcaagtgtaagccttccctccgcatcagtgttatttacctcaatagtcttcccgttagaagcagtcacaatgtcaccaggtctcatgcctgtgccactaatcatgttttcacaagcagcaacaataaaatgaacctctactccagggggcttgatttggcccaaagcttttgctgcaccaaaaactgctgcagagcctcccatgtcaaacttcatcagctcaatactgcagcctggtccagtcttaatgttgtagccaccactgtcaaaagtaagaaa

SEQ ID NO: 386733 - DNA, 599 bp, Oryza sativa
ttttagtcaaatgcatcagcaagtaattctgaggaaaatgataaaacttcatcgcacacgaggcacgaatggtccaaccaaccctcagaattaggtatcaaaatttgcccgctacaatgacacggggtattgtaaaccaacagaatactccaaaaccatagtacattgttacaaaatgtgtacgcacacgaaaagaactaataaagggacacaaaaataccacattaagccttgttcatctcaggctccagcgaattaagctgtcacccgatagcaaaatccatggcttctttctttccttcgttgtcgaaacaataatgaacactcatctgaccttgcaaaaatatacagcacaaaactggctgttgctcacatctccagtacgagagttcctctggggtgaaacacctaagctatagagaatacacgatgctgttttggctaggcacagcatccaaaaggttgatatgccaaggctgccaaggggctattatttcaaaagtttgttgcaggcgtcgattaccacagcatgcgagctcaatatagcctgacctgaagagtttccgcccatggttttcatgacagcatcaaaaattctt

SEQ ID NO: 386734 - DNA, 1061 bp, Oryza sativa
  unsure (1)..(1061): unsure at all n locations
nnnnnnnnnnnnnnnnnnnnnnttttttttttttttttttacttgacaaaaatagttaaagatctacaacatctcaaatattcttaactcatactcatgtgaatctagttcccaggatatacactagattcacactttcatcttaagcatggacatacatagcagacacatttaagaagaaaaggacttaaagacttacatcaacttgaagaaaagaacttaaagacttaattcaatttaatagttaccttaggcgaaccggccaaataggttttataagaggaccaacggaacttgtttacccaaaccacaagcacaccgattagggttttacccccattaatttccaatccttagaagaagcattcgattacccgcatcacttcaaagactaaatctaaaaccttgaatcaggaaaatgtcagcatctaaatcacttctttaccgtttaagcaatcatcgagatgctagacaaggctagggatgtctgcagagccacagcgacggcgaagctccatggcggcatggcacaactccaggaatgacgtcggctgctcgatctgtaaggggagtcactagtacggtgcatgcaagaggtcaaaagctatctagggaggctattcatgcatggaatttgactgacgctcaccggagagaatggaatcgatgatggaagcgattgaatggagttggagaacacgatgtcgatctccaagatcgtgcgccattggatgggttttcttggggtatcttgaagaggacgtcgaggtgatcctggtggcgcaagggttcggcttggggtggttcggttcggtcggaacgacgatgagaacccgatgacggcgtccagtgcgcgctccagagcatcgtcggcgagctctgcgttcccgtggctgcagtggatgaaatgacgtggtgtcaaaatagaagatgatcggcatgatgaggaaattatggaacggtagaagagaggagacgaccacggcacaatggcgatggcaacggccgtcgtcttcacggccggcggcaaggtcgagatggaaaagaaaagccggagctct

SEQ ID NO: 386735 - DNA, 862 bp, Oryza sativa
  unsure (1)..(862): unsure at all n locations
nnnnnnnnnnnnnnnnnnnnnnnnnnnaaagatctacaacatctcaaatattcttaactcatactcatgtgaatctagttcccaggatatacactagattcacactttcatcttaagcatggacatacatagcagacacatttaagaagaaaaggacttaaagacttacatcaacttgaaggaaaaagaacttaaagacttaaatcaactttaatagttacataggccgaccgggccaaatagatatataagagaaccaacggaagcttgtctacccaaaccacaagcacaccgactaggggtttacccccattaagttccaagtcctagaagaagcagtcgattacccgcatcactcaaagactaaatctaaaaccttgaatcaggaaaatgtcagcatctaaatcacttctttaccgtttaagcaatcatcgagatgctagacaaggctagggatgtctgcagagccacagcgacggcgaagctccatggcggcatggcacaactccaggaatgacgtcggctgctcgatctgtaaggggagtcacggagagaatggaatcgatgatggaagcgattgaatggagttggagaacacgatgtcgatctccaagatcgctgcgccattggatgggttttcttggggtatcttgaagaggacgtcgaggtgatcctggtggcgcaagggttcggcttggggtggttcggttcggtcggaacgacgatgagaacccgatgacggcgtccagtgcgcgctccagagcatcgtcggcgagctctgcgttcccgtggcacggcacaatggcgatggcaacggccgtcgtcttcacggccggcggcaaggtcgagatggaaaagaaaa

SEQ ID NO: 386736 - DNA, 524 bp, Oryza sativa
agttcccaggatgtgcactagattcacactttcatctcaagcatgattatacatagggagacacaaataagatgaaagcatctactttagttacattggccgaccggccaaataaataatagagcccagcggaagcttgtctaccccaatccacaagcacaccccgactaggggtttaacccaattatgttcaaaagtcctagaagaagcagtcgataaccccgcatcactcaaagactaagtctaaatccttgaatcaggaaaatgtcagcacctaaatcacttcttcaccgattaagcaatcatcgagatgctagacatggctggggtagctaggttgatgacggcggctcgtgtaacggctcggcggcggcaagaacctccgggtgaacggcgatggctcaatcagctccaagaacggagggggtggattcggcaaccgcgacggtgaccggaggtggagaagacggtggacgatctccacactcgtagcaccatccttcgagattcttgcggacgcgtgg

SEQ ID NO: 386737 - DNA, 387 bp, Oryza sativa
  unsure (1)..(387): unsure at all n locations
ttttttttttttttttaagatgaaagcgattgtaaactacatcctactttagttacaccggccgaccggccaaaaacaaatatatatatatagaacagcggaagcttgtctacccaatccacaagcacaccgactaggggtttaccccattaagttcaagtcctagaagaagcagtcgatcacccgcatcactcaaaggctaagtctaaatccttgaatcaggaaaatgtcagcacctaaatcacttcttcaccgtttaagcaatcgtctcttgaatgaggcgcgggaaagtctggacagcggcagcggtgaagnagatggtccggcgacggtgtagagctccgggaangcggnaacgggnngaaccaattcatnnngccccgtccg

SEQ ID NO: 386738 - DNA, 514 bp, Oryza sativa
gtcgatgttacaaaacgacgagcttctttttttttaaccatagttataatatcctttgtattaacaattaaacgtggaactgaaagcttaacaacgcttaaacacaaaatatactttgattaacccacgctaaatttacctctataccccccacctcaacgctacagtaattaccgacatttatgcacacctcgccgtcgccggagccggagaagacgagacagctagacctcgacgcggcagtaggtggcggtctggaacttgaggccattggcgccggggtagccgttgccgccggaggcggtgaagaaggccgggcaggtgacgaagaggtggtagtggccggagatccagctgccgaccttccaccggacgcggccgtcgatcttgacctggaggatgaggtactccgccgcgacgtccttggcgagggcgtcgccgaggtagggcgcgaaggggacgtccgggccggagagcaccggcgaccagacgtcgacgtcgccgtggccctggt

SEQ ID NO: 386739 - DNA, 527 bp, Oryza sativa
gacagcgtaatccatggtagttggtgtagattcatggacacaatgagggtgagtgaacaaaggataggataaatattacaagtgaatcgctgtcaatcattgtaaaaaatctcttacagacaagtactacttgttcttacatttcagttgtacacttgtactggtctatggctatccttgtcaaagtgctgaaaaaaatctcatggtgatgggccatgctcctttgatagggattcacatcagacagtagaatgggcatgctcacaagtcacaagatcactcattagagtttaatcatgacaattaattgtgtgcacaaaaccagtgtttgcaagttacaacttacaactagttagcctcagtaatgaactattgattagactagcataaatggctgataagattctatcatagagtagaaattttcctctcctgagttaagctacactctctttggattttgcattttgtgtagtttgaaaacttctgaaaatacatgaatgccattgagaagatcggacgcgtgg

SEQ ID NO: 386740 - DNA, 465 bp, Oryza sativa
  unsure (1)..(465): unsure at all n locations
gggaactaaaccaagcctaattaaatgattcgtattttttctttcgtcacagtgtttgttttggttggccgtcaatccaaccaagcgcaattacatccagtacaatggccaaaccaaaaaaaaccaagagttttgatacaaaaattagctaacaaattgaactctaacaagactcttgaatcgaaacttcaataaaatcaagcttgggaggatccaacgggattaaaaagtttgaaatcaacgggaatcgagcaaatcacaaagcaaccttgatttatcgtcttgacagcgatgacaagctcgtcgtccgactagaggatgggcggtggtggcggangaggataggaaggaaaagcgagcgctagcggctcaagacgcaccatcatcgaagccgttccgccgacccgctggacaccgctgccgccggatctacccatcggaagtagaggagcgtgctatcgcggc

SEQ ID NO: 386741 - DNA, 535 bp, Oryza sativa
  unsure (1)..(535): unsure at all n locations
tttttatatctgtggctctgtaccaaacactttcaaaatcatggataacagagagtgttagagtggagctgccaaacagctgccaaaccggaaattatacttcatccgtttcacaatataagtcattctagtatttcccacattcatattgatgttaatgaatctagacatatatatctatatagattcattaacatcaatttaaatgtgagaaatgttacaattacttacattgtgaaacggaggaagtacgtgaaatggcattttctcagctccgctccacccacagagtaggagctggaccaaatgggacagcaccaagtttcagactccactgctctacacacacttgtcaccaccatcaatttcaattacatgtatagttgatgctgctactactactactgatggttaggaacttaggatggatgatcatttggtcattcggacgcgtgggcgtgagcaggcaacctcgggaaggagaagctgtcatggngctccggtggngtcggcgtcggcgtcgagtcgacgtcca

SEQ ID NO: 386742 - DNA, 708 bp, Oryza sativa
tttttttttttttttaacacatagaaatatataaaaacattattgcgtcacactgcagcttccattggtcgtaggataggttgtagtacacgcagatcgatcgggatattgcatataagcatatttgcatggctctcaaacatgcaaataaatattttatttcaactgtatcttaagttgtactccctccgttttcataatgtaagtcattctagcattttttacatttatattgatgttaatgaatctagacatatatatctatatagattcattaacatcaatatgaatgtgggaaatactaaaatgattaaaatgatttacattgtgaaacggaggaagtagaagaaaactctgtaggtacgataaactaaaaaatactgaattccttctgtttctttttatatgatgttggttgattagaagtaaagtaataaccaacgccttacagcttataatcatggcacagtagtacgcgatgggcatggatattggcctggattgcaggtcggatacggagtcggaagctgtccactttgaagcaacaccctcgcggcggaggccatcgccggcgcctccagcagcgccgccgccaagacgaatagcatcatgacgagcaccgccgccagccgccggccgccggtggtcctgagcgccaccgccatcgtcgatcctccgatgactgattttgtcacggatgtttgcgga

SEQ ID NO: 386743 - DNA, 640 bp, Oryza sativa
tttttttttttttttttacatacaaagcttattgacctttcaatagattggaatagcaattcttggaaatctatttactcaccgcgcataatattacaatgcattcacttggcaacggactataaattgagtgctttgcagagaagcacctgcagcttatttggaagataagagtgcaatacaacagacctaccaagtaggcaagtcctactgataatcaacttgctaaaatatgggtaacaagaaaaatgctgtgataactccactgaactaaaaaacaacactaggtaatgactagaaactggagggtgttggtgtttcattccttgaaatcgtctttgtcatttgctggaagccctctgttcctccaaaaaactgcaagagcactccctccaagcgccatgcatacaacactgacagcagatggaacagctacgagtggattcgtgaagtgcttttgggcaagtaaaaatccaagtgcagaactctgcatcccgcattcaatagagatagtcctagaagttgattccccaaaagaggaaacttttgataaccaatacccaagtgcaaaggcagcaacatgcagcagagcaacgggaattataagttgaccaccttgagctttcaacaccactgaaac

SEQ ID NO: 386744 - DNA, 467 bp, Oryza sativa
ttttatttgcaatgtttgggcagtatagattaccaataattaagtttgaaccagcaggtttaagaaaaaaaaaagttaagtaaacctacaacaacaggtgcctgcctacagaacacacacataactacccccccccccccccccccaaacaaaaatacaacctttttttagtgcaataggataacgcagcacatgattgatttgagtaggtcgatcgatcgacctaggcgtcgatgggcttgcagacgacggtggcgtgcttgaggatctggttgctgaactggccgggcttctcggtggggtccaccttgtccatcccgggcggcggcagcaggtcgaagctctggacgaggcggccgagcgtgatcccgatgatgggcagcgcgaggatgatcccggggcagctgcggcggccgacgccgaagggcacgaagcggaagtcgttgccgtgcgccttcacgggcttt

SEQ ID NO: 386745 - DNA, 499 bp, Oryza sativa
gaaacagtcggggtaatatctcggttttatttgctctagtatgaccaatgaaatatacatctggattctcaaatgaaccatgtgcacaaccatccatcaatctacactctcacactttttccatggccatcgaatgcgaccgccgcgcgctactccgatgtaccggaactcgagagagctccaaactttgaattaaaatttatgcaactatgctacgtatatgtacagtttttgcagtgtcgtacactacacacgtcacgtttcagaagacgaggcaggacttgtcgaggtcatagcccatcttctccaggcccggccgcaccgtgcactcgaccatcgccggcggcccgcacacgagcgcgagcgtctcgccgtcgcccggcggcaggtgctccctgagcgtccgctcgtccaccctccccacgccgtacttccacccgtcctccggccgcgccaccttgctcaccacgtaccacaccttgagccgcgccgggtgcgc

SEQ ID NO: 386746 - DNA, 921 bp, Oryza sativa
ttttgtttttttatttttttggtttgtctatgaagatccaccaaatccacatattacattataatcataattatgaatactttccttgaagagcatcattacacaaaatcctttgcctcccctcttgcatgctcaagaaaaacctaccaattttctcctccctacccttaacaaccaaaaccagccccacctaacacattgccaaagcaccattttgccatctggtaatcccttctaccaccaacagctacaagaaagagcaaatatccctgtcccctacagcaggcaattaagattgaattgcatacattaacagtgacaacaatggccctacatgattgaaacattacttgatggcttctggtcctacccacactaccacaacaaccctcttcttattcctagatcagaagcactggtactggtacaagtctatgggtggctggttccatgagctggcaccaaaaatatcacaagcacttgtagtggtggctggaattgtaggagtaggagtagcactggtgttgttcatgcacatcaggatgtcagttagggcacacagcctgctctgcagctccaactcctgggtttgcagcactgagttctgtgcctgcactgccacaaggttctgtgtggtcaggctcagtgccatgctcagctgctggttctgattcttcagctggttcacctgcgaggtgagttcgtcgaggtgctgttgcttcctcatcctagacctccgagccgactctcggttcgactccttcctcctcttcctcttcttctccatctgggcctggaggttcaggtcatcttccgacctggagctccgggttccctggctcgacccggacgaggtcccactcgacatggtcacctctcaacaattttttttttcgcaccggcaacaattttacacacaaa

SEQ ID NO: 386747 - DNA, 773 bp, Oryza sativa
  unsure (1)..(773): unsure at all n locations
ttttgttttgatagtgttatttaagaaaaaaattctgtggaaattacacatatggggcgaaaaaaaagaagtgggaaaggatgcactgtactgttcatcgttcagatatctacnaaacaggcactctaaatacggcttaatgtcacggcccaaataaccagtgtggtcagcccagttgatnagccacatataaacctgttcctccagctaacaacacgagtcaggtatgctgagcgccagatgaaccagctcacaaatcctgcaagagatatccctttcgattccttgctttgcctcagatcgactagagctttgtatcttccgacagttgccatgctccccagatgcttatacacaaaggcaggacctagatcaacgtcgatctcccagttcgcatgccctcctccagctttcatgacatggttaagcaggtgagctagatacttgccttgtcgttctgcaacctgagctaaagctgggagaacatccttgcctgtgctttcaagaaatccactgcaatccccaatagcgaacacatcccgggcagaaggaacacgtaaccactcatcaaccccaatccttccacctggtgactttggaaatggcaacgacttaacgaatgatgaaggaccaactccagtagaccataccagcaaaccataaggaacctcttctccattgtccaggattaatttgttgggttgtacatccttcacaatgcctctcacaagcctaacacctgacttagttcggacgcgtgggcggacgcgtgg

SEQ ID NO: 386748 - DNA, 548 bp, Oryza sativa
tatctcatattatctatctcaaaaccacctgtatttaatacagcattgagaatatctagaggaggtatcaaactctctcaagggccagggcaaaaaaatggtctacacctcacactacaacccttatattaactattagcaaccccagcaaaggactacatttccacttctgaaaaaaactctgaaaaaaggaagatgccgatggattgtaccaagctattataagtcgggaatcattttgattgttgaaagactagtggctaacaagaaaatgacaacatggagatttcctacttcaggaaggccgatgatacaaaaaggagtgcataagtaacacatgcagtgctcacttccaagtttcttggaccaggcagtataggcggaattacagaaaccatcaagaatgtggcaaggaaccaggaagcaaagaaggatccgaacccataaaagaatgttcgccatccacttttcagcctctgataaatgaaatagatatttgctgcacaagagatggccacctggagagttggcccttcttcagtagggaa

SEQ ID NO: 386749 - DNA, 824 bp, Oryza sativa
cataaaaatagctatatttgacatttcagaaacagcatggatacctttgtataggaaatgccatcacaagtttgcaatataaagatatacattaatcaaaacatcaagtggcaaaatttagttctcgcttatctttgaaagaaacaaaatttaactcttcatcgtaatcatcgtcatcatcatcatcatcatcgtcattaacctcctcaaaatgacctttcccagcctcgactttaccatttcgattacttgtggtgcatgcgccatctaacaaactgtcatgcccagcatcattttgtccatgtttatactcatttccagtaccatttatttctaaaccatatgttgttccatcgggttttgcttccagctgaattgcacaattccctgtcaattcattcgcttcttcttgttcttcaggagttttggcaagagaaagaaggatattctttgctttcttgtctgctgggtacccacgagcctccatttctttgaaccagatgacagcatttccaaaatcagagttccttccatgcacatccatgatggtagtataaatagtctgattgggttcaacaccctgcatccgcattctctcgtacactctcattactctctcaacattatttaatttcgagtagcccttcatcaaagttccataaacaacaacatttggcttcaaaccgtcctctttaatccggcggaagaatttctcagccccatccatgtcagaagcattcacataagctaagaccattgttgtgtaagaacagagatcaggctcaaccctgtgtcttctcatggccttgaaaactgtatgagaa

SEQ ID NO: 386750 - DNA, 403 bp, Oryza sativa
agaaccaaaatccaatcacagatagtgtaaagttgcaacacaaaagtattggattcaaatccacagcaagttaacaacaatgaacaatatgtaaacttaaaagaagacatcgtcgccggtgaactcctccgttgcatggggtggccgccgccgccacagcctcctcccccctccgtccggatctgggaggggtgggttggggtagcaagcccacacagccgccgccgacacgtacccctcccctccgccagatctgagaggggaggggtcgaggggaggggcagcgacgtggccagtggttgtcatcgtcgtcgcgtggtagtcgtcgtaggcgccgtcgccgacgccctctgcccgcgccgctgccgaccctctccgcccgtgccatcacccggacgcgtgg

SEQ ID NO: 386751 - DNA, 644 bp, Oryza sativa
gtcaatgcaagcttcaggaccggtaatcaggcccaatgtttatagtatgtactatcatatagtgtagtatcatatgataaaacccacagaaaaatgtcgctgctaactctatcgcaattgtttacctaatgcatgtgcaagccaagttctggcttagactggagatgctaggcctccaacctcccaaaaggccaaagaaacgacctgcatttcagcgagtaccaaacaaatcatgcacgtacatgcgcaagccaagttcttgtcttaaactttcgaagctaatagctcgcatgatataatgtcgcttaacgatgtgaagcaaccagatgccgacactggcacgatgttgaaaataggaaccccatcaggtgtgcaggaaccaacaccaccttcttcaagctcggcgaatgcctcagaaaatacacgggacatcacatccgcagtcactgggtgctctactgaatagtagaatcttaacatcgttaggttgtcccaggaaaagccattatctatcagaatcttagcaagctggaatgcacaaaatctagccaaagctttcaaatgctcctccgagtggtatagttgttcagttgtagaacagattttcaatgcaatatcatttgtgactgaaaccggacgcgtgg

SEQ ID NO: 386752 - DNA, 736 bp, Oryza sativa
agatcaacacatagttatatatagcatcaaatgatcttggtatacattagtgcattacagccttttttttaatactcattacaaacttaggatacaagctaaaagatcattgtatccactggggatgtacaggggttgcatctcttattggtactaccatatagtattacaaccatgccatgagatgcacacaccagaaacacttgcattacactaccttatcagctaggccggtacactacacaagactaaaggtgttcattgtgccagtgccagccccgggtccatggagctggtatgtctggcttggtacaacctgaagaacacctggttgcttcttgagctcctcgacctgctggggagtaagttttgcagagaaaccgcttgcggcgtgcttgtagtggtagagcaccgcctcctttgccttctcctcgctgccgaggacgggggcgagggtgcggatgtggaactcctcggggtcggcgtccgcggggcggtccaggtagacgatctgcacggtcgcctcctgcgccgcgggggccgcctgctccggctgctcggccgacatggcgatctggggaacggatctgccgccgcgaggaagatgaggaggaggattgggaaggagttgctgagaacgctcgaggatttggtcttcatcacccctggattccgaggtcttaatagccgtgatattctcgttctcttccgcgcccacgcgtccgcggacgcgtgg

SEQ ID NO: 386753 - DNA, 914 bp, Oryza sativa
  unsure (1)..(914): unsure at all n locations
gagcttacgtcgatgccgcgcgtagctgatctctaagcggcgcctttttttttttttttgagganactgctgttatagccaagccacaaaagttcacaattgccactgggatatacagtagatgtattacaacaacacacggacaaggcagtgaatgtccccccctcctgaatcttgggaggatctgaatttctagtacagatttgatcagcttgtaaactgtttactgttatagacagctttggatcagaacactgaacacctaactccacacctttgacaattcagctgggggtgttcatttggctctctcctgcaagaattagtatctgggatatatacaaggaagcaaatggaggttgagggcattgtacaacaggaggttaacatggtagtcgtgacaccgtcagcttgccggaccgtcccgggtggtggcgagggcaaacccgcctcgttcatacatgcgctggatctcttcccgatactcagttagcgacttgtgtgggagcgcaggcgtcagctccaccacatctcccatgcacagtttccggttagggtcacttatgggcttgtggttaaccctcgggcgcaattcctctttcagtgggaagctgtaagggctgcatcttggactattggcccccactctctccatcagatcgactacagttgagttcgcaggaagctcttggacagacatcttatcatgttcaagcataatcacaaagatgggtccatcgtggttgcactggcgagtgtaagaataagggcagtcctccgaatgcgagggaaatggacatggtggcctaatggcatcagagcggcctaaacctgaggaccgctctttgctcattgcttcgcattgccacgggcgcgcgacgcgcgatcttgcccgattccaccatttggagtac

SEQ ID NO: 386754 - DNA, 181 bp, Oryza sativa
cagaaatttctaggctcatgggggcaagattgtcatataccgcgaatttgtgatatatgtgaatgaacaaatgggggtggaagatacaagcatatcacaaaaacaacaaaatgaatacagtgtctctgggccaattgaaatcaaataccgcaaaagaaagaaaaaaaaatcggacgcgtgg

SEQ ID NO: 386755 - DNA, 838 bp, Oryza sativa
ttttgttgagttaaaaccaaaacatgaccatcttcccggaggcaactcaagagcgtaccaaaatgtcaaaaaagagaaacattctctctttatactccgtcaggttacataagtagaaaattagaacagaacctgatgcaccaaaacagagttgggcgcaatttggatgttggcaataagccaacaaactgttccatgttcactagatattgatagttacagcctcccaaaatagacaggatttattcaatttaccacaagataatcaagcctttattttactacaaaaagtaaaacaatagtacattcactcatggtcttgctttcgagcagagcagaaagagaaatgaatggggcataataagtcatgtgcttataattatcgcagccgattgtgccatcatcaaacctggcattttgtacaaccatccgtggagtggcaggagcaggtcaaaagatgaacacaacgctgtcgtggaccctgttcttctgattctgcgcaacacactctgatatccacatcaagttcctaatctcctgctcccgtagccttatgtaagcatagaaaacagcatagtggaactgctgttcaaatgacaagcacagcctccgcacttcctcctcatagaaggccttatccaacatttggctttccccatacgaaattttggcaaaaatagcctggtatggagggtacttctccattacaccacggacctgatcaacatcttcacaaacagccagttcttcatgaccatatggatacaataaaccaaagttggagtacagcttccgacggtcatctctagtcaactctgcggacgcgtgggtcgacccg

SEQ ID NO: 386756 - DNA, 709 bp, Oryza sativa
  unsure (1)..(709): unsure at all n locations
nnnnnnnnnnnnnnnnnnnnnnnnnnnnnnnnnnatcaacctccctcaggcaaacaatattctgaatctcaagagttctgaacagtgtacaatcatattctgcacaagataagaggactgctaacgttttactccctccctccgttgaaaatataagaaactattgaatctgagtagaatcatttttatccaggttcataatagtaggatatgtcccatttagtttttcttatattttgaggacgaaggtagtacaagacaattcaatttctgttatcaccagacttgattggcacaaacgatgcgagcaaaagggcgtccaaggggccacttcattattccccctagtcttctttttccccatgactactgttgacagaggccggacccaggcggcaagtgaatggcatctcaagccctatagacccgcacggcaagagttgttgctcaaaccggtccttgtcgtttccacaaacaaatttacgacccatggggtgtaaaatgtctaagtgaccacgacaaaacgngnagtcttcctgtactgcccaagaggctcttcaatgatggtgcatgcttcaacgacaggaattgggagtggaagtagcagatccgaggagacggagctgctgctgggtggcctctcagctcctgggactggaaatggcaggtaagagcagacagagctggtgctgctgggagctgtagtgca

SEQ ID NO: 386757 - DNA, 1251 bp, Oryza sativa
  unsure (1)..(1251): unsure at all n locations
nnnnnnnnnnnnnnnnnnnnnnnnnnnnnnnnnnnnnncagcaaaaatgaattgggattccgatttccttataagtaatagcaagatttcgtatacatcaaagttttacacgtttagtacttgttcaagccacaagaaacaagaggccagtggtgcttgcttggaatatgtggtctcagaaagatcagatatcccaaactccaccattgggtcagaagatccattttctttcagcaatgtacattcagggctcatctaccccacataggattcctcttttcgtctatgtcaacgaccagcaggtggtctgggttcgagccgtttggtccctctttatatagagtgggcaaatatgcgtggtatgctggtaggtagcgcgacacaaaatccatgacctcctcatcagacattcctggtttcccatctgctctcatagctatctctgcctgcagtctccactggtacacgcaactaggttcctttatttttatgaccatccatgacccaatgaacctgtcccatgcatcgtagtatgcctcaaggttcttattaaccacctcaagctgagggtccactgcttttacaacttcatttggaagaggtttgaatccaagcatccatccttcaaaaagaacaacctctaagggcccttcaacctctggccatgttgaaggatcagcccgatcacctcttccaccaaaagcagacttgtcataccgtggaagcttcatcttcaaaccttctttagttagtttaagcagcgattcaagtgtttcaactgagaacgggagatcatggcttccagcatttccacgaagctccaaaagagcatttccaggatttctttccctcaatttaccctgttctgctgccgtcaagtagaagtcatcgatagataatgtagcggcattcctaccagcaacccgaaaaagataatcaagtgcgaaaacaagagttgtctttccactgccttggggagcgctgaccccaatcactaatggagggatctcgtcgccgtccttgtacttggccctgtgctccgtgacctggtcctcgcaccagaggaagacggggatgtagaagtggtatatcctggccttctccgcctccgagaggtggagctcgttgaggcggaacagccgggccacctgcacaccgcagcgcagccaccggtcgatggagccggcgatcttctccttggtgtacccgatcctgtccacgagcgggccgctgcagatgcggacgcgtggg

SEQ ID NO: 386758 - DNA, 846 bp, Oryza sativa
cttcctttagtcttccacgtcgaaccttgttgaataactctcccccctttcacatactctaggataaaatatatcttagttttggtagccatcacctcatacaattgaacaatgcacggatgtcttactaggttcatcactgaaatctctcttcttatttgatccataagctcacatttcaatatcttttctttgtcaatcaccttgattgcaacactttgtgaattcttaatattacggccatggtaaactttagcgaaacttccttgcccaagtaattttcctatctcatatctcttcatcaaaatattccccttttgttctaccatcttatcaaatgccttatgtattcagaaagcactaatcatgtaacttagtgatgatgattgatgagggagtatcagatgagagaggcaataaatgaaaaataatttcaaccgtccccaacaagatggtaatctaacatgatggttgaactgccacatctagccccatcgtgcaaatgcacaaggagcacttgctgtgcataaacccgtacttcactatcatcaagagcacacaaagcataaatattttgagctaccttgccaattcccacacaaggtagctctctatcatagaagcacatcttccggcattccttttgttttgtgcttctagcaaaaagcctaatactgatcccggctctgtccgggaaggataaagagatcggaattaaccctgccgatcgagcagtcccccctaaaatcaagccctccaactcaaagaagatgaaaaagaaaaatatccagagaagaatgggggcagccgaggagtaggagtgagacggaggaaacgaatcaggag

SEQ ID NO: 386759 - DNA, 1344 bp, Oryza sativa
  unsure (1)..(1344): unsure at all n locations
ttgaataaaacatgttttcaattaaatggtcaatacaattatcgtttcatactgaacacatgataatgaaaaatcaaatgacaaacttttttagaaaagtacattattgattactaatagcacatacaacacatcaacacattgccacaatctctactgtcatttcacttgtcaaaatatttaacattaagactgttcgttcaatgattgtggttgtggctgctcaccttgccaagcccatacaatatcctttagtgctggtctcatctcttgtttgaccttttgatactcaagtgtatcaccatttatcttcgtaaattccactaaatgaaaatctggtgtgatctgaaatatttcagcattgatggacattacacctttccttccaggttttgatccttccatctttaacaaaccaccatttttcttcaagaattttaatcgtaaattcttcgcaacatcctcaagctttttggtgattgtcgtagctgtgttagtggatgtaaattttgattcctctttgctgttttcatcttcaaacatagcagaaagatcaaatcctgatgaaagagaaataatatcaaaagcattcaagctagtaagattttctgcttcttgttttccttcatttatattgttgcttaaattaccaaatgttgaatccatgtcaacatgcacaactttatcaactttatctgttggtatggtcttgttaagtagatctgaattaagacctactctaaaccaaggatcttccataatttctgaaactgagatccgtgtcgcagggtttggatcaagaatacgtcgcaaaagctttcggatatcagaagaaaaccaacttggccatttgaattccgctttgcatatcttcttatacatgtttatcacatttttatcttgaaatgggagataaccagccaatagtacataaagaatcactccacaagcccatacgtcagcctttgcaccatcatatccttttctgttaatcacttctggaccaacatatgcaggagttccccaagttgtgtggagcaacccatcttgtctcttacattctgcaagtgcactcaaaccaaagtctgagattttcaaatttcgattttcatcaagaagaaggttttctggctttagatcacgatgataaacccctctgctatgacaaaagtcaatagcactaattaactgctgaaagtacttccgtgcaacttcttcctttagttttcnangtngaacnttgttgaatacctctccccctttcacccatntaggataaaatatatcttagttttggtagccatcacctcatacaattgaacaatgcaccggacgcgccgccga

SEQ ID NO: 386760 - DNA, 1046 bp, Oryza sativa
tttttttttttttttgtctgaatattcagttaagaccattccaaggctccttttcgccatgcataaactaaaccaacaactaggataagcacgaaaatgaaagcttcgataaaaacggatatacccaatacgtcgaaactcattgcccaagggtagagaaagaccgtttccacatcaaaaacaacaaaaactagcgcaaacatgtaatagcgtattcggaattgtaaccaagccccccccatgggttctatacccgattcataactagaaagcttctctggtccttcacgaaccggagctaaaagtgctgaaatccaaaatgctaaaataggaataaggcttgctattattagaaatgcccaaaaaatatcatattcgtaaagcagaaacataaatgtactcccattaatgtggaataggcggaactgaattagtcaattcaagtcagcattgtcaatttatacagaatttctctcttttcctcggtgaaacaaggatcggtttttctcaaaccaaagggcttagtttagcctttgtttcctctttgccacgtcttctttaaagattcatccaatggaatcccgaccccctttctttttgatttcctttctatttaggtatggtggagacataattcttatagaaacaaaactctctcgcttcactttgtctcattttctctagaatctctagaaaaaggaataaaaacgaaaatactacgaattagagcctaattaagataggatgactaatgtatgcagcctaatgaggagtaattctataaaaataaagaactctatttcagaacgtagattgatttagatttaggtaatctatagatatagataagcaaagtaatatacttcaaacaaagtaggaatttgcaagatggagaacatcttgcagttgatttgatagaaattcatttttcttttcctgtctctataattttcgatgaatgagcctctggaaaacccccgaatctccgggagaagtcgatctataagcatccgctagtctcgcatctttttttttcggacgcgtgg

SEQ ID NO: 386761 - DNA, 943 bp, Oryza sativa
gcatcattcttaattcaatatacggtatttaactggcaacattgttcttgcaaaggccactgcgaaaacatgttcaccaaaggaagaagtcaagcagatgacagcaatgcttgagggcaaaaaactgcaacgcagaataaacctcaagcctcaattacaacagaaggagcaaattgaaatttccacatctatcacctaggagctttccacattgcaaacccaaaaaaaaaaaaaagtaaacctattttgctttatgtaattgaatctgggcaaagaatctaaacgattatttcaattccagttaacctaatgccatctaaatgatgactacaccgtaccatttccaaaatactgaactgatgccattgacattgcctgacaaacatgaccatcgagccagccatcaaaatttgcctcttataaggttatgaaatttgttattcaacacctccaatcaagtaggccaacacttggatgatactcaaataatcaataaactgagaaatccttattgatgagcaacaagatggatggatccttctgttgaaaactgagtgcaacagttgaaaactgaacggcagggcagaaacatgagcataatagatggatcttcccagcacagttacatgatcatgacatacctagttgggatactaaaggagtttgatggctatttttaatgaaaatgaagatccactgcaatgctaacatcacacagaataagaaggcactggatggagggccaagaaatgaagtccaaagcctacatatgctgttaagacttgaataactatcaaatatcaatagcaaattttaaatcagaatttgcacctcgatgcttcttcaaactgacgatcagctggctagaagatagaataatcatatgacggtgcagattttgcaaggaggaaatcaactttaaaatgaaagtgacccctccagc

SEQ ID NO: 386762 - DNA, 683 bp, Oryza sativa
cgctccaaaaaagaagatcaggattatctgtgatatattagcagatgaactttacatctttacaacattcacaattaggaattgcacaatgtactatattcagagcagcctgtgcccatgtgtgtgtgtttttgagtggctacgctgaagactccccctccccctcaccctcaccctcctcttccttccagacagggaggatcccttggccagccagcctcttgtaaacccagaaccaccaacatacttggcgtttgctctcttctcgtcgatcaggaacggctcgatggtgctcacttctgtgctatacgatgacagcgcgaagcccttcggtcctgtgaggtctccatttggaaagaaggcccagaagtaataaggcacttcatcctttatgaaggaaccctccaacctattatcttcgaaggagagctccacttgggacacgtcgtcctcagcctccagagctgccttcagcggggggatgatctcctcctgcatcatctccggcagcggcttcaccggaggcttcttcggcttcgcggccggcttcgctgcgggcttcgcctccgcggtggcttccttcttggcatcggccgcatccttcttctcactgacatttctgtttgctgatgctcctgctgctgcttgcttggttctttcggacggcgtgggcggacgcgtgg

SEQ ID NO: 386763 - DNA, 755 bp, Oryza sativa
gagatttaactgaatttgacatgaataggcaagatcacacgggctgagagtgctccagaacaaaggcatgcagattaggctaccaacaccagcctgaaactgttcatggacttgctgcatacaaacaacacagtatataccatgagccctacaaggctatatgaatactgctgagaaagggagaaaaaggtgaggtaagaatgtagaaattaatagatactgtaaacaaactgatattccaatactaccatcatcttgacaacagcttgcttaaatcagaaatccacagttaccaacagtaatataacaagagttaacttcaacagtatttatttgtgcaacttaaaagacaccataggaagccttgaagctatcacccctatgctgaagtactgaaatgagaggaaaccatgtcgttcactcctttttcccgactccatgagacatgttgtacaccccacggcctatcataaacaagctggaggcggcaagagcgaggggaatggcaacggaggtgaccacatcataacgccctttcagatacgtgtgcttggtcaagttctgaaaatactgctgctgcttaaagagcctctcgcgcggcaaaaacggtgattctgtcattcttgagacggaggcggaggaggaggaggacgacggattgattggacgatccttgcagcggcttgggggattttggatggatcgcggcgagagtgaaacgaaatggggggaggaggaggcaaccggacgcgtgg

SEQ ID NO: 386764 - DNA, 784 bp, Oryza sativa
ttgctgatgaatgatggtgatgatgtgatcattctggttttttgaatgtttcaaaaccgaagtaaactctggaagaagaattggacagaccgtagcaagtccgcaatgtgtacagctgaaaaaccaattgcatttgcaggttctgcctccaaaacgtgtttcgttccaagggtattcaccaatcgtcatgggtacaaaacgaaagcaaattttaatcgaaacatacatcacagttatatatcacggcttatcggggccaaccagccatggctggctgggccctgcctgctatggctcgatcggggtccactactccgactcctcgacggccgcctccacccggagcagcacgaagccgacggcgacgccgacgagcacgagcccgttcatgatgacggcgatcctgaatatctcaccggcggcgttgcactgcgccccgaacgcgccgccgcggctcttcccgccggcggggctcagcttggccaccaccttggcgaacgagtagtcggcggtcttgcgcacgccgagcagggtcaccttgttgagcgccttgagcccgctgtacgcgttcatcccctccacgtacgtcacgccgctcctcttcctcgccgccggtgcggcgccggccagcgacggcagcgttgtggccatggacagcgacgccattgctcgtggtggttcttggcgatggaggaggaagaggagtgtggccggcaatggcgcagggggggttggagggcgcgcgcgtgggcgcgcgtgggcggacgcgtgggcggacgcgtgg

SEQ ID NO: 386765 - DNA, 878 bp, Oryza sativa
ttgttttttttgataaccaaaaatttgaatcgttttattttgtgacggaagattccatccagtacatctcacaagtaccttgttccagaccaaatacatatatattagcataaagcaaaagagggttgcgttttccagcgcacttcaaagtgccagcttcactcgttgctgggttctccgcgctccagcttacaacggaagcaagtgttattcaccgtggatcgttatctaatccttattattgcataatatagcgtccatcttgatgagcttcgtcttggtgcatctcgtatttaggagacagggctagcagtaatgccccatatttcctttgcatactgagcgatagtacggtcgctgctgaatttgccacttccagctgtgttcagtatagacatcttgatccattttttcttatccttgtaggcttcatcaacctgggcctgtgcatcaatatagcttgggaaatcatagccaacgaggaaataatcaccacgaccaaatccagaatttccttcaagagaatccaagaggggagcatagtcataggtgccaaaagcaccactccttataagctgcttggcttcttcaaaacgtgggtctggtttgaacaagccattctctctatccttcctcagcccagcaacttgatctgccttggcaccaaaaaggaagaaattttcttgtcccacttcctctcttatctcagcattagctccatcaagagtaccaatgataacacaaccattcagagagaatttcatattactcgttccacttgcctccacgcctgaggtaattatgtcccccatcggttcactcccttggttggcaaacagaacgcgtgggtggatccacccgggcagtccgggccggtc

SEQ ID NO: 386766 - DNA, 765 bp, Oryza sativa
aaaacgtgggtctggtttgaacaagccattctctctatccttcctcagcccagcaacttgatctgccttggcaccaaaaaggaagaaattttcttgtcccacttcctctcttatctcaacattagctccatcaagagtaccaatgataacacaaccattcagagagaatttcatattactcgttccacttgcttccatgcctgcggtactgatgtgctgtgacagttcactcccaggaatgagcacctcggccacagatacattgtagttgggaatgaacaccacctttaggtatttattaacatcaggatcattgttcaccacagcaccaacatcatttaccaattttactattcttttggcattggtgtaagtcgcgaatgcttttccccctatcatgacagtgcgtggcgtaactttttgtctctcctctgcactcattccctttaacttcttgtatctgtaaacagctcccaaaatgtttagcagctgtctcttgtactcatgaatgcgtttaatttgtatatcaaaaaggctatttgggtcgattgtaacacctgtcacatccaacacatgcttggctaggcgttttttgctagccaacttagctgatgcccactcagcatgaagcttttcatcatctgcaaatttccgaagtccggtaagaagatcaaggttgcttgtcccctgatctgtttttagcggacgagtaggcggacgggttggtcccaccaggaattccccggcgggaccggcggccagcca

SEQ ID NO: 386767 - DNA, 688 bp, Oryza sativa
ggatcattgttcaccccagcaccaacatcatttaccaattttctatttcttttggcattggtgtaagtcgcgaatgctttcccccctatcatgacagtgcgtggcgtaactttttgtctctcctctgcactcattccctttaacttcttgtatctgtaaacagctcccaaaatgtttagcagctgtctcttgtactcatgaatgcgtttaatttgtatatcaaaaaggctatttgggtcgattgtaacacctgtcacatccaacacatgcttggctaggcgttttttgctagccaacttagctgatgcccactcagcatgaagcttttcatcatctgcaaatttccgaagtccggtaagaagatcaaggttgcttgtccactgatctgtttttagccattttgttactatttcactcaactctgggttgcagaaacggagccatctacgaggtgtaattccatttgttttgttctgaaatttgttgggccatatagagagatagtctgcaaaaagctcttccttcaaaatgttgctgtgtaactcagccactccattcaccgtatgggcagacactacgcacaaatttgccatgcgcactactggcttctgagcatttgagttgtctaagattctcatggagtcaatctttccctccatttccttccgggtggagattaccataacaa

SEQ ID NO: 386768 - DNA, 759 bp, Oryza sativa
ttagatgcaaaatctggaacgggaaattaccacatctcatgccaacagaataagtggtttgatagtgtcgatctagcttaagcgacacagaacctgtcatgctcatattcacattccactaacaagctggaaatcccatgaaaaatacaaagctggaaacccctaaataaataagctggaaagataatctaaataaacattactgtagcacatcgacacaaatgtatttgctgtgcccttgccaaacacacttaagaaactgatgaagtcaagctcatgtttcatttctgggggtgccagcctcttccgttgtggttgaatttggcccttcgatcgctgctctgaccgcttctgattgttcaggaccgtttattatataatttgctgttgaagcacccctggcggccatgtgctctatgaaatggatctcatcgtcatgggtgctcgcgaacctggttaagttccgtcgatggaatatttaggatcctatcgatttttgcttgatgtttcaggaaaaacgggccgcatataccttctatatacatgctttgctccactgtttgaaggaaactggagccagacaagaatagcaaacttcacgtgataatagaaaggaacacttgaaagaatctgatcagcaaagatttccgcaatgctaaaagatccatatgctgcccaatacaagagccaccgctctttttctttttgatccttcttttcaatagctctgaaagtggagtacacaggccggacgcgtgg

SEQ ID NO: 386769 - DNA, 1374 bp, Oryza sativa
ctatgcccttgcatgcagcgcgtacgtctgcttggcgcctctctttggtcgcccttttttttttttttttagtttgaaatgtcactttcttcattgactgcatttggatccaaagtttggatctaaacacagcctgaatccattttgcaattccgacaaacataccgaacaacacgaatatcatgaacaagggtttatcatgttttatcacggatatctacaggcagcttcagtagcagaaacgtagcattcagtcacgtttagatattttagatacaggcttcaagatagaatgaacatgaactggcatcactgaagcacacagcagcgaagccagcaaaccacccatcaagcagaacgaacattcagctgctaccgtcagtaggacgcgacgcagttgggtacacctgagaactcgcaaacccgacaaaagacgccacccttccgaatcgagtccccttgcgcaacttattctagttcttctttggcttcaccgggcccctgggtatcttgctcaaaaccttggcatccagcacctcatagtgcttgcaggcctcagagtgagcccttccagcaaagtggtcgaccttatcctggtacttgtcatacaagatcggcaccgtgtggagcatcaggacggcaacatatatcaaggtgaggaagtcgcagcagcttcctacttctgagagaacccagagagcaacaatcacgcccagaaacttctttaggtcatgccccaacgcgatctcccgaaacaggtgaagtgctctgtttatgtcactgcgtaatgctcgtgacacgttcacggcgacatcttcaggtatctgtactacaggaatatctggtggactcttcttgataaatgtggtagcttttgaccacaggaacaagatggccaaggcaccaatcatcacatgggaaagcagagtcaagagatggtaatcaagcacttcaaacaagatccatatgacagttgcaccaccaatcactacagcggatgtcttcttgtctttccataatagtacatcagcagttttaccgcccccaagagccttgtgcacggaggtgtcctccccgagcagcctgaacccccggctcctcaccgccggcgccggctccggtggtggcgacgacaccttctccggcgaggcggcggcggtgtcggcgggcagctcgaccggctgcggcgcgtccgaggcaccctcggcggggtcgaccgccggggttggcggcggcgcggggacggtctcctcggcggccggatcggccatgggcggcagcaaaagcagaagctggagagcaaggcgaagctaccagagagaaaggcgagagctttttgcggacgcgtgggcggacgcgtgggcggacgcgtgg

SEQ ID NO: 386770 - DNA, 985 bp, Oryza sativa
tgacatgcacgtcgcaccgctatacctaggatcctatactgtagagcgcctttttttttttttttgatccccacatacctcttcatatatggtcaaagaaaaggaaaacgatacatttgaacactgaaaaggagaattacaaaaaaaatataatgctcagtagtaagaacaatctggatccttttatacggcagaatacaaaaccacacgagagcagccaaagtgtccgtgcagtgaaaggtgaccttgatagtttctcaacgtgatccagaactctgttaaaatctgttatccacggtagcactcactccccttatgaaggcttgagttaatgcctcatggaattgagactcccgtcaaatttcgtaacagcttcattcgattttggggtctctgatctttcctctctcttcttcttttccctttccacgtattccttgagaagttccttagcctggaccaatttggagagtatgttccggtaaacatcgagatccctgtcgacacttcttttgttgatgtttagagcagcgcaaagcttgtctagtatggttggctctgttgcatttgcaagctcaagcaaacggaacaagccaactgcaaagaaccggctgtagctgaagcttcccttaccctgggccctttctgaaatatctttcagaatggcctctatttctccatctttggatgaaaactcaactaaagaattaccattctgggaacgagcccactcttccatcttttgtgcgtcagctctgtattgctcagggtcttcgtttaacgctgttatatatgctttggtgattgcatccctatcctcatctgctagggtacccgtccatgagttggtcatagccggtcacaaaaccaagagcaatcagcggggcacatggatcactgttgcttatgtctctcatcacatgttgctgcaccaaaagttcatgtagacctgtactgtaaatgcttaggataggaaggttgcggc

SEQ ID NO: 386771 - DNA, 770 bp, Oryza sativa
gaagaatctaaaccatttcttggcaatcaccaaatttacaatgttttacatgcctaatccttctctataattgacaagaacgcgaggtgaaatgatgtgaatgtgtaataatcgatatgtcgaaacaaaaacattacacgagcgaacatccagtctctgtgtgtcgctcacgagcaggagcactgcgagctcttcttcatggcgctggtctccatgatggagccgacgtccagcgtggtccccttcagcgacagcacctcgccgccgccggcgccgccgtcgcgcatccgccgtgcctcgtcgagctccagcgccctgcgcgacacgacggcgaagatctcctcgagcagcgtgaggaaggcgcggtccacgttgtcgcccgacagcgcggacgcctcggagaagaagagcccctgctcctccgcgaaccgcgcggcctcgtcggcggcgacctcgcgccggcccgccggcatgtcggccttgttcccgatcagcgccaccacggtggagccatcggcgtgcgcccggagctcctccacccaccgcgccacgttctcgaacgtccgccgccgcgtgatgtcgtacaccaccatggcgcccagcgcgccgcggtagtacgcgctcgtcaccgccctgtaccgttcttggccggcggtgtcccagatctgggccttgacgcgcttgcggtggagggagagggtgcgggtctggaactcgacgccgatggtggacttggagtcgaggaagaactcgtccttgcggacgcgtgg

SEQ ID NO: 386772 - DNA, 1064 bp, Oryza sativa
tgcagaataagatatggttaagtctatcatcaaacatacgtctattgagaacacatcagggcatcatcatacaagaaggtgaggtcctacattctagctccagtattcttaacccccacaaaactgaaatcgactcgtccctcgtaactcgaagttgctcaagaaaaatggtcagaatatcaaagcgaaggtgctaaaataaggaacctaagcaacttgtgacgcttgaaaattttgtgattcggaatactcctctttggatcgtcctctcaagcagtcttctgtttcgctgacgtggaggaaaggtaagatagagccctatggcccacaaacacaaggaagacaccaaggaagctgaggtacttcagggttgtgaaaagatccagcttaatccagaagagaacgtagagcagcagcactgctccaattccagcatggaaaagtgaggcaaatgctgcgggtgctggcaaggacgggaagttcttcaagtttaccccgagacgcataagcccaatcaagaacccaacaataggcagaagcgtgaggcccgtaaacgcaaatgagagttccttgggtggcctcttctctggtgaacggaatatgtgcgatatttccttcttcggaccaaattttgagaatggatcaacagcctgggccggaggctttggggctttttctggggcctcaggcaggtccaattcaatatggccaagggctcgtagaaatgaattctccattgcagcatcaccaactgcaagctccaggtcatatcttccagaaaggtagtagaatttctccaccaaaccaagaaagtctagaacaattttaaactgccttgcagagcctggtacaacaaataaatgctcaaccttgctttcatcatgctttaacttgaggaacacctggtgaggtttaaacgtcttcccgagtggtgtactcagttgaaaagataaccgcaacttctgcagatggtttgcagaaagagaaacactagtatctttctgcagatctatcttttgaacagactccacagtcccagcatcattatcagaaattccgatatc

SEQ ID NO: 386773 - DNA, 415 bp, Oryza sativa
ggaagagaatacagagcaacacatttggtctttgagtcagcacaaaacctttcctggtttcagctttgaaattgttggcccaaaatgtaaaatttctatctgataccatttctaagctggcccaacttaaataacaaatagtagagttctaagtatctctcagacttaaattgactgctaatctaattggaagctaattaatgggcccagggattagggaaccccggctgaatgggagtcgagcagttaactggttcagcctgaagaaaggggaggaatgtcttcagcgatccctttaccatcagcggcgtcgtaatagaagaaattcttgatcggatcacccttaccagatattgacttaatcacctcctgaccaagaatgccgccaaggattgcacatacaggaggatgttgc

SEQ ID NO: 386774 - DNA, 309 bp, Oryza sativa
ccagggcacaatcacgcaatcctcagattccgtcaagaaaaatagaaaagcgaatgattcagttatacaactccattcgttgggatagattagtctacacatcaacattgtgtcagaatttcacaaatagggaaaaggggcatttcagtgaaaaacatctggtaatcaaaatttgtgaatcagtctatgccgactaatcaatcatacgatttgctacttcactgtgttatagataatgaggttccagtactagattacgcttggtcagtaggcagcctcctcagcagtttgtacaggccaaaaacattg

SEQ ID NO: 386775 - DNA, 953 bp, Oryza sativa
gagcggagggagtagttttcaaaacctgcttcagatctagttgacgccttgacggcttcccgtggttatgtgccaggagaggccatgtaaaaatttctgaaggaacgaccaccttttggaggcaccgcacgcagacagaaaagagaacaccattgacgtcaggataaaaacaagcatagcaataccagtaatattcctcttggtattgcatttatttcgaaatacattacatccagcactcgtagtagtggtagcagtagaaactatgtttacagacgacacaacaatgaaccaaaacatacgcgaatctatctgttggcctgctctagctgagcagccttgtcctggtgcacgaagaaggcgtagaacccaccaccgattgtggcaaatgccatcgcccagacgatcacggcgaccaccggcggcatgattgccgccaccttgtacgagaacatcaccgtgagcaacgtcgtcagtccccatacaaagaccttgagccattcccggcgggcagagtccctcggcgctttctcgaagagacggaggcacgcgaagagcagcacgagatcgatgtacgatgttaatacgaacgccaccgatccacgatcgccatcggaccggtagatcgccatcccggagttgaaggtaaggaaaccgaatcccagagctgtcagccatgagaatccgccctcgttatcattcatgctcgtggatgcctcccgctgaacaagcggctgttttctcggcgacactgaagacatgcctgtgacaacgccagcttgcgaggcaggatcaaggccacagccggcctctttatctcaaatcctctcactctctcagagccgggttccggagcagacggatgatggctggggtggggggaatgatgtttctgagaaaactccccccacgcgtccgcccacgcgtccgcccacgcgtccgcggacgcgtgg

SEQ ID NO: 386776 - DNA, 364 bp, Oryza sativa
ccggtagatcgccatcccggagttgaaggtaaggaaaccgaatcccagagctgtcagccatgagaatccgccctcgttatcattcatgctcgtggatgcctcccgctgaacaagcggctgttttctcggcgacactgaagacatgcctgtgacaaacgccagcttgcgaggcaggatcaaggccacagccggcctctttatctcaaatcctctcactctctcagagccgggttccggagcagacggatgatggctggggtggggggaatgatgtttctgagaaaactcccgggggcgcgcgtcagtctaacccggatccttcaatttatacagctgggagctgcaagttccttgaattttcgtc

SEQ ID NO: 386777 - DNA, 1190 bp, Oryza sativa
  unsure (1)..(1190): unsure at all n locations
nnnnnnnnnnnnnnnnnnnnnnnnnnnnnnnnnnnnnnnnnncaccaaaactccagcaggcaaaggagtaaactcagttaggaatcattaccacattacaatgatctgtgtgaggtttctgcataaatactgatagacataccaacaaacatccttgtcagccagcggacagcatgaccaacacctctagcaaaacctacatcactgttaacaggtaaaaactatcaagtatggagcggctgcagcaaaaaagaaaggtacaaaaagttaataccagcgataaatttaaacgaacttctactgcaaatcctacaacaatatggncaggaaagccattcactttcccatgtttagtttcatcccaagttacaaaaactaagtatgatacagagagcaagaaagcattgcactattgccgctaccaacactacagacgctacctgcttcctatgtctttccatgtatccacgtcgttgctgctgctcaacatcttcgaaccagagccgtactgtgccttgagagcagccacagggtcagatacaccgctaaccaggaccccagcacccccaagccttcccaggctgctggaaccccgaaaggagttcgattccattcctcttatgaagaatcggcaaagttttctagtagtttgtgatctgatgtatgtggcgggcattgaaggttgctgaaattccgcaaacacgctgagcgcgccatttttggttgagtaaactggtacaccagctgacggtctctgacactttgccaccataaccataggctcaggctgtattgttcgcccatccatatggtcaaaactcctcatcgctctctcctctagccccaagttagcaatgattggaggcctggaagaataaaccaggcgttcccttggattactcaacaacctagaagaagctggcttatcaacctttggtgaggggggcttgcttttgcttccatgaactgatgaaccagagctttgcaaggatgattgatggctaagaatttgcccaaacaacttgacatcaccaggccgcttttgctgctcctcattcccagcacttgtcttgacagaacaaggcctaaacaagccttcacgtgcttcctctcttctcctagtcgatagaaccccaagatttccattcgaaaggcccaagctgctgggcctgccattctggaatttcgat

SEQ ID NO: 386778 - DNA, 459 bp, Oryza sativa
tttttttttttttttgaattggagatagtagttggctatattattgaacttgctcttaagcatttgcacgggtattcatgtcatgtgatcgtgtactactcctctctgcacttggggaaaaaagagagaacatggcggcaatatactagtagtagtgatactattcagcaactaatttaatcagcaccctcaactctactggatctcttcctctgtctctctattggtcatcatttgcagaaaagagtctccttcgtggcgtttccagtggttgtattgaccccatcgagcaattttgcagaggtattcacgctgatcgtctcgcagtggaacatctggaaaatctgcctccatatatgttggaacctttgaacgtcgtggtttcctgtggcaaagtgccccttccaagttggcatttgtcagatttaccttcgatacatttgccagtgaagaaatctg

SEQ ID NO: 386779 - DNA, 756 bp, Oryza sativa
ccacgcgtccgcccacgcgtccgcttgcaaggataactcaaactacttgaatcagatcagacaaaaacatcataagaatatcacgatgtgtggaggagcactgatcccgaacgactatggcgacaagccgccgccgccgccgtcggagtcgtcggagtgggacgccacaacgaagatgaagaagaagaagaagcgtggtggcggcggcgacgacgactgggaggccgccttccgggagttcatcgctggcgacgacgacgacgacgacggcggcgtttccatgttcccttctggtgcagggacgatggagacgaccacagaggtggcgccggccggcggcggtggtggagaggccgcggcggcggcgaatggtgaggcggagctacccgtaccgcggcgtccggcagcggccgtgggggcggtgggcgtcggagatccgcgaccccgtcaagggcgcccgcgtctggctcggcaccttcgacaccgccgtcgaggccgcgcgcgcctacgacgccgaggcgcgccgcatccacggccacaaggcaaggaccaacttcccgcccgacgagcctccgctgccggcgccatcgcaggcgccgttctgcttcctgctcgacgacgacgacgacgacgacggcgtggcccgtggaaacagcccggcgtcgtcgtcggcgccggacagagccttcgcttgcacgacatcttctacggtggcgttcggcgagcgaggcgatgagctcatactgctggagtgct

SEQ ID NO: 386780 - DNA, 1137 bp, Oryza sativa
gtctcgcccttttttgtttgttttttcaatgactatgctcatttggatacattgcaaaatcactatagttaatgattccgctcattttggatacacaacttctcgaatatgctatattctcacgacattacatccgagttggctttcttacagttacagtttccaagcaaattgttgataggttacaacttacaagcaaaagacagctggggaaacagacaacatgtccactctctaccagcagagtgtgcagagtttctaatctggcaaggcagtccccctttcaagattgttcttgatctcaagagtatacttgccaaatgccctctcaaccttcttgttgaagtgttcgttccggtcattgatcgagtcaatgtccttgtcttcatggaacttgcgcctcctgctgaatgctttccgtttctcatcccgttccttaagctcattaaccatcctgtctatgttttcttccgggaccttagacaccttcccatattggagacttgaagcgtcccgataaaattcaggatcggcttcctttgctttgttgtatgcctccatgtcaacctcaatgtcttggtcctctttttgtatgcatcatataaggtcttctggttgaaaacatcccaaccatatggtgcaggttccttttcccacttcttgtatttcgcttcggccgactcctgtgtatcgagcatgtaagactttgtcatgtccaggccatttgagtcaagaagctttccgatcttcttttttctgtcttccagccacttttgtttagaaacacctctactctcagcgcgaggctccatcctcttcttctctgccaccatcgcttgctgatttgccttcctagcttcattcatcttcagccgcaactcaaatagcttcttctgcttctctgtcatctgcgggtaaccgtcgtctgagccggcgtcctcctgctccgcatcatcatcaccaccaccaccctcagcttgggcagcatcggatttgccagcgtctgcagaaggcggttcttgctccgcacgctccaaccctgatttggcgtcggcgatcctcttgaagcagtactcggagcagacgtggtaggggttggaggcgttgatgcagtcggcgtggacggtgcggtccacc

SEQ ID NO: 386781 - DNA, 1062 bp, Oryza sativa
  unsure (1)..(1062): unsure at all n locations
ccatccaccatatatggnctatgtgggttggctatgtccaccatcaccctggccaattcacatgccggaaatatttatgtataggaaaggattacaagccctaaagttcgccaataggaatacatcgcacgaataagatggtttcgtaatgcatatgcacaataagatggtttcaggacctccatagatatattaagtgattttttggtccttctagatcataaaagatgtgtaatttgttatatatgaatgagtttaagctngtaccagttctgtagggggctctggaccaaaagttgcacccagagccaattggctgctagcttctgggtggtactgaatcatgttgtttataattgtcagccgtactgcttctaacaactctggttcaccaattttgcgaccagtcgacctgtacagtattcctgtcactctaggcaagaactgatatgtgcagaaaagtacaatgaagaaagatgtcacattctgttgtaagtagangatcaaacttttatggtatatattcctcatgtcaagatttacgtatctgaaatatttagaaaagaacattnacttacaattttgttatagctaacttaatatgcttgccagtagaatcgaggcagacgctagctttcacaacatttagccctaaattcttcagggcattcatggtatcaagaagatcaccgagacggtcacccaaagttatctctacaatggtcgcatccggatctgagtcttgatctattataactttcggggtaggaactgtgtcagtgttgctagagctcccatcctcgtcagccgcagaggaagcagctctaggatccctgacagcaggagaggacagcctcagcccagcgtgcggcggcggcggcgcgagagcccgccacgcggcggggcggcggcgccggtggctggtcccggacaccgcccgcgagacgccggagcagggccggagggcggcggtgactgccatttcggccatggcaagaatcggagccgaggaagggaggggtggatcccactcccaagaagaagaaaaggaagcagctaatg

SEQ ID NO: 386782 - DNA, 1271 bp, Oryza sativa
  unsure (1)..(1271): unsure at all n locations
aaattgtcaaatctttcaccacatttatttattggtaatctttgttaatcagataatggagagaacaatacagctacatttcaccagaacagttgatgcatggccccccaacttgctttcttatttaccatcaaacatgcatcctaaataccaaaattatcaagtgtcacatgcttgagaatcgcactagcatgtaatcttggaaggcttctgcagttaatacagcagatgtcctaccttcaaatgggaacagcttaaatttgtataagccataagatcaagtatacctccaagcttttgataaattgtttgcatatttcaagaataattttgatgatggtatcaaatccatgtatcacaaagtatctgaaggtggggggcttcctgtatttatctgcctagtaactgccctcctctgtcgtcggcctcctcaagaaatagcgcaagctattagcaagaacctgctgcaaggctttgatcaatggtttacccctataactgacatggaattttgctttagccagtaggccctcagtgtcaaattctccagattggacggtgatgttgatgtcatcaatgatcttaacaaggtcaaccaacaaacctggtcggtcagctgtttccactacaagtaagcttctgtcagggccatcatcatatatgtctatgtgggttgctatgtccacatcaaccagttctgtagggggctctggaccaaaagttgcacccagagccaattggctgctagcttctgggtggtactgaatcatgttgtttataattgtcagccgtactgcttctaacaactctggttcaccaattttgcgaccagtcgacaattttgttatagctaacttaatatgcttgccagtagaatcgaggcagacgctagctttcacaacatttagccctaaattcttcagggcattcatggtatcaagaagatcaccgagacgcgggtcacccaaagttatctctacaatggtcgcatccggatctgagtcttgatctattataactttcggggtaggtactgtgtcagtgttgctacagctcccatcctcgacacccgcagaggaagcagctctaggaaccctgacagcaggagaggacagcctcagcccagcgtgcggcggcggcggcgcgagagcccgccacgcggcggggcggcggcgacggtggctggtcccggacacccccgccgagacgccggagcagggccggaggcgcggtgactgcattcgcgnacgctggtcgaccgggattcggac

SEQ ID NO: 386783 - DNA, 1046 bp, Oryza sativa
  unsure (1)..(1046): unsure at all n locations
tttttttttttttttagctaatttaatttaagatccctctaccatatgaaattattgttaataaaaaaaaaggtgtcccaaacatgagaaaccaggaatcagctggtgtttcctcctcctttgatttgtatatactatatatacagttatgctaagttgctaactatgcagaaatatatctgaatgaaaagcactgcatctcttaacactctgcagtatatatgaactactacacagtgacagccggagttgaaagctcaggcaacccactttggccattcagtacaatcaccttcccctcggaatccacatcgacaatggcagaatcaccctccttcacctccccagctagcatcttctccgcgaggctgtcctccaggagcctcatgatggccctccttagcggcctcgcaccatagctcgggttgaagccttcgtcaacgatacgctccttgaacttctcggtgacctggaggtcaatgtccttggccttgagcctgtcaaagacctccttgagcatgatctcggcgatctccttgacctccagcttggtgagttgcctgaagacgatcatctcgtcgagacggttgaggaactcggggcggaagtactgcttcatctcctcgacgacaaggctcttgatcctgctgtagctgctgtccttctcatcgtaatcgagatcgaaacctatcttccgaccacccttctcgatgacgctgcttccgacgttcgaagtcattatgagaagtgtgttcttgaagtccactgttcttcccttgctgtcagtcagccttccatcttccaagatctggagcatcatgttgaatacatctggatgcgccttttcgatctcgtcgaaaagcacgactgtgtatggcctgcgtcgaactgcctcagtcagcggtccaccctccgtgtacccaacataccctgggggtgaaccaatcaacttggatacagtgtgcctctccatgaattcactcatatcaagcctgatccggacgcgtgggcggacgcgtgggcggacgcgtgggtcgaccnnggaa

SEQ ID NO: 386784 - DNA, 939 bp, Oryza sativa
ctcgatgacgctgcttccgacgttcgaagtcattatgagaagtgtgttcttgaagtccactgttcttcccttgctgtcagtcagccttccatcttccaagatctggagcatcatgttgaatacatctggatgcgccttttcgatctcgtcgaaaagcacgactgtgtatggcctgcgtcgaactgcctcagtcagctgtccaccctccgtgtacccaacataccctgggggtgaaccaatcaacttggatacagtgtgcctctccatgaattcactcatatcaagcctgatcatggcctcctcagatccaaagtaatatgctgcaagtgcttttgcgagctcggatttaccaacaccggttggacctgcgaaaatgaagcttgcaatcggcctgttcgggttcttgaggcccacacgagcacggcggatggagcgacttatggctttcacagcctcatcttgaccaatgacacgctgatgcaaagtctcttccatcttaagaagcttatcggactcgtcacttgataccttctctactggaataccagtccacgaggatacaatgtgctggatatctgcttcattgaccagtggccctgtctcccctgattcagtctctgctttgctcatctccttgctcttgtcaatgagagctgttatctgggccttcaattccatttcacgatcacgtaactctccagccttttcgaagtcctggctacggacagcttcattcttatcttttgtgatttgcttgagctccttgtcaagctctctagcttcttcaggaacctgggcatgtcgaagccttacacgtgaacctgcttcatcaatcaaatcaattgctttatctgggaggaaacgatcactgatgtattgataagatagcttggcagctgaaatcagagcatcatcacggacgcgtgggcggacgcgtgg

SEQ ID NO: 386785 - DNA, 647 bp, Oryza sativa
gggcaatgcaaaagagagtttatttcatggataacttatactgattacattcggatgaatggcatttactgtagctcaaccaaaattaccacaccagcaaaagaattacagtcttaatgtacacaaaaatgagggggagacaaactccctgaagagtttgagtacgcaaaatggatgttatacacttggctgtcccctaggaacctctcctcgatttagagtagatcccaaatgctaggaggtaaggaggaacaatgaggaagacatgtatatctggagataagctttgattgcagcacagatgttcccttcaataggcagctgtcgctggcaaaactctacaaactgtaacaagcatggtggcatgcaagtactgtcgaagtttgcttctagggggatagaccgaaagaagacgcaatttctagcaagtgctgccctgttgaattggttatgaatactatagggactacaggctgaaacatgatttcgttgtcgtccagttcaaggtcatagcatgtttttagttccattgctttagattctgcagcttcagcttctttccgcagaacctcaacccggacgcgtgggcggacgcgtgggcggacgcgtgggcggacgcgtgggcggacgcgtgggcggacgcgtgg

SEQ ID NO: 386786 - DNA, 1202 bp, Oryza sativa
  unsure (1)..(1202): unsure at all n locations
nnnnnnnnnnnnnnnnnnnnnnnnnnnnnnnnnntgcatgggaaagatgtgacaatctgacaattgattgcagctgaaacttgatctcagttcaacaacgccactggccaaagctacattacaaccgtcgaaaacgccaattggcacctctgcattgctttgcatatatgttacgaaaggcagtagactgtgaaatgtcaagctactgcatcttttgataatattattgatcgctagagtttgtctagaagaggaggtaactagcccctaatggtgaactgttctcaagttgctagacacgttccgtgaaggcaaacccaatgcttcagcaatacttttcacctcagcgaccattgcgacgatgtcgttaagtttgttgacagcagaaccaactcccacaccggcagctcctgcagttactgccattggtgcagtcactgagcttagcccagatgcacacatcactggaattgtgacagcccgagagatggagtatgcagcggccaaagttggtgttgccttttcaattaatccaagcactccaggctttgttggactagaacacttccctccttcagtttggatgatatcagcgccttcctcttcgagtagctctgcaagtcttacctgatctaggaggctcagtgtatgtggaactgttacggacagtgttatatctggaagcatttcccttgtctccttggtcagcttctcagaagagaattcgatgcctgtgtcataaaaagaatcatagtttccaatctcaatcatctttgctcaagcttctaccgcagaacggaatgctgaaggatctacggaggagacacaaatcggaagggaagtaagctccagagcaagctttactaagtcttggtcacacgctatatcaacatgggtggcacctcccttatctgcagccgagacaacagaggcaacactactcctgtcgaaattctgaagccctgaaatgatcttgagagctctcttctcgcggaaggccttgaggacggcgtccttggtggcatcggcggcagccgaggctctcacggcgaacagagctcgcggtgctcgccgagaagccggccggctcgccgctgccgccgtgaaggacgatggcgcctggagaagtcccagcgaccctgccgccgccattgttgctcctctgctgaagtgtttcagaaagngaagcggacgaagtggaa

SEQ ID NO: 386787 - DNA, 592 bp, Oryza sativa
gtgcttatctttcattcttccttttgatttagtaacaaaccatggaaatttgaatttacatcaccataacacctcaatttgatctaaaacttaacaacaaagcacaaatgctaaataattaccctgagctcaaaaattcaaactacaaactaataatgctctcaggagcagattcggacatagatacaggaacatacaagcaggctcactcacaacatgcgaagactactcctgaagaaaagatcaaatctgcagagacgaagtcgatcaccgtgtgtccctggagcggctggcaacatgcctgagcagtgcctgccctgactgatgcgcgaaatgcttctgcctcagctgcacgtacgggtagcagaggctggacaggatgtgtgctggcttcgagaaggacattacctcgtaccacacctgaacgtcttcgtccagctgcaccgagaacctctcctcccctgccagcagatggccttgtagagtgccgctaccataagcaaaaacgcagccttttccatggcctgaggagttgcctccattgccatcggtcacataggcaatctggaggggcaacatgacggacgcgtgg

SEQ ID NO: 386788 - DNA, 475 bp, Oryza sativa
tggattataaaggtgcgccatttattcaggatttaccgacctggtacagggcaagcaggtaccacgaaaagtacaaaatagtattatcagacaatccaaagcatctgaacatagtgaacttctccaaaatctctaccctcctgcccccagggagaaactgcgaaaacccaaatgatatcgccattcagatatcaatattcatttaactggtacacgactgtaggtctaagcaccaaggacgtgaagcatgatagcattctgggcgtgcattctgttctcagcctgggggaatacgattgagttgggagcttcaatggcgccggctgttacctctatccctctctgtgcaggcaaacaatgcataaggaaggcatttggcccagccatgtccatcatagcttcatgcaccgtgaatacttggaacactatatttgtatattcagcttccttcttttggcccatgctgggccagaca

SEQ ID NO: 386789 - DNA, 1118 bp, Oryza sativa
ttttttttttttttttttgatcgaaatggtgtttcattcgttttcaccattacaacatctcgattctgcgtaaagagcaaaagtaaatgtttatatatgactttgcgagtcctctgatttactccacatagtagcagattacaagaaacaaaggctccacgtaatatatagctggaattccttttccaaatgtaaaagtacagattttttactccattgcctctctttctcattatccaacagccggcgttgtatatacatcgaagtccttcatctgccctcaatggcatcatggcatgtgccacaggccaatgtcagccattggatcatcatctcctcctcaattcctccatgccaagacagtgaatgtgccagtgttcatccaataagcagattggctcagaggattagtgacagagatcaggtaatgctacaatgtgttcctctgccctacaaatttccgtgcaacaccgaagatgagagccttggtcaacagcccttgatcaagagtgcaagccagagcaacagctccaccgagcacaaggaaccttgctactcggtttttcgcgggtttctcttctgcttccacaatatctgactgatcgtcgttggattccaatccacgaacaaaattgtcaccgaccttggtattgatatgcgccatcaaggcactctgagacaatggctccccagcagctctcgctttctgataggcccgaagtccaggttcgattctctttacacacccccacattccctgccgaatgccaatctttgcaatctcatagggaatacccatgtcctcatggtggaacaggagaacctcacaagccgtcaatccactgttccctcttcttgattccactggacggatgcaccagcttgaatagtatacatctactctacgaggtttgttacgacgtgggatggatgagcatggcacaccctttgtaacacaatagtatgcacctcccagtttccatatccgacgagcaatgatgtactccctgtcactacaaaagaaggggaacttgcggacccaatgcactttcatcgtgcctgttgtctgacactcttccaaagtcttatgatagataagcatatcatcccacttgttg

SEQ ID NO: 386790 - DNA, 1083 bp, Oryza sativa
tgatcgttcgacaaactcaagtgttttacgagtgccaggcacatcttttgggcgaagaatacaactcggaaaattgatttgcagtcggatatcgttcaattcaacatgcagtctcgcagttggcatgctacacttttgtacttgtaatattggcatctttggtacttgataaatgcattttaagttgatcacggggctaccattatgtgcgctccctctattaattaatatccagagttgttgctctgtgacattcctatcacacaacatatgtatgcgcttatttgcaagggagactgtcgatcgtaacatatgcacttcatgtcggcctttgggagcactgataagctagttcttcttgagctgtcttgatgcatcaagcagcacatggaggtcgctaattaattggtctgttgggctgcagctgatacttgagccgtctcagctgcttcctgctcagctccactggcgtcactgggcacatccacgaccatcttggaaacacggaacatggccaggtggatgtcgccaaaaatgaggaggctaccggggtcgatgggagtggggaaacccgggctgaggcgcctctcgttgatgtaggtgccattcgtgctctccaggtctgttaccaacaggctcccctctttcttctccagccgtgcgtgcgtcccagaaactgttgcgacagacaggacgatgtcagcctgttcaggaacacgacccaccgtcaccgccgcctcggatgctatctggaagccgccgggtcgtgcgacgcggtacccgatatgacgccaatcgccgtctcctgcaggctcaagaacccatctttctgaagtggcggaagaagacgcgctgtcagtgccactggaagagcacctcagcgacaaaatggaaatgcttcttctgccactcccgttgctgtttctgctggttagctgactgacgaactgcagccgcggctgctgcagcttcgccccattggaggcgtagctgctgctgcaaggaggcggcagtgacaagcaggaggaaggcctcccggacgcgtgggcggacgcgtgggcggacgcgtgggcggacgcgtgg

SEQ ID NO: 386791 - DNA, 452 bp, Oryza sativa
ggctcccctctttcttctccagccgtgcgtgcgtcccagaaactgttgcgacagacaggacgatgtcagcctgttcaggaacacgacccaccgtcaccgccgcctcggatgctatctggaagccgccgggtcgtgcgacgcggtacccgatatgacgccaatcgccgtctcctgcaggctcaagaacccatctttctgaagtggcggaagaagacgcgctgtcagtgccactggaagagcacctcagcgacaaaatggaaatgcttcttctgccactcccgttgctgtttctgctggttagctgactgacgaactgcagccgcggctgctgcacttcgccccattggaggcgtagctgctgctgcaaggaggcggcagtgacaagcaggaggaaggcctcctgggtgttgggctagagaagagcaaggaaggagtagccactgctgcttcca

SEQ ID NO: 386792 - DNA, 457 bp, Oryza sativa
  unsure (1)..(457): unsure at all n locations
nnnnnnnaaaccaactttcgatgccatataaccaattctgccaactattaaaaatattactccagtctttacagttgtaatgggttctatatgtgagcaacacaactggtgtgactcagtacttcctatgacgacagtggaataataaaataatatcatttctctaatttatcggacatcaaggatgcccggaagtgacccgtgatcacttcacctaagaaagagcaattcaaattgctaacagtataaaaaaagaagatattcaatgcgctagcatagcgcatcagtctctagagacgatgcaaaggtaaagtgaaacaaaacagcaatctgatcctacaacaaaaatccttcagaaattttcccttcaactcggcacaagcgttaattaggtggcatgtcacgtttctcatcaatcttagggttctccctgcggcgcagttcaaagcgcttccca

SEQ ID NO: 386793 - DNA, 970 bp, Oryza sativa
  unsure (1)..(970): unsure at all n locations
ttttttttttttttttttccaatgattacatttatacaggagatgataataataacatgagtaataagagtagaggctgaaaatttgggagaatatatgtgccaaactgctcaattaagctagctatgagatctgaatttgatagcagtgccaactgcccatgcatatataatactagtagaaaacagtaataatttaaaacagtcttggtttatgcatggtttgatgtgctgaacatcaaggaagcaccatgtagatagtagaattaatatgaggtaggatatatatggaggaggggagaagacaggatgagcaagaaagaagaagatagagattacagagggcagggcagacgaactgcagaaatgaagaaactaaagaagaagtaaaaattaatcggtggtgatgtgtactccgatgacgatgacaaagagggtgatgagggcgaagtagatgatggagtggacgacgatggacatggcgctggtgtgcaggttgccgaactcgacgaagtggtgcctcccggggagctggatgagcagccccggcgagagcagcacgaacagcaccaccgcgatcaccaccggcccccagtctgacatccttcctaatttcctttaattaatgcttgctttgctttccttccttaatccttcttcctcctatttctttcccgatagagcttccttgttgttgttgttgttgttgttgttgttgttaggagcaggagggtagtaagtaagcgaggcgagcagtagtaggagcaggtaaggtagggtatgcagatgcaaatgactcactcactgtactagtattggcaacgtacgtacagtacagagagaatgaaagagaaagaaggtgaggtgcggttcgtgggagtggatggatggaaagcacagcagagaagagaanagaagcgcaggttattaggctcgaattcgaccggtgcctgctctacactgcaactgna

SEQ ID NO: 386794 - DNA, 704 bp, Oryza sativa
  unsure (1)..(704): unsure at all n locations
nnnnnnnnnnnnntttttggtagcacaagacaagaggcaagctagcctctgtttattattattaccgttgatctcatgaagcggaaatgttcccaagtagtgccttacaaattaacaacagattatttaatgtacaacatagctgcgagcttctcgagttgaccgtgagttcacaacagcttgaaagcttcagccggaacagctcagaccttggatggtggaggatcctgaataccgcagagcaaattcgcgggcacggctacatcgatcatctttggataggccaagttcaagttgtccataattttcttgaatgtttccttatcctttgttagtcgagcattatacgcaacctcctcttcaacagtacttactgtgaaacctttgtagtcatggccaggataaagcagggtatcctttggcaatgtgaaaatctgcgaatgcaccgactcatacagctcatcagaacttcctccctgaaagtctgtccttccccatgcacgtataagcaaggcatcaccagtaaaagccattcttggtgaaggttggatcgtcgcctttcacctgttacataagtcacacagccagcagtatgggccaggagtagatcgcacctcaaggaagagggttaccgaagtatattcgtccccacgctcaataaaatgtccgcccacgcgtccgcccacgcgtccgcggacgcgtgg

SEQ ID NO: 386795 - DNA, 573 bp, Oryza sativa
gttacataagtcacacagccagcagtatggccaggagtagatcgtacctcaaggaagaggttaccgaagtatattttgtccccatgctcaataaaatggtctgcttttgctttgcttacttttgcaatcacggactttactccaggtaacttagtctttattaatcctgttccagtgacatgatcagcatgcacatgggtattcatagcatagactagcttcaagcccaactccttgataagattgagatctctatcaactgttctgtccacagggtcaatcaacacggcgggtttctcggggtccccgacgtcggcgaggaggtaggtgtaggtggagctctccttctcgaacagctgcctgaacagcagcctcctcccctccccggcggagccgctgctgtaccccgccattgcgagcaccaccggcagcagccgcagtccccgcgagatcggcctagcccgaggagcgcacgacgatgacgacgacggcgcggcggcggcgcaggcggacaggtgcgggatcaggcggcggcacgagcgaagcagcgccaccatttggccggacgcgtgg

SEQ ID NO: 386796 - DNA, 710 bp, Oryza sativa
gggcaatcactgagctgattcgcatagactgaagcttatttaacaggtcgaaaccagatacaactgagggtagtcatagctcaaagcacaccatcatattggatcagtacatacaaagcgtgcgtattgacaccgtctaattggattagtacattcgaagtggataagtaggctttggttcaccagtccatgcctaaattccttgaggtaaacagatcttcaacgtagagaattactggtccagatgctctgatgaaagtctgcatttgaacctttgccgaattttcatcttcattcaatttcttcaggagctgcgattttgagggaagggcgtacattccagcagcaacggctttccttatggcccacccatggtgaggagcaaaaacctgagcataagccttagatgctgcatcccttaaggagttgccctctgtaaccagtatttgctcaaacagaattttaaccatatcaatcccacgcttaaccctcagcatattcctagtatggctcccagcttgcctgacggtgcccttctgaatgtccaactcaaccatctcaggcaattttgagattgacttggatgcctccagcaaatcatcaaccttggcgacgtagtccatctcggcgaacttgaaggcgatgccgaggcagccgaagaggacggagacgttggagcaggcgcgggcggacgcgtggcggacgcgtgg

SEQ ID NO: 386797 - DNA, 647 bp, Oryza sativa
ttagagcacagaaatggcgtaggaagattataataacaaagcttgttgtgatgatgacagcattttctgaaacagaacacatgcatatgatcactgctgtgaatgaagaaaacaggtaacaactaacaacacagttaaatcctgattatcaacacaagagttttgtcattcttatttctttgttgcaagaaaaataggtttcactgaaaacaagaatcactggaacaaccagagaatttttcttaagcattcactgggcttctgatggtgcgctgttcagtacttaatggtgcttgttctcaaataggccatcgggtccccatgggaactccttgttacggatgtgcagataggggtacgccggcggctcgtcgaagtgggggtggcccttggagaggttgtacgccgccagcagggtgcaggtgacgatcccggcgtaggtgatcttctcccacttggccgtctcatgggcgtcgtcgtgggcggaggaggacatgcgcgcgcctcgcccccgggggcggcggtcgccttggcgcgcgccgccagcgagcggaggccggatctcgccgccgccgatgccatgggggaaggtgggtggtggcgccgctggttttgggggaaacgggtggagagatcgagaactagtc

SEQ ID NO: 386798 - DNA, 667 bp, Oryza sativa
atgcacgcttaggttggatcctatctcttatagcggcctttttttttttttgggttggtttattttattagaggcatcggtttttctctttatttacaattgttttatgacagcatatgacatacatacatgtttagagctgtccaaattgtcaactgacaattagcctttttgacagccacaaacactacagttgcatatcagcctatcagctattcatcgtccagtacaacgacaacaaccatgtgaactacaactagcagtaaaatacatgaaacaaagtgcatcctggcacaacgctgcaatcgaatgaatgcagcataagcaccctggagcattatttgatatcaaaatacctgagcaaacgacactggaaatgagaggttcacctttgattggtagcagtaaataggggtatcggagggcatcctacaaggatgatggtaaggcgatacaagccagaaagcatcaggctctgatggtcacactgcacagacataatcctggtggcttgagctcagatgtgcaccactctgatcccgttggtgcagcgggatcatacatcagtgtcttatagcagggctcttcatccagagagaacagcagcagctccccatcatgtttgccgaaaaaaaaacgagtactagaactacctgtgagtggcact

SEQ ID NO: 386799 - DNA, 375 bp, Oryza sativa
tttagcaggaacccacttttcatatggaaaaacagaccatcagaaatagcgaatgacagtgtttcagacaacaaggtttacatacagcaagagctgacaaatcttttctgacaattagcctctttgcccgccacaaacactacagttgcatatcagcctatcagctattcatcgcccagtacaacgacaacaaccatgtgaactacaactagcagtaaaatacatgaaacaaagtgcatcctggcacaacgctgcaatcgaatgaatgcagcataagcaccctggagcattatttgatatcaaaatacctgagcaaacgacactggaaatgagagttcaactctgattgtaagcagtaaatagtggtatcggatg

SEQ ID NO: 386800 - DNA, 412 bp, Oryza sativa
tttttttttttttttaagcagaggcagggcatgcattttcctgcaaaccgcgcgtcaaaacacgctagtacaatacagtagtaagtacatattcacagtccatgatgatgattgggttaagtctggattcctaatacgctacctagtctcaattttgcattttacattcatacacaagggatcgatgcgaggaggaagattttactttttttttacataggcaggcatgggtgatcaccgtaactaaaaatttgtgaggtgagcggccatggccgtgaagagacagaaatcgcgtgtgtgcgctaccagcactggtcggtctcccaggtgcggcgtgggcggcggccgtaccagcgcggcgcggcggcgggagccgccatcgtccggtggtgcgcgccgcgcgccatggagg

SEQ ID NO: 386801 - DNA, 456 bp, Oryza sativa
ttttgccacataagccaatgctgttctcatccatcatgtaagctgaacacagtgaatcagcacaatacagatggactccaggacacaagtgttcaattgtcaacatttctttacaagttatctaaacctacctatgatggtgaacactctgtccgtagctgcaacaaaaagggtggttatggtcttgtggaacacccataatctaccaaatggaaaggccaacaaaaaagatcaataaggatgacctgacaggagagcaaattgataatacgcagcatacttgtagcagagtaccaatatttaaagtctgatagaactaattactacccgcgtccacgggagttttctcctcttaggtccttttaaaggttcagcattaggtgagtcatcctgctcagctgcatcctctgtactggtgtccttgtccccaatagcttcctcatcagcaggctcaga

SEQ ID NO: 386802 - DNA, 902 bp, Oryza sativa
  unsure (1)..(902): unsure at all n locations
nnnnnnnnnnnnnttggttttttaatcgcacctgaggtcacaaattgtttatgctctattacgaaattattacctgcctgtgctggattccataatttcataatcaaagacacaatttgatcgaagcagtgctcaagttttgcagcccactagcactgaaccccccacaggtgttactgacattattcatctacagtctgtctacacaccctacaacatcggcggcaaagtagcaaaacgaccccctgtaccatctcccgtctgcagctagcattgcatcgcagaacctttagaagatgtttgatctggatcagttcagggaatcaacaagaaacgattctacattctactacccagcaccgccaaaagagcgctaatacactcgcgaacatagctgctgaacctagctccaccaacagttgcagagaaccatcaatctgcatcttccacccaaaacttcgctgtcacagatcacagtccagggcgattgctgctttcatcagtggctggttgcaagggcggtcaccagaaggcccaagacgaagaacggttgcgcgcttgcctggtatttgacgtcatacttcacagggtccttgaggaagtattggaactgaaagaccacctgaggaattgtgagtcctagcagtgccagggcataataaggcttgccggaactgaaaaggtagcctgcaacggataattgagttatgtcaatcgctcctacacatatccactttgcagtttccataccaaaagcaaccgggagtgactgaagccccagagctctatctccctcaacactcttaaagtcatttacaatagcaatccctagcccagctatgctatacaaagaagtcaggacaacaatatcaggagtaagggttccaaacccacgcgtccgc

SEQ ID NO: 386803 - DNA, 2199 bp, Oryza sativa
caatattaaccatagcagctgcaggataaacacggtgcaaattaatctggcttttttcagagaacaaggtctgttgatatataattattctgtttttatttgaatacacataaacgatcaaactgtgaaacggtacaggatctgagataattaggaaactacagagcagcagctacaatattaaccatagcagctgcaggataaacacggtgctaaataggcaggctttgttcttctttcacagcctggatatctggaaggggaccatgacttcagtcatctcctccctcatgataatcttcccaacctggaaaaggtcggagatgcctagctgcgtcgacagatgccttcggcaatcctctgcagcaacaatgcctgaagaataagctccatgcacggacccagagtgatcgatgcaggcggcctccccagcgaaaaacaggttgcccaccggagcacagaatctttcatacaagtcagctggcttcccaacaaggtcgcaggaataagaaccaagcgaattcgggtcggttccccaccttgaaaccaaatactggaccggttcagtagctcctggtagcattttcttgagctgagacatgacaaagtttacggattcttcatcggatagcttctcgaattcatatgcgaatcttcctgctaccatgcatacaagaaccggatgccctgtggctttgtgaaggttaagaaagtaaccgcaggcatttgatgttggggcaaccctgcctagcacttctacatttggccaaaatacactattgaagcggagggctattttgttctcaatgccaataccaagatcagatattgatgaaagcttccaatctgggagctcaggttcaaacttgatgatatttgctttaagtacaccaagagggacagttattatagcagcatctgcaacaaagcttgtcccatcttcaacacatactatagttttgttgtacctctggatgattttggtaaccctgtggttcaggtggatatcaagatcttgcgcgagagctttgataacaggatcataaccatgcaccataagcccatggccaccagtaagaacatgttcctgatcccaatttttcagagatatattatccacatctgtggcaaaccatgcctccagcctacatatgcaccactgcagtacttcatattgcaaaccatcaagctttaggtgtggattcctgtcaagcacaattgagatggcttgaataagaggcatgtcatcttcatgttcagctcttactttcaccgtctccttaagaattttctcaaatgtttccccgacttttgtcactatctcctggggaacttgacgaccatccttatcaaagagagcatagctctccagatcatggtcatatagcacagagttatcaccactggtgcgatataatctaaggccaagcaacctaatcagtggtgccaatgaattctcattgcatacaccatgcaaccaagatgctcccatgtcaattgggcagccaaaagaatagtcagtatgcacacggccaccaagtcggtcccgtgactctaatagtgtgaccttaaacgaagcattagacagcgcacgagcagctgcaatgcctgaaatccctccaccaatcacaatgacagaagggggagaggcattttgcccatcaatgtgacgaagaaaaagacctccggcggcgaagccattagaaggctggtccattatcctcccgatccgagttgcgttcgacggcgacgaggtggagaagatcgaatcgaatcgaatcgaagcagagagagagagcgggatcagagagtgtgggggacaggcgagatcggctaacaattagaggaggagattaacgagtggtcgcggccaccacgtataggaagcgagaggtagaagacgaagatgaggaggccgtccatggagccgcggcgggggacgctcgtggtcggcgccgcatgggtaacccctctcatacccaaaccagctcgtcgccggcgagtcccctcgccgccgccctccccacaccggcgttcccctccctcggcgccacgccgccccgccgccgccgccgcgcgagccgagccgagccggtgctagtggagagcgcgagagagacacagcgagagattggctcgagccgaagaaaagcccgcacgcgtgggtccggccattccggcccggcccccgccggcggg

SEQ ID NO: 386804 - DNA, 1109 bp, Oryza sativa
  unsure (1)..(1109): unsure at all n locations
agtcatgagccatgacaattagataatgtgtcttttctctccgacaaatatttctctagaggaattactcaagaagttcagaaagtactggaatccattcacatgcccatccttttacctcaatttatttacggaataacgactcaaaacatggaaagagaaacacgcaaatcttagcacaggcagaacaactcaaaacactcgtcagaggaggtcatcagaccatcgctctcagctcccgagcagagacgtcaagaaggccagccctccgatcaagagcatgatgttgaggaagtagttggactgcagaggcttgtccgggctgcctccgaatccctcgtactccgccctgatcttctgcttcatcgagtccgacagctccttctttccgtaggagtatttcgcagcgacgaagggctctggttgcggtgctgcaccgttgttgtcatccgctggcgatgatgccactgctgctcctaccgttactggtactggagttggttcagcttccttcttctcctcgactggtggaggtggtggtgctgctgctggcgctggtgctggttcaggatccttctcttcgacggctggttcatcgtccagtgaaaatccctcaggtggatcgaactttgcaccaaggtcgctcagtttagcatgagcttcagcgtagtctttaaagaatgcctcctgatcctctccgtatttttcggcatataccttgaaggacggatcctcaaataatgcagcatctgtgggtagcactagaagatcctggtccctttgctcttttatgtccttgaagtaactgttatcaaacttcaaccattcaactgtccatgattgccctccaggttcaccaggcccatccttagtatattttgtttctggctttccccagccactcctgtcaggtcccccccccccaagtgtgtgtgctccagataatgcaacaatttccttgtcatcaaggcccatcctgtagaatacctccctaagatgatcagcgggcacacgtggaccggcatcaggaagcctcccctctggtgggcactgctcagctgctgtccanaacaacccacgcgtccgcggacgaatgggcggacgcgtgg

SEQ ID NO: 386805 - DNA, 547 bp, Oryza sativa
tgcagcgtggctgcagcctggttatgattactgttaatgttgctactactgctgacaatgctgctgctgcttctcctcactgtctccacttccttgaacaatgcgccgtcatgcttcttttgcctcccgctgctccagaaagctaggccgcagatcagaaccaccacagtcaatatcaccaccttcctcttatagattcggaatctcatgataggggctcagcctctgtgcgagtggagagaagtttgcaggcgagctgaggagcaattgcaggtgatatgatgtgctcggctcaagaagcgggcccggagaggaagaagtcgtgccggggctaattattggcaaaacgagctcttgttgtaaacattgatccaactggaatgtcactaatggcgaatcaatattccataaggcatgatggttgctcagaggcaggagaagagcaacgaatacgatcctataaaagataaaacataaataaacagtcttgattatattctgggtattaaagccacaatcagaacaaatatatgctttgtatcttttc

SEQ ID NO: 386806 - DNA, 749 bp, Oryza sativa
  unsure (1)..(749): unsure at all n locations
nnnnnnnnnnnnnnntttttttgtcctggaatcatcaggtagtactccactttttaattcactgttaaacagcagacaaaatcactttgaattcatttcaaaattcagaaccaaaacaaaacactcgctaaacaagaccaagcaaaaatcaaaatcaaatacgcgacattgcgagagcatagaagcaatcgcagcttattgttacactacattataaaacaaaaatatcaattcgtcataaagcctcagtacttgtagtccttgacgtggaggttctcggagacgccctcgccggcggcggcgtcgccggcgtacgcgccgagcgtcgcctgggagttggccctgcagcgggcgagcagcgccgcctgcgccttgccgacgttctccgccttgccggcccacgccttgagcgtgctctgctgcagcgcgcggccgaaggagaaggtcagcgaccatggcttcttgcccctgctcgccacctggttcatggcgttcaggttcctcgtcgcctcctcctcgctctgcccgccggacaggaacacgatggccggcaccgccggcggcacggtgcggaggagcgcgcggacggtgtgctcggcgaccacctccggcggcgccctggcggcgtcggagcccggcgtcaccatgttgggcttgaggagggtgccctcgaggaggacgtggtggtcgctcagcgccttgtagcacgcggcgaggacgcgctccgcccccgcgccgcggacgcgtgg

SEQ ID NO: 386807 - DNA, 1174 bp, Oryza sativa
  unsure (1)..(1174): unsure at all n locations
ccatacagtgcagtatctcgtgcaagngaatgtaatgtacagtttcggtagagtagacagtttcgcggcatgcggagtgagttatacatgcagatttcgttcattgagagcaaggtaaggttatgatgcgaaatgcgcatagagcaatacaatatgacaccgacatgatacgatgatagtaacagagggaaccatccaaataccaaaggtcgtttccatatctctaaaaatgcagggaaacgattatatatatgttctagatatatatatatagccagcatccagcgaagagaagattactagattggcaaataacaaaggtagaaaaggagaggttcaggtaaggcttcatctactatatgtataagggggtggaggggtcatcatcatcctccttggtcatacagaggcaggcaggcaatggtggtggtctgcttcatggggggtcaggtactcaggtcactctagtagaagacggcgttggcactctggtagccgccgtcgtagatggcctggctggctccggcgcccatccccatggcggcagcctgctttagggcggcgtgctgactcatcagggccgggttcgctgccatcttgctcagcgccagggtgcgctcgtaggctaggaggtcggtcgccgacatgccaggattgaatggtgctggtgctggagggggtaggggcgcggatgctgtccctggtggagttggcttgcttccccaggaacacttgatctgcctaccgccaataagttgtccattaccagtctgaattgctagagcagcttcttcatgggtgctgtaacgcacaaagccaaaacctttatcacgcgttacacgcacctcctcaattgaaccaaccccaagtgaatggaaaaatctgtgcacatcattgctgttgacatcatgaggaagattgccaacataaacagtcgtgtactgtgggttgttttcaggaccatcttcatttgcattatcctttccaccttctgatgaaccatttgtcaactctatcatacccttggagtctgtattttgtttctcttcaatagcattcgcaccctttgttgcccaattgcagcgtacttgacggttgccgagccacttcccattcagttcatttatggcatttctgtgcgcacgcgtgggcggacgcgtgggtcgaccgggaa

SEQ ID NO: 386808 - DNA, 657 bp, Oryza sativa
ataagttgtccattaccagtctgaattgctagagcagcttctttcatgggtgctgggaacgcacaaagccaaaacctttatcacgcgttacacgcaccttcttcaattgaaccaaccccaagtgaatggaaaaatctgtgcacatcattgctgttgacatcatgaggaagattgccaacataaccagtcgtgtactgtgggttgttttcaggaccatcttcatttgcattatcctttccaccttctgatgaaccatttgtcaactctatcatacccttggagtctgtattttgtttctcttcaccagcattagcaccctttgttgcccaattgcaacgaacttgacggttgccgagccacttcccattcagttcatttatggcattttgtgcgtcctgctgatttctgaaagaaacaaaaccaaaacctctggatcgtccagttttctgatcccacattaccctagcatctgagcaactggtaaatccagcgaaaaaagcaaacaaagcagcatctgttacttccgggcaaagatcgccaacaaaaatattaaaatggcctgatgtatcctctctttgagtacttgcatatgcccaattgacttttattggctggccaaacacggacgcgtgggcggacgcgtgggcggacgcgtgg

SEQ ID NO: 386809 - DNA, 551 bp, Oryza sativa
ggggttgggttttgcataaaggacattttcgacttgatatattgcaaatgtcgtgaagcaaaaacagtaccatcatcttccaaggatatgaagtgccactctcgctgacaaaatggcaagtgcattctctcttgccccttcattccagaatcggtcgttatttatacacaatgaaggtagagagaattataatacgctcctagcttgtgtagttagctatgagggactcgattgctgaatccttagcacgtacgtctttataatggattcgatagccatgaccaggtaaaaaccactcgaagtctaacttcaacaattttctcatgctgtccagctgcaagcccactgattgcttgctgtacataagaaagagatctaaatcatcagattcttctgattttgcaacatgatctccagtgaaaagcgcctttactggtttgtagaataagcagactgaaccttcagtatgacctggggtatggataagttcgaaatcagctccaatgtcccatgggccatttccagtaagtttccactcaacatctgcagta

SEQ ID NO: 386810 - DNA, 1135 bp, Oryza sativa
  unsure (1)..(1135): unsure at all n locations
nnnnnnnnnnnnnnnnnnnnnnnnnnnnnnnnnnnnnnnnnnnnggggtggaaagcacaacaccacgactatggcgaaacaataacattaatcaatatgtatataacattacatgtttttatgcaaagagaagaaaaagaaacaggagggtaaacaaggaacttttatcaattttatgtgtaacctcaggtccacgagtaaagctgaaatcatcatttcgcatcggaaaccgatgacagaaatcttgacaacatgaatcctaggaccgaaaagacaaacccgcatcatatacagacgcagacaacttatgtgagataagcttctctccactagtcaagtcggccagttgcttctctcaccatccgcaccgacgacttcatggtttagccatcatcttggcccacgtgtttgggtgcttcatgcctcgacatagggggcaacttatcttggagtcgcattattgttgatataagcattctgtcaccaactatatgccttaacttcttcactaggtcgactcggcttattttcttgctcttgaattcttcgtaacaactgttgaccatgtccatattctcagcagaaactttggttgaaatcgctgcaaataacatggagaaaggcatccaaggcgtgcttggagccctttccactttatctcctaacatgggggcttcataatgacctcccaatgctggagaagcctgaaggttcatgtcctgtgatacactatcaggcgaaccagagctcaagatcagtgatgaaacctctgataaattgtgacaatcttcttcggtggcaggagaatctttgactctagaaggcaatttgatggtgactacaaattcagaatagatgtgactattcacattcatatcccacacaatgtaatgttgagggtttttaatgtcatctacaccactatcgaaatactcgttactaggccgatgctgcttagatccatggtgaactatttctacgttccccattacaacacggcacaacatcatatggacaatgccattttcatcaacatcagagtaattcacacaggtattggagcaatttgctggagcaaggattgtgccaattccgtagtctgggcacttaacagtcttctcaaagtgcatgacac

SEQ ID NO: 386811 - DNA, 573 bp, Oryza sativa
tctgttggttctacgtccggtaagctgaatctatttcgctgaccgtgcgtcttgcctgatcctaggccgaaaagcaacccgcatcagtcgccgccgccttttgtgagataagctttctctccactagtcaagtcggccagttgcttctctcaccatccgcaccgacgacttcatggtttagccatcatcttggcccacgtgtttgggtgcttcatgcctcgacatagggggcaacttatcttggagtcgcattattgttgatataagcattctgtcaccaactatatgccttaacttcttcactaggtcgactcggcttattttcttgctcttgaattcttcgtaacaactgttgaccatgtccatattctcagcagaaactttggttgaaatcgctgcaaataacatggagaaaggcatccaaggcgtgcttggagccctttccactttatctcctaacatgggggcttcataatgacctcccaatgctggagaagcctgaaggttcatgtcctgtttgtggagaagaggatgtttgttatttgattcttaaacccacccccggacgcgtgg

SEQ ID NO: 386812 - DNA, 1145 bp, Oryza sativa
  unsure (1)..(1145): unsure at all n locations
nnnnnnnnnnnnnnnnnnnnnnnnncacgancatcgcagggtaaaaattattggcaccacgtcacaatcatgggatcacatttccgacagtcatactcaacacaaccaaaactatacatatattgtacttcggtctcatcctttgagtcagacgacagcaaaatacatcacgaggttttcacggttatatagatcgctgttcaaaatagtacttaatagagcaggacacactgacgtcactgagcaagttgacaatacgtctggttggtgctgatggactggctagttatcactttgcatgctcctgatcatgttcaggatataaaggaacaagttgaggatgtcaaggtagagctcaacagaggcccaaatgtagtcgtcataagtgtggcgctttatcaagttctctgtgtcgtagatgatgaaacctgagaaaactaaagctccaaggccaccaaacaatgcaactggtccagagcccaatgggaagaacacctgaataaagcttatcacaacaagtaaaacaagagcagaaaacagaattggtccaagataaccaaattctttccccttctttgaagcccagaaagtatacgcagtcaaagaggcaaccacagctgaggtcaatattaatgcctcaagcacaattttcccttgagtgttagcacatgccacaccaatactgaaactcaagcacaacgtgaacagacccaggtaaacaaagttgtgtgggtgtttgtgctgataatgatacaatgggaccatcaggacgaagggaaggacggcgagcacaagggcgagggtcggggaggaggagagcgtggcgttgagggtggggtggaggacggtgagcgcggagacggcggtggtgaggagcagctgcgcggcgaggatgccgtacaccttgcggacgaacccccaccggagggcgctctccccgcgcgagatccccgggtacagcgtctccccggtgccggcctccaggtccaccgcggaggcgtccaccttctccttcatctccggcgcccggcggtagcccgccggggccagcggctgcatctccgccgccgacgccatcgcttccgacgcgcttggtgggtgggtggggggaatcggggagagaggaggaaggaggtcaggagggg

SEQ ID NO: 386813 - DNA, 1063 bp, Oryza sativa
ttttttttttttttttcaagtaaaagcaatgattgataggttatattcacagaaattagtatcctgaccaagtcattacaatggatggggaaagaagaaaaagaaaagctctaatatcatatagctatgatataataaaaagaatgggaggtgaaacaaaagtcctctccgtatgcagctccattcatcctatactcaggaatcagcttcagggcaggtgaagtaatcttcactgcccgcacagcatcatccatcagagatgggtgacgactcatcgaaaggcgtctccgatccatctgtcatgcgatacatgcccccaaacatgtatagtgtaccgctactcctcatggagtatgtgtgccgatggagatagtccggtagcgtgatgccaatgaagaatggtgagtaactcaaaagtccaatatggtcgaagtgaggttcatcaatggcccgagagcgctaggagcaaacttcctacgaaacagatagcagacagaagtgggcttcgagttgtaagtgcatcgtgtaccgttattcctgatagcctggatgaactcttcactgatgtttgaagcaccatatcttgctgggtgtggacctcctcttgaccaatcaacccatgtgatggtcctgttggcattcagggacccatgaaacaaatgcagataggttggtatgtaatgctcatccggataaaccaagatggtctgcaatgcttcctgaagattgagtagtacttgttgtctgctattatccgcaaggccagttccacggttgagctcaaaccactctgacccttttctccattgactcggcaagatgtgaggagccatccgccggttgtagcggccagcacattgaggggtgtcaatgttataggactccacgaagctgtgtgccgagtttatgagatactcatagacggttgggaagttgaacacggggatgcagctctccgagagaagaacgaaccgctcattggagaaatccaacaaggcattggtccagcagccgcttctcagcatcaacaagggtgatcgatccccaggacacttcctgcagt

SEQ ID NO: 386814 - DNA, 487 bp, Oryza sativa
ttgcttcacaactggactctatgcagaggatgttttgtcatccatttgagctgatgatttacacgtcaagcatgtcaagtatagtacaggacatgaactctttttagtgctagtgatcccacatttacaggtgcaaaaagatgaaaaacaaaacgaaaaatcagaacgcatcaactggatacaccatacccaaagatgtacttaaaaaaaacttgccccccaatgagataatataaggatcggactaaatattgatacaacaaaacactcttccttttgatatcatataaacagctcgattccatctcctctaggcctggtaatatatatcttgtacagatatgccgtcgagatcaacgatgaactcggtcttcagcaacttatgcctatggtgccgatggtgaaggcgaccatggtggtttgaggtctggataattcgggtaaggcgaaagaggtctcggagctgcaggtggcgccgcctttgggg

SEQ ID NO: 386815 - DNA, 1225 bp, Oryza sativa
  unsure (1)..(1225): unsure at all n locations
nnnnnnnnnnnnnnnnnnnnnnnnnnnnnnnnnnnctttttttttttttttttttactagaaagacatacttgtacatgcaagcagagcaaggcgaccatatgctcttgcagatcgacagtgcaaacaaaaacaggcaccacaaaggcaaaaatataacagaaccgggtgagccctgtggctctttcttactagccttctgctattttaactggacaagtaattaaccatcaagcacgctccaagcttcaccagcggtatagctcttttccttgtcacacgctctcaggatctgcctcttgttgaagcaatggttctgtgaattccctggtatcgctgaccaagaccattcgcatctgatgtcctcatgatcctcaacctcttcacagagctgacaaacatttcccaaggaacatctccaacgagcatccagtcaccatccctgtcctcgtaggtgagctggtattcggcagagttgtctagtagtttcagcgagtttgtattatgagaagcgcaaaggccaatggacggcttcgtgaacatgagttcaagggctaatgcaagggtcttgtatgagcggtgcgcattgagatccaccttccttccaatgacctctccatccatgttcaccttcacccatccagcaacccgtcctttcttttcgccctcctccttgtccttctgcacatcagattcattggtggcggtcttcttggtgtcggtttcagatgtgttttctttagcctgattgaacaggctggttcaatcctgaactgtcggatcgggtggccatcccaaccaattccaaagctgtgtcggatggccggaagccaaccgtccccaaggcgaaggttggtggccggtgggggcctcaagcctttttcccccccggccgccgccgccgccgcgggggatgacgacgacacggaggagtccggtgacagcgccgccgccggctgcaggtccctggccgtcaggattcggcacggcgcatgctgctgctgctgctgtttcttggagccaaggctgagcccgagctccagctcctcgtcgtccccagctgagctctcctccacctcctccgcctccgcctccgtccccggcggctcgccggcggtgggcccagctactcctcctctcatcggcgccgctgcttgctgcttggcttgtgcgtgtgcgtgtgtggagtggagaagaggacacggacgaacacctcggacgcgtgg

SEQ ID NO: 386816 - DNA, 457 bp, Oryza sativa
  unsure (1)..(457): unsure at all n locations
nnnnnnnnnnnnnnnnnnnnnnngtnagtgaatgaaactccagggctaattcatagagatttgtgaggctgtgcaagagtcagtagtaatcaggtaggcacaaggatcatcatcaaacaccataaaaactactagaaagacatacttgtacatgcaagcagagcaaggcgaccatatgctcttgcagatcgacagtgcaaacaaaaacaggcaccacaaaggcaaaaatataacagaaccgggtgagccctgtggctctttcttactagccttctgctattttaactggacaagtgattaaccatcaagcacgctccaagcttcaccagcggtatagctcttttccttgtcacacgctctcagggtctgcctcttgttgcaagcaatggttctgtgaattccctggtatcgctgaccaagaccattcggcatctggatgtcctcatgatcctcaacc

SEQ ID NO: 386817 - DNA, 649 bp, Oryza sativa
gaaggaagaatggagtacggcttcagatgtttcatgagggattatggaaaatatatcttacactgtacttaaaacagagacaaacataacatgaaatacaaaggtatgtagaaataaaatctagacttacatgagtgatgtacatggacaacattctacaccaaagaagaagcatccttatgagctgaaagctcttgagattgcatatatgaagtccaataaaccagtccccttgagaaggcctttcccagttaaaagttcaaagtctattaacaagagaaagccaattataccgcctttcccattaattagttcattcttattagtgaaaccaaaacctccgacatcctcatcaatcaccattctcacctcttcgatattgacatcggatgcagtaaatccaggttgtgctttcccactgaatataatctctgcggatccaccggaggtaacagccccccttgatactgatgtatatattctccccatcgattttcacagggtacacgaatagttttctcaatgcaggtgtaagagcccttaaaacagggttgttgggataccattcctttatttcaccagtacgaagatcaaatgtactatctgttgttgggcaaacaatgcagccgtcctgggtgcggacgcgtgg

SEQ ID NO: 386818 - DNA, 789 bp, Oryza sativa
aaaccaaagcagagggaggtgcataagctcaagcaacagtgtaatggttgcggaaacattgcaaatcacgctaatacataccgcatgttacatatacattgcactggtcttagttcttactaccaacgtgatcaaaacgacacagctcaagtgccaatcggccacacttaatttacacctgaagagggcaatccatcatccacggccacacttaatttacaccggagaaggggcaatctatcatccatggaggctaagcagtcgcaacgacatttggcctggtcatggcttcctttctccttcctgccagaatccttttcagcaagttggtgttccccttctgcttgctcggcataagtgctactaccttgagagcagcctcatccttgcaagttccattcacatcgtagggcctcattggtggtgccaccggcattgggtgggaactgcatgttactgaatcatcgcctccgttgtcgacagagcaacttctttcatgccgcgatcttagttccgcgcatatgatctccttggttttgggggagctgaggtaatcgaatcctccatcatccatggctagcatctcgtttagcgactgagaccggggttttcgctcagactgaatttttgtatgaaccactttgtcgaaaaggatcgcatcctttggagatgcaagtgctttcagttgctttcccaggtttaggattgtctcctgacactcgataagcttctctgatgctgttgagatctccagccgctgtagacacaatggggaaagcggacgcgtgg

SEQ ID NO: 386819 - DNA, 892 bp, Oryza sativa
gaagccacagcaacagggataggtttccaacataacaaaccagaaaagcgcacaaagtacagatcgaactggtgatagaatttctatcatttacaaccgtggaaaataaaatatcgtgcttaacgacgctacagacttacggcaacgtaggatgctgcctaatacatccctaatagatggttagtttgttgtgctagacatatttaacattagctaatggtcaaggtgatgtcaccgtggcagtagacaacaaaatgccacatcaaccattctggtgcatcccttttcatccttagattgactcctggaacatccatttgtttttcgactggaggaatcagatgaagaatttacaccttgttgtaataggagtaaaaaaaaaggaagtctaaactgtagttagtgatgtatctgtgatattgatatatgtgtgccgaatgctgatgattgaataccagcacagcaacccaggccttttcagcgtggcataggttcaaaaacaacctacttctccaatcatgaagtatctaccgcctcgatgttaatgttttccttccagtcttctctgaaaaacctttgagcagcatgctctgacgaaatgtatgatacttttctaagctagtcccagcccacctcttgcaaaatcgctcatctgtaggcacaaaggagctaagagggaatggacccttaggagctttcttcaatgaaacaagaaaacggtgacggggacggattctctggtcaagggacaagctcaagtacataggatactttgtcaaggattgaacatcgtttttaaggtcattgaccaagtaaagatactttggtttgagattttcctccaaggacaaagacaacacctgagtcagactcgtcaataccttgagaacat

SEQ ID NO: 386820 - DNA, 613 bp, Oryza sativa
  unsure (1)..(613): unsure at all n locations
ggacgaagaaagagaaaattgcgatagattgaaatcacccaatacagcttgtactcgtccatgcggtttcgggggaattgaatagcactactagaaaaaaaggtttttgcaggcgccaaaaatagtttttccaggtgggggaaaggaccgcctatacgcaaaggcttgcaaaaattattttcgctagcgacacctccatcttcgcaggcggtagattcacccgcctgcgaaaaacattacagcgtataaaaaaaggggtgccaccgatggctctcctcctccatccgccggtctcccccacaaccggcggcatcgtcgtcgtcgcgtcggcaccgttcgagacagtcgtcgccgcctctcctcctccgtccactggcttccccacacgcagcgttgtcatcgtcattgcgcgtcgccaggagaagggggagccgagctgccgcttctcctcctccgtcccccctcccccagaagcgtcggtggcggcgtcgtcgtcgtcgttgcgtgtcgccgggagaggggagagtcgagccgccgcctctcctcctncgtncccccacccccacacacacaggcggtgttgtcgtcgtcggcgcgtcggtgccgtcgtcct

SEQ ID NO: 386821 - DNA, 585 bp, Oryza sativa
tacagtatgaatccgagtccggccacgacatatattggatatcaaaatagttccaaaactttctgtacacggtcggtttacatcttcagccaagaaaaacacaaaacctataagtcctgatatattcggtatatattcagctgcaggtaaactctcaagtctcaagtctcaagcggtataaaactctatccggcaaatgtcagtgtcattttgacaaaacggtaaaacgtttgctaccattgtcgctggggtaagtaaaaatctgatgcctcctctccaaagtctgcagccatggggtttctttgcaagttgcaacctactcttctcagatgacacagatcagctgttcagatcacatggggtgagtgatgaagtagttgtagtcatggtgctggactccgagctgcttgagccaggaatccgcggcgccgaagagggagaccatcctgtcacggtcccctgttctcgggttggtccagagagaaccctgcagcttgtgcgccgcgagcccgaacggagcaagatgagtcttgctgaccttcttctccgtctcgtcgtttcgcttcccgttggccggacgcgtgg

SEQ ID NO: 386822 - DNA, 734 bp, Oryza sativa
aatccaagagacaagggatggtttatctataatttgattaaagcgacaacattgtgcatttcagatagcttatcgcatagtcttaagaaaataataagggatagttaaagatgaaactacaaagatcttatgactaacatatactatcatttattgaaatacatatcacaactaagataagttatgacatcttccaccttccagcagcatagggatcatccaaaggcaagggaatgacagcgtgtgcaagtccccacaagagtcagagttgttgtaggtgcaactttatcctcgatgtaccttcgtccaccaatgccagctcttccggattccttgagcacagcgttgctaacaggccagcaaattcttcccattactttccccagaacacctatcaccacctctaagtgtgtccaacacaagacgctcaagtgaggcagcggctttgacaatgcaacatgttagctcaaccaagctcttcgcggagttgaaccctatgatctccacactcttcaggcattcatggctgagctcgggcagctgcctcaaatgtgcggaagaatcttcaacaatcgattcatgcctcatatcttcctgaaaaacatccaagtataaagtctccaaggaaggagacgcgtgaaggaaagaaaccagaaagaaataatcataggatggggaaaaggtccctcgcgcaatctgaatggtcaggtgcttgaggcagagcggacgcgtgg

SEQ ID NO: 386823 - DNA, 467 bp, Oryza sativa
aatgatgctagccgcgcaatctgcgcggaccaccatgctagttattattattataccacatcattacaattccagcatttaacgactgaatggcacaaccagctcaggtagacgaaagcggttagagactacccagagttcagcaaaatccatacaccacgattcacgccacagtaatcaggtttcaagggcgccaaagttcagggcaagagaaagaggacgatgtgcacgatgccgcctaatccttgtacttcatgtcggataccccggacgcatgggcgtcgaatgaagtggcaaacttctccacctccgccctgaggtcctcaatgtccttgttgttctccaggccctcgttgaagtacttgagaagcttgccacgctccttctgaacatccaagcagatggtcactgcctggtgaaggaactcggcgatctgtacaaagtcctcctctaccaaaccccttgat

SEQ ID NO: 386824 - DNA, 1236 bp, Oryza sativa
gttgttctggtggtgctgctgctgcggcgagtgctgcggctgctgctgccggtggcggtggtgcagccgctgcagctgcagctgcccaaccttctgccgccgcaactagtgcctctctgctcctgaccaagacatttttggcgggaaaagatgaagggaaaaaaccgagaccaactcggctaatcctgatacagccatagttaaattaattattgctaccagattaggcatcactgcatgagaggatcatatcatatgtatgcatgtgcagatgggtaaaaagatgaagatgatattgttcactgttgacaaggaaatgttatgctaacctgcagatgggctgaggtaacaaacaatatcctggtatccaagagaaaagtacatattctaatgtaggagtatataattccaacattaagtaggatgtacaagcacagaaaacaaccaaaagttagttatcttggcacatttgcgcacagttgctatgggcaaacaaagccctatgagcaaattgagcatccatctgctcaccaacattaatcagtactactagcaatagcaagcctaacagaataacagcttgcaatactttagaagaggctactatgttaacaaaaggtgcgagatgtagtgttagtcctgtcacatgtgatcctttatcttcatgttgatgcacatatgcagggattagttccaggtaccccactgccatctgatccccggataccttagcgtccaaactgatgtcgcggcttggcggatatcatcgctggagtcggcatggaaaagaatggtcacctcgcaagatggagcacagttattcaacaagggtgcaagatgaggaacatccttcaatggcggtagatgaaacaggagtctcctcaaacagcctctaaactggttgctggtgcataacatcaggcaatgcgtcatttcacatgaaaaccgaggggccaacttgacttcgctgatgccggcatacagctgaagaagatactcgggcttcactgcttcaacaagttcatatttgtttgtagaagtgggcagctcaagctctaatgtagtgatatcatgattctctgcaaatacttgcaagagggactttagatccaatgactctatccgcagatttttcaaactcacaaggccatccggcttggacatttggtccaagtttatcaactgttaacttcagagtaaacatggatggggtatccaaaatgagcggacgcgtgg

SEQ ID NO: 386825 - DNA, 1096 bp, Oryza sativa
agggaaggaaatttccttttccataaacaattaatgtagttatgcatccggtgaatctccattttcataacacatggacttggcaattgcgtagtgagttacttatgttggccacgaacattgtgaatgtgttgattgatagattaattaagatgaagaaaggaacaaaaagtttgacggtccaggatattttcaagaagaggagagggtgtggatgatatttttgttgaacgggtctgaaagatgtgtcaaaagattgtcgattggtccaacatgagtcacagatgcttgcacaataaacccaagcatagcaaccatagccaacctcccattcttgatttctttcagtttcgcttcatctgcattctctatatccttggccagtcctagtggattaaacagtggacccccagggtagcctggctgtgaacctgcaagtgcagcctcgataccaaggaatgttccttcctctgcttgtgatcctggattgataaagtccatgtacctcttggtttcagcaaatcccatcaagagaagctggacaaagaagagtgccgtggtgttagcgaagtcgaattttgttgcacctgcttcaaaccacactggcaggttgttgattcctgatacacgtatcaaatcagtcgcaaggatgccagcaacccctgccatcgcaaaccggcagtgcacaagttcggcttgaacataccatttcaagtttgccggttcctccccgagacccaggggatcaaatccgaaatcgccaggtaatgtgccgtcgaggtgaggaggtggatcgagcccaggcagccaggtcgcacgctcggtgctagctcgcactgcaatccgagctcgtggagactgaaaaacatggtgtccaggaatggccgccatgcttctgctcaaagctgtaaccggctttggggagagtgtgcaggtgtgcaggactcggccatggctgttagctcctaacgacgccatggctgccgccgctgtaagattttggttgcttcagtgttgccgccgctgcaaggggccttcggacgcgtgggcggacgcgtgggcggacgcgtgggcggacgcgtgggcggacgcgtgg

SEQ ID NO: 386826 - DNA, 782 bp, Oryza sativa
  unsure (1)..(782): unsure at all n locations
tttttttttttttttaatgcaaatttttcatatgtcattgtattagagagattaaattttacactataaaatatgatacatcctcaagagcctaaaaatcactcttgtattgtattaaaaactcggaatattatttcactcaccatgtttttatctgcataaaagctagtatatcaataagtaaaatctttctagttcgaatacgaaacctgtagactacctctgtttacaaaagagaaagatatataacttatcaaactgacttgtttctccttgaccaatccgagcaagtgagcagcatggttagattttcttcagcttaatttgtgcaccatgctgtgggtggagagttatcacagtgaatggtgcgtggatgtacgatggtgaaagctcaaaggagaaccgctgaaggattgtacagatagccatcttggcttccaatagtgcaaagttctggccgatgcagattcggggaccccatccaaatggaaagaaagaggtctgatacttcgttgcgttggagatgccatcagcaaacctccctgggattgaattcacctgcatcttttccccaaatatcgggatcctggtgaataaataaaatggggcaacataagggtcacttcagcgggatattgatgccgccgagctccatttcctgtanggtncgtctgggtcaagaacaccacggggggtaaaacctaaggaacctcgtacagaatcatgttanaatcttcagacggcttaagctaaccaaagnccgggggggggtccttccaaag

SEQ ID NO: 386827 - DNA, 643 bp, Oryza sativa
agcgccacatcatgcgatttttttctcaatcatgaagcattgctctactgtataattgtgtgctgtatatgaggcactaaaagtgtaaaacatgctctacagagaaacattacacatttattttcaccatgacacgttgacaccatgcctgcaagcacacattgttgatgtttctgctgttccgttctattaatagacaggtcacccaaatcaagaaattgacaaaaatagtaaacatgctacacaaactaaaagcaagccagggaaaatcaagagaaaccttgaaaccgacatcatacaacataccacaaaagaataagcatataaaatcaggcctctaaaaatgtatatgcatcatatttgcgttgcagaaacagcccgtgggtgaggatcagtttgacggacatcgtatttgtcgcacataagcggatcatcactctcgtaaaaaggaaaaaaagaagacctctctaactgcaaaaatacctgaatatctacacaacgacctgcaataacaaataaagcactcactcgacagcgatgatccagtccatccagctctcggctattatacacctgcaaaaatgaacacaaacacagatacataagctcatcaagcaacctttcgaagatcatgtcatgtgtt

SEQ ID NO: 386828 - DNA, 615 bp, Oryza sativa
  unsure (1)..(615): unsure at all n locations
nnnnnnnnnnnnnnnnnnnnnnnnnnnnnnnnnnnnnnnnnnnnnnnnnnnnnnggccnctaaaaatgtatatgcatcatagttgcgtggcagaaacagcccgtgggtgaggatcagtttgacggacatcgtatttgtcgcacataagcggatcatcactctcgtaaaaaggaaaaaaagaagacctctctaactgcaaaaatacctgaatatctacacaacgacctgcaataacaaataaagcactcactcgacagcgatgatccagtccatccagctctcggctattatacacctaaacacttggagggggataaaccggcaaccatccatggagcagcaggagtaacaactgaagatgatcatgatccatcccaacaagtcgccggagcaaagtagtagcctctttcgagcttcgacaccacacgaggaaaaaaaatcagacataaaaacccccatgaagaacaacccaacagtaacaaaagcattccattcccccctccattagctgcatgtccttcctagaattctcttttctcctccgaagagacgacgcgtggatgaacaaattcaggtggcgcccacgcgtccgcccacgcgtccgcggacgcgtgg

SEQ ID NO: 386829 - DNA, 775 bp, Oryza sativa
aaaggggtgaacaatcttacatggaaatgaaattgcttatgtgcggaacgaacgatggccgttatgtacagcaggcagaattacatgatgagaattggaaaggcttcatggattttttttttcaagccatcctacgcagcttacaacaaaatgttggccaaatcccgagtacccaatactggtatccccatacaaatggagtatataatgtagcatatgctacagatcccatcttttcttcacacggaacaggaaggtgggattgcggaaattgtcctgaggaacttgaagcatgagctgaagtttcgtcttcattggtgcggtctttgccttgccgtcttcttgacccacccaaactgaagcccatccaactcgcacctcagaatcataaccagctttcactttgaaatctttaccaactgtgcgcttataaacagcattccagtcatcagtggtaaagtcataacgatagctcaacttatcagaaggaccaaaccgccttttgaagcctaaggatacagcattggaaggcagggacacgctgggaattaaagttagttcattgtccttataacaatatctcagattaatatcgttttcactgtactgggcagtaagaatgccatccaagaaattagattttgcaattccataaagggataacattttctcatccgcttcgtttctcctctcttcaactgacacttgaccaataggaaagtggagggttgctctcggcagaccattgtaaggcaccaaggatgcggacgcgtgg

SEQ ID NO: 386830 - DNA, 654 bp, Oryza sativa
  unsure (1)..(654): unsure at all n locations
gnaattgtaatacgactcactatagggcgaattgggtaccgggccccccctcgggtttctccctttggtctgttcaatgaactttgttacattatgtgatacagaacatgtataacgaggaccagaagtcagccatctcaacagtaaaaaaaaaggtcaacgaaaagcctatataaattgacaaaactggacatgactgcgaggcaaatatcgctcagtcacaagatctcacaatcaaaaaccaaagaaacatctgatcatctccaaccaagtgattgccttatccctgagaaaatcaatcccagagaccttcctatcatggacacccagaagtacgacactgcagcactaactttggtgacaacagcccttatgaaaggcatggcaatatctgacatttctaataataggctgaaataatacctccatccagccagagctctcaattctttcgtccttctcacgggaagaaaaaatgacttatgtgaacntctctaaaanantagggngganggttcccaatccaacctcacanttgtccttcacttgatactgtggtttcncaatttccggataaaattaccaacttctctcttgaanatgatcaatnggtcaccccatatgcnnctcctcttgatccggtnaanacnacac

SEQ ID NO: 386831 - DNA, 727 bp, Oryza sativa
  unsure (1)..(727): unsure at all n locations
nnnnnnnnnnnnnnnnnnnnnnnnnnnnnnnnnnnnnnnggaccaaaacttgttttactgaacatttggagggctgatccaatatacaaccccatcccctagggggggactaaaactgaattcaatttacaggcctatctgggttttacattttggatgtcacacaagaactcgattggctattttttgccatttcggtattagaaatgcagggcaatatgcttaacttttccattgtttactatttccataacacttacacttgacataagattgcttaaaatacgcagttaaacacaggaggcattaaaaaagtgttaaaaaaaggggtttccaccaacttggggcaaatgactttggttgatggggaaactggcattctgcatctgatgtgtaaccttaacatcatgttgttggactatgaactgatctgcaaaatagttattgtagcatgacatgatataataaggtttagagggaaatcacgatggagttaaattgaattcagaagatggcgaaacaaagtaaaaaaaaattacggttgttcgtcgtcattggtggcagaatttgtggagttatcagatcagaattaacaaatcctgtgaatggagcacgcggcagcattgaagtactacccgtatgcggtaatgctcctcgcatggaagacaaagaagggaactgtacatagatggaaaaaaaaaagatcttcatttacctaatagaaaac

SEQ ID NO: 386832 - DNA, 844 bp, Oryza sativa
ttgaccaaaacttgttggactggacatttggagtgctgatacaatatacaaccacatcccctagggagagactaaaactgaattcaatttacagtactatctgggttttacattttggatgtcacacaagaactcgattggctatttcttgccatttcggtattagaaatgcagggcaatatgcttcactcttccattgtttactatttccataacacttacacttgacataagattgcttaaaatacgcagctaaacacaggaggcatcagaaaagtgttaaaaaaaggggtttccaccaacttggggcaaatgactttggttgatggggaaactggcattctgcatctgatgtgtaaccttaacatcatgttgttggactatgaactgatggttgttcgtcgtcattggtggcagaatttgtggagttatcagatcagaattaacaaatcctgtgaatggagcacgcggcagcattgaagtactacccgtatgcggtaatgctcctcgcatggaagacaaagaagggaaattggcagctcctacaggatattgcatgttgtattgtccatatcccatatttaactgaggatttgctctccaatcccagtttgcagcatatgggtggtaactcatggtaaaaatatcctctggaagtgcctttcctctactagatgtggtgtccacagcaggtctctgtgatgctagtgttcctgccaatatatttgagccatgatttgaaggaagagcatggctcccttgtattgatgcttgcgacgcggctccccacaactggctattaaccggagcactattagctctgtttagtggagcggacgcgtgg

SEQ ID NO: 386833 - DNA, 1222 bp, Oryza sativa
tagacaaatatatatagatatggatatagattcattaatatccatataaatataggaaataatagaatgacttacattgtgaaacggagaaagtacaaattagggtggtatcaagagatacaacacgcgttgggatcttcctcgcccaaaaacataaagtggggcggggtgtatttcgcacgtcacaaactcgtacagttccggcctggcagctggttttggtttttctggttttttaaattcgatgcgatgaacttttacagcttcattgatgaggtctgcgaaggtcatgcgaggcttcgttgtctggtcgcagataccagcggcgatgttgttgaaccgagcagtcaaatctgcatccttgctgacaattctgttaaacacggttgcacagagggacgccaatgcttcctgcaatttccagtcatcatcttgggtaccttcaaggcctgaaactgccactcgcagtatctcttctcctgtcaacccccaaccaagtgcttctcttagcaccttgggtatcaaatcaatgatggcctccttcagattctgaagatgttcctcgtcagtggagtagggactacacagatgattgaggatctttgctgcaatttttctgtgcatgctgctatatacgcttgaacgagtatcagcaatacaatcaacaatatcatgaccatatttcctcaatatgatcgtggcactgcttccacttcttctacatatctgcaccagatcatcacctgctagtttttcaaacaagtcgcccttgctgttgtgaagaaacatgtccatcagggtgccgatgaatttttctctgtcaccttcgcccataaacgaagatggatccatgcatatttctttgagaatacttaactcttgtttcttgaggtccagatcttcacctggcagatttccaaagtcgcccttactgttgtcaagaaacatgtccatcagggagccgatgaacctttctctgtctccttcgcccataatcgaagatggattcaagtatatttctttgagaatgcttaacccttgtttcttgagcgccagatctacacctgccagattttgaaagtcaccattactgttgtgaagccccatgtccatcaaggagccaatgaacctttctctgtctccttcacccatagccgaagatgtatccatgaatatccttttgagaatccttatggcgtgtttcttcagcacagagtcacat

SEQ ID NO: 386834 - DNA, 778 bp, Oryza sativa
ttagattggcaaaaagcttttggttggtagcaatatgggcacggattcacagtttacacatgaagaagtctatgggcatgttaggacatcatctctttgatcatgcaacattgcaaaatgggcagtgatcccttacaaaagaggtcccattgccaaataccacgatttacatcgaaaattgcaattgtttggatctcaaaggtctgtatatcttctgtctaggatctgcaaaattctctagtaagcttcaccccagcacctacatcattgttctagtatggatcaaagttgtaaatacatctcagtttaacgctatttcacgattcagataggaaacaccggtttcacagtagaagagctctgttgtttaatgacatcctcaattgatggtcctttttcatgtacaaagttgacagattctgacagcctattcagaaggtttactagtgcaatgacctcatttcgctgcagctggagtgattgattcaaatggttctctccatccaacagagaaaagaatcttcaatgcagtaccgagaccaagaacgtggagctttccccataatcgacacttctcacatccaacacaatccataattgcactgatatttctaaattgcttctgaatctcctgctttagctcagggccattttcaccttgccagagttttgcttcatcaaatggtaacgggcacgctgatcttaatttggggttgtaaagcaattgcttcactaaagactgtgttttcaagtcctcttcaggattgcggacgcgtgg

SEQ ID NO: 386835 - DNA, 1424 bp, Oryza sativa
gaaaacaaaacatttattcaactataatcttattcgtgagccagtgggacaagataggtcaacgacattttgaggaacagcctcgagggctctttgatgattccttcttgtggtatgatatgacatattgatttttccctaaatagattacatatacagccaaatcaacaacagatgcgtgtacatcagacagtatccctctataaatatatgcagttgggaacgcaggcacaaacagaagtgcagaactcacatctgttttgtataactcgtatacagattccgaatgttgctcaaccgagatggattggcagcagcgctgcaagcctgcgtttggcgtgagattctacctcgtggaatagttgctctttcatggaaatctgaaccttgttttatggatgaatctccaaaataggtacataaccagcaggaaagtataccagatcaaacgccatcttcagattggttgatgctatagcttggagtgtggtctcagagggcatccaccttcaaaagcatggtcaagtacttcctcgatgcgcttcacaagcagaatctccaagccagagagaatgggtgctggaacctcagccaagtccttcatgtttctttctggcaatattactctcttgatgccatatctatgtgctgcaagtaccttatccttaacaccgccaactggcaacacaaggcccctaagagtcatctctcccgtcatagcagtgtcagctctgacttttcggtggctaaatagtgacactaatgatgttaccaatgtcactccagcagaaggaccatcctttggcaccgcgccagcaggaaaatgtatgtgaatatcacgactctccaataagttaatatcagaagtaggtgacagattaaggtcagcagctcttgctctcacccatgtcagagctaactgtgctgactccttaattacgtcaccaagttgccctgtcagatgcaaatcacccttacccaccatcgctgtagcctcgacaaattgtacctccccaccaaatgaagtccaaacaagcccaactgacactcctgggctcgccacacgatctgcagcttcgctatcatcaaatcttggaggcccaagcactttttctagcatagcctcatcaacaatcatgggtgatggattctcataagtatttgatatgtcctggcccataggaataacttccatttcaacttcaccaccatcagcaagcctagaatccagtagagttgtagtaattggttgtatttccttgccaagtctaagcgcactatcttgctccgcaaccttgactgcagctgcacgggccaatgcagctaggttccgctcaagattacgtacaccagcttctcgcgtgtatctcccaatgatgagtctgaccatcgcctcaggaatctgaagatatgtggagaaccga

SEQ ID NO: 386836 - DNA, 528 bp, Oryza sativa
cagagacgtacttcatgtacaactgaggtaggacctaagagtagcttatgctcacaattcacaaaatggctgaccacagtcatagttctttgcaatctctttgatcatattatgtgtcaagtcctatccttaacaccgccaactggctacacaagagcccctaagagtcatctctcccgtcatagcagtggcagctctgacttttcggtggctaaatagtgacactaatgatgttaccaatgtcactccagcagaaggaccatcctttgagcaccgcgccaccaggaaagatgtatgtgaatcctcacgactctccaataagctcatatcagaagtaggtgacagattaaggtcggcagctctatgctctcacccatgtcagagactaactgtgctgactctttaattacgtcgcccgcgtgccctgtgagatgcaaatcaccctcaccctcgccatccccatcggtggtgtggcgtcatcgacggctgtctagggggggaggagagagagagaaaccctagtagatg

SEQ ID NO: 386837 - DNA, 959 bp, Oryza sativa
  unsure (1)..(959): unsure at all n locations
tggaatcaagctgccgtaccatantttgttcctagctggcagataggatcttttggtgctattaccagaattgtcaatatagtccgcaatcgtgaggacctactgaaggtagcagctgctggaccattggcagggttctcccttggatttgttcttttgctgctaggcttcatctttccgccaagtgttggccttggccttcctgatagatccagcagtatttcatgaatcatttcttgttggtggtcttgcaaagcttattcttggagatgctctaaaagaaggaacaaaactatccataaatccactggtcttatgggcctgggctggtctcctgatcaatgccatcaatagcatccctgcaggagagcttgatggcggccgcatagcatttgccatgtggggaagaaagatatcgtctcgaatcagcagcttggccattggacttcttggaatttcagctctcttcaacgacggcggggttctactgggtggtgctgatcttcttcttgcagagaggaccgatttcccctctctctgaagaaataacagaacctgagaacaattacatcagcattggtgtagccatcttgctctttggacttcttgtctgcctaccctacccattcccctttgatccatcacaactaactgattttgacttgtgaaacaaaatcagtcacaggtcacaagctttcttcctcccaaatttatgttagatgctgagatgtatgtaacctgtcggctccctgttttatttatcttagccttggtcataaagatttggagtctatgagctccattgctccttgcagtagcaaaataaaatgcaggagcattcctgtggtagttcagttgttgtagtagtattttggtaggatgcatcagtgtagaacagcatatgagcagttgagcacatgattctggatgtaaaaaaaaaaaaaaaagcggacgcgtgg

SEQ ID NO: 386838 - DNA, 837 bp, Oryza sativa
gaacaagacatgctacatactctatacgattgagatgtgtagaaacattttttttccatgtattttgaggaacatgcacatatcaacatacatgtaatacgatgttgaattaagcaagcaaatttaagcatgcagagtgcactgcttagcacacactgcatgtgttgctagctagctagctccatctagttccctctcttctcatcatgattgacacttgataaaattaagcaagatttagctagctagctgagctgatctgatcaccatgcatgcatgcaagcaaggccaattcaatttcaagctcgccggccatacaccacacagcacatatacggtgggtaaaacaaaaacaaaaaggaaatcatacacaacattgattcattcatccattctcttaattaattgacttgaggttgaggagcatatatatacgtgcgtggcatgcatgcatatatatggtacggtggtcgacgacgacgacgacgagcctagcaagcttggatgtttgtcgatctcataattaattaatttggatgggtcgatgagatgagatcagatcttgccgcccacgcgtccgttgttcctcctcgcaagaactctgttctcttcgccaagatcgggtgaatcccatccagccatcagagaccccatcttttaattcgctactcagagataatttctctgaatttggatcgatcgacaaagttggtctgatttgttatccagaaagaactgaagatgaaatcaagctgaagctactagcttgtatgattagttatcaactttaatttgcagatgcaaattgtagcgaatggataaacaacggagagagaa

SEQ ID NO: 386839 - DNA, 853 bp, Oryza sativa
gacaagtgcacaaagccaaattaactttattaaaagttcaaaactgattgcaagtttggagcaatgaggtaatccggcatgcgtacttgagtcactagctcattcgctagtgctagctttgttgctatcaacttcattcaaacagagaccagctggcaacagggatacagtacatatatacatgcattctgctgttcatttgccttattaccatgcaccaatataatgcatcctcctctctagcttatcataagtactaattaactaattatcccagagcatggcaccaatataattgatccacttgagaccaagcatagtgtacacttgaacacatgcatgcattggcatgcacatagtacggcttgatcacaaacttaatcatcatactagcttccttggattaatatgatcatatcacatcccttgtaatttgcatgaattcttgcatgctcgatcattctgccttcttctgatcgttgtagatagtagctagccggattatattaattaattaatttaatgaatactagatgttgatcttgccgatgagagggatgccgatggcggtgaccacgagggtggatgggagtccgaagatgacgtggttccagaaggtgaggtcgtaggcgttgcgcgtcgcccgcctcgcctgctcgcacacgatcaggttcgccgccgaccccagcagcgacaggttccccgccaccgtgctcacccacgccagcagcagccacgaccgcgtcaccgccgccggtgatatcgtcgccgccgccgccgccacctcatcccccatcaacaacacggtggggacgttggaggcgaggttggagaggaggaggcggacgcgtgg

SEQ ID NO: 386840 - DNA, 661 bp, Oryza sativa
atggtcaaggggttgtggcgttgttcttgcgttgcgggtgacgatccgggcaacgtgaaactgcggcgcgtagttctgcgccttgccggcgatctcctcctgcggcggctcgttcaggaacgcccagttgctcctcgtccaccagtcgtggctcttgctggggctctcggcgccggcggcgtcgtcgtgggggaagaagccctccacgcgagtcgccgggtcgatacggccgccgcgaggcgacgaggcgtgcgccttcgagcggctcaccggggccgaccgcgccatgccgccggcggcgggggagccgagcggcgagcccgacatcatctcgccgccgtgctgcttccagaacgcctccacctcctccctcgtcagcgacttgttcctcctcgcaagaactctgttctcatcgccaagaacgggtgaatcccatccagccatcagagaccccatcttttaattcactactcagagataatttctctgaatttggatcgatcgacaaagttggtctgatttgttatccagaaagaactgaagatgaaatcaagctgaagctactagcttgtatgattagttatcaactttaatttgcagatgcaaattgtagcgaatggataaacaacggagagagcagtgcagcggacgcgtccgtccc

SEQ ID NO: 386841 - DNA, 1002 bp, Oryza sativa
agctgatctgatcaccatgcatgcatgcaagcaaggccaattcaatttcaagctcgccggccatacgccacacagcacatatacggtgggtaaaacaaaaacaaaaaggaaatcatacacaacattgattcattcatccattctcttaattaattgacttgaggttgaggagcatatatatacgtgcgtggcatgcatgcatatatatggtacggtggtcgacgacgacgacgacgagcctagcaagcttggatgtttgtcgatctcataattaattaatttggatgggtcgatgagatgagatcagatcttgccgatgaggggtatgccgacggcggtgacgatgagggtggatgggacgccgaagacgatgtgctgccagaaggtgaggtcgtaggcgttcctgggcgccctcctcgcctgctcgcacactatcaggttcgccgccgaccccagcagcgacaggttccccgccaccgtgctcacccacgccagcagcagccacgacgtcgtcaccgccgccggcgatatcagcgccgccgccttcgccacctcatcacccataagaagcaccgttggtacgtttgatgcgaggttggagaggaggaggatgatgacggagaggacggagatgccgccgacgctgttgaccttggagtagggggccatgaagtcccagatggctcccgggaggcccgtcttgttgaagccgctgacggtgatgaacatcccggagaagaagacgagcagcgagtaggacacggtgtccaggcacggctcggcgtcgcggaagtcgaccacccccagcgccagcgccgtggtgatggccgtccacgacatgttgagccccaccatgtaggccaccaccatccccaccgtcaccacgtacccgcgcctccgcgggaacagcttccgccgcgcctccgtgcactgcatgaaccatgggtgcttggtcgttatgttctccgacatctccagcgacatcatcgtgcggacgcgtgg

SEQ ID NO: 386842 - DNA, 505 bp, Oryza sativa
gatggaagtttaaaaaaaggttgtaaaggagatggtttttcaggaatagcacgaagaggtcggaagataatgttgagcatctaggggaagcccaggaagaaccagatgccttcggggaggatggaaccagtataaatcactgcccataatgatcaccctggtgaagaacacggtcagagagtagggcacagtgtcaaaggccgccgcgccagaaggtggttcgtccaccaccagcgccagcgccgtggtgatggccgtccacgacatgttgagccccaccatgtaggccaccaccatccccaccgtcaccacgtacgcgaagctcttgaggaacagcttccgccgcgcctccgtgcactgcatgaaccatgggtgcttggtccttatgttctccgacatctccagcgacatcatcgtgttgccgttgccgttcagctgcggcgtgctcttggccgacgccggcgacctgccttcctccaccgcctccatctgctcggacgcgtgg

SEQ ID NO: 386843 - DNA, 917 bp, Oryza sativa
caccatgacagcaagccatgagcccatgacttcactatcaccaagagagcaatggaggcgaaaattttcaagctctaatagagaggaaacaaaaaacattgtcttcttgcccacaaacgcatgtaggtaggtagaaaggatccttcaaaatatctttcagaaatgacacaattaagttttgctagtctcagtagagaagtgactactaattactgtcgattgctcaaacagaacggtcgcacaatgccgatcgcaacacttgcaaacaggagctgacttagaccttgaatccacggctgttcctcctgccacgggccttctcgaacttccttcccttggagcgcacatatggcttcgtgtggctgtgcggcacaccaggagccttaccaaagtgcctgacggcctcacgggcattcttgggacccctcaagaggaccgtgttctccccaagcggagcacggagagcaagctggtcgaaggtgaggcactcgccgccagcattgacaatccttgccctagccgtctccgtgaacctcagggcagtaaccttcattttcggaatctcttggatcctcttgtcatcagtgactgtaccaacaatcacagcaatgttgttctcctccttgccttccatgaacttggcgaggcggcgcagggagagcggcgggcggttggtcttgctcatgaagagcctcttgaggatcacggcattgaagttactcttggttctcctcaccaggaaacggtacagcttgacgaggagcttgaggtagacatcgtccgacctcggcgcggtgcgcttcgtcttcttgttcctcccgccggcaacgaggtcgatacccatggctgctgctgctgcggcggcgctagggcttctgggcttcttacctcgtgtgtgcgtgtggccggacgcgtgg

SEQ ID NO: 386844 - DNA, 520 bp, Oryza sativa
atgtgtcatacacaataaggtctttaggttgttcccttgattcttctgaaaacaaatcaggtggtgggacaactccattttcaagtaagacagcatggatcctctcagctatctgggggttttcttttgcagcactaatcatatattctgagacatctttcactttcatctttcgtactgctggagcaccacccacctcagaagatgaaggagaacttgatgacgaattattcgctgcagaggacttatctttgctctgtgtacgcatggtatggtctgtatttctagattcatgaataacaggcaaattttcacttgtgcttgtgctaattagtagtgcaccgtattctccgccagcgggatgcggcgccgctgcccgaacgggctcgcccagaagtccagcagcgcaagctcgccccccgccgttgctgctgtcactggctctctacgtgtcccggtggaccggatcgagctcgggagagatctctctcgaaataagcggacgcgtgggtccagcaag

SEQ ID NO: 386845 - DNA, 1039 bp, Oryza sativa
ggaaggtgaatctatctttcttgtttctgaattcttttaaagtgtaaagtaatgatcggagagtacagtttacgcttgtaaacttcaaatacaaattacttgaacctgccagccggcgaaattaaacaagttattttgaacgaccttggttaatgacgacaagtagttaaatgagtaaatagcagtaataataacaaccaaattaaggtgtacacacaatagcgtagctagtcgtcgatgccgtagtgcttcctgaggaggccgatgaagtcgtagatctcctccggcgagcggaggctgccggcgacgctgtcccgctccatgcaccgccgcgcccacgccgccacccgcgggcactccttctccacgctgaacccgccgtacctcgcgaagctgtacacccacggcatcatcggcaccagcgccacgtccacaaacccaaactcgccgccgaagaattccttctccccgagctcgccgtcgagcgtccgcagcgcctccaccagctcgccgcgcgcccccgccgccgcgcgtacgccctcctcccccttgaccttccacagccgcgtccccaccgggtacaccttcttgtcgacgtagtcggcccagaacctggcccgggcgcgcgcgtacgggtcgtcggcgccggaggggagaaggcgaggggtggcgtccgggaaggcgtcgtcgaggtactcgaggatggcgagggactcgcagacggcgcggccgtctccgtcgccgtggaggaggacggggaccttggcgtggatggggttggagcggaggaggaggtcgctcttggcgccgaggagctcctgctcggagtagtcgtaggggagcttcttctccgccagcgcgatgcggcaccgctgcccgaacgggctcgcccagaagtccagcagcacaagctcgccccccgccattgctgctgtcactttctctctagctttgcttgctttgcttagcttaccttcttcctctctccaacgcttgatttgattgtgcagtttgtgccggacgcgtggcggacgcgtgg

SEQ ID NO: 386846 - DNA, 765 bp, Oryza sativa
cccaaagaaagacttggttacatggatgaatgattctgaatgttcctgtgtacatcagctatcagctttgtccattctataggacagcactgtacaagtcgaatcaacttcctatagcagtcaaaacaaagagagagctatctatctagagccaccaacaagtatctgtatctgtacttcttgtaaccaaatcactacatacatttgtcatctcccaaagaaaatcttattctgaactatgaccagcagctatctgcctttcctgtgtagttgcctttacatgtttgctgtaagatgttaatctaataattatgcacccctatcttttttctttactcagtttcagaccagattattttccatggtccacctttgctccctaacctccagaacccagcaattgctcgcaaactcataaatagagtaaggccagcccagacgccaccaagaccaaacttaggagcggccacaagcagtactgctgatgagatagctcccgcaaataatgtagagtatgccacgaaagcaaagtcagaaacaccatagtagagcccatccatcacaaacgcaacagcatttattggttgagaaacagtgacaaactgcaaaaatccatcagccaattactataaaaccattgcatatcacttggtaaatcaagtattgacttctcagaatagtcattacccagactccagtttgggcaacgtctaaaactgctgcatcatctgtaaacagcatggacaaatatccacggacgcgtgg

SEQ ID NO: 386847 - DNA, 472 bp, Oryza sativa
acaccaatatagggggcacacattcaatagccaagagggcgtgaatccattacagctttttaaaaagttcaacctggcactcaaataaaaagcttaactttacatagtcagccaaagacattttgacatttagaaactaacgctacgaattctgtagaggttacaccaaagtactgcggcagtagccactacgtagaattaaaattacaggctaccacaaataatctggttttctctgacaaacttcataatccagagcatagaaaagatacataagctagctgtccatttttttgtcaagaacaccatattgtaaagttaggcctatctggcaccactgcaatcctagatcagttaatgaggatatgctatgtttccttaatgaagtggtgagcaagcaactctgataatccagaactaggaatgctctcgcagccgaacagctcctgaagttttgagtcacataatattg

SEQ ID NO: 386848 - DNA, 482 bp, Oryza sativa
aacaggggaaatccactaatgggggagtggatccttttcaacattgcaacaggcaactaatgcaaaaaaagcaaaacctgaaaactatgctcgtatgcttacatcagtacaagcactttggagccgtgactgaaggtaagtgagctcaagacattcccctcagcaccatggccaccactgtgagaaagagcaacaaagctcactcatcacgccgccgcacaaaaaaaattcactccattcttccattgcatacaataagcccaagttaaaaacggtaggctattgtctacactacactatctacagctctaatcctctaatgtagagcaactttggtcgagtgcacaaactcactttcacttctgagaactaatcaccttctcttgctgaaatcctttgggataaatcagcactgaatcgacgcacagaccacctttcgtatgggtgcagactatctgtgccagggagaacttgagcttgat

SEQ ID NO: 386849 - DNA, 753 bp, Oryza sativa
  unsure (1)..(753): unsure at all n locations
ttttttttttncagcaatgaaagagtgggaaatatattcaattattattagtgaagcatcttattgcctgcttttacaccccaatagcttatacatcccaacaaaaaatcgtaaattcaacaccgggcaacaacaaaaccccaaaacttcactttgttttgacactgacgccatctgttccagcgatgatcaccgaagtcgccaacgcatccttgatcggcgtcttgaagtataaatcaacgatgtagtttgagttgtcggtaacgtagggtttgccgccttcatccaatctcacttcgcctcgcatccttcatcgttaaacagatcctgcaatctcacttggttgtacttccagcagaactgcacaacctccacaggcatggctagaccactccctcctaagccggtaactagctttgtctcgtcaacaacaacgatgaacttgtctgatgctcaacgacgccttccaaagctgagatgggcaccacctctccctttcacaaggttaaggtctggatcgacctcgtcggcgccgtcgatggcgaggtcgatgcgggggtggtcgtcgagggtggagagcgggatgccgagcgtctgcgcctgctagaacgtgcgcttgcacgtgggctggaataagatcatgctcaacttcaatgtcgcgagcggcgccactgtataccagtcagcgtaagcacacggtcgagcaggtcctcagccacagtatcatcccggacgcgtgggcggacgcgtggg

SEQ ID NO: 386850 - DNA, 824 bp, Oryza sativa
ttagcattgaaagaatggggaaatatattcaattattattagtgaagcatcttattgcctgcttttacaccccaatagcttatacatcccaacaaaaaatcgtaaattcaacaccggcaacaacaaaaccccaaaactcactttgttttgacactgacgccatctgttccagcgatgatcaccgaagtcgccatgtccaggaacagcccatgctcaacgacgccttccaaagctgagatctccttccctgctgccaacgcatccttgatcggcgtcttgaagtataaatcaacgatgtagtttgagttgtcggtaacgtagggtttgccgccttcatccaatctcagcttcgcctcgcatccttcatcgttaaacagatcctgcaatctcacttggttgtacttccagcagaactgcacaacctccacaggcatggctagaccactccctccttagccggtaactagctttgtctcgtcaacaacaacgatgaacttgtctgatgctgcctcaaccatcttctccaggagaagggcaccgcctctccctttcacaaggttaaggtctggatcgacctcgtcggcgccgtcgatggcgaggtcgatgcgggggtggtcgtcgagggtgtagagcgggatgccgagcgactgcgcctgctcgaacgtgcgcttgaaggtgggcaccccgacgatgccgctcagcttcccggacgccagcagcgccccgatctccgcgacggcgaaggccgccgtcgacccggtccccagccccagcaccatcccgctctccacctgctccaccgcgcgcaccgcccggacgcgtgg

SEQ ID NO: 386851 - DNA, 607 bp, Oryza sativa
agggtacaaagccatccaaaaccagttcatcggatatacatgacggctttaatacttttgagatcaaattcaaacaatatcgctttatagatgacacagaagaaaacggtggaagaaatagctagtggagcaggggcgggtatatgggtcatccagcattctacgcacatataaccttccagcccgggttcataaattcaacctaaccttccaacaacaattttcctgtttgaaagctttcttttgtcttaaaaaaaaaacaaacaatgttgcccgcaaaccaatactgggctcaacaaaagtcacaaaattacgcattcaggacaggagaagtgctcataggtcttgctgcaactgagccagattagccatctacgagtacggtttaaggcacgaaaactccaccagttcagcaacgaatggtgatagactatgccctatgcagttttattcttttgcaatttccacaaaaattattcttccacgaatgatccggacatccatttccttaacaaacttctctacgactgctaaaaaaaaatatttaacaaaaccaaatccttttaaccttccaattaggttctcttaccaatcgagcttcatcaac

SEQ ID NO: 386852 - DNA, 831 bp, Oryza sativa
  unsure (1)..(831): unsure at all n locations
ttgccacccanaacagagacatggcttgcttcaacaatgagcatcaaaccacaaccatgtccaatccgaggggtatgacacaactagaacacagttattatacattaaagaagcaagcacattaatgttagcataaagacccggttccatgaactaacatgcaacaggatgaacataccatcagttcattgcacaagtagctgctgataagcacacgcatacatcaacacagaataagcacagacacatgcatacataacaacagtttctgtgacataccatgagcagatacattggatagttagttactcatgggaaaacatgcttttgttgagcagaaacctttcatccagagctcatggtaaaccggacagcagagtgaccgtcacttgccatccttgttgccactgaagagatagtcaagtgatgaaccaccgcctggagcagcctgcaccttggttgacggacggtccgtaaggaaatttccacagttttgaccttcagccctcatgtaattgttcgccttactactttgaataccggctgggatctctttcagcttctctgcagaggacgaaggggcaggcttttgaactggagcaggcttctcagctgacttcggagcttcaccaccaccaaacaggtagcccagggaactctgaccacccccgctgctaacaccacgacccatcttatagaacttcaaaggtcaattactcttacgcgccggatccgggagggaggaagggcgtgggcgcgcggcgcgatcgattccgcggagacgacgaacaaggggaggaggaggaggagtgggatcgctcggacgcgtgg

SEQ ID NO: 386853 - DNA, 1177 bp, Oryza sativa
  unsure (1)..(1177): unsure at all n locations
tttttggaaacatgtaatgcgtggacatcatcacgaggtcaagctgattcaaggctacgtcaacaactatggagagaaggtaaggtacatggccaaacgcatggtaaatacaacagtacacaaactagataaatctaaccaatggggactatagttagttttgttgtgtatcctttggaggcagacaggccattcggtagcctaaaccagagttgtcacctgcagctgatgagctcctggtgatgcatctacatacaaacaacagtagccttggatgaacatgcgggtctaggtggtcattttgccgtgacacaattccacagcaaaatggtacacgttatgggagaactcctgttcctctgaatatattagattggaggatgctgctgctgctgccagaagttcctttggtacatccaatgagccttaactatcagagtttggaaggtaaatacggtggaaattgttcgccctcagactctttctgcaagtagggcatttcttctgaatctggatggcttgcttgatgcatgtcgtgcagaagatatggccgcaaattgttgtggaggnctcctccaacttgttccaacacaccggacagttaaaaaccggttcctttgccttaggaggctcattgctagtcttcaagctggacccttctccccttttggagagaggcagtgtataacaggtgcaaccctttgaacgtttgttcccttcccggctagcatctacttccagatcaactactgccacaggctgcctcctagttctccggttccttctcggaggaggcacttgcgaagcggacaatgtctgcacttcatcatccagagcttccacatcaatgggggaggcgcgcgcaccagtggaggtcggcaccgcgcgacggcttccaaccactggggaggagatcgcgtccaggttcacaacgactttatcaccaggaccatcttgtgattgcctccttggggcacgccgagtgccgctgacagtactcatgctaactttggagctgaatcagtggcactcaactctgaaatcaacctgctcgaatcctcgatccagccgcgcggctcgatgaggaggagaccgcgatttttttcttctttttttttccttttttttttatcttgaccgcgatttatttcaatttcaacacgagtgaagagagaag

SEQ ID NO: 386854 - DNA, 438 bp, Oryza sativa
aaaagcattggaacggccaaaatagctacaaaacacagtgtcgatcgaacagtttgtataatatggcgaactaagctaagctaagctaaccctgagccttagctaagcatcatcatcatcatcttcttcttcttctagctttcaattcttctcctctagcactatgctttaatttgctcacatcaaggatttgagcgaccgtgccttcacgggcttcctccacctcttccgagcctgctggctcttattcttcctagcgtcaccgttgatgccggctcggagcctgccgatccgcgccgcgtcgtcgctgctctcctcgtcgccgcctgctatcccggcgatgtcgtcgtcgtcgtcgtcggagctggagaaatcatcccgagctgccaccgcagtcgtcgtcgacgccagcgtcgtctgacgatcacggacgcgtgg

SEQ ID NO: 386855 - DNA, 683 bp, Oryza sativa
ggttctacaaaaaaaatacaaaccctcaatttttccaactcatcatttaatttaacagtacctttttacagtttttgacaatacaccaggaggggcagaacccccactccatttatgccccgaattttcgtaccgacacacacacccagagagattcacacactcaattcagtccttgagatgagaataccatcagtatcggcgtagagccactccccgtcgcaaatcctggtccctgcaatggtcacaggcacatgcttctccccgatgcccttcttgtttgctttcatagggtgcgagttcagagctcggacaccaatgtcgcagccattgatctcatccacgtccctgatgcaaccattgacgacgatgccagcccacccattgttctgcgcctgctgcacagggttgccacccaaaatggcgcaccgcaggctcccaccaccatcgaccacgagaagccctgccttggcccttctcctccaggaactcgcgaacaagaacattgtcctcgtagaccttcagcgtcacgatagggccggcgaaaacctgccgccttccgtagacttggaagacgggctggagagcacgaagctcgccattcatgatcaaatgtgcatttgcatcacataattcggctgtggctaatggcaaggcagccatattggattcggttctcgctc

SEQ ID NO: 386856 - DNA, 583 bp, Oryza sativa
  unsure (1)..(583): unsure at all n locations
tgtacacttgagggggggggttccttacatggaatgctcatatacattctccaccaaacgcagatttttggcaaaatctaggagctgcattcacttaagccaaaaagaggcttatagtttaaacttcagatttccgaacaacggatacaacaactgttacatcatccagcttgcccccagagtaacccagatacccaactgcaagagccgcgtcagagaaggggcttctacaggttgccgatctgcccacttccttcgccctagcaaccaggaactccgcaatctccgaaggcttgaggccggcttccaatgatttggagatgacagctgctatttcttcctcatagacattgtcaaaaaggccatctgttgctgtcacaatggcatctccttcttgtagatcaattgtgtatttctgtacaagtttgaaaggatcatccccttctcaatttgcaagggaaattgaagccgtagtcatggctttgattttgatatattctccgttcttatcnccaaaatccaaatccctatcttactgctgaattccggactccaatgacaacaaacatggacaacnggattc

SEQ ID NO: 386857 - DNA, 605 bp, Oryza sativa
gcattcacttagccaaaaagaggcttatagtttaacttcagatttccgaacagcggatacaacaactgttacatcatccagcgtgcccccagagtaacccagatacccacctgcaagacccgcgtcagagaaggggcttatacaggttgccgatctgcccacttctttcgccctagcaaccaggaactccgccatctccgaaggcttgaggccggcttccaatgatttggagatgacagctgctatttcttcctcatagacattgtcaaaaaggccatctgttgctgtcacaatggcatctccttcttgtagatcaattgtgtatttctgtacaagtttgaaaggatcatcccccttctcaatttgcaagggaaaattcaagccgtaagtcattggctttgatttttgatatatttctccgtttcttatcaccaagaatccagaatcacctatattacatgcatgaagtacttgaccatcaaagtgagcccccagaacagtggaagaagcacgggatcgtgcttcatctgcagccttagcaagaacttcctcagttctcatctctggagctccttgactctccataacagctttcttacaaccat

SEQ ID NO: 386858 - DNA, 538 bp, Oryza sativa
gatctgtaaattgagttgttaatgaatccgctttattcgctgactctatatgatatttctttttctttgaaggaaaaattctataacaaggtttgagaccttgtatctattcctcttttttctatactagtagaatttcattgcattgagttctttcttagatctagatggagtggaatagagaaatagaaaaaagtcctttcggatgaaaatggaagaatattacgccatatatcccacttggacaaattagaagcaattttctcttatcctcatttgttccttcctttagataaatactcaaaatccccttacaataatgcaatttcgaagggaccttttccctcgtgttgagaaaacttttcttcttccaattcttcttcattcaattcatttcaaaaaattcaattggtactcaaaatacttccattggtatgcgcaagaaataagccaattcggcagctttttgttcaatttctcgtggagtaaaaaacttctcatcagtacgagtcaagggaatggccccccggacgcgtgg

SEQ ID NO: 386859 - DNA, 937 bp, Oryza sativa
atatagtgtaccggccgtccttttttttttaaccacatactatatagtgtgggatatatggaagtaaaaactctagggagctgaatattgagaaattataacacattattgagagtttgcacagattcagaccaaggtgcagcataagcatgaggaaacttttcctttatttatagaatatactccgtatgttcgttcaaaaaaagaatatactccgtaacaaagtacgtatagataactgaaggcagtgataacacgtcaaaagccattcttgaaacagtctggaatgaggagcgccaatgatttccatatctctgaacagcataccaccaccacctcaagcttcatgactatagattgttaaactgcagatcgaagtccaatgataccgcatccaattcttgctcctgcatttcctgttgttttactgagttcatgaccaccccttcctaggtcatcagaatcagcatgaacaacaactgcccttcccaatatggaatgaggcccgcttagtgaaatctgtaggtcctttatgaagatatctgcaacaccatctttgttggctactatgtttcccaggtcgcccacatgtctttcatcatcagatggtgccccatgggacttattgtgaggattaaaatggggcccggtagagttgcagccgttggtggtgtcgccaaaggagtggatgtggaagccatggaggcccggagcgaggccggtgaccctccccctcacctcggtatacccggtggaggggtcctggaagaagtggagggcgccggcgaccgcgctgttgccgccggcgccgccgatgagggcgacgcccttgaggccgccggctttccctgccattctctgccgcttcgctcccaggccttttcctttatttatagaatatactccgtatgttcgttcaaaaaaagaatatactcag

SEQ ID NO: 386860 - DNA, 675 bp, Oryza sativa
  unsure (1)..(675): unsure at all n locations
tgttgaaacgaagaancttggtggtcagtggattcagattccagtttccacttggaacgaagaaacaagcagagtgtagtacatgagagtacaaatgcgattggaatccgcgaaccaatgagcagtgcccttgatgaatcctgatgctatgaacaacgagaagaaagaagaaagaaagaaaaaaagaagaagaatcctatccatgtcgaactttctaatgaaagaggaactgtgaggcctgggcgacggcgtcgtcgagccaccggcgaggctcgtccatgaggtcggggctgagcctgaccatgaggacgcagaactccatctcgctgagggcgccgtcgccgtcgaagtcgccctcggcgagcatcccccggaggtcgtcgtcggacatcccgccgaggccgagcagcggcgcgttgcggcggaggctgtcgaaggtgatgagcccggaggccgggtccatgagcaggcggaacccgcttgcgagctcctgcatcagcccttcctcccccagcctctccgccatcaccggcaggtagtcctcgaacccctcctgcatcatctgctgctgctgtctctgtccgccgccatgagaatgagtgaggttgactgatcgatcgatttgttgtgttcttgtttgcttcttgcgatctttgagaggaggcggacgcgtgg

SEQ ID NO: 386861 - DNA, 968 bp, Oryza sativa
ttaccaaaactttattttccaatttttcagaataagctgggcaggtgatttaactcttatgatccaacaggtgccaactctgttgaactcaaaattatttgtccctagagcccaagaacactatgttgctcactaaaacatcgttgcataacttagaattaacattactcggccttattcattaccaccgctggcagtcaagtccagtccaggtacataactggttacattcctagtgaagattatatacatggaagcaggcacagcttggtctgctgcacttagctaagccagtgcactagtgttgtagacaagaatagcgccgccaactagaattccagcaagagtgattgcccagagaagtaaacctgcctttcctccaacatagacatcaccagttgaagaccattcttctggggtatatattgggctgtacccatcaacatttgctccatacttgttggaaaactggtaaagaccctttccctcacggtactacttcgctatcggtcacccaggagtatttagccttgcaaggtggtccttgctgattcacacgggattccacgtgccccatgctactcgggtcagagcgtaagctagtgatgctttcggctactggactttagccatctagggtgcggcactcaaccgttcgcctagcagcacaacgcttgtattgctctcccacaaccccgttttcacggtttaggctgctcccatttcgctcgccgctactacgggaatcgcttttgctttcttttcctctggctactaagatgtttcagttcgccaggttgtctcttgcctgctcatggattcagcaggcagttcaaaaggttgacctatttgggaatctccggatctatgcttattttcaactccccgaagcatttcgtcgcttgtacgcccttcctcgtctctgggtacctaggtatccaccgcaacccttcggacgcgtggtcgac

SEQ ID NO: 386862 - DNA, 698 bp, Oryza sativa
  unsure (1)..(698): unsure at all n locations
nnnnnnnnnnnnnnnnngctcactaaaacatcgttgcataacttagaattaacattactcggccttattcattaccaccgctggcagtcaagtccagtccaggtacataactggttacattcctagtgaagattatatacatggaagcaggcacagcttggtctgctgcacttagctaagccagtgcactagtgttgtagacaagaatagcgccgccaactagaattccagcaagagtgattgcccagagaagtaaacctgcctttcctccaacatagacatcaccagttgaagaccattcttctggggtatatattgggctgtacccatcaacatttgctccatacttgttggaaaactggtaaagaccctttcccttggctacccttccagatgcatcaacaccttccttgaacaccactcctccagcaggcccatagggctgggatgtctgaatcttctttgctttcttggccactatgatcaaagatggccttgccattgtccctttccctcgaagcttcgaacgttctagtaatggagatgcagatggtttcagagccagagaagccatgacagaggcagccatgtttatgcaacaacactcaactgatcactcactctatctctgaaattaatgggacgcgtgggcggacgcgtgggcggacgcgtgggcggacgcgtgggcggacgcgtgg

SEQ ID NO: 386863 - DNA, 794 bp, Oryza sativa
ttttgcaaattcaagattgcaattcatgaatcatggagcactggtaattgagtttctgggtaagtgccagtgccacacatacgaagtctgaaactctgaaagtaactgatacatgagcatagagaaagatcatcaaactgacaaatttcatgcggccaatatacacacgcgattgcactactgttccaaattaatcaaccttttttcttttcttttttacccatctcatacataatcacgtagaaacaccagagatccattcagattacattgcatccatccaagatgagaatgatcagaagaagtttgggttgtatccgttgctgcaggtggcgaggatgtagtaggcgacgatgtggccgagggagccccaggcgaggacgtcgacgaggttgaagccgacggggtcgttggaccggagcaggccggcgaactccttggcgcgctcgtcgccggcgtcgaagtgcgtcttgccgttctgctccggcacctgcttcgccacgttctcccgctggaagttgaagaacacgaaccgccccaggaacagggagacgccggtgctcaggctgatcaccagcgacgggctcagctccgccctcgccgccaccgacctcctcctcgccggcgccgccctgaacgccacagacggcgaccgcacgcgcggcgacggcgccagccgcagcccggccacggtcggcggcgacagcgaggtggcggccatggttcttggagcttggagcttgagggtgggtctcgctgcgatcgagtggtggtgctctcggacgcgtgggtcg

SEQ ID NO: 386864 - DNA, 513 bp, Oryza sativa
tttttttttttttttgatcaaatcgccacgagggctatgtgtgttttcatttttcaacattccacgctgggagaagcacaaagtattcaacaattcaagctccaaacggacaaaagtagcagcctattcacccaaggttgccacgtatcgacactgacatcagtaatccactcatctttataggtgccccacaaggagaattaaaaagcattgagatagatactgatgttcgataatatcactgagagttggttgggggagcttgtttggcagtctcaaatgaatccagtatgggcctaacaacagctggaagaaaaagaccgaagccggcgatgaggcaggaggcggcgacgaccggctcctgcaccacgaagaccctcagcttccccatcgcccccatcgctcctcgtcgccgatccaaccacgcccgctttccctcaaccccgttttcacggtttaggctgctcccatttcgctcgccgctactacggggatcgcttttgctttcttttc

SEQ ID NO: 386865 - DNA, 1223 bp, Oryza sativa
  unsure (1)..(1223): unsure at all n locations
ttttttttttttttttttattctctgaattgacttggacacagtatagctaactttatcattcacacgcaaacagttacattccagtgttgtttgttcatactgtttccaatnagagtttgttcagatttcttgctttggtacaaaatcaacatgcagccagcagtacatcgacttggagaccatatcgggttcaactgaacttattggagggtaaaacaatgaagcaaaatatcaacaaatatatggttatcccacaaagtctaacaagaaagctcaaatgaacaaggcgaaaagggcaacaatgccagcgttgtcatggtttgtttcctgatcagaatgaaggagaaaatgggggggaaaagagcataggcaaaaacagtacacggtacatcacaaagggcatcgctcctctggagagttatatacaggaaggcgcatcatgctaagttgctactccggtgctctcctatgccagacagacccaagtttttctggtcgttaccaagtcaaggcaacaggagtttatgaagattgcggagtttcttgaaggcggtacattgtgatctcttgctgcttgaagtacctccggtcttcctcgtcaacaagaaccaggttcaggtagtacttgacattgaacttgttgtttatgttgcggtaagtcggggtcaactcatatggtgtcaagaagagtcttaccggaatagactcacctcttacgggagcgccatccatcaactcaaactttgcaagtgtctcagtctcaatatatgtgccaggcccagatcctgttgattcccgccgacgaatctcaagctccatgttctttatctttattctgactagaagaaaatagatttttcccacgatcacatccttgagatggtacttgcttttgctgtactcaaattcaatatgcaaacaatcttcaattccaacttccatcttgatgctattgttaattgaaggaagaggagtgtaattccttacacagaaatctcgacattccacaacactagtagcatatgcgtctgccaattgtaactttcaggatgtacctcaatctgaccccacgcgtccgcggatttgttccgttatacgactcataaggcatctcaacagtagagaattcaaatggataagtcttcctttcatagatttcaccagcaacctctaactctcgcactaacgaagtgaagtcatagaagtgaccggacgcgtggg

SEQ ID NO: 386866 - DNA, 699 bp, Oryza sativa
cagaatcaaattatttggaaagcgaagcatctgcaaaattacatcaaattacaaagttacaacataattggccgcaaaagcctcttccagaattcattggaaatacaagggattacaataaccgtggaaccacgttctaaattctagctcaccttgctaaaagaagcaaagatacagatctgaatgagacagctcaacattgtggtacaatcctctagtagaactagggtacaaaaaaaaatcaaaataatccactcaacactctagttggccaatggtggatttctattttcattgcaagctatcaaagaagccagggccagcctttgctttcagctcgtggccagcatctttacccatctcaaccatgatatcgaaatcataaggtccagttctcgaagtctcatatactgtagatccatcaggtgaagccaatagccctcggaatgaacaattcccatccttgtcacgagaagcatatgccgcaattggagttcggcagttgccatcaagaactgacaagaattctctttcacatgcaacagctaatctggtatcttcatggttcaatgaggacaagtaattcatcattgtgtcatcactgcttctgcaagctattccaccagcaccttgcgcaactgctggaagcatttcgtccactgacaatacagatgtcgcagtttctgcccggacgcgtgg

SEQ ID NO: 386867 - DNA, 1130 bp, Oryza sativa
  unsure (1)..(1130): unsure at all n locations
agaacaatcagcgtgctgacagagccacacatgtattggggcatgggacatanctattacacaggttactcatcagaaaagtaatacagatacataactagaaggttcataaatcgttacaagcaaaacgatacaacaaattgagcagaagcaaaaatttcagccctttataaactgatgaaccatagacccttcgatttctgctgctgctggggctgctttctaaacactgtttgcaacagacgtcactctccgatgaatggtttggtggatgattagacatgtccccgtcttgagctagacctgtaaaatcgcggcgtttggttttgtgccacacatattcttccattttactcgacttctttgatcattcttctcttcctgaggggctgcacaggcatgctcccgggggcactgtgcgcacgcctcctttcttctttacggttttctgcttcaatcatcgttcgccttaagttggccgccttgtagattggcttaggtaagtgcctatgcctcacaatccgcttgacttcgggaaggtgcttataccgctccttgacagcatctaggtattcttgttttctgcgttctcttggaagaagaactcccaactgttctgaagctctggacttccacagccgaagattcgtatcatcactgccagaaaccaaataggttccatcataggtgtatttcacaccggacaccctttgcatcctcttagtatggtatatctccctgctatgatcaccattatattggaagatccgcactgttctatcgtaggaacccgtaacaaattcacgccctgttggtgaataatcaatgtccatcactgctgaaacatggcccttgtgaacaactttggcttcatcaagctttctagcatcaaaggnatagcaatttgtatcttcatttacggcagtgaagttcataggntccctagggttccagcatattgagttgcaccttgtcttcatgattagctttctagcaggggatgacatgcgtagatcataaagtgttatactccgntcactagcctgatgtaattagnacatcagggtctnccaggattaaatctcacggncagaactgtaatctttaaccccattcaaaagcctaattta

SEQ ID NO: 386868 - DNA, 659 bp, Oryza sativa
  unsure (1)..(659): unsure at all n locations
ggggacaactcaaaatccgaatggttaaggtcctgataaattcatccaacagtcaagattcacctttgtactcaactgtacatgaangcgtctcccttataaataggcctaaaaaaaggcacagaacaagaactcacaagtaagctcatgctgtatcaaatcgttttcataaatcctggttaatgaggctggcaaatcatgcacaaaataatatactctacccttccttcatacttaatgaggctggctgattctgctttcttcaaagattctgcaccttacatagcttgcttctgcagctgctgctcctgcttttgctgctgcctggttacaaaatcccaaactctcttcaaacttttagctgaaaatacaacagataatatcagctcttcagtacaaaaactctggaccgaagggaaaaaaacatggcaccacagttaacatactcacaccataaggacgtattcaatcaaattttacagagtacgtttgacaaaacactatgtctggcgttatttgaaatttgctcacttttctacaacctggacaaaagaaacaccccatccaataattgcaattgaagaattgcatagattatatagtacataccagttctacgagtgacaggaattataccagagaagctgccggacgcgtgg

SEQ ID NO: 386869 - DNA, 700 bp, Oryza sativa
atcagtatggaaggaataaaatttccttagatttgcaataaatatcagcagtagctcaattcaggcaatcaagacaacatgtaaggagccgaacacatcggcaacctgaataacaagtggcaacctgaataataacaagttaagtttatgtagtataagaactgaaccttggatctaataacaacaacaacatggccatgggacacgaaaaggtttcacctttgcggccacagctcacaccgcggagggctcctcgacatctctgccccttccgccgacgccagcggcgctgtggtgcggcaggtcaacgccagtggcgccctcgggtatcagggacgcggggcggttctcaattacctcgtcgatgagcccccaatcgcgcgcctcctcggggtccatgaagaggtcgcgctccatgcactgctcgatcttgtcgatctcctggccggtgtgcttctggtagatcttgttgaggcggtcgcgcagcttgagaatctccttggcctggatggcgatgtcggtggcctggccctgcgcgcccccggatggctggtgaatcatgacccgcgcgttgggcagcgcccggcgctccccgcgcgcgccggcggcgagcaggagggagcccatggacgcggcctggccgatgcagagcgtggtgacggggcagcggatgtactgcatggtgtcgtcggacgcgtgg

SEQ ID NO: 386870 - DNA, 670 bp, Oryza sativa
  unsure (1)..(670): unsure at all n locations
taaacactgaaatgaaatttacttttcttccttattcattaaacaaaactctggaaggatgaatagaatagcaatccaatctcaccttaaccttgctcccaagtgaaataaaaaataatctagtgcactcttcgatacatacagaagcatacaggtactcatttgcggatgaacaggagcatatgcagagcagaaatgcagcatttgtctctgaattgagagagaggagtgtggctggcctggcctggcctggcctcgattgtttcattctatacgaaggcgtgcttctcgagcagcttgaggacttcctcctggttgttgagtttcgccacgtcgatggccgtcttcccgtccaggttctgcaccgtcacggcggcgccgtggtcgagcaggagggcgacgcagtccttgcggccgtagccggcggcgtagtgcagcgccgtgttcttgttcttgtccaccgcgtccacggccgcgccggcctccaggagaacctgcgcgcatttcagctcgccatagccgcaagcgaaatgcaggcctttcctccctttcgaatcctcctcgtccttggccacgcctttcttcaatgctttcttcaggccctcgacatcgccgaccctggcagtgtgggggatgacggacttcgcctngaacttggccttcttcccgc

SEQ ID NO: 386871 - DNA, 937 bp, Oryza sativa
  unsure (1)..(937): unsure at all n locations
actcattaggcacccccaggctttacacattatgcctccggcccgtatgttgtgtggaaatgtgaacggatnacaatttcacactggaaacagctatgaccatgattacgccaancgcgnaattnaccctcacnaaagggtanaaaagctggagctccaccgcggtggnggccgcccttttttttttttttttttttttttttatagtcaaatagcaagtacttttattagattgacaatatcccagacaaaccatactcataatatgccggtagtgcataatgaggacacaacttgcatcaagcaagaatcgctttaatagcaacaaatagtcttatgacttcaaatatagagaacagtaactggtagcttcagaggcttcccaatatctggcagcacacgatattgcatacgagcatctataggcagcttagaaaccgtgaatcttgatgttgtccttcttagcaatcccagcctgaactaggaacgtggcaacattcttacgctgatcaccttgaagctgaatgacctggccaagctctggatcttggactacagtaccattgcagcagaactcctttttcagatccttgaggatcttgttgtaactgtactccttctttaagccctgaacagtagttagactctttctgccgttgcgctgctggatgcgcacatgcacataatcctttgctccagggccagcgccggagtcctcagcatttgcctcagcaaacggatcgaaggcagatggaagctgaacgtcgagatcagacatgaaacttgtttgttgattggttggcaccggacagatcaagcttttactcgttggtctttatgtggaacctgtcctttttttcggtggtggagcgcacgcgaggcggaaggcgagaggagggaggaaggcagataagacttgacgcggacgcgtgggcgc

SEQ ID NO: 386872 - DNA, 801 bp, Oryza sativa
  unsure (1)..(801): unsure at all n locations
ccatgtcttttttngtgtgaatgccaaatccaaacaacaattgcatgagaagcgaaagcttagataaacacagtatacttttgtttagtagacaatataacagaaccgaattttcatataggtagcacgtacaaaccatattgaaacaagttgcatcaataaccaagagctcacaccgacacaaattcaaatgtcttagaagtagtaaaaactggtattatcacaacttcaggcttcagacacttcaatattttgtatcatataatagcacataggcattaatgtgtagcctaaaacccgtgtattttgatgctctctttctttacaattccagcctgaactaggaacgtcgcaacatttttacgctgatcaccttgaagttgaatgacctggcctaactctggatcttggactacagtaccattacaacagaattcctttttcagatccttgaggattttgttgtaactgtactctttcttcaagccctgaacagtagtcagactctttcttccgttgcgctgctgaatgcgcacgtgtacatagtcctttgatccagcaccaacgctggagtcctcagcattggcttccgcaaacggatcaaaagctgatggaagctggacgtcgagatcagacatgaaatttgctagttgagtttgattggtctcaaacagatgaaagctgatttctttgtctcaatgcaagcttgatcggcgaagcggagcggaggggaaaggcgagggagacgacgacgcggcacggcttgaccacggggcagacctctcttctgcggacgcgtgg

SEQ ID NO: 386873 - DNA, 641 bp, Oryza sativa
  unsure (1)..(641): unsure at all n locations
cttaaactaatgcaggtttctattgaaaggatatcaaaatattatagtctctacgtactcgacagaaagagcaaagctcttgttcgatcttccagtagggatgtaaaagttatacatacanaagtgtagnaaagctaatgattataatataatatctactttacaaacttttgtacttcggtgatgtcaacaaactcattgactccactcgtcagtagatacctgtcaagaagatcctttgccatggatttgcatccaccagggatagaagactgcatatttattgctatgttggggttatgtacactttggcgaatgtggacccaccccagttctccctgtacatgtacgcatcaacatcaaaaggatcatcattcgtgtccacgaggcatccttggctaaccgagcaatccccacagtcatcgagaacccaaccatttagtttcccttcctggatatggttcctaaaagtctcgactgcttgagtgcccctttgttttgcatacttggcttctcccagaatgttcatcctcatcagcttggactcagccggctcctcaaggtccatgatgagtgttcctacgcttccctccaatcccacgagtccggacgcgtgggcggacgcgtgggcggacgcgtgg

SEQ ID NO: 386874 - DNA, 514 bp, Oryza sativa
gtaaaagttatacatactaggtgtaaaagctaattattataatataaatatcttcttaccaactatttgtacttcggtgatgcaacaaactcattgccccccctcgtcagtagatacctgccaggaagatcctttgcacatggttttgcatccaccagggatagaagcctgcatatttattgctatgttggggttatgtacactttggcgaatgtggacccaccccagttctcccttgtactcatcaaaaaatttagccctgtacatgtacgcatcaacatcaaaaggatcatcattcgtgtccacgaggcatccttggctaaccgagcaatccccacagtcatcgagaacccagccatttagtttcccttcctggatatggttcctaaaagtctcgactgcttgagtgcccctttgttccgcacccctggcttctcccagaatgttcatcctcatcagcttggactcagccggctcctcaaggtccatgatgagtgttcctacgctcccccgc

SEQ ID NO: 386875 - DNA, 1041 bp, Oryza sativa
aatgctatggttctttcatatgatttctgcatttattcagaagtaattcgtcgagatcgtgcaacaggtactcatttatttgcgctatactaaaaaatattctaaagtgcagccggatagatccaatctattctggaaatagacaactcgcacacactccctttccaaaataaatcaatacaccaaccactacagttagatttattagatttgttgctaaaatatcggtattaagcccgaaactcccagcggatggccagtgagctaaaaaaacgaaagaatgggttacatttttcatatgctctcctcttatagataggacgaacaaagaacaaagtttttcgatcacttacttcgctcgccctttttgatcggtttttttaatgcaattttttttaatagaaatagattcaatttagtaatttcttttagattaagtcttagatctcgtttgacctgtgaaagacctcctttgttgaaatgttcccaaaattcctaaaataaaaggaaaaatactttccactgccctaaacaaagggcgggaagcaagacggcgaacatatcctctaaattgatcatcctcaaatcagctattcctggggtggggtattgtctgtccccataaatagaaaactctaggagtaataaattaggagtaaagtattgatataattggaattgcagaagcaaataccaatttactaaaaaaagaagaaagtatctaatctaaaggactcgttttcttttttaggattaaacaaaagggttcgcaaataaaagcgccagtgccacaactagtccataaattgttaaagcttccataaaagctagactaagcaataaagtaccgcgtattttaccttctgcttctggctgtctcgcaataccttctacagcttgtcctgcagcagtaccttgaccaactccaggcccaatagaagcaagacctacggccaatccagcagcaataacggaagcagcagcaattagtggattcatgatgagttcctcgtgtcaaaaaaaagcggacgcgacgcgtgg

SEQ ID NO: 386876 - DNA, 440 bp, Oryza sativa
tttttggatacctagcacaagcaatttggattaaagtttgagaaagaagcttgggatattgtccacagtataccttcttttgttgatttactcttctacaaattacaacatatacagaaatacgggaaagcatctgtacatttcacttctctattcaatcttattacaatgcaggagcttgattgataaacaaattacaaagtaaacatgtatatgattactacccgtccatctgcacatccacctagctggtgttatattgagtttatgcttcaaagtaacagcatgtacaagctagaaaggctaggtgtcgtttcagtaattctgtgtatcggtaggaaaattgcagacaatgatattgttgtattacttcttgaacgtttggaacagtgtgactattagaattgcaggcatccaatattttcctgaagaaatcaacc

SEQ ID NO: 386877 - DNA, 816 bp, Oryza sativa
tcttaagcgaacaattctcacctgcagagaatgttatacggttttgcagccaattttatacaactgtcactcattcactttccaagaatacaccaagagcttcatagatatagcatacaaaagattaagaaaaatggcagagtctgcattagctcagtcctcatccacaaagattgtttcttgcttgaagagtcccccaaacacgggcctcacatccggcttggattccggctgctttggtgttggtcttgtcttctgcgccgcgggcttcacaacagctctctgtggtgccagcttctttgcttttgcctggcctctcacggtggcgatctgcgcttttggttccacctcgtctgagtcctgagtggccactcctgcaagttgtgtgctgagcttctcccatgagaagtccgtgccgaaccctttggctctgctcagaaggttctccagagaagcttgcgcctcacttgcagctgcctcatcagagggcgtcttcttccccccggctttgaccgtagtagtgtcctcttctgcctgacgagttcgctgcgaagcccgagtctcctcttctgcctgtgcttttgcaacagcatcttggtactccttccttctactgtcctcagggatagctgagaaagcctcctctatggtcttggatgttactgatgagctagtggaaacttggacaaccttgttctccgcgactgccacgttggagaagacatctgccacaagaccagcaatctgcaacttggacaccttgccggtttctgttgaggaagtagtgctggacgcgccctctttgcggacgcgtgg

SEQ ID NO: 386878 - DNA, 1691 bp, Oryza sativa
  unsure (1)..(1691): unsure at all n locations
nnnnnnnnccaatttaatttaatggctatcgtgtgttatcatctcatggttactttaatggtcattaccaagatgacatttgcattttacaaaacctcaacaatggcctgaacaaaaatcccccactatgtgatcaagcatatataaataaacgcaggaaaccaggcacttgacacaagattctcagttacacggcagctacattaactgggcgatatagttagtatatatctagctgttcaagcaataagagaaccgctaatcaactccgtagcaatacccccaaacttataattgtttgtagaacaggacatatgcttggtcatgcaagaccttgttcagactgacaggtgtgacgttatcatcgtcgaagcgaagccactgcccactggcagactttgcatcggcagtgtaatggcccctggacgggtttgccccaagatgcgtgatggttgcaacaagctcatatcttctactctctgatgatggcgaactcagcagatcacgactaagaaccagctcaagagggaagtgaattggcttgaagagtttcgtgcagccatgacttccataactaaacctcttcaggtgcagtatcattatctttgaaagtggagtgtatcttcactgattttctagccgtcaccaacccagcctttccagcagctgttctgtatccttccaaagattcaggagcagcaaacagacgaaggcatcatcaagttctgaacagcatcggggaatatgtcaagatggatcagccgaaaaggctgaacgggtgactgatgctttggtaccagtagctttcaccacagctttgcagctggcctccaaaaatagcagttaactcggagggaacaaaactctgactcctcattatggctgacttgttcttctttccaacagtctcccaagcatcatcatcatttgatgaaacaatcataccctcctttgaatttgagccattgccattaagcttcactagttcatcatgcattctatccatcgcaaaacttaagaattcttgagcatcttcctgccttggcctagaagctgttccagctggcacatctggagtaaaatttctcagaactgtgtcaaacatggagggaataactgattttgaagctattgtagcaaacttctcgtctttcttaacatttgaatcatcgagcacgtcgaattgagagatgaactcaataaatgcattcagtgttgggtaaccagccttaggtatattctggttcctcaagttctgtaaaagctggacaaaaggccagcatgagagcaatgcctgcaaggatgaattcaggaagcatatatttcctgtattcttcaaaccatgaggaagcaagggcttgttccgaaagtcctttttatttaagcttgtcacaagctcatccactggagctgcagtagttggtgtatcaatagctggccctccattttcagttatttctgggactaaactgctgttttgattgcgttcgatcccatcatggtccacctctggaactgaaagtggtgctgggctgctgacatttttagcaggaacactcgtgagaactgcagctacagccttctgattattctcaatgacgccattgttgggagacacattggcattggcagtgggagatccattgaatagcactggcttgccatttggtaatgtaggagctactgtttcc

SEQ ID NO: 386879 - DNA, 745 bp, Oryza sativa
ttgtagaatgccttttttttttcctttgaacaatgtaaattcacaagagaatatggcagagacacagaagtaagtgtgaaatgaggctacacataattgtgctagctccaaaagatcaaacaaccacagctccaaaatttcaggctacctcctgccggtatcagcatcttcagtttgctcacaagagctctgtcctacggtagctggttgtgtcaaaacgtcgagtaggcttaatcagcaattcagcattgatcatcaggcgtatagtttagcaagatcatcctcatatgtcttcctgagcacttccctcttgagcttgagggcagcagtgacaaggccagactccggggtccatggctcagatatcagcttgatcttggccgggatctcaaacttctccagtcgcgcttgcttcgcagcctttgatagagatccaagcacttctttaacagcctctggcttctggcacaaatctaccaaatcggtgtatgtaactccctgctgcgaagcccagttttccagctcattgtgtgcagctaccacaagtgcaacacagtaactgtggaaaggatcagcatggatcatgatgttctccacatatgggctcacaatcagagcagcctccaccttcccgagagacacatattcaccatgttgaagcttcacaatatcctttttacggtcaatgatttcaaggcagccatctgggtggaagcgcccgatgtcaccagaatcggacgcgtgg

SEQ ID NO: 386880 - DNA, 458 bp, Oryza sativa
aatcatgcaaaacttttctttgctccaaggtaattttaaacatacaaaacttatgtgctctgagaatatgccagctacagtgtcattcgctccttaggggggaaggatatctagttatctagataggggaatcactgaattggcagttgacccaaccagaaaccgcaaaacatgttctagacttcctagtcctatcttcacttggtaggccgatcccatgtcgtctctgatgtgaggctgttcccgtagtacacctgctttgtagattcatccaggtatgcctgccatccagaaggaagacccttgcagagctctgcaagatcaggttgtcctttatgcagatcggtgacactcactggtgcagaaatagtctcgctatttgcctccttttttgctttcgctcttctgcgtttcacacgatcacgccagtcaccacccaagggaacaaaattggcatt

SEQ ID NO: 386881 - DNA, 642 bp, Oryza sativa
tcatggtaaacaactatagtctgttgtttggctgtgtttagttccaggctaaagtgggaaatttgaagaaattggaacaatgtaactgaaaaattgaagttcgtgtgtgtaggaaagttcgatgcgccgaaaaatttaaaggtttgaaaaaaaaaaggttgaaatcgcccttcttttgttgtgctctgcagcttctccttcgaacaattccgaaacccgctcgcccagctccccggcgggtgtacctgagttttttctcgagcttggggtgcgtcttcaggtacacgccgtaagcagtcacgaccttgtcggacacggcccttcgcaacgcgtcgcggagcgcgggatcgcggacctcgcagcgcgcctgactctcatacgctctgtcaaacgcggcgctgaacttggccacgacttttgccgccggcttcctgcccgcgggttccaagcaagccacgaccggtgcccagcaagcctcggcgtagcccgcgacgtgccgctccacgatgctctcgcgcgccgccgcccactcgtccccgagcagaggcttgcagctttgcagcacgaagttggcgttgttggcgtggaagaggtggtgccgcgaaccggtcgccgccgccgtcgcgtcgtccggacgcgtgg

SEQ ID NO: 386882 - DNA, 217 bp, Oryza sativa
ggttccaaatcaagatttgttactagtataacaagatcggtgcagtttgagatgcaatttgatcacaaaatgagatgtggagaatctgtggttgtgaattttgttgttgcattcagttgtgggtgtcgtcttcgtcttggtctccggcgatgtcgtccgggttgaggacggacgcgtgggcggacgcctgggaggtcggagccgtacggacgcgtgg

SEQ ID NO: 386883 - DNA, 891 bp, Oryza sativa
ctaggcaaacagggcgatgtcaatatatataaaaatgaattggtctaggattctatagggtggaggtagcatggcgagcgtgcagcattatattacaacatatacatcatccaaaggcagttggaacctttagacacccctccaaaaaagagcttacctttctgcgcactaaagccaaattcccaatcagcacaggaattaacagtaaaacaatcaccctagatctaactataccttgccgttctttccagcggctattaattgtgcgctacttgaagtatctcttggtaccacagaataggaaagagtaatctgcgctggactggggactgcctcttcccggaatttgacatcgaaggcaacagattggtgaagacgaacttcgtcttctttgcagtagtaaaccttgcaattgatccttcccgttgatgacgatgaagatttccttctgtacttgagtgatgcctgtcctgagtttagaaaaccattaactggctctatctcaattgcatcagctggttctatgtccacatcaaatttacttcgagcttccttggagaaatggtaaccatcagggacagagattgctacagacacatatccttcaattgaagaaccgccatcaatgttaataacatccgtgtctgctgatagacgtcttcttaggcgtttcaatgtctttggttttggtgatggtggctgaactccaatcaaatctagcgtgcgcacctcagcgcctttctcattcaaaactatatacctgattgtgctattgtttgtatctgctacaagaagccttccatctcccacttcaacaagtcctgctggctcagacagttgagctgacaaggctggacccacgcgtccgcggacgcgtgggcggacgcgtgg

SEQ ID NO: 386884 - DNA, 581 bp, Oryza sativa
  unsure (1)..(581): unsure at all n locations
nnnagtactatatcctttccagagtatgttatcttgaaattggcatttatgttccattattataatgcacagtatgggggttccattctgatacatcatacattcacgtggtcttcacaatgctacataaaccttcgcggacaagttttgaaaatggctgaatcaaggcaaaacataagcacgattgattcccaaagagaagcagattaatttgctacaacttggatgatctcacttgggcgataagctgccttctcagaatctttcctgaagctgatttgggcacgctgcccacaaaggtaactctcttcaatcttttgtagtacgccacctgtttttcaataaatttttggacatcaacttctgtcaatgaactgtcaggtgaccgaacaacataggcaatgggaacctccccagctttagcatcaggaaacgggataacaacagcatctagaatctctggatgagatagaagtaacccttcaagctcggcaggtgcaatctggacgcccgcgtgcgtcgtccgcgaggggggtcccggtacccaattcggccctatagtggagtcgnattacgcgcgc

SEQ ID NO: 386885 - DNA, 508 bp, Oryza sativa
gatgatctcacttgggcgataaactgccttctcagaatctttcttgaagctgatttgggcacgctgcccacaaaggtaactctcttcattcttttgtagtacgccacctgtttttcaataaatttttggacatcaacttctgtcaatgaactgtcaggtgaccgaacaacataggcaatgggaaccttccaagctttagcatcaggaaacgggataacaacagcatctagaatctctggatgagatagaagtaacccttcaagctcggcaggtgcaatctggaaacctttgtacttaatcagttctttaagtctatcaacaacaaaaagctggcctcctccgtcgaagtatccaagatcaccagtgtgcaaccacccttgcttgattgtaaattcagtagcccgcacattgttgaaatacccttgcattacatttggccctcgaacacaaatttctcctacttgattgggcggtagatgttttaatgtctttatgtccggacgcgtgg

SEQ ID NO: 386886 - DNA, 901 bp, Oryza sativa
  unsure (1)..(901): unsure at all n locations
tttaaataattttttcntttttttgctaacaggaacggggggctgtactatctggcaaattattctcttccattttagtcaggggacatggaaaattggaaccaacaccaaaccccattatacgattctcccactgctccaaggctaacagaaacgggagaagcaaataaagcaatcagtcacggctataattctgtatacatgcccctaccaaaatctttttcttatgtaccagctttgctctacacaaataaagcaacatctaccttatcctagcggggccatcacactcgacacaattgttttgcccggaaacaagatggaaagccttgaaaaaaaatccctgacgcccactacatcacgagtaagctgcaccaacggcgtcaaccagcgggaagcaatataggcctcagcgtaatggccatatgttttgttgccatgtttcttctgttgaggttgtcttactttgtgatctctctttggcatggcatgctatccagacgaggcctttgttcagggcttcaagcccagctattaatcttctcaattataaattttcacaggcttctcaaaagtgtgacgattctgattggctgtataagacctttttggtgttgtgtcagtatgttccaagccaaggtattgttcccaagctccataaacatctctcctctgaaaacgtgcagatacaacgtcgccatcctggaggtattcaggccgattcatagatatgaatgcaagcttccacttggagaattcctcatcaggaactcgaagttttttctgaattcgttctaatatctctgctgcagtttcaccttcacggataaccagcaaaaatggatctccaaaattctgaatctgctgattttgattaggatctttcatgaaatggtaacaa

SEQ ID NO: 386887 - DNA, 637 bp, Oryza sativa
gctgaaaatctgcacttatttagccaaaacgatgtagaaaagatccatggttctttaaatccacacaagctcttttacaataaggtcacaagccctgatggccattcgaaaatctaaatagttgtacatactgcttaattttgaaagataggattgaggaaacaaagttcttgtgaaaactttgaccactagagtaatcgatttgccagaaacagcttaaaacagcaagtttataagtgcgaaccaggaacacgtagaatcatctggccacagtaaaatagttataagcatcctaatgacccatgtaatttcttcctgggcctcctggtggagtactgccatacccaccaccacccccatagccgcccaaataaccaccagcaccaggcatcccaggcaaaccactactacccagtcctgcagaagcccctgggttaggcaaccctgaaccatttgcaccaactcccaggatgttgttcagacccaaccctccaccctgggaggcaaggatagctgtcaaggcctgccccagagcaggattcacccctgggccaccagctacacctggccatgaagtcaaactggatactggagatggcatcacatggcgagcgcgaggcgtgggggaaccttgggg

SEQ ID NO: 386888 - DNA, 586 bp, Oryza sativa
tcaagaaaacattcccaaactacttccaattgaccggaacaccttatattttgtggtgttgatacacaccgcatccatatttttcttaatatcggtatctagggctataatacaccccccacctctgttatttcttttctaaaaaatactgtgtgtattgtattgtatgtcgctccacatgagagcagaaatgcctacctagctacttctctattgctcaatcactgtggctcggtacaaaccatttcttttactatacaaaaatgaagctaaaatcattggaagcacacttaagtatctgctgagtatggtctgggatcaccataactagttcccttgaactcatagcccatctttgtatcaatctcttcacaaggtatatagctaaccaaattctccatcaaatggccaggtcccttaagcctctgaatcatgctgtcgaaggggttggttctcgttgttctggctgtcaagcggcatgtactgggacatgatggccatgatctccgagtccatgtacgacctgagtctgtacttgtagaacacatagccggtaatccccacgccgggtacgcacgacgccacc

SEQ ID NO: 386889 - DNA, 1025 bp, Oryza sativa
  unsure (1)..(1025): unsure at all n locations
nnnnnnnnnnnnnnnnnnnnnnnnnnnnaaaccaacacactaacatggtaattctccggtactcaaaaaagaattccaaacaaggcagcatgttcatgcaaaattgcaccaattactcgagaaatctgaaagtagctggggtggattgatcgaacatagtgcaagaggttcttgggctattataactcaggaatgaacgattttaaaacatctcaagctctaaaccaacttaggcggtggtagcagcagccttggcagcagaagaaagcttggacctcctctttgccaagctctcgctccggcgttccctctgctccttgagcctctgggcaagaagcttctggtactcagcagcctccgacttcttcttggcgatcctcttcttcttgtcagcgattctggcacgcttcctctggagggtgaggggagtcacaagacgctggatcttaggagccttgctcaccttcttgccattcttggtagtgaatgtcctgcggtaggtgttgacatatttgcggacatcatcatccttggaaaggttgaagagcttcctgatcttggaggccctcttgggtcccctcatcctgggcttctcagtgtcagtcaagccaggaaggtcattatcacccttctttacaatcaccaagttgataacagagagatcttggctgacaatgcaaccacggactgacttccttctgcgctcaccatcacgcctgccatatccacggaagcagggggtacccctgtggaggagaaggcggacacgtccagaagtaagcacaccctgcttcatggggaaaccttgcttgtcacagcctcccatgatcttgaatacatagcccttgaattcttcgccaagagcatcaccactgacttcctgggagatcctcttgtcataaaatgcccggagcttctggtcgtcatcgatctcgagcttcttctggcacccggtggtcgggttggcgatgttgaacttcatggcggcggcggcggcggcgctagggctaggcttcgcgtcgaaa

SEQ ID NO: 386890 - DNA, 1181 bp, Oryza sativa
  unsure (1)..(1181): unsure at all n locations
ccacccggtgcggccccccttttttttnnnnttttttttttttgacagtncttcaaaatttgagttcacagaaaatagcactagaaatgcataacagggatataaaacagtcaaggagagagatattacgagacatcaaatgacacaaaaaccaagaaaatagtaggcacaagttatatcatcagaatacatagcaactgcaagtgctcaaaaattgtgacaaagcatcatcttgtccacagaaaactgctccaattaccgaagaaaaactagcagcaccatgtctatccatcacaacgacaaacacttcctcatctataatgttttaaggtcttataggggtcttatgctgcttatgcggtggtggcagcagaaagcttggacctcctctttgccaagctctcactcctgcgttccctctgctccttgagcctctgggcaagcagcttctggtactcggcagcctcggacttcttcttggcaattctttgcttcttctgggcgattctcgccctcttcctctgaagagtcaggggagtgacaagcctctggatcttaggagccttgctaaccttcttgccgttcttggtaagtgaaggttctccggtaagtgttgacatacttgcggacatcatcatccttggcaaggttaaacagcttcctgatcttagatgccctcttgggtcccctcatcctgggcttctcagtgtcagtcaagccaggcaggtcattcttaacccttctttgaaaatcaccaagttaataacagataggtcctggctgacgatgcaaccacggacagacttcctcctgcgctcaccatcacgcctgccatacccacggaagcaaggtgtgcccctgtgaagaagaaggcggacacgtccagcagtgagcactccctgcttcatagggaaaccctgcttgtcacaaccccccatgatcttgaagacatagcccttgaattcctcgcccagagcatcgccactgacctcctgagagatcctcttgtcaaaaaatgcacgcagcttctggtcgtcatcgatctcgagcttcttctggcacccggtggtcgggttcgcgatgttgaacttcatggttgcgaagcggcgcgagctcgcgggcggcgagcggcgagtgcgcgggggagcggcggcggcggcggcgcgagggctagggttttt

SEQ ID NO: 386891 - DNA, 798 bp, Oryza sativa
tttttttttttttttgaaacacaaatgatcaccgatatgaaataaatggatgaattcatcacagaagagagtctagaaacaacgggtctgaactttcatcgatccatatagtaggttacataagctcaaattctcagatttaacgctgattttgttaagctctctttcctcgtaacctacttcgaatgcgaagtcaagtactgttcgtagtcccctgggaccaaagcaaataagttactcgtgcgggggagctcgagcagagttttggcaagcaccagctccaacactaacacctacaggtcaatgactcgtgatagcttctggatgcggttcagcaggaagtccccttgcttgatggttgcctggtagaaagcatttctggcatcaggccggttcgtctccaggacgcaagcaaccttatcgatcttgcagtggagctttccagcagcaatgaagcgtgacaattccaggtctatgaaatcaacggtcacaccaaatgcagaagccattgcttccatcgtcacactcttgtaggactcgaggaattgtgaatagacaacagtacggacttcacgcatgtagtaacggaaatgaggctgcaggtaacggtctaacttgatctgctccgtcaagccagagaatgcggcaaaaaaatgacttgtactggcaattgtagagggagttgagaaactcagagaggtgaggtactttgccaattacagccaggatctcaggtgcatctacaacctttgcctttagggatacacgatccaatggagataacacttgtaagaactg

SEQ ID NO: 386892 - DNA, 438 bp, Oryza sativa
gagaaaagtaagccaatgaggtttactgtcaatttgcggattaagtgattcacaatgcttataaactaagctatttacatgtaaactagcatctttgagaggaaagcgaggtacacatcaatacattggaacaaaactctcaaaaacctggattcaatgaccaaaggaaccaaagatctcaagctccagatatagatatgatgcttgtcagcggtagcaagaggtcctaacccacaccatgaacttgaaactaccgacgaagaatggccctgtaggatcgtcggtaccccatcctttttcaatcttgaccatatgtaaacagacccatcattagcaccagcagctatggagttttcatcagggcttatgcaaggcctgccccagctgctaaccactctgttacccatggccttgaattttccacaaacttccattgtt

SEQ ID NO: 386893 - DNA, 436 bp, Oryza sativa
tttatttggacaaaatgcactagttgaccaaacatttataatgttttaagtggtggaaacaaccgctagttccagacacattgaagtgattgctcgacacatacgcaaaccgagttcacaaagcagcataagagtatacatgcgataacaacaggaaacaaatgaagttacgctcgtactagattctacatatcgtttattctagcagtgttctactggtaattcctcccttgtccgtccctctcataagccggcacaccggcattgtagttatcgccgccttgctggtagctagggttgcctccttggccatggtagcctggtgcatagccagggttgccaccttggtaaggaggcgggttgccgccctggtaacctggccctcctccctggtatccagggttgttgccttggtaagcagatggtgggggtgggg

SEQ ID NO: 386894 - DNA, 629 bp, Oryza sativa
tttttttttttttttgatataagattgtccagatttattatttttggtggtatcacatttttacatagtttgtttttttggatggagagagtagatgaaattgtacgtaccgtcgtaccgtcatgcacaaagtacttgaacagttgctaatgccgcggttgccaatgcagataacccaagataaaacatcactctagaatttaatttttgttctcagacacaaacctgcatgaaaaacatacaaaggctacgatataattgcagtgcagctgcttatttatactacagttcaggcccatttggggggtccattcaaagcccaaatccagccccacttcagtctccccgagatcagtgcttcgcacacggcttgcgccgatctcaaacgaggcggcggcagagggtgatgccgtcggagaccgggagctgcacggcctccacgcgcgggtcgccggcgatcttggcgttgaaggccacgatggagcggcggatgtcctggtcgaactcctccagcacggagtcgtcctccagcgccacggacccgccccagagcgtgttgtcgtaggccagcacgccgccggcgcgcaccagccgcagcagccgctcgtggtactcgccgtagttcccct

SEQ ID NO: 386895 - DNA, 1382 bp, Oryza sativa
  unsure (1)..(1382): unsure at all n locations
nnnnnnnnnnnnnnnnnnttttttttttttttttaacagaaatcaacaataggaatatgaattatattctgaatccattacaatcactttgctttgcatagagcaaggctagagccaaggacaaagccagatgatcagaatttcagaagatacatatatgtttcctttgcaataactttttaccttagcatggccattttcagagtcaccatgtgttaacatgccaaaacttctctcaggctctcggcactggtcgtcaatgctactacctttttcctttacattcagaactatgtgacaagtgaacaacatagaagcacgaactaaagaaaaaacactaaaacatggggtatgagagaacatatatgatttggtactctaacggcaagcgcatttcatatatttttgaagagctttggtgaagtttccatgcaacctcattggccgcgttctatgggcttcacgacggcgttcggccctagtccgagccatggctggctctcaggctccttcttgactggggttgcatctgaaggagaagcctggtatggcgtctttgcattaagacgatcctttctcttctcaaggaacctgtggagtgatgccttcctagcaataggcatatcagaagcattcgcgcgagcaggcttctgagcatcggcctgagctgtaggcaagctactgaccggggccggcacggccataggggccttggtgttgtctgtaacagctgctggtgcaggtgccgcggcattctgaggagccaccgggctgcccttgctagccagctgcatcaagccctttgccttgtcggctgggaagtcgttgaacacgagcaccttcccaccatagaagatggtcagctgacgcttctcaggctcttgttccctagcatcagcagcagaatcggcggtgatggcatcctgctggccaaagccggcgctctgcgggaagagctccatggtctccttcttcctctccgcctccccgggcagcaagctcatcgtcgccggcgccgccctcggagcctcaccctcacctctgatgccgaggccgagctcggcggcggcggcgccgttctggcggacgtagcggctgagcaggctgcacgccatggcgaagctcgtcgccctctccccgccgacgccgacgggcctcgcggaagccgccatctctccaagctcccttcctaactacccggcgtcgatccaatctctcctccccgccgctcgccgcgccgttcttgctgcaccaccccggctcgtcgtcgcctcgccgccgtccagctacctccgattcctcctctcgccttcctgccgctgctgctagtggttgagctgcgcagagcgagagctagagagagagaggctcgtgcgcgagcg

SEQ ID NO: 386896 - DNA, 756 bp, Oryza sativa
tttgttttttttttttttttggttttttcgatcctccaatccaaagttgcattttgatattcacagggtatatttacacatgcattcactcatcgaaagttcgaaacaaggaaataaaatttatgagaaaggtcattttttataaggctttatgagcggcctgcagtgacagggggtacatcagcggggctggacgaaccacgtgccttagctacagactgcagattctgaagatgaccatactgcgacctgagggcgaagggctactagattactggttactcctacagtagagccatgttattcctgaagcctaacctgagtttagggctggaattatatcataggactcttagatggaggccaggatatccagtttctgtcttgtatttgtcgaaaagatcttgcaaggccacagtaaattgttcatggacttcatttatctcatcaatggtaggctgagaatttttctcaacctcaatgggtctgccaacaactacatgcatgggcgttgggaaagggattggtgtcccgtatcttccccaaaagacaatgggagtaaatttaattgctctagcaattttcacaaacaatttgcccttcggtctccaccacttgtacgcgtagctctgtccgaaacagaaaacgggaactaaagggcagccagactgcatagctatcttgacaaaccctttccttgatttcaaaaaggcaatctctgcggacgcgtgggcggacgcgtgggcggacgcgtgg

SEQ ID NO: 386897 - DNA, 585 bp, Oryza sativa
ataattttttttttatctatttttattatatacgtttaatttttatttatatattatatgtttttttgtatcaattaaaatgcctttttagcttagtcccagctaggcccatgattttatttaatcatacatatataggattatattacaaacacgctattaagcggttttttatttggttgcagcacacataattcattcgttcgttcaagcttaattatgcatgctggtccttttgccatctgaggctagctgcttagaaggttgcgttccctcctatgccagtaatagaaaaacttggaacctgccgagccggtgcaggtgcattagcatagttgccactgaggaaggcagtgccattgaagctggagccagacacagggacactcgtgctgttgccgatgttagagttctgcatgccgttcatgacgccctgctgcatctttccttgcaccacagggctgatcatcacgctgctcccattggtagacatggttaattatgtgtctaagtgtttttttttgtctcaaatgtagtgtcaataatttgtatttgttggtggcgctattggctctttgagttcat

SEQ ID NO: 386898 - DNA, 527 bp, Oryza sativa
caaatgggtttgtcattgagcatatcctagtagtaatggacatgaatcacaagcagagcagctggggtgtacatacaactcatgaatacatacacgcaaacgcaaatagcacatctttgctctactacctacttccccgttttgaacacgagaattttatcctttttccaagtgaattgaactgattttccatgaaaatcatccaaattcctccgttttgaaggctgcctctcgaatgttataatccaagaaggcaaaaggaatcaaagggctcctttcgactctgaatcggatgaacatttctcagaaggcgcagcagcagcaggagacaaggcggctccacgcggcggtggcggcggggcgacgcctcttcctgccggcggccgcggccgcggcgtggcgcggcggcgcggcggcgtccatggagctgagcatctcccacatgacgtgcacgtcgctgtactcgcacgtccgcacctcattccgcagcttccccaggccggtggttcgccggagcggacgcgtgg

SEQ ID NO: 386899 - DNA, 794 bp, Oryza sativa
  unsure (1)..(794): unsure at all n locations
ttntttttttttttaagaaaggcacaaaatcaccacgtgattaatgacatacaaactgcatcaaaacaaagcagatgcaaatgttatgcctataagatgagaaaggcagggaaatacattaaacgaccgacaaagctgtcattagagtatatatcgaagcagctgtgctcaaattaactgaaaaagtttttaatcacaatgcatgcacttccagtttgaagttgcttatgataagatgcataggaatgtaacaataaactggaaagttttttgctgactttccgtacaaaataaaccatcaaacgaacatcatcacaactccaggtagctcatcggtggaagaacagaaattctgttagatcgaatcaaccacagacaaaccccaagtcctgacctcggatctagtggtgggcggcgccggcggcgccctgcctctcgagctcctcgaggtgggcgaggtggcggcgctccttggggaggttgatgaggtaggagaaggccatgaggccgtagatgacgtggaagagcggctccggcgagctggtctcgatgtacttgtcgatgtagcggtcgacggcctggtcgctgctcttcttcacgttctcccagctcagccgcggcttcaggtaccccggcacctcccgcaccttcatcccccggatctcgctgatcagggctcgcagcgccatggatggatctctccgatctcgatctctcctcttccccttcctcgcaacgtcagggctcgcggctagggtttggtggcttccgcccacgcgtccgcggacgcgtgg

SEQ ID NO: 386900 - DNA, 821 bp, Oryza sativa
tttttttttttttttttttaacagcctaattccaatgtgctcattcggtctctcaccaaatcccattactgggtcttgacaagtcacaacacttctgaatgcgtcatatattacatgaaacccaacaaatcaagctaaataggagtataccatacatggaataggcagtgatctccaaatgaaaaccacagagaacatattgcaacacaagaacacaaaagcgcaccatttcgcgttcgccatcttcgtctacctcatcatgccgaccgggacgccaggagctcccatcaccgacgctccggtgacgcctcgcctctgcctgtccacattggcagcccaaccgatccccaagtcgaagccgcggttcttgagctcccggtactcctggcacagcgcgcagtactcgcagcagaaatggacgaggaaatcggggcaatccccttcgtccaggtcgaactgagccctcatcttggaccggtagaagcacgagtacaggcaccccatccccgacgcgcagaggagcgcgtaagccgtcccgctcgcgaggcatgggcaggtgcccttgtccacgatgtcagcgacctgcccaaaggtgatgcaggggcacacgcatgtgatgagacagtttccgggatcgtccatgcagtggaaaaggccggtggaccatcgcgtcagcccgccgccggtgcgtggggtgttcatcgtcggcagctggtacgttgccggcggcggcgccgtcggtggagcaccggcgctgtacttgttatacgcgtcgggaggggcggagggatacattgcttgggaatacagacctttgttta

SEQ ID NO: 386901 - DNA, 792 bp, Oryza sativa
gactacaaattgccatttcaggcgtacacatggacatggctttttttttggtgggcattaatggctggatatcccgggtccattagaaagggacggagtctgcactaaattatatcaaacagaaaggtaaaaagaagacgctcatcacagcaaaatggcgtgtcgtattacaaatatccttgaaacaagtaacctatggatcggcttatccaactaaaacgggaaaattgttgatcggttgatacattagtgcaaaactgtgtctgccatgcccttcgaagttccaaagaaccgtaatgttttcatgcaagtgcgaagcacttgtctggctgcctagaaaaatccctgaaggacaagtcgatatctaacttaatctgacttgtcagatttctcctccggctcctcttcaattggaccaccttcagtgacaccaacttccgcaggacggagaacacgatcatgtagcatgtagcccaccttcacaacagccgcaacagttcctgatggttttgaaggatcaggaatttggaaaagcgcagcatgcttatttggatcaaatttctcattaagtggatcaaacttttccactccaaacttcttgaagacctccccaagttgcttttcggtcatctcaacaccctctaatagggtgtttagtagcttcactgcttcagcagattcattagatgtatctatctttgagaagctctcctttacaacagatgatgccctagataaattgtctgcaacatctaacaagctcttggagcggacgcgtgggcggacgcgtgg

SEQ ID NO: 386902 - DNA, 755 bp, Oryza sativa
aacttaaccagtgctcaagtttaattgttgacatgactaatcaggtggcgtataagtagtacaacaatcagctgactccaaatgattgaaaaggtattctaaaagtacagagtagagagcagcaactcgatacattctacagcagggagaacagattcaacacatgaactagaatctaccatcaagaacataacaggttaagctggattgcttcttatgttgccctctcaaaatctacaaactaactagtcataatataatgataaatatcgtcggataatagtcgatatagatcaacaacagggtggctgtaatacgattgcccacatgcacccaaatttggtcacaaatcgtagcgatgctccacaacttcatgggcacttcctttggatgtaggatactccatgttcttcgtattctgctttggagaaccacatttgctggaacgacccaagggatgctagaatgctccctccaatccaaacactgaatcgcctctctactgaatttccacttgccaaaacctttacacgagtattaccagaagattcctcaagtacttctttttctagcctctccttcaactgcagaattgatgatgaaccacctgaaagcagaatactgcttagcagttccttgcgaatgtcaacatcgcacctatttacactatcaatgaccattcgtcggacgccacgaactgacattgaatctgcaaatccatcaactccaggaatagtctatgcacggacgcgtgg

SEQ ID NO: 386903 - DNA, 633 bp, Oryza sativa
atctctacttttttttgggacgggcccgaagtgaactttgtgctctttatttacaatcttgacatcaaatggtacatcaggatatacttatgtttctactggactgcagaaacttgtcactgcaagcatcagcgtctccaacttttctgtcatcaattttggtgaactcaagggtgatgaaagcagattatcgctttcattgccaatcaacaaactacaatccatgagcacgtcttttatgtgcatatgagcagatgaaacaagcaaacatgctagagaagaagacgtgttctatacagtgaatctcgagctagctatacctcttcctgccatcctatcaacacgtcggcgactcaaagggcaagccaaaaaatgatcgaaccacacccccaatctcggtcttgcagagtgggcacactgcatttatcttgagccatttatcgacacattgcacatgaaagaagtgggtgcaaggaagctcacggagctcatcatcatctccgtacttagtaagacagatgcagcacacagcatcttcagctgaaacaatcctttcctttttagttcctgggcccaggatgccaccctcgctaagattctctgagcttgaagcatggtcaaccggacgcgtgg

SEQ ID NO: 386904 - DNA, 558 bp, Oryza sativa
  unsure (1)..(558): unsure at all n locations
tatcagaaccagcactagtgctgcatatattaaccaatnaatctactgcgggttgaaggattacaacccatatgatacaattgatgcaaaatagcaggcaaagtggttatatacagagagtatatctcctatatacacggtacacgcttccatcaatccattttaccggcgaaagcccagcggccagtgagcggcgtcaggcaggggcgaagcggtccatgagcatgcacacggtggcctcggagtcggagaggaggatgctgctgtccctcgtcctcgtcgtgatctcctgcacaacaccatcaccaaccttactcttgcagctctccccttcgctctgagctcgctggccgacccacggcgtcggccgccggtgccgccccccggcccatcttggcgaactcccccagccaaactccaaccaggcccgccattgattaatgattagtctgttcctctctgcctctccgagctagctgagtgaattcactagcttcgcacacacactccaaagaaaagctcagttgagtagtagtacttgactggtcggacgcgtgg

SEQ ID NO: 386905 - DNA, 485 bp, Oryza sativa
ttttaaaaagggaatgaaaacaagctaactaatgtagccataaatgggcgggtgaataaagcatccctttggtatacaagttggcccatatgacaggattccagctttatgtatggaacacttctaagtatgtgctcgcaatcaccactgcacatctcattcaagaacccaagacctaatacatgtaggaattaaactaaaatctgaaaccttcacaaaacgtttgtattcgctcctctagcatggtggtgtccataaaccacacctctggttagctagaaacaattaactaacccgtatattaacctgatatcaccaattcatagtcatgcacctgaatacctgatataatgcttctttcatctatcccaagtcatatatgaatataatagtactctcgctaggaagtgatacctctgcttggctgattattattaacagtataattgcccatgtaacttgctggtatgtttgatttgatatct

SEQ ID NO: 386906 - DNA, 212 bp, Oryza sativa
acattagaaatcggagggggtacgctctattgaatataaaactaagaagtatataggaatctcaaaggccaagcaagtgataacgagttcaatttacatccaggagaggaagagagcatctaattgaggtgtcagatcgacaacaattggctacaaagagaaaaaaaaaaaagcaaggtaccacgttgagttgtacatgaattggttttttc

SEQ ID NO: 386907 - DNA, 698 bp, Oryza sativa
ttactgcacaagcaaaaaggctaacttgaatttgtgttgataatgtacttcacacattaaccggacaccgggtgaaggatttgcaccaattgttatggttgagtataaccgagaacgtgggataaaaaaatacacttacaattgtgacaaagagcgacttagaatgcgattcaatcagaacattcgtttcttcccagtgggggagttcgtctttgtgcagagaacccttcttcctttggcgcgtctgcgcttcaggacctttcttccggcagtagtcctcatccgtctgcgaaaaccatgtgtacgggcaagcgacttcctagatctatttctcttggtcatgcacagagcagcctttccagccctaatctgcagaatccgggatcttcctgttgtaactctgttgtagctgaattcaattcccaaagatgacccagcaaatgaggaggcagaggtgaaggtcagcgacgccgagaccgcggcagagagcgcggcgggggaggcggaggcggatgacgtggaggaggaggagacgaaggagctccggaggaacggggtggcggcggcgcccatcggggatgccctgcgagagcggaggccgccgccgatagccgccgctgagatcctcccggagtggagtgagagagccgccattggcgagacgagggcgagcgccatgtttggggagtcgaggtgaa

SEQ ID NO: 386908 - DNA, 849 bp, Oryza sativa
  unsure (1)..(849): unsure at all n locations
gtnttttttttttttttttgatacaggagggcggggtgttattcaatctgtctcanccttcaaaccaagccaaacctgtccttcacattggcatgcatatgatagcaagcagggcagccattaggcattagcaaggctattcagtaattaccaacaacactgcactacatacacatctagtactactacctttcaggtgacagatttgggggcaggtgatagttacgaacggtgcgtgccatggacagagatagcaatccaatcctatatgagtatatagcagcagcagcagcaacaggaacatgccctcgaacatctcacggtatgactagaagaaggtcccttctggaggctgaaccagcttgcggctgtgcggcgcggccatctccttcttcagctgcgtcaggatattctccatggtgtactccctctgccagtttgccagcatatggaacttcttgctttcgaccagtccggtgtcagggttgacgcagggcatgttgatcctggagtggaagcgcacggtgggcggcttgtcggggtagtccttgtcgcagaagagcttcagctggtagatgcgcccctcgtgcacagagttgagtggtccaatgattgtgccggtccaggagcgcatgaagatgtcgtcgccgtcgtcgtccatgccgtagctgacggtgccgtcgccgatgcccttctcgccacgctccagctcctccagcaaccggaagttgcgtggcactactacgacgctggaggacgcgccgccgatcgtcatggccgccgattgatatgcttccgattaatccctcctccactccgcgtgtggagagcagagacacggacgcgtgg

SEQ ID NO: 386909 - DNA, 547 bp, Oryza sativa
tttttttttttttttgctccatctgaataatgtgcttcgattcagagtctgggtatcggtatgtacttgcatacaagtttagcttattgaacaaatgatcaaaattacaagcatctttcctatcaaattagaggtagatggtagatggctcacacatgtttagagaaacacaatttctttctccatcgactttgtcctcgagaccactaccagaattccgtcaatgacgaggcaggcgacagaattgtccacaggaggtgaggtgactctaccatgtactctaccaccagagcaaaaattagctccttcaaaccctcatccgtagcagttcatttagtcccacaataacccaagcaaaacatttgctacggaaccacatgtatcatgacaaatgaggcttgtacatgccctgaaggtatactagaggtttcacttgctcatagtggttgacaggtagaagttccaataaatggcacgggaggacatgaagggcacacgagcagacaaaggacccatcaaaagtaatgatcgatcaggaatcaaaatt

SEQ ID NO: 386910 - DNA, 456 bp, Oryza sativa
tttttatatcaaaccatctacgttaactttgcttccacttcgcacaacagcaagaggttaccagggcgcccccatcattttttacacaaccactttacaagtcgaagaagcaacagaggcaagaagatggaaaacacagtggaggattcagctcagcagcggcttccaaaactgccgctgctcacaataccacatgcacacacaactagacacaaaggcttcccctttcaatccgagaggggggcaatgccgaaagcaatacagctaaagtgattatctttttaagagaggtaactgtcagcctacaggttagctcctgtattatctatcagaggtgaaactaatctccatcaagttatgaggaaacgccacagcttcttcgctgaagatgttttctcttcctcttcctcttcatcttcctcgtcagagtcattgttgtcctcaagtccatctaca

SEQ ID NO: 386911 - DNA, 523 bp, Oryza sativa
tagatgatgaattgaccccgacctggtccatcagaccaaagtgcaattgcttgcctctacaaaaacacagctgtacatgaccatctgccggtttatacaggtcaagacaatataaatatactgtgcacctctaaagaaaagagggtagaaaaatatacaccatgccacgggtgttgtgacgccgtactatttcatatctaaccacaagattaggaatttactccctccgtctcaaaatataagcatttttagccggtggccagattcatagccaaaagttgttatattttgggacggaggtagtaggcaaaataatattcagtgcaaatacaacaactagcattttacatgtactacttgtagtaaggaccatgtcacgatcattgtctggagttgcttggctggtcctgctgctgctgctgctggtggtttaacttctggtacattgccatcatccggttgtacgcctccatgccgttcggttgctgtgcgttttgctgcgccccttgggaagcgaggaaag

SEQ ID NO: 386912 - DNA, 673 bp, Oryza sativa
aggggtgccaatttttttgtttggaaccaaattggttcttcgtaaaataaacactacttgcttgaccatcctagcttggtgcctgtgactacagcacagggagaggaactccgcaagcacattggcgcaacgtgttacatcgaatgcagctcaaagacacagcagaatgtaaaagctgtgtttgatgctgccatcaaggtagtaatcaagcctccaccaaagcagagggacaggaataaaaagaaaacccggcgcggatgttccttcttctgcaaagggtgtccattgtcccaagaagaaggcctaagtatgcctcaagtgaaccaaagaggggttctttgatgagcagagcagaggtctgtgagacaaaatgatgtcttgtgtttgataattgctttatctcaaaagttccagtttgatagttgcatttccaacctatatatatcctgtttggcaattaactactacctccgtcccaaaatataacaacttttggctatgaatctgaacgcacagttatccagattcatagctaaaaatacttatattttgggacggagggagtactagtagtagattactatcctgtccatgtaatgtattaggaaggttaatagcactccctacatctcagaatggaagttgttttggttttaaaaaaaaaaaaaaaaaa

SEQ ID NO: 386913 - DNA, 549 bp, Oryza sativa
tttttgtaacacaagaaaaagataaattgccacacttttgcagccaagatactctacagtttatgagtttagtgagcctctccacgattaattattgtacataattatacatatcgaacaacataaacaaacaaacaaacaaatttacatgaacatactgtaattaattattatacagcccacacagcacacaacacaaacaccatggattaattacaaacacatcgatcagcctcgtgtttaatttattccgatttccgaggcaaggaaaggagcagaggtagtagcaagcaaggaaattaagcagcagagatgatcgtgatcgacgccggccgccggccggccatcacatgatggagcaggcgttggcgttgtcctcggtgtagcaccacggcggcggcgggcagacgggcggcggcggccacacctgcggcggccacggcctgatgccccagccgcagttcccgtggccccccgagcacccgcacggcggcggcggcggcggcgccggcttgcagacgcacacgaaggcgtgcgagcacccgcacg

SEQ ID NO: 386914 - DNA, 556 bp, Oryza sativa
  unsure (1)..(556): unsure at all n locations
nnnnnnnnnnnnntttttttttttttttttaattttcaaaaaggatcttttaatagaattgcaccaatccagctgagcaagcaacagaaatgctcattttgaaaatacattgcactgcttttacaggtatgggcaataggggagtctgacatattgcattcagtctaacaatcttaataaagccctaaaacttgtagaagcaatctcttcaagttaacttaatgcgtgggccatgatactggagtcgccaagaagttacttgaggttccaaacgcaagcacattgcatcacagggaagttcagtagtaaactataaggctccttttgctatctaggactcatagcagcctcttcaccagccgttttggccagtgaattggctctctcatcatcaaaaccaagggaagccaatactttatgaccagctgactctttatctgaccatatccccaggagcagatgattggcggttacttctccatcttcacctgatttcagtttttcattgatagcccaatcaagcgctcgttgtgcggacgcgtgggcggacgcgtgg

SEQ ID NO: 386915 - DNA, 580 bp, Oryza sativa
aagctaaattaacccccagcaggccatgcatatatacgtgtgaaaaaaatcgtctgaagcggaccgttcaaccgcttgtctacgacgcatggagaacaaaaacatcaacaccagggctatgagcagtattacccagtggtatctagaaactgaaatataaatttcgccattttatacaacccctttggaaaaatttccccttttcttcaaatcaagcgcttacagaactatatatgtttacttgcaattagttttgtctataaaatataactggttctctaatatacggctcctgatcctgatcttgcagaacatttcctgatctaagcaattggcctcctattgctttggatgaattcctcctgccctgtaacccagcatagtgttcagccctcggcgatcatctgctaccaattgttatcacctcttgcgtttggttttgacgctggtggaggaagatgggttactgtgccagtttcttttcctttggttgatgaaccagttgttgatctgctttagctgtagccctgtttcttggactagccgtgccttgtcttcctctgttggatcggacgcgtgg

SEQ ID NO: 386916 - DNA, 597 bp, Oryza sativa
  unsure (1)..(597): unsure at all n locations
taggcgattggatcggnctcaggntgaagattgaaacatcgaatggattcacgccgcacgatagtgtatactaaacgcgacgatcctgtacaatgtaaagagttttgacaggttttgtttaatttcatgaattccagcggcaatgtacccagcttgatgcaacttctttgccactttccaagccagatctctcccactgtcagtgagtgaacccacgtacagctttcagctacgctatcttacaagtgaagttattacaagcatcacggcgacgatgaaaaatcgctcgtgcctgcttcagagagtgtagtttcctggagttgggtattgagcagggaggagaggaggtcccgctgcaggtacagggctaaaattgaaggggtgattgtatgcgcaagctggcccaaatttgcagaccccatagcgaccatagtatgtgcacacaggctgatcaggttttataggcaagccaagaggggcctaagaggctcctcgctcggagggcaccgcgggaccttgggggggggatatttggacttcaaacccaaattttcgggncangnggggggganaccttggggngggaancctgnnntn

SEQ ID NO: 386917 - DNA, 473 bp, Oryza sativa
  unsure (1)..(473): unsure at all n locations
tttttggcaaaaantacgaactgtacttcacttcacaattcacatatantacagtcacattgacaaaactttcagtatgtgttaacaaattcagcatcaaagaatatcctggagttgtttcaatcttggatccaactctgttgcatcgcccatttcataatcatccgtaggagtccggtatgcatcggcaatggccttccctttgtccagcactgctgatggcacactctgaaggaggttgtctaaagctccaagggctacactgattttgctcctcatgacatcgacagccgctgatgggttgttccctgatgcttgtagtaccagtgagtcaagatcttccaatgctcgtaagcattcgtccactgcatcagaggcagctttgccttgaccactgctagaagcatactgcgccactgctcgaatattgatacgcagagaagatgctggaccagaacgaagcggacgcgtgg

SEQ ID NO: 386918 - DNA, 1655 bp, Oryza sativa
tttttttttttttttttttgtattaattccacgctttttcctcgcatggttccatcattttattttccattgctaacaaacagacatcagcatctaccaaaaaaaaaaagataatctacagtactgtattgtattattccagtctctgacttgatgaattttgacttacacttcaaccactgggctaattaattaattaattaagctagcaaccctgaagaagaccttataatgggagtaataattaaccaatgaagaaacagaaacaggaaagctagccccctgtataccgaatcaatcaccatgtactatgtacatgccactatacacacacactgacatgccacccgatgcaattgcaccatctttctgctgctgcctcgtcgtcgttcagtccaggccagggtccccccaaccacggtctcatcgccgcctttctcgagtcctcatctcctctgtctaatccaatccaatccacttaagacacttcttttaattatctttgagtcaactccggcggctcgcctgagtcaaagttcaccggccatgaagctagctagcctgcacggtgtccagtgacaccattgctgccaatgcggttgttttttttttttttttggtcgtctagaatggcttgccccagtacatgaggatgtcctggaggagggggtcgctgccgccgccgccgaggccgccgaggccgccggagccggcggggtcgaggatggaggcggcggggttgatgggcccgacggtggcgaaggtgcgctcccactcgctgatcttgggctggctctgcacctcgcacgcgaactccggcgacagcacctgctccgagcagctcgagtcggcgtgcagccgcggcatcgagtccgacggccggtcgtagtacgccgccaggtccgggaacgccggccccgccaccaccggcttctgctccggcggggagctcaccgccgcgttcacccccaccatcggcttcctctggacgccgccgccgttgctcaccatccccgccgccgccaccgccgcggccggcggcttctccagcccgcccttcttgttgtaaatccggcacagcacccaatcatccaacctgaggctgttcttcttgcgggcggagcggtcgacgtcggcgaggcggtactcgtgcatgatccagttggtcttctcgcccttgggcgccttgccggcgtagaagacgagggccttcttgatcgccaccggcttcggcgagcccaccggcttgtcggcgccggtcgccttccagtaccccgacccggcggcgcggttcggccgcgacccgttcgggtacttgcggtctcgcggggagaagaagtaccactccttctctccgtacagcgccatccggggaagctgccatggatcgaacttgtagaggtcgatctcggcgatgatggggacggcgatggggaggccggcgcagcggcggcagaggtagtgcatcaccagctcctcgtccgtcgggtggaaccggaaccccggcggcagctgcaggtcctgaccgccgctcatctctctcccccttctccggtgatcgtccgttctccggcgagctcgctactactactgctctctctgtggctttatcctactagtgttgggaagcgcccacgcgtccgcccacgcgtccg

SEQ ID NO: 386919 - DNA, 480 bp, Oryza sativa
ctagccacactcacagctggtggggttgaaaataaattcgacttctttttcattctgctacatatgtctccctcacaagtcacaagggaatgtaaaaatatcaatcgggtgggggatcattcggtacaaaattaatcaatcagtagctgtggcggcactttttgcttcctggtcctggaacatctaaggcaattcctcagggatcaggaggtacatacatgaccaacagtctatacatcaatggatccttccttcttttagaagggcttcccagcagcttccatcatcgacttcgctcggatcagcctctctatttgcctcacaatctcaaggaccatgtcctctagggtcactgagtcgatgctactgtagcccagttgagatgccacattttgtactgaaacagttatatcagaaactccatagcgctcttttagttcatcctgtcgctgtcggactctgctcattgcctcaataatc

SEQ ID NO: 386920 - DNA, 1277 bp, Oryza sativa
  unsure (1)..(1277): unsure at all n locations
gttcaatactttttttttattggggaaggaatcaatacaaccctgtcgagcacaaaaggaaaaaaaataaaataaaagagagaagaccctacacctaaactcttggacccataaaatacacgctacaaaacctttccaacaactctatgttgctgctggggtgccagtgccagtgccagtggagtgacaaaaaaacagaaccgagtccactgaactgaccagtacaatagaacctacaatcaagcacagctcttcgacccaatcgactcaataaaccaaaagggaaggtactagccttcattctgtctgtcgtggtaattctttcttaccactcacttgtgctgaggacaacgcacatgatgctctcagacagcagtcctgtgcgaaccaaatatatcactagcagtggagcatacaaaaactaaccggccagaatccatcacatcataaaaatcacacactggcgctgcacgatgagttccctttcttctctttgcttccgtcccaacgtatagtaaagaatagacaaccaaaacaaattccgtcggtatcctcatactccgtatctgcctaatctctgaacgaccgctggctctagggtggacatgcactgttcccaacccccacttccgagcatctgcttgtatccattcaaaatctggcacacttcattgtgtaaaccttcactctttatctcgttccaacttgcacaggcctggcagataaaagttagtgaacccacagctccagttgggtttgctgctaccttggctcgtaggccacccaatgcatcctctttctcaaaatcatctcgtatcatgcacaaggcattgcaccaggcttgcatgaaatggtccatgtggggggccacaatgtctggacagacccagcaaagcctccccagagtgattgcgctattttcgagaagtgacttattcaagccctcaggagattttaaaataggcaccaagcaagaaacaacagtgataaccacaggtgaaatttctttgccaatcttgattgctaattctccaattgcccaacaggcgttgttagccaatgacacagcctccttcacacattgcgggttcagttgcttcgcagcaacattaaggaattcttgaaggcggggatgcagatgtatagggcaaaccctaaaaaggtcccccangagggcgagagcaatctgtcgaacatccgctgcttcanccatacaacattgcaaaaaaatatctctcaaactgctttgtgaaaccaggctttcaataccagcgcca

SEQ ID NO: 386921 - DNA, 730 bp, Oryza sativa
  unsure (1)..(730): unsure at all n locations
tttttttttttttttgaaaaaaattgatgtgttattaatgttcctcaggtgatatacaggtacagtgggtgcaaagttacattataaaatgggtagaaaatgtgttattcaccgcgaacacaaacaaatgaaacaaccggtagcagcacaagctntgagaacagctagcaacaaagagatttctaaccatagcgttatgtacactcaaaattaattatacattgaatcatgacgggtttttttttttttgtattgtcttcagacggagttaagatcttgggaaacttggttttgccaccttgtaagaaggaacctcgccaaagggcttacggtaggggcagccaaggaaggtgtattagccattttcttgttacttggaggttcagagggaggttcagatttctttgcgaaaactgatgtcgccgtctcttgaagactttgcagcgaggactccttcgagctccctagccgatggagcattctgccaatcagcacctcacaagatccaggtagctctttttcgagatgcatcaaggaatcaaggaatgtatgaacaactggtccgttaaacttgtcaccagtagcctcttttagagaaggaattatcaatgacgagagtgcaggtgaagatacagaaccagaagcttgaggagctgattgtccatcatgtatctggcgtggtttgcgaccttttttcatgtcagcattcttacttggggcatcatgactg

SEQ ID NO: 386922 - DNA, 580 bp, Oryza sativa
  unsure (1)..(580): unsure at all n locations
atatgagcagggtcttaacttaatttgaccagctaccctagtancttaactttgttgtcagttgttacattctatataaaacttaaacttcctacgggggaccaaattaatagggtaatacagatcacaacactacacaccttcctttttctatcagcagcctgcctattctctactctactgggctcttctccccgaaacacagggcaaaaaagaaagaaaggaaacctaaacttttcgtgatacagaccctgtattcgcaaagccattagctaccttttggggaggagggtttcttcttatagtttgctagactacagtgagggcagatgtattccagcccatctgtctttgcataatccttgaaagtgcctaggccttgtcgtctgtcacaaccaaaatgtgcccattcaccacacaaaccacagttcacccaatctccaggagcgctactgtggcaaagcaaacagcattccccgtntacatcatcatgagctagctcatattccagtcaatatgtttcgtaatgtcttttcagtgtgtttccaacaccggtccggacgcgtgggcggacgcgtgg

SEQ ID NO: 386923 - DNA, 719 bp, Oryza sativa
gaataggttgatctctattaaattcagagtagttctgtcacaaattaacaaccacatttgtatgaggcctacagttgtgtattcttttcaccaaatgcagcacacatcattccctaataccattctatcacacatctgtgctttcttgtacatcataccgtgtcgcttctttatctctaaagataggatgtcctaaccatccaacagctattccatccccattgtccattgagcctgctctgaataatcccccctttgccggattattaccaatataatcataaaaggctaatttttcgggaattttagaccaagcttctgataaactgagattttcggctaacccatcactaactcttcgatatatttcttgctgaaagtatccctgatcccactgataacgagtaggcccaaacaattcaattggggtagttgctgacccataccacatagttccggcaactacgaaagctgcaaaaaaaaacagcagcgatactactggaaagtacagtttcaccctcgcccccgcccaatcctttgatagacgttgaggtggacggacactaagatggaataggcccgctaatatgcccaatgtacccgcagcaatatgatgagaagctattccccccggaacagaaggatcaaaaccttctgcaccccacgcctgatttacagcttgtacttgtccagttagtccataaggatcagacacccat

SEQ ID NO: 386924 - DNA, 1134 bp, Oryza sativa
tttgatggtatttggataggttgatctctattaaattcagagtagggctgtcacaaattaacaaccacatttgtatgaggcctacagttgtgtattcttttcaccaaatgcagcacacatcattccctaataccattctatcacacatctgtgctttcttgtacatcataccgtgtcgcttctttctttttacattgaacaacagtggccactaattacagcttctccttgctaataaaactcgctgagactgtagttcagttcattcctcggaatcggaatccattgggcatgatccgtcatccacggtggcgagtggatcaaacatgtgcgagtttggatccatgcaccctgacacaatgtccagcttgcagcgatctcccccctcttcgtagtagctgcccatctcgcagcttgtgatgacaacgttttcgtctgggaagatggctctgtcgcatgccccttctctgttcagttcgtctgctagaccctcgttgaagaagctcaagggcttgttgagccatggcttggggaccctgaacttgagggtgtacggtccatcccaatccaccccgtttgtgaaggagaagacgagggtcatggcatgctgcggcacacgtatcctgatggtgtatatgggaggatcagctgatcccctctcttgcagcgtcatctgcctcggctcaccaccgcacatgatcggctggttaaaaccaccattaaacgcgatgccaaactgagcgttgggggtcatcttggtcgctgccgggttgtagaaaaggatcaggccctctccagccgatggaggaagaccgttcatggtcttccagtagaccggcgccttgcccagctcgaactccgcccatgtcggaagcgagcactcgttggtctgcggcacggcgggcgccgtggccgcggcaggcgccgcggcggcgcctgtgcggactaccctggccgacgaggaggaggaggagctccggtggcaggtgatggtcgcagcgcttgccggccgccggggacggcgctggacggcgccgccgccggtgctcaggcggctgcaggaagagagcgtggccatcctacagtctacacttgtgaattgtgatagctgcggacgcgtgggcggacgcgtgg

SEQ ID NO: 386925 - DNA, 844 bp, Oryza sativa
  unsure (1)..(844): unsure at all n locations
ataaataatttttttttnttttnaaaatcaccaattccagatccaattagaaccttgcaatattctttgacgatgcatatgcctgtaatagacccatgaaatatttttcgcatgaatattaacacgcactgttttaagatatcaaacataaattatttaccttctcgatccaggatccaagaggtagaaggatatacagtgcatgctatatggtacatgccttcatgctgaagctgactagaagtgtcaatacaatgacaatttattcacacagatacgttcacaatttggtggtagatatatacatgaatgatactgttcagtccaggctggggccgccgctcatggactcagtgcttgtgcttcggcttttttactatcatcacggtgcagtgcgcatgatgagaacagtagtcactcacgcttccaagaacagctcgtttaattgctccatagccatggcttccgacaaccaacatctccgcctgatgcctctcaacagactcacaaagaacattcctggcatccccttccagcacttcaaacagagcatcactcacctgggcgcagagctccctggccttctcgatgacgcgcatggagctcttcttcaggtccgcctccacgaccggcagcacatccgccgcgcctggccccgcgaggccgacggcggcccccgcggccgccctggcgttgacgacgaccggacgcgtgggcggacgcgtgggcggacgcgtgggcgcacgcgtgggcgaacgcgtgggcggacgagtgaacggacgcgtgggcggacgcgtggacggacgcgtgggcggacgcgtgggtcgaccgggaaatacggacg

SEQ ID NO: 386926 - DNA, 497 bp, Oryza sativa
  unsure (1)..(497): unsure at all n locations
tcncatgatgagacagagtactcacgcttcaaaaaaactcgttaattctcaatagcatgcttcganaccaacatctccgcttatgctctcaacagntcacaaagaaattcctgcatccccttccagaacttcaaacagagcatcactcacctgggcgcagagctccctggccttctcgatgacgcgcatggagctcttcttcaggtccgcctccacgaacggcagcacatccgcggcgcctgggccggcgaggccgacggcggaggcggcggtgggcttggcgttgacgacgacgaggcggtactgcggcggctggccggcggcggcggcgaagaagtggcgcagcgtccactgcagcgcgtagtagctgtgcttgctctcgtccacccctaccaccatcgtcatcctcccctccgccgccgacgacgccgccgccgcttcctccgccatgtcctcctgtcgatcgcttacgatctagtgatctnangncncctncc

SEQ ID NO: 386927 - DNA, 528 bp, Oryza sativa
taaactaaatccttcacgttttactgcgacagaacagaaatagaggactatagcacaaaagacaactgagtactacaagataacgaacaggcactgccaatttggcaattttctgaaattctgaaatgcctgagaattgtacagttcactatactgctattacttccccaatcctaagctcacagtgcaacttaaataagtaattaagtaattttcttgattgatatcgaatcactaatcaggctgctcgggcgacggggtcgcaggccgggccaccgccaccgccgccgccgccggcgaggttgacgacggggcgagcccgcgtatgcagcctcgggacggttaccctgagcacgccgtgggtgtactccgccgagatgccgtcggcgtccaccatcgccggcagccggaacttcctcgcgaagctcctccggccaccgccgcctccgccgtcgccatcgccaccgtcatcaagctcggtgcggatgacgaggtacatcgcgtcctccacctccaccccgatctcct

SEQ ID NO: 386928 - DNA, 430 bp, Oryza sativa
ttttttttttttttttttataactctgagaacatatatgggagccagaaattcgggaataaaaaaacgagaattggagggacacactccttgccgctgcactatcaagtgcaatgcacgtacatatgcaccgcaaccttattattctgacgagtcgacgaacaagggtgttcgatcgattaattagttgggtgtgtcattaattcatgcgattgtcgtctcctttatgccttgtgaagccgccgtccacgaccaggttatgcccgttgacgtacttggcctcgtcggaggcgaggtacaccgccgccctcgcgacgtactcctgctcgatggccactccggcgctgatggcggcgtccgccatcccctccaggtcgtcctctcccactccgggggtcatctgggagatgatatgcatcatcatcggcgtc

SEQ ID NO: 386929 - DNA, 501 bp, Oryza sativa
tgaaataaaatgccttgctatattatacctatatcatatttgctaggggaaggagactataacatattgaactaagcttagatggcctcatttagacaggaaagccaaaattttagatacatatgctttgttttgagcactaaaatactaactcaattacaatggggatgaacccaagaacatggcctgctcaaagcagtgctacagcctcttggagctgacatctctcatcttcccttttcattttatagctagtttcccgccagaacaaaatggttcaagtctcagttcttgattgcacacagccacagaaaggtgccctcttctttttcttctgcgcaccgccgcgcttctccttccttccatacagataatccctcagaagaacccgagtgcgcttatcggagaccttgagccttctgtactcatgcttcctcttcaagctttagcaggacattctgtatcttctgaagttccagttcaatcttccacgttttccga

SEQ ID NO: 386930 - DNA, 662 bp, Oryza sativa
agatcaatcgaacaacagctctttgaggccgtctattcagaaggatttggctatgttgcggtaacagaaaatttacttctttaaaccatcttacagaaattgaaacagataacacaaatcagacaaggtaatcctccgccaactttaagataaccatctcaggaaaatgtctacaacagtcccaactgtagcatttttttttacagcgataacagttacggtaacaaacccactgggtagagcaaagcctccacaggaacaaacccaccccccaccagtgcttttgtcattccccactcttatgtcaaagacaaagatatgtcgatacagcagcttctaaaatagctcctctttgtcacaaaattcaaaaatcaaattcgccggtagccttgttgaatagaacatctcggccatttaaatgcatgattccatccttcaaagtgcatttccagcggttctttgtccttgtcactttgtcaaactgtgcgaggacaaggtgctgtgtgttaggctcatcctccccttgctcaaggtcatctaactcatcatcatcatcgtcatcttcattaagcggaggctcatcatcatcgcctacatcatttctcggttttggtgttccaacagccggtgtgggagctcggtattccgacgcggacgcgtgg

SEQ ID NO: 386931 - DNA, 660 bp, Oryza sativa
cagtgaacagtatagcaaatttgcaaatcaagttacaagcataacataacattgttaaatatacattattcaactgcatagaacgagaatttcgatctcaacaaacactagcttaggtcaccaagtaaaatgccaattcaagtctcaggctagaaacgcagaatttcctgctgtcaaatcataatattatgcaggcctcggtacaggtgaagtctgctaagaaaattctggttgtagttcctactggcaactgccaaactgccatacatgatatatactggtactacacaactggatgccacactggttggtcattttcctgccagaaaggtgtcaattatatgtccatgtctatcagtgcatcttcctcttcaccatcggatggtgcactggtaaggaagtcatctcctgatattttgcttatacaactgcaacgaaagctcacaactcgctttagcttccgattgtagaagaaaaagttgatcgaccatatgacccccttttcaagaaatggatctccatcttggtctggattatagctgtagatgtcagactctccgattttgataacctcatcaatgacattagtcatactgtctagaagagaagtgccctcatttgttgctgcccattgctttgaagcctcagataagtaggtgt

SEQ ID NO: 386932 - DNA, 619 bp, Oryza sativa
  unsure (1)..(619): unsure at all n locations
nnnnnnnnnnnnnnnnnnnnnnnnnnnnnnnnnnnnnnnnnaaggtggcaaaccatgcattgaaaggatcaaaaacacaagacaggaggtttttaacacagaactaacaccatgatgtttagctggataatagagtgcaattctagtagtagggttctacaagagtaaactcaacaagacaatattgccatggacttcatgaacttggagatactctatttcttcttctcggtgtgagcgtgaccgccaccagacctcatcttcctgaggacaccagccatctcctctctcttcttcttggccctcttgtgggtgccaagctttctctttgccaccttcagtgcacgcttgtccttgccaactttgagaagctcagtgatacgcttctcatagggagcaaatccagcaacctccctgatcaagttcctgacaaaggtcaccctcttggtggatttccccttgcggtcggacgggcgaggcggcagctcgcgcttggtgacgacgtggcccttgttgatgcccacgaagagcccggacttcggctgcgacggcgccatcggggagccctttttccttacctgggagaaatgaagcgcacgcccgcccgccgggaattcgg

SEQ ID NO: 386933 - DNA, 423 bp, Oryza sativa
tatacagaaaagacttaattaaacactcgaacaagttttcactgaaagttcagatcctcaaaagtccacgtaaactagtagaacttgttcggccacatttttatacaagcacgccgcttagaacaagtagacacagctcaactgaagactgaagacgacgatcgaagcaggctgcctagtgatggtgtcctccattgccgccgctcccttctctcggattgcccggcggcttcggccttagccgcgctgcccgcacccgagtggtcgcctcactgctcttcatgtcctcttctccttcttgagacgggtcggcagctgcaggttcaggttcagggacaagaacagagcttgcctttgggtcgcagaaagaatcgctgaggccgaggcagcaggcgcagacccgggctatgtacttgagcagcg

SEQ ID NO: 386934 - DNA, 1240 bp, Oryza sativa
  unsure (1)..(1240): unsure at all n locations
ttttttttttttttttagcaagtagcaagccatatagatacagatctggcacgctctaccatcaaagggggcagggaacagaaccagattgataggttgttctgtcaatttacaagctttcacagaacatgttttggtctctccagatatgcactgaagcaatcaaacagaaaagatatgtgcactgcagcaatcaaacagaagggtagaaagactaaaaaggtatcccaactctagcatctagcagatacaaaggtaggagtaaaaacagttacaaatgaatcttctccaattatgttggagcactaaaaaaacaatatgtagcattggacatagatagaggctttcaaactaaagatatcacacagtggaagaggtgaggatgatgatctacaccgatccggtagaatcaactggcgatatcgctggtgccatatcttctagcattcacagcctgacgagcgctgttgccttccagcacctccaacatcaattgtatcaggaagatatatctcctcttccggttcattcttgatagcattccttgctatacactcaaaagcagcctccacgttgaagccttctttagcagatgtctcaaaataagggatgtttcccttagaagcacaccaagctttagctttcttctcagaaacagtccggctattaccaccatcaacatcaattttgtttccaagtacaacaaaagggaaattctctggatctgatgggctagcttgaattaggaattcctccacgccagctgttgagcctttcaaatgacttggtaacattgacatcatatacaagaacacagcagtcagctccccggtaaaatgccacaccaagactctgaaatcgctcctgtcccgctgtgtcccaaatctgcaatgtgaagagccggtcgtcgatctgcacctccttggtcaggaaatccgcgccgatcgtcgctttgtactgattgctgaacttcttgttcacgtactggttcatcagagacgtcttcccgaccccgctgtcaccgaggatgatgaccttgaggagcattcgcctgcgcgacgccatgggcgcggatctggaggcggcggacggatcgggcggagcacgaggagggagaagaggaggaggaggagaaggcgagaagcaaagagatgatctttgcgcttctctttgctttgggattggcgtctcttgtgtgctcaagaaaaaaaaaggcgtttttttttggagggatnttttg

SEQ ID NO: 386935 - DNA, 658 bp, Oryza sativa
agtcatggaataaacacattaattttgcattcagtttttcctccccttttgcatcaggcataagactgaggcaacacaaattatctaaattatagcctacttttagggcctaaatccttttctaaaaaagtttgcttctgaattgtacgctacttttagggcatacaccctttttccccccttatgtattctggtgctttactgcccagaacatttctacttcttttgctgttcttccagggattcttccagctataagttcccacctgttcccaacaagcctgtgcattctgaaaacgagatcttcctcttcttccgtgaaatgaacaaaattctgtgcagtgttattaacttcttttgtttcacaaccatcactggttttggaattctttccctggctaccactgctgctatccattaggcgtgaaaaactccaatgaaatgccgagttgagatcttgtgctagctaagatcctcagacccttgttatgaccttatgttttctagggcccttctctgggtaaagatgagcaaaactctggtttttaaagagatgggagttggtagtcaccttctgatctagctgtcctgagtactgactaatgctgctggctgttggatttcccctagtcttccattggctcccttatctgtaaga

SEQ ID NO: 386936 - DNA, 729 bp, Oryza sativa
ggtaatgctatcactggaagggatttcatttatttacttgataagtgcaagccatctttgcagtgggatgagaaaagttcagagcattttttcgtctattcacataaaggtttgagacgggctgtatgctgacccaacgctgatgtccctttctttacgtttcgatgaagctcaagattcggtgaaccagggtctttcacatttggtgaaattgggcataggtttggactatctctttcgatgttctttaggaatatctcacgtgtgttctttttattttgggagcaatgtcagttagaccacaactattgcaaagtattacaaggtcacccgtggacattatttgtttagcatcaaaactgtcacttcataactgattacatccttctgggaaatgtttccaaacaccaaatttccccttcagtgtactcttttgctgttcttccagggattcttccagctataagttcccacctgttcccaacaagcctgtgcattctgaaaacgagatcttcctcttcttccgtgaaatgaacaaaattctgtgcagtgttattaacttcttttgtttcacaaccatcactggttttggaattctttccctggctaccactgctgctatccattaggcgtgaaaaactccaatgaaatgccgagttgagatcttgtgctagctaagatcctcagacccttgttatgacgttatgttatctagggccggacgcgtgg

SEQ ID NO: 386937 - DNA, 1236 bp, Oryza sativa
  unsure (1)..(1236): unsure at all n locations
gcaaggaatatcaatatagactactggtggcatggcacctcaatagtacatagagagtgagcgttaanctaagaaagagaggaaaacagcatacatctaacaatgactagatgctttcatcaacagaagtagcggataaaatcatgtaaaacacccattggctcctgcccacagagcagcaaaactttaaaagattgaagtaacaggtctgcggaacaaattattggccattgctttgcaaaacaaccaaagaattcgaaatttaacagccatcaaccacagacgatgttatcagggcctgagtgcaagcgctagaccaaacttggggggtctgtccaaggccttggtgtcgaattcaccagagattgtcaaaaccgacttgggtttaacctcatgctggagaagagcagcaagctttccagtgttgttgagccttgccttcacagctgtctcggggtcaaccttgtacaggccaccaacagtgagagtgttctcatttgttgagagcctgcgggttaattcagcaacaacagaggatttctgcttatcatcaaggtgatatacacctgacactttaacggtgtcacctttgtccgccagaacgattgcagcatgataatctggcttggttacaccttttcgcagcactgtacttggtaaattttcctgtagcagtgtcaaacccagctctgcaccaaaggcaagtccttgagcaccagctgttccagaaaattcaaccacaggagatggcttcatgccaacagcagtggcaaaacttgcattctcatggaagtattgcatctccacctttccagaattgtagtcaggcagcttgacacttgtcacaagctttgtggatggaaggacatcaaacacagtcaaagtagtagagatattagattctgtgtccactttgacatcgacgagagtactcttgtacttgtaaactgagctgacatcaagagtataaagcccccctttcttcacagctgtggaagtgaggcccactccggaggagctgacggtggagacggtcagcttctggtcataggtgtagtccttggtgagcagatccttggccctcttgccaatgtcggagaagaggccgggtcccttcatggccatggcggcggcggcggcttggggaagggggggaggggggaggcggccgccgaagagcagggagagagaaaggagaggtcagagaggataacacgaacaacccgatcggcgttg

SEQ ID NO: 386938 - DNA, 860 bp, Oryza sativa
tttttgtgtttttattttttggggattaaattcactgtcataatatattagggggtcctggagcaaagtttggtacaggcaatcttcagagaaaaaacaaaatgggggaacatgaacttacaataaccgatgaatgactcaaacaatttccacgaactaaccgtattaaccaatgttggcaacgtgagccacagttctctaaacacaaaaaaaaaatattctattgatcatttccattagcaaaacaaaatgcctcccagatcccatgggcaaactacatgtattattggacttctatccttgctatccaatcaggctccatacagtgcaggatttgttgcaattgtccccgatgtagttccccgtcatatattagccctgggcatccaccggaatgagaaaggacagccatatttaccgcattctaaaatattcagggcttgttgcgttttttggattcactgtaaagaattacgcctataactgtaagagtgtaaccgagcattccggttacagatacgggattcctgaatattagaattgagacaacaactgccacagcacctttcgcgttacctaggacctgtagagtcaatgcactagtatgcttagtcaccaagaaattggtcaaattgacaaaatatgccaaacaggaattgaacagcagcaaccaaacaatcgtggtgtcctttttggccagttctattgtaatgccaacaacgttgtcctccatgaagatggtagcagggagcaagagaataacagcaattggagccatgtataaaagcaaattcatagaattaagcttctccccctcggatgaaaggaggattccttgcaacaccgtcttcaataaacga

SEQ ID NO: 386939 - DNA, 621 bp, Oryza sativa
  unsure (1)..(621): unsure at all n locations
aaactcgaccaaacaaaaatatcaattagaaaacttttgacnaccggggaaagaggttaatttggattgacagagattacatatgagaaagaaaactcggccatgcattttctataataaacacaatgactcggtgagattactttgacactaacactaatgaccgggtttgcagaaactagtttgacttaatacccactaattaaaaatctagctatcctatttgttccatgacgagtccagtcaaacctgaaggacatgttgccttcagatgctcgaacccatcggtagccatggccgccttgagggttgcccggagaagacaagaactcgacgcaagcctccttgagcgcgcggcaatggtgctgctccgccagcgccagcgtcacggcgacgttgcccatggcgacgcggcggcgcagcctgtcctcgcagatcagcctcagcctctccatcccgtacgcgtccgccgcggcgagcagccgccgcgccatggcgtcgtcatcgtcgtcgtcgtcgggcagcgtgtcggtgtagatgaagtggagcagcgccctgaacgcgtcggcgtccatggcggcgagccgcagcgtcgccggcgacgacggcgcggacgcgtgg

SEQ ID NO: 386940 - DNA, 1560 bp, Oryza sativa
gggatactagtaaggggcggacagatcgcatatcatttgacttacagcatacacattaattcttcaagtctcaacttggattacagcgagattaacgtgcgctcctccctaacacctctacgtcacatcccgtagttaaccggacgtagagagagagagagagagagagagagagagagagagagagagagagagagtacatctattattcagatattattccaatgtgtttctggacaagtagcctaaactccgatcagtctcgagaagcctgcccgtgtgtgcaaaatccagaaatcacccaggacaaatttacatgatcccaaccgtatttgaggccattaacattgattaaagtcaaactatggccgttccgactccgaaggcgctatcatagttcctcaccatgttcttcgtcgagggcataccagcaacaacatcttcttcgatgccacattcgtttgtgccccttatgatcttgaagtacccatcatcgccccatcctctgttccactggtttgcaagcagccagtaatcctcgccagcatccgtggttccccatccaatcaacttgacagcatgaccacccatcatgccacctgtgatgtgcttgtatactcctgatttgtagtgtgcaaaatcctcataaacggtgaaagcaacttctacagggccattttggtagacctctgccattatgtcatgtggatcagaatttactctgtatgcattgacactgaaatgcttcttttccagccaaacttggttctgcaccttgcatttcttctcgcacactggcgtaggataagcaggttcgcatcctggatgcttacaaccgacctgatcaaagtatggatcgcactcatcggtaacaacaccattccgaacaaagtagcgccatgccatgataggatagcctccatcacaaccatcgccgcacatgaaaccgcagcatgccactaggtcattgacagatagcgaaatgttcatgttgaaatgaatgcagaaacgatcctggagacactccacagcaccaaatgcccaacacgagccacagtgaccctgatcaagtatggtcccaattgtgttacactgtgaccatgcagacctggcatcaaactcctttggaagcatcagcgatcttggataagttttgacagggacatcatttagcacactatgcggtgttggcttcactccaaggatatgtttgaattgcgcagtagtatagtttgcaaagtatggattccgtgcagccgtccagccagcattgggatgcttgttgattgcctttatgatgtcgtcctggatgattcttgaactgccgccctccttggtcatgagctggagatttgggattggctttgcagctctgcctgcctgggggccagcagcgacgaggatcagcagcagcagcagcagaggcatgcccatcttgttgcattgcatgctaggccttcctcgcccgtgttcgtggatcctataagcaagtcctctgtagttttcctgttcctctccactaaaaaaaaccgacggcgtgccgctcgcccgggtatgccg

SEQ ID NO: 386941 - DNA, 578 bp, Oryza sativa
ccaacacgagcaacagtgcccttgatcaagtatggtcccaattgtgttacactgtgaccatgcagacctggcatcaaactcctttggaagcatcagcgatcttggataagttttgacagggacatcatttagcacactatgcggtgttggcttcactccaaggatatgtttgaattgcgcagtagtatagtttgcaaagtatggattccgtgcagccgtccagccagcattgggatgcttgttgattgcctttatgatgtcgtcctggatgattcttgaactgccgccctccttggtcatgagctggagatttgggattggctttgcagctctgcctgcctgggggccagcagcgacgaggatcagcagcagcagcagcagaggcatgcccatcttgttggattgcagctagggccgattgcctgtgttctgaaatctgaaggtgaggactgaggaggattcctcttcctctccactctccagaccttgaagagtcctccactccttgcgtgttgctgttggtgttgcttgcttctcttctcttctttcccctacctcagtcctcagcggacgcgtgg

SEQ ID NO: 386942 - DNA, 409 bp, Oryza sativa
  unsure (1)..(409): unsure at all n locations
ggatcagaatttacnctgtatgcattgacacttgaaatgccttcttttccagccaaacttggttctgcaccttgcatttcttctcgcacactggcgtaggataagcaggttcgcatcctggatgcttacaaccgacctgatcaaagtatggatcgcactcatcggtaacaacaccattccgaacaaagtagcgccatgccatgataggatagcctccatcacaaccatcgccgcacatgaaaccgcagcatgccactaggtcattgacagatagcgaaatgttcatgttgaaatgaatgcagaaacgatcctggagacactccacagcaccaaatgcccaacacgagccacagtgaccctgatctgcgcatgaaaatcaacatttcccatggtttggtggaaaattatt

SEQ ID NO: 386943 - DNA, 376 bp, Oryza sativa
gaaccaataaagattatgagaggaagttggtgtagattacagtttcaatgggacatggcttagtaattgtgatgacagtttcagatgagccccattgaccccggaacataccactagacatagttgtaaacaacgtacaaaaacacaaactcttttacttgacccggggggtatcctgaatgatacggaccatcggacgctcacactttctggcatatataacttctccaagtataatatatctctagaaagaaatcaacctcagcggaagccgccttccgtccaataggagccaccggtggttccgttctgattgctccccttgctgggggtgctgggattgtaactatcaaaattgtcatcctcggacgcgtgg

SEQ ID NO: 386944 - DNA, 834 bp, Oryza sativa
  unsure (1)..(834): unsure at all n locations
gagctaaagctactgctagacaattgggatgtatctggggtttccccttggggtggatgtgagcctccaaatgagctccctaaatgcatatggggggaggaacgaacaataatcagatcannccctcgccttctccttcccgagccctgcattnggcttcagtgtaggggcgtggcgcgggtgctcttcnaagagctcttgtgtgaggggtattcgagcgacctatgatgaaagaacgctttgctggcgacatattcttcttatctttcctggccaatctctcacgctcatcatattcttggttctccttctccactagacgaatgagggtctcgcacctcctagctagctcttgggttgttctagacttcacaaaccaatcaaatcggaacaagggcgacatgcgaaaggctgctttcagttcatcccagtttccgtatccgagtttgtgcaccatgcataacataaaacgatcacattcttcgttgtataacttccctttattctggccatactgaattttcaactctaaccaagggttcttatagcggtctagctttttcccaatagctttcataatctcatccttccggtatatccttgcttctcctttctcaatgttcttaataactcggtcataatcatttaattccttgtatctttcctggaaaactttagcgtaccgctgcacctcctcttctgttttcccctccatttcagaggatatgttctttatgtcattacgaccgtacttctcacaagcacggatgaatgtattgaagtccctccttgtccatgtcgaaaagccctcttccaatagctgcggacgcgtgg

SEQ ID NO: 386945 - DNA, 743 bp, Oryza sativa
  unsure (1)..(743): unsure at all n locations
gcagcagaacacaggccaaatatagtattatcaaaacatgtgacagaacatttgctctcacggttgtggaatcaaccacgcagaaaacccatcaccggtttaccagcatccagccagctccataaaatgacagctgatccaaaaaagaaaatcacgcgatctccatcaatgactacaagctctagcattcgttctttcaggcaagatcaccaaacatcatttctgtgaacctaaatatcaaaaactataaagaaagcatacataatgttcagataaatataatggccatgtgcgagagttctgaaagggctggccaccccccatctatacccctatacaaagccaatctgcaagcgttttcgtggtaccatggaggcaggcgatagcggctgcaccttagacttcacggcgccagccaatcctgaagtattgacatcgtaccactataagctccattttgtcttctatacaggtgaagcgatgtgggtagcgtcgtcagcatctctcagtgcacaagttgccacctcttgttgtcaagccccactgtgaactaccatgacaagaaagagatgtgttgcaatccttgtgctcctcagcaatggtcaatggtcgacagccatagccatcttgtacaagcttgcctcaataggatatccatgtagtgctccaacatatgcttgtgctcaanacttgntactgatgtggcngcaccatcgcttttgccaaagngcnaaaccaaaaaa

SEQ ID NO: 386946 - DNA, 1497 bp, Oryza sativa
  unsure (1)..(1497): unsure at all n locations
nnnnnnnnnnnnnnnnnnnnnnnnnnnnnnnaganccagatatctagtttatagtagcacagaatcatcacataacatgttttgacttagcatcagaaacatctatagggtagatacatatacagatactcccagaagcagtagaaagtagaaacaaacagctgctagggctccgcaaatacaatcaaatgaagtcaaccctttcattagggttgtatatcaaatacattcctaaccatttcttcggtagaggtgtttacaggacagcagctatgcatgtacatcaaaggtatgatagaaagatttctaacattcatcctgtcgatgctttgtcacttccatttgtctacaacaataatgggattcttcaaaccaaaattcccatacttccaatttccaactacatggaaaagtataaaataagtgaatctgagcacgttcaatcggcacagatcttttgctcatgcgctagccaccatttctgttttcttatcaaggctagaagtcagctgcttgtcgatctcagcaaacacatcatccaccaaagcatccccttttacctcaactatcacatcttcgtaaattgatagcaaggattctacattttgataatgagtctgtaacctcagcttaaccttttcttctgtatcatcaaatctctgtgtaagccttgaagcgatttcttcattctccggtggggaatactttagatggtatattttcccagttacaggatcaagccgtctcccaactaccctttcaacaagaagttcatctggaacatccaaaagaatgaaaatgtcaggtcggatattaagagtttccagcgcccatcgcttgcgaatagcttcttgggtacccatccaacaaccaacccttttcctgagcatctggttgcagaaggcgttccttcaccatattaacaacaatctcatcaggaaccagctgacccttctccataaattccttagctcgcttcccattctcactgcctgcagcaatttctgcccttagcaaatctccagcagaaatgtgcaccagaccatatttgctcttgatgagctcacactgcgttccctttccagatgctggagcccctgctatcatgaccttcaaaggatcagccttcacagccacaacaaccttggctgctcgaggcaaggagcgtggcttcctggtcgccggcgagatgccgcagcggcgggcggattggaggcggagagagcgggaggtcgccggcgaagggggcaagaagaggccgccgcggacagtcggcctctcggcggataaaaccggcggcgagagggtggcggtggcggccatggaagaggccatgggcggcggcgccggcgaagaacaacacaaacgcacaacttctactactactagtctactactacaaataaataaatgcttctctttcttaaaaaagaagacattttttctgttgacaattcgtggacgaaaaacatgaggagatatgtgtttcttatccga

SEQ ID NO: 386947 - DNA, 593 bp, Oryza sativa
  unsure (1)..(593): unsure at all n locations
ccacgcgtccgcccacgcgtccgatcctactcgtcatcctcttcttggtctccattccgttcctcatcaagaggatcatggacggggagaccttgttccatgaccgacgggtttggatggctggggcgctgttcatttacttcttcagcgtgtccggngggatgtacgggatcatcaggcacacgcccgatgttcatcaccgaccggtccgatccaaacaagctcgtgttcggctaccacgggtctgggatgcagctcggcgccgagggttttgcggttgggttcttgtacactctcgtggggctcatgatcgccatggtgacacacttgctggtgagggtggagagcctgcagatccaagcgttttacgatgctggcggtcatgataattgggtggtggccagtgaagaaggtgattctttcggataactggaagactggatatagcattcataccttctggcccagcagctggaggtaaatgcttgtacaatggcagacgatatggatggtttcttccttcggcttctgaggttatggaattatccaactttgaccgtgctgagatagagcatattttggagtgttgggac

SEQ ID NO: 386948 - DNA, 419 bp, Oryza sativa
gagattgcaactcaatagagaattcaaatttgggcagggagctaataacagcaatgatttctcagtcacaggacaaaactataatcaacaagaatgacatgatgctactgtaaagtgcaatttgttggcatcctccaccatatgatgatcacacaatcacaagtgtctatattgcactttgtacaaaatcttgacagtatagcttccagttcttattggtggtatgttgcatttgcaagccatgtgaagaaaaccatacagcgaaaataatatgcttcactttcataagctacaaccgtgaagttcttagaacttgggtattactgaacttgatagcacttaaggaaccagcgctggcttttccaagacttcttgtcctacaatgtacatcttcatgtcctatgttctccttgcatgtt

SEQ ID NO: 386949 - DNA, 515 bp, Oryza sativa
tttttttttttttttatccataaacatgaacttcattaaaaaaacaaaattacatacaaacatatttaaactgggatgttaaaatgaactaaaatatggcagggggcaactttgggtgatggaaattttacaaaattttggccgcctgaaatctaacaaatacacctgttttttctcccttaaaaatgcatagaaaacaatgcttatgacttgccacaacataattagctcatgttggcctcggcaaggccgcatcgtcaaaatctcggaacaattggtgtacatttagttggttgaactgatgacatgaatatactgattgatttacaattataacgaaatacgttggtttacaaaatgtttttcgtcctcgccttgttggatgttgtgtaggatgctcctctttcatgtgaacctgaatgactgaacacacttctctatctgagccctgtacttgtctacatccccgtcctcatcgatgtactggcctgtcaccgtgtagagcggacgcgtgg

SEQ ID NO: 386950 - DNA, 1061 bp, Oryza sativa
taataacacggataaaggcacaaataaccactgcatcaaagggcatacaatgtatttttgcgtatatagacttgcagttgcaaaccgaattacatgcgtggtgtcgcatagacgtacaaattccacaggctgaggctttcctttctgcatccaaccaagccctgcggtaatacatctggtcgacacgacaaaaccatgttcaactcaaaatatgtcagatttcactccggttacacaaatggaacacttacaggttacaacaagtctcccagcgaacaggttgaacttgattctaatacactatgtaagctacaatggcacacatacagtggtacaagcaattgcccgtgccttgcggttgcgagataccagcaattgccagtgccttgcggttgagagtttaccaggttggttgcacggcagctggagaactcaggcctcttccacttgctcttcctcttcctggaggaggttctctctgttgtcgtgggcccagaagccgcgcacatctataagcatgctggcaatagtcccgccttgcttgcaagatagaagatctgttagtgcgatcctgagaggatctgccggctttaccatgtcccagatttcatccctcacgtcttcgatgcaaagttcatagtttccgccttcaatccatttctggtgtacatccctaaataatgtatggatatcagcagttgtcaggaatccccttccattaagatcaaggcatctaaataggtatgtcaatccttcaggagtatctttgttttctagagccaaaacaaagtcaagaaagctttcaaagtccatttcacgactgttgccacctccaactttgctccggcgtacatgctcatcaaaaactctttcaatgaagatatcagtcaatgtgccatctgcatattccttgagctcctgtttgctcaatgttccatttgtatctttgtcaagtgcaagaaaccggtcgcgtgggcgctgagctgacgtcagggaaaacccattttcagcctgtccagtatcaggaacctttttccgggacgcgtgggcgggacgcgtgg

SEQ ID NO: 386951 - DNA, 1474 bp, Oryza sativa
agttaattcaatggcttttttcgttgcctttcggaatgaaactctattttttaattggaaagctatatattctgcaagaatgttaggttgtctataaggttctttcactttttcgatcccaatattaagtctctggtttacagaattaacttctttttgtagatctttctctaattcttcgattgctccttttttctttaataaattggggaatccaatatggattatgacgtggattgtatcgatttctttttgaatttctatatgtgtaattacttcggaacttgagcctgagtccatttttttattatgtgtaattacttcgaaacttgagtctgcttctatttttctattcgagccctttttcctattcttttgtatatagttcttgatacaattccgtatttttttatcttcctgtagaccttcagaataattttttggttgtgcgaaccaaaaggaatggtgattttgggttgtaccaagtctgaaaccaagtggatttattttttgtcccatatttttctattctattttttttaccgggaatcaaatcttagatggatctaaagattatttcgatttctttactatatttagtacaattgttatatgacacatggttttttttatgggagaactacgtcctcgagcccgaggtctgaatttattcataatagtactcctactgacttcggctttagtgatgaataaatttgctttgtcgaaatccctataatgagtagcatttgctgctgccgaataaaccaactttaagatgggataagatgctcgataaggcatgaggttcaatatcataacagtttcttcgtagtaacgccaacgaatctcatccagaactctttgtactttgaaaacggacatgtggatgcgtttttgtgctttgaaaacccgttcgaacttaagtagacgatcggttggtacttttcttgcgagtttccttagcccactcttcttcttctttatcctaggggtatactttaccagtttgaaacttgtcataaataaggttattccccgcttacctatttctttttttttttattttgaatctttctattctgaattcagttaacgacgagatttagtatcctttcttgcactttcataactcgtgaaatgccgagttggtacgaattcccccaatttgcgacctaccataggatttgttatgtaaataggtatatgttcctttccattatgaatcgcgattgtatggccaaccattgcgggtagaatgctagatgcccgggaccacgttactattgtttctttctcctccttcatattgaccttttctatttttgccaatcaatgatgagctacaaaaggattcgttttttttcgtgtcacagctgattactcctttttttccattttaaagagtggcattcgatgtccaatatctcgatcgaagtatggaggtcagaataaatagaataatgatgaatgg

SEQ ID NO: 386952 - DNA, 749 bp, Oryza sativa
  unsure (1)..(749): unsure at all n locations
cggtncgggcctcttcgctattacnccagactggcgaaagggggatgtgctgntaggcgattaagttgggtaacgccagggttttcctcagtcacgacgttgtaaaacgacggccagtgaattgtaatacgactcactatagggcgaattgggtaccgggccccccctcgagttttttttttttttttttggagaaagattggtgtttatttagttatatttaccaactccgccaataacatcattcagatacaaagacaaacaaacaaagatactcttgtagctaatatgaacttccaagcattattggtacttttttatccaaataacaaagctctaatcaattgctgctgttgtattgcaccctttcaaaactgctcatggaaaagctatcattttttagcccctctagagttttttcagacatcaaggtacttgctggctgtgtggacatccttgtctcctcttccactgcagttcaccaccaccctcacgccgtcgggcagcgttgggcagagcttctccaggtaggcgagcgcatgggacgtctccagagcagggatgatgccctccagccgagagacgcgcttgaaagcatccagtgcctcctgatctgtcacgctgtcatattcagcacgtccaatatccttcaaaaagctatgctcaggcccaacaccaccgtagtccagcccagcactaatggagtggggttcaataacttgtccatcatcatcctgccggacgcgtgg

SEQ ID NO: 386953 - DNA, 1193 bp, Oryza sativa
gtaacaaaattaatttgtcttccgggcacgggtcagcattaataacatatatgttacacaactttgtaacctgttatgttaattaacagcccttattacagtctaacagccttattaattctaccttgttatacggccacagtgttactatgagcaaacgcatattgctcgtcttatgcatcgtttgtttacagcgacgactcgtgattactcatgagtaaaccatttacagggttgatttgaactaattaattaatagtattgacatggcgacccaagatgataacatttggaagctccgtctactctgttcatcgggaagctccatgatctgttgttgatcatcagcaggtcttccctgttgcacagcgagcccaaaacgagtcgataatccaatgtcaattctgcagattagtgcagtccaatccgaatgatatgttcatgcataagcataatcagcaaaacccctgcaacacaatactagtagtctgaataaatttcaacttacctctatcgctcaacgtactgttccaagtactctctaatcatcagcctttcctccttcgtaagatcgggattttgaccagtcaaacgctcccttaattctctctcttcatcgctggtaccatccctggagacctggacgtagttattcacatggccatcagcatttgctttggtcttcttctcattgtcattgcacacccatttgccgtccactatatatttgtattcataccttccttcaggcaactccctctcaagataccaagctcttttctccttgttgtatgtcaaaggaattatctgtccccacccgacatcaagcccagaaatttcaccagaagaacaactattcactttcccacttcaaagtgatggaattctttgataagcctgtcagaatgtcagcagtagccaatttaatggcttccaactttggaaagcaagctcgtttactctgtagtagctgatgcccttcattaagactgtagccaagaatccagaacatatacgccaatgtcacagcaggagctctcccaagtccagcggtacagtgtatatatgttaccccaccattatggttgacaagcttgtgcagtttgctaatcacagcaggaagcctcaatcgcaaatcaaaagcatcaaaatccctaatttcggcacgaccggacgcgtgggcggacgcgtgg

SEQ ID NO: 386954 - DNA, 424 bp, Oryza sativa
aactatcactttcccacttcaaagtgatggaattctttgataagcctgtcagaatgtcagcagtagccaatttaatggcttccaactttggaaagcaagctcgtttactctgtagtagctgatgcccttcattaagactgtagccaagaatccagaacatatacgccaatgtcacagcaggagctctcccaagtccagcggtacagtgtatatatgttaccccaccattatggttgacaagcttgtgcagtttgctaatcacagcaggaagcctcaatcgcaaatcaaaagcatcaaaatccctaatttcggcacgacagtgctctatatctttacattgtagacaatattcttgaatgggagatcccacgcgtccgcccacgcgtccgcccacgcgtccgcccacgcgtccgcggacgcgtgg

SEQ ID NO: 386955 - DNA, 889 bp, Oryza sativa
  unsure (1)..(889): unsure at all n locations
nnnnnnttttttttttttttttattcacaacgttcttgatttatatatcaacgtaagtaaacgcaaattttgcataaactgatcatactacatatgcaccctgccaagctcaagtttacatcaagccacgtcgacaatactacagttagtcaatgcataattttatggaaatatcgaaatcgagaccgagtttaaaagatactaggggcatatatataagaaataaatatccagccgacgcagctcacgccttcattgtccacatggttgccgcagttatttgcgtgcttcagccttcctctgttctttggcagctttctcctcttcacgtttctttgcagcatcagctctttgttgtcttattaaagcaagacgttccaaatctttcctagcttgttctgtttttccttgctcctgaagcttcatatagcgctcatgagctttctgtttctcgatctcctctctttcacgcctcgagagctcagttgtctttccgagatcaacttccttggcttttatattctttgctttcactaagttcgggttttcaatctgaataagaccttcagttcctttatgtttagccttcccttcagactcatcttcagattcttcctcttcagattcttctatgtcgtcttcttcctcctccttttcctcctcagctaaattcttcttaaatgtgcgtggacgacctgaagtaccagcagcgatctcctcgggggtggagaagttgcggcggccggtgggcttgcccttgaacttccccctgcccatggcggaggcggcggcggcagcggaggaggaggatgaggaggtgagggggagagagcggggaactggggcgtgtggaacggagggaggagggttcgcctaagctgcacgcggg

SEQ ID NO: 386956 - DNA, 1148 bp, Oryza sativa
ataaaccgtaagtgataattccacaatggcagtcagcactggccaaatcaaatcgtccccttgcgcgagcaaatgtcatcacgtaaggatacatgtccactgtttgcgatcagttgcgcaagaacgccaaggccaagccctgaacactgtatagaccgagatgaatctcacacgtttgtacagcccaatcatgattgtatttgaagtagtgagaatgtgggcctcccattgttcacttcctaagctgaacgaatccattctcggttaggtactccacaaattcatctattaggtagggccaagcaccttcttcgtcgtagttggataactgtggatcgatcgtcttgacaaattccaacagttgagaccatgtgtccctagaaatggctttattatgcctcacctgtaaaaactggcaccaatggtcgataaggggccagtgcctttcagcaaagagcaactgccacattccaagagcagtctccagtgcgagagatttttgacccttttccctagcccaagcaaaagcaaagttgtatatctcacggaatttatggtcatcttttatctcagcccgtaaagatggcaatttctcacggagcttttcaattgaatccaccccaattgactgcagtccaccaatgaattcctggcgagtaaattcacacattgtggcagctttcatgtgccatgatatgacaagcataacaatatcctggggatccacctgaagatcagtgcaaaactgagatacaccttccaccatgatcatatcaacatcaggttctttgtatctgttgtacagatcttcaagatgccgagagttcgtcagagaaatttgtggttggctgtagaaaaaatcaaaagctccttccaagtgccaatcactagctttcagggcctgaagggcgaccttctcactcgcaccagttatggtcatgaactgctgcaccttgtcgcggcttcctctccccagcttatgcatcttcgatcggatcgggtggcgagctcggggtagggtagggggggagaggaaggcggtgggcgagcgcgagggctagggtttcgcgggcgttgggctcctcctgctcttcttccttccttcctccctcgcctggctggctttgctacccctcgctttctttttt

SEQ ID NO: 386957 - DNA, 873 bp, Oryza sativa
tttttttttttttttctgaaagagactcttgatgttcaactatccacgagaaaataatcactaggtgatcaagaaagtgattatatgtcaggcacagcacacaaataaacccaacatgactaacttctactgtccgtgaagttctaaccatttaagcaggggtaccaaatcatcatctgcagggagcataggcgacatgaatctcctattatacactcaaaaaacataaaagcccaagttctcgaaaaaggaaaaaagcagccgccaaaatggccgcgataagacgtcaaaatcaaaggcttatgttgtgtctcatgtctcccttcgggacctccggcgtggggcagcagctccatccttctcttcctcttccttctcgtcctccttgccaccgctgcttccagctgcttcggactcggtagactttggttttttgacctcggctacgggcttcacaggagccgctggcttcttgccgccgaacaggatcctgaagagcacagtcacaaagacgacaacgatggagaccagaattccaatggtgatgttgggctgcttctctcccttctcaattacatcaatgatcttagtcttgtagggttccaagaatggaatgtcagcgagtttgtacagaacgtcaaagatcttcttctggaactcagaaagaccatcacctgctgccgctgctgcctcctcagccttctccttctccttctctacttcgtacttgggcttccaagacttctccaggatagaagtggcaaccttctcatcatcagcgatcaaaatgttgtcaaacaggatgccatcttgcatcgtccagatctcaatcccaatagcggcaatcggatcagagtcaggccggacgcgtgg

SEQ ID NO: 386958 - DNA, 540 bp, Oryza sativa
gtactcggcctctggggggggatcatatcaggcactattaccaatttacagcagtgcaacatctgtggttcaaaccagttgaatacggtcaatatacaccaaatagatgtgctaattttcacacagaccagcagtataagtttatgaccgatcaacttgcttgcacttcttgcttctcggtattttcttcatttttcagctcctgaattgtagtcatgttactcacttcactctctactactgaactgctagcagatattccatcagcaggagcaactggtgtcgaccgtcctgaattggagccagaatgttgccccaaagattgctttgatgtgttcagcgcatgacaatggggccagtagtaagtaatgtgcgggtaatcttctttcctggccaagccattatgcatatgacagtttccacatatcaaagcgtacgactgcgacggatcctccccaacaagtaaagcagcgatttttgctatccatccaccatcacttgcccctgagccttgaaaatgttctaccaccattggaggct

SEQ ID NO: 386959 - DNA, 578 bp, Oryza sativa
ataaggccccagactcgagcattgattgattttaatgaacatttagtcggagtacatggacaattcaaacagatgcaaactgtaagaggtcatgttccacgaaatgtaagctactgctacactttcttcgagcgatcagtcaaagttttcgatcttgattggagttatatcatctgccaccttaaaattcccgactaatcgagcaaagaacaccatctgctgctccaaagtaaacttgatgttctcagccttgcggaaaccatgctgctctccttcgtattccaccaaggcaacaggcaaacctttctcttttaaggccttgtatattttgcgtgcctgatctggtgggactacctggaatgaaaatgaattgaagcagatgaaattgtttgcactttacagttgcaattatgcaccattaatttctcggttatcatgattatgagctcataggaaatgtttcacaaggaaatattgcaggaatgatgagaggcaattatgcatcagtaattcctcagttatcatgactatgcatgagaccaacatagaaacttccggtttatgaaccggacgcgtgg

SEQ ID NO: 386960 - DNA, 529 bp, Oryza sativa
tatgacgatgtaaatattatcatttcagagagtatactataagaacatctataacagctgatgaacaaattaaattggatattgggctgctgaaacaaagacaaaaaagggactctggaaactgccgaggtggaatgagccagctatctttgtaacaccaactaaacaacaagacggttaaaacaccctacaagaccctaaagtgagacaaaatggtaaaactcatctagatcagtcataaatacaacagtgtgctcctccatgcttgcatcctggacatccgagcgaataagcattcagagctctcaagatgatcaggataccagttgtgagttgtgactaaataacctggggatgcatcaaactcacatctcgccaaggctgttgaaatccggaaagaaaaggctaaaacatgtcagtcgtggagtgacttcatctggacatcaccaggttggaaacccttaatgaaaggaggtcctccactgctctggcatacttcttcatcgggcgctgaattaagcactgcaaa

SEQ ID NO: 386961 - DNA, 727 bp, Oryza sativa
agaaaagtgaactgggtgttaggacagatttagtaacaaatttcaattaaagatatttcgatttcttattctattatgttcatatatgtactcctctatacataaataacaaatatcaatagtatataaagcaatgctgttcctcttgactcttgtatttggaatgattttatagagaccatttccgctttccataatcctgggcaagaatttatagaatttatatgatatgggtgaaattgaccgtctgctccttcagcttacaaattgtttctggagcaggttggcgcagaactccaaatcaaagcgtacttctggagggtcaccaatgcaatcgaacacagcatcagctgttgcaaagtcctcttctgcagtgtatccgctttttgttacgatacacttcataccagcagctttggctgctgcaagccctatagtactgtcttcaacaacaacacaactagatggatcgactccaagtgtggttgctgcaagtaagtagattgctggatcaggttttttacgaggaaccacatctccagcaaatatggtaattttttctgcacgatcagggcccagtaaacatgaaactattgccgaaacagctttctcatttgaagtactgcatactgcaactttcactccttttcctagggcttcatctattaacctttgaacacctggacggaggggaagcaacttcttctcaatcagagcggacgcgtgg

SEQ ID NO: 386962 - DNA, 704 bp, Oryza sativa
gcgaggcccaggctctcggagatcgccttggtgagctccagcaacagggctctcgtgcaggtcgcgtactccgttgcaatctccctcagctttgcgggcttttcggggcagtggaattcaggatgagagaacatcttcaggtagtccctcctgcatggtacggcgtcgacgacagagtagaaacctgtaccgatccgtataggatccatcggcttggcacgcatgtactctttcttctcctccaaaggtaatctgaacagctccttgcaggcgtccatgattgcttctcggagagcctcgggcaccccatggttagtcaccatgaagaagccccaatcctcgcatgccctgcctaggtcgcggatcgcccgcgaccgctcggtcggccgcgccgttgatgaggacgccgagatcgacgaccgggattccttgggacggtgtggccgagccgtcggctgcggcggcggcggattgctcctcatgggatgggagccgagacggcgcaaccatggctgtgcactgcttgcttgccggcgtcactgtcggcttgcagctggcccgctgctctctgccgcctcccgtgcacgccagcgcagtcgagccattcgtcgccgcccgccagctgctcgctctcgtcacccagcgcagcttcggccctcaccgcccgccgccggccgaaggggaagaaccgatcggacgcgtgg

SEQ ID NO: 386963 - DNA, 436 bp, Oryza sativa
  unsure (1)..(436): unsure at all n locations
gacgtcactactcactaggcatgaagtcaaggtgtacacaactacacaagcatgggagaccatggacttaattacacagtggcacagagcaacagatagctttattggtatagtgcacactatacgcttatacgtacatccataccatatacgaggtgtacacatactgagcccatacgtacaaaaaccccggctcttattcagctgcacacgcccatggccacaccttacgcgtgcgcgcggacgccggccatggcgccgccgccgccgcatgcatggcgcgatcgatcgatggatcatcagccgaagagggggggcttcttcttcccctcgccgccgcgggcgccggagccggactcctcctccgcctcctcctcggcgtacttcgccgcctgcttggcctccttcttgtcngggtgctcgtggaacgcgaacc

SEQ ID NO: 386964 - DNA, 851 bp, Oryza sativa
atggtgggggtttttttttatttatttttttttttttttttttaatgaaagcttcagactattccattctgctcttctgattgtaatgccacagaagagcatcagtgtttaagtcatgtgcaaaattatgacaaacaaatttgccgtccaccttttgatctaacaaaagggctggtcactcccaaaactccagatggatatatacacatcatttcgtttattaactatcacacgagattcctaaaacacattcatatgcgaacatccgcaaaactttttaccagttgataagcttgttgcatgaattctgcatcttcagagtgaagttgacgctgtcattgtcctttgagcatttccaaggatgataacaatgatggtaacatcatcgtggtactttctcctgctcccaacaggtatcctcatcaattcttcagctgttaaagctgcttccttcgctgctttaagtaaaagttgctcaatgagatactttgcaggatcaccaattggattatcatgcataaattgataaaccaactgaacaacttcgtcattgctgaagaaatcaaataagccatcactaccaagcacaacaaacaaatcatcctctgtgactttatgactaactgtgtgaggatttgtgtacacataaggcgggctgcacaaattacgaactcggagaattcccatgagtgcatcgttcaacttcttctgttttagatagccaactccaaaagcacgagtaaccttcagcttcccctttattttgttacccatcacaactgatggctcattaggatgatcagctaaaagtttttggtactccaatggattttcaagtgagtggatctcag

SEQ ID NO: 386965 - DNA, 1081 bp, Oryza sativa
  unsure (1)..(1081): unsure at all n locations
nnnnnnnnnnnnnnnnnnnnnnnnnnnnnnnnnnnnnnnnngggctaccgaatttgttcatggcattaaagcaaggaaaacatcccgtgaaaagatggacaacttcaacatttctgttcaaacgggcaggcttaggatacagcgacacagagacgttctcaagctcacatattatggatttgtatcacacagcaaggttttaatgaagtccacagatcccatatgggatatcaacacacgcattttagcataacagtatttacgaatctaacaaatatgagtagcctttgacgtgacaatggctcatagcagcttgagaatcatatctgaagtgaaatccctcagccgcgggccttaagctcagccaggcggcgggagaggtcgtcttcatcaacagccttctccttctccttggcagctggtatggcgtgagcggcggcctgcggcaacccaacggagacctcaaggccgtagtcgtcggcgacttgctgcatgaggctgttgacctcggtctcgggcgtggagagcgaggtggagccggccatggcgccctccatgaactcggcctggacctccatgttgacgaactggcgctcgaagttgtccatggtctcggacatcttctgcaggttccccgtggcgagcgcggagtcgagcgacttgacgatgttggccatggacttgccgatgacctgcatcttcgcctgggtgtcgaggcgcgcgacgacggcgtcgaggcgggaggcgaggcggaggtagttcatgtgctcggtgcgcttgcggatggcgttctcggcgtagatccgcgcgccgtccatgttccccttctcgatcgccttcttcaccttgagcttctgctccttctcctccttctcgcacttgcgcgcctgccgctgcagcgacttggaggtgaacttgaggtcgaagatctgggtcatcagcttctccgggttccccatcgccgccgccgacgagctagccccgatcgtggatttggctagggtttgacgaggaggaagaggaaaggcagatcggattgggggatttgggaacgcgtgggcggacgcgtgggtcgacccgg

SEQ ID NO: 386966 - DNA, 1020 bp, Oryza sativa
  unsure (1)..(1020): unsure at all n locations
ccaataaattttnttnttttttttttttntttngaacaaaaatttagttatttttgttcaattttatccggtttcagttttcctgaccgaaacatgattagagtacttatccatgaatcgatgctagaactgatcacgaggcacaattttctaaagaattttacactatgattccaatgtttatatatcatctatcctacaagctgaatttggaattatacatcatctgtaaggtgagagaaatttaaatattgacatagataacccgttaactacggcaaatgtttgctgacttcctaagcagacgcctgacagctagcaagagccgagtggaacttctcatcaaatcatggtaccagtggcaagtgaataaaattagcagcgcaccatttcgtcgccaatctgctgcctaatggacctcagcatgttgcctcatcttagaaatatcaccaattctgcccgcaatgtttccagggaagtcgcattaagttagctcaacgagtctgcgcttcaaggaggatgttcgggcccgtgttgatgtcatttctggctcgcattagcgcctgtcttgcagcatttccatcaaagcccatcgaaaccagcatagcgattgaagattctgggggctccacgacaggagcgaatccagatggctgattgttctgcacagcacggcgtgacgagaactcatgtttccgaccagactcttggagggcctagatgaacctcccgaagaaggtgcgaaaattcttgcgaaaaatgatgcaataacctgtggcatcttcatcctgcggatgccaagcacgttcagacgatagagagaaccagcaatcagaccacaaataccaggaataagagaacgcttcccagaagataaaagcagctgcaggccagctaggtatatgaatgatttatcactgaagttaacaccaaaaatacgaaatcgtgatgtgacaggaatgtcaagaaagaatggaatgaatgaggcaaatataaggccataaggtacacatgcaagag

SEQ ID NO: 386967 - DNA, 501 bp, Oryza sativa
ggtgttttttttttttttgtggtttagccaagcaaaaacatcttcaaaacacttaatttatgattcagactgatacagatcaacttgtaaatacaggtcttctatatacaaatgcttgctgaggttacaaacagaaatacaaacttcacgatttgtgaatagacttttcgagctcagacaatacaagttagaggtgtcagatgaaaatcgacatacgattttcgtcatcttcttcgctcggactgctccctcaagaatggatgcctaagcgcctcttgtgctgttaggcggctagctggatcataccttaacagaccttgcaaaaggtcaatgaactcgcccccagaatgatctacattttgcatcaccagattctgaagacgtggcagctttcataacagcttttcatgctatccccgtgaacgcacaaaccttccagggccagtttaaacggccttttctgacatatttctcagaatgacggtctgcccttttgagcat

SEQ ID NO: 386968 - DNA, 716 bp, Oryza sativa
catcctaacatcgtggccgtccttgtcttgttttattaaaagttttttttttacgattacacgatagatacatggtatgtgggttctaaacttttattatcctcacacgttagtacatgtaataatagcgttattatggtaaaggatgtgaacacgtccactacacacgctgacttaacctgccacggtttcaccgatcgtcatcttctcctcccttctcctgcgttccgccgccggcggcggcggcggaggcggggacttgccggcggaggtagtcctccttcccgaggcacgagtccgggacgacgacgccgacgctcttcccgaacgcgtggtggcagtaggcggacgcgttctgcccgccggccatggtgatgttcacgttctccagcgacagcttgctgcacggcgccgcctcgctgcacgcgaacgtcaccgcccgctccgacgccgacgtgccggtgatgtccgtgtagctgatctcccccaccgtcaccgcgcttccgttctttgatccgcagggaatttcgttgctcgaggagttctgctgatcgatgacgatcgggttcttgacgttcttcataaggatgtcaccgaacttcattttccgggcggtgccgcagccgccctggaaggtcttgacgcgtacgccgttttcagtgttggaaatgaacagggtgtccatcttgatcttttctaccctgtggtaacttcgg

SEQ ID NO: 386969 - DNA, 653 bp, Oryza sativa
taacgtatttaccattcatgcatgcatgtgtaaaacacattgtaccgttcatgcgaatatgtatgtactgagttgagttctgactcgatcgaacaaatgctcatcagcgtggtggtacaagccagagtacatcatcaacgagctgaacgtgaactcggtgatcacgacgcccgggcacgacgagatcctgtctatcaacggtatcaccacgcagcgcggatacaccatgaagggatacgcctactccggtgagcacgcactcctccataacttctctctgaatcgctcgccttaatttactctcggtcgcagtggcttgtcattttgcaccatccttttgtgtttgaccttgattaatttaacttgtagtaaacaatgttacttaggtggcctgaaaaatctctagtgcttttcggaaacttactctcaacgtagtagtatgccactttgcaaagtgaatagtggtaatcaaatccaacaaatatcttctgaattttctgacagaataataccccatcagcatatggactacatatcttagctaaagtactggtaataaaataacaccttggccaccagttagtcatttgtcaaagttgaacatgccttgcaaatacggctagtggtatcgtaaagggtcatttaatcggtgg

SEQ ID NO: 386970 - DNA, 845 bp, Oryza sativa
cacaggaattgagatgcattcccacaccagatgggggtctggaagctgaatcaagataccattttgctattctttaccaagcatggtgtcaaaagtacatgcaactgctcaaaactaagactacacagtagtactgacacaaggtgagactcaaaaaacggagtgaaacagaggcaaaagcatcagttataaaatttgcaagttctcggtatgtttctccagtcccagagataagcttgacaaccattcatggctctttgattgcacacatgacaaatggcttcagcttgcagtgcagaatagaagcctgacggtgaaaaaccgatttctctgttgcttttgcaccatggcggagaactcccggcatggtagaagatcgaatacaggatcagaatcttgcaccttactctttgccgaagtctgcactgtagtgggcgctggattccagcttcttggcgtcgttcagcttcctgacagccttcatgaagtcctcatggacaacgtagtcccgttcagcacgaattgcagccatacccgcttcagtgcagacgttgcgaagatcagccccattgaagccctcagccagtttaacaactgcctcataatcaatttctccatgcttggcaataccagcagcatggattttaagaacttccattcttgcttgctcatttggtagcggaatctcaatcttcctgtctagacgtccaggacgcagtagcgcagggtccagaacatcaggtctattggtagccatgatcattttcacctttccaagttcatcaaatccatctaactgatttagcagttccatcagtgtgcgctggatctcgccggacgcgtgg

SEQ ID NO: 386971 - DNA, 612 bp, Oryza sativa
tgacaggaaattcaaatgtgactgtgatattactcatgtatcctgagcatgtattcaaaacaatgtattccagcatttatgtgccaactccatgtttggatcaatgtagaattggagctgttcacatgtgtaactgagcacatcatggcatgtttttaagaggcacaacaatacagccatgggcatcttggacatttgttttgcaaatcaggtttcaaatcttgagcgaacaaacttgttacaaatctatattaggcaatggtgctcaaaatccccagacagtggagtatttcactgtactcggtcagcatgtttttcagtttccatggaattgcggggattgcaagtttccagcaataacctaataactttaattctgatgttttaccgtatctggatggccgtccacaaattccttcttgtgaaaccgtgttgggttgatgtcactgagtagcaccagccaacctgtacatctgtatacactaccttatcttaggatgactctgcaaaaggttaaggaactgtcactgcacagtcctcacagctttcctcttcaaccaatgattcagagagttgatcgggatctttatcatcccctgcgcggacgcgtgg

SEQ ID NO: 386972 - DNA, 578 bp, Oryza sativa
  unsure (1)..(578): unsure at all n locations
nnnnnnnnnnnnnnnnnnnnnnnnnnnnnnnnnnnnnnnnnggcattgattcagattttattggtatgggcaaacctctgaatttgatcaatgacaaactaaatagcacatctgagatgtatatcaatataagatacactattatgatgatgaatagatacactacatatatcaatataagatacaacaacagcagaaacgattactgtgtaatgttcctttactttcttcaggatggcctagttcatgtcagctttgttctcagcgtcatcgccctttaagaagcgcgagaaccaccgggccgatgctttgggatgccgggaaagcccatttttgtaatcaacataaacaatgccaaacctcttggtgtatcccatagcccactcgaagttgtccaggaacgaccatgcgaagtacccacgaacatcagcaccatccttgattgcttgtgcaactgacgcgaggtatcctttgaagtaaccaaccctcgtcgtatcattcaagacttggtcaagcgttgccgattgatcatcttcctcatccatgccgttctcagttacatatatcacaggatttcc

SEQ ID NO: 386973 - DNA, 1112 bp, Oryza sativa
tttgtttttttttttttttatagggagaatgcaatgttccattccattaatcaaattgtgcatcaaaaaggcacaacaaggcatatcacatactccacacttactacatgctttaccccaataatctctctttgattgttgattcctacctgcgctatatacaacacatcaagaatataacctccctcgcctccactggcatacaagcaaaataccagtactagtatgttgttctgacaatactaccgtcagtaattcaatacactattcagccagttatggcacaaaacttttggagctcattctctaggactggagatattgctctaagataaattcaacaccacaaaacacgccccagtttccacaacgtttatctttgaaacatttcactgtacaagcaaatcctgcgactgctgcttccatacgtcacacggttctaccgcaacctggtagggtttattaatccactggaaaagacaaccacgggcttcaacaactttgagcatatgtgatggcaccatggatttgaatgcttcatgaagcttcacttttctcaaaccacagaccataagagcagctatcagtccattaggcgtaacacccgctaaatgcacaatggtcatgttctgcaagccacatatgcttgaaagggatataagcccaatgtcggtgaccgaacaatatgacaagtttatctgccggaggttgtgagagaattgggaaaggaaaatcattcccatgtcattgatctcaaagcatttcttgatatcaagcttagaaagtagcctgcatcctgttgcaatttccgagagaccagcagatgaaaccatggggcagccacgaatctccaatgtgttcagctttatgcattttgaaagtgatctcagtgaacagtctgttaattttgtgcagtaggacatattgatagactctaacattgggcatccttgagctatatgagtaaccccttcatcactgatcgccccagacctgtacaaatcgatatctcggagatctggacaggacttgctaacgtgtctaaggccctcatcagttatcctcaagcatatgccaatttttaggcttgaaagtttgctgcatccagagag

SEQ ID NO: 386974 - DNA, 470 bp, Oryza sativa
ttgttgtttttttttttactctgaacttgatgtaggccattaattctgcaatcgtagtaatttcacacacaaacagcagagcaatgcaagaatccatgggacagaattaaaaatcagtacagcgccaaaataacataacataacacaaccacatgcgtctcactcagaattgtcttgacattcttattaccatgtgaggatgcagaaccgaaacggactcacgataagtctccacctctctaggactctaaatgctagcgagtggaatgctaaagtaatattacctccagtaataccagcaccacggcaaaagggggtaatccaatctcatgtaagccatagcagcagaccaaaacttcttacgcgtcacagcaccagattacctcttcaggtgaaggatgaccaccgcaacgacggccgtggcggcggctccagcggcggcagctgccatcagcccgtgataacctacc

SEQ ID NO: 386975 - DNA, 1567 bp, Oryza sativa
  unsure (1)..(1567): unsure at all n locations
ttggttttttttaaacaggagtggacagcatagaagatgcacacacatatatattattatttatatacactactaagtagaaaagaatgccacagacacggtaataaaaatggcagtagatacataagaaataatttaattacactagctagcagtggcacatctgaaaaaacaacgtgaaataaaagggaaaaaaagcaagcagaaagctagctcatcactttattccagaaacggtacagtgtagtgactcgctcgctcctccctctggcgaaataatgtcgtcaatgcctcaatcgtgcagcagcaagtgctcggtctccggtgatcgccgtcactggtcggtcgctggcggtatgtgcggcggcttgtgcttcttcggaggtgcttcaggttttggctcaggcttaggcttaggtttcggttcaggctttggctctgggtatggtttaggctccggttttggttcgggcttaggctctggtttaggttcaggcttcggctctggttttggctccggctgtggcttgggctctggctttggttctgggtgtggtttgggttctggtttgggatccggtttaggctctggatatggtttgggctctggttttggttcaggctttggctcaggcttcggttcaggctctggttttggctctggttttggttcaggttttggctctggctttggttctggctttgggctcaggcttaggctcaggcttagggtgtggcttgggctcaggctttggctttggctctggctttggctttggttttggttcaggttttggctccggctttggttctggctttggctcaggcttaggctcaggctttggttcaggctcagggtgtggcttgggctcaggcttaggttcaggcttaggctcaggctctgggtgtggcttaggctcaggtttcggatcaggctttggttctgggtgtggtttgggctctggctttggtttgggctccggttttggttccggcttcggttccggttttgagctctggcttcggctctgggtacggctttggttctggttttggttctggcttaggctcaggtttaggctccggctcaggttttggctctggcttcggctccggttttggctctgggtatggtttaggttcaggcttaggctcaggttttggttctggctttggttccggtttaggctcaggctcaggtactggttttggctccggctctggcttgggctcaggttttggcgtgggtttaggatgaggctttggctttggcttcggctccggctccggcagcttctcgtatgtcacacgaccctgcttgctcatgaagcgggcgccatggccgagcccccggccagcagccgccgcttcatcaatgaaggcgctcgccaccgccaacgccccaagcaggagcatggcgacggcgaggcaaggagagcgcctcgccatggctggctagctaagctcctcctcttcccttgtcttcttctccctctctcacttctgctgttgtacgtggtagaactgaactgtgagcttcgggtcgacctcgagggnngccnngtcn

SEQ ID NO: 386976 - DNA, 533 bp, Oryza sativa
  unsure (1)..(533): unsure at all n locations
ttcggttcaggctctggttatggctctggttttggttcaggttttggctctggctttggttctggcntgggctcagacttaggctcaggcttagggtgtggctcgggctctggcttcaggctctggctctggcttgggctctggctttggttcaggctttggctccggctctgggtctggctttggctcaggcttcggctcaggctttggttctggctgtggcttgggctctggctttggcttgggctccggctttggctccggctctggctttggctttggttttggttcaggttttggctccggctttggttctggctttggctcaggcttaggctcaggctttggttcaggctcagggtgtggcttgggctcaggcttaggttcaggcttaggctcaggctctgggtgtggcttaggctcaggtttcggatcaggctttggttctgggtgtggtttgggctctggctttggtttgggctccggttttggttccggcttcggttccggttttggcactggctacggctcag

SEQ ID NO: 386977 - DNA, 1013 bp, Oryza sativa
  unsure (1)..(1013): unsure at all n locations
nnnnnnnnnnnnnnnnnnnnnnnnnnnnnngatcaacctcgacgacgaatcatgtaaagcaaattcttcagaatttaggatatacagcattgtctattctttataagatccgacaggttcaacaagacaaaggcagcgtttttcccttggctgcttgcttgctgctgctgctgctgctgctgctaatcatccgtcgtaagcctctgcatgatcatctccacaacggcaggagcatcaacggtcacagcaaccttcacggttggcttaccggtccacgcagttatctccccataccttttcttggttgtgtcgaaaactgtgagaccctttgtgatgccatcagtctgcaccctcactacaccttccgtgtaagtcatcagtgacggatctaccgcagcaataagtgttgctggatcgtgaagatacactccttttatgaagtaggcgtccttgtggtaatcataataaagacccaggatcttgctcaagtatcgggcatatttgctatcagactgttcaagcttttcccggtcagcatcagaaagaactacttggtgtgtaatatttattcccacagccaaaatatcagcaccggaggtgaaaactatatcagctgcatcagggtcaccaaatatatttgcctcagctgcagggttgacatttccattaactgaatacgcaccaccaaggatcacaatctgcccaatcttcttcgggaaagaaggatcaagttctatagccaaagctaggttggtaagtggaccaagggcaaccacagtaacttgtccagggtacagatttgcctgctcgacaagaaacgcggcggccgattgatctaagggcttcccagttggcggaggaaagttctgatttcctagaccatccgagccatgaacaaagctcgcaatccgtaccttgctcggctttcttgattgtgccgtgggatcacagcgaaatcaaataagacccacgcgtccgcccacgcgtccgcccacgcgtccgcggacgcgtgg

SEQ ID NO: 386978 - DNA, 568 bp, Oryza sativa
gaatacgcacccccaaggatcacaatctgcccaatcttcttcgggaaagaaggatcaagttctatagccaaagctaggttggtaagtggaccaagggcaaccacagtaacttgtccagggtacagatttgcctgctcgacaagaaacgcggcggccgattgatctaagggcttcccagttggcggaggaaagttctgatttcctagaccatccgagccatgaacaaagctcgcaatccgtagcttggtggctttcttgattgttacatgggatccctctgccacggggatgtcagtcctcccaacagcctccagcaggtggagggcgttgcgggtggcgagggtggtgtagacgttgccgaagatggtggtgaggcccagcagctccacctccggcgacctcagcgccacgaagatggccatggcgtcatcgattcccgggtcggtgtcgatgacgagcttcttcttcgtcgtcgtcatcgtctccacggcggcggcggcggcggcgatggatgggggatcagggaagggatggggacgcgtgggcggacgcgtgggcggacgcgtgg

SEQ ID NO: 386979 - DNA, 1213 bp, Oryza sativa
gccaaaaccaggtattcttatacctccaatggtaacaaaccaggacgggagcatgaacaagcaaggagtagtggcacagagtgttccttagtatacatcttcctaggattagatagtagtagagtgggaaatagaagtgcttattccagtacatctcagctaccagtagcttattacggtacatagcagctagccatctagagttctagacccatacaataaccacatatcaacatatcacccaaaaaaggcaagaggcaagaacgaagcagagagataccatatcggtatttacagtcacgcaggatacaaaggaaccacagatcgtgggcagtccgacctcttcccggcaagggagtagtatgcaagtatctgagcttgactatctacacaaggttcaccatcttctctcattcgatttgcattctcagaactgggaggtgtaaactctatgttccagaagggcctggccatgagcatgagatcgtgaccagtcttagaagccttgtagccctgtacccacacgtatctcagggaaggcatactccgtatagcgcgggctaaagcttgctcactgaagcaacaactccttagctcaagcttccgcaggttctcacaccccaatgcaaaccggatcagaccatcatctgtttccccaacattacccagaagcatgtattggataattccactgtactgtccaatatagccaaggcctgtatctgaaagtccccctggtctcaagtatagagcaaacctccgaagtttcgtgcagcccctcagcagtgcacggacaccattgtctaagggcaaatctgttatcctctcttctctatcgagtaggacaagacggaagtcgcaaagatttttgcagaaagtcccaatagactccagggccccatttgtgatatcagacacataggcagctatgtattccagttcacggcatcctacggctacagttgtcaacccgacttgagagactcctccttgttcttcttgcaaacctggatcatcatctcctcgctcaactctgagtctttgtagcttcttgcatgtgtctgcaacaacccctaatcctctatctccaatcacattcctcaccgcaagaactagtaagttgggacattttgcaatgagttggcagtgatcttcagtggtgagaaaagtgtactgcaagtccagcttcttgagtaatgcagagaaagggaag

SEQ ID NO: 386980 - DNA, 948 bp, Oryza sativa
  unsure (1)..(948): unsure at all n locations
nnnnnnnnnnnnnnnnnnnnnnnnnnnnnnnnnnnnntccgagtctcatacaatttatattaatttgggtcttgcagcaagcaagcaaacaagggtatgcaaaagttagccggtgacacaaacaattaagcatgcatgtatgcatccatgtgtagcggatgatcgacacagtaacaaaatagagtacttacgtactaccggaatgcatggaaagccaagccggcggatcagagtgagttgttgttacttgctagagactcttgctggagctggacagccaacccaattaaataatggtccccaatccaatggctgcccgctaccttgcctatgcttaattaattaaaggcttaagctgctgcgttctgatcaagtggatgagcttcttcggtgggaactctgcttgttggtaggctgctggatcagagcagccatctccgtcttaagttgtttgcagtgcctcttgagcttgagattctcattcaccagccggcgaacttccttctccagctcctgcacatacgccctcttccttgccctggagcgcagcgccgactccctgttcttcatcatccggatggtcttgcgctcctcctcttcctcgtcgccgccgccgccaccgccaccgcctatgcccacctgcagcagcagatccagctcctcggcgccgcccacgccgagggatagatggggagcaccatcggcggcgctggtaccggcgctggagatggaaaggaaggagctgcagctgctcaggcttagctgcgggctgcccacgccgcccagctgctccgccatgcctaccctattattgtgcctctcttttctttttcttcttttagctaagctaaagctagtgtgtgagtctagtagactctaagaatatccctcctcctcctcctcgtcccccccctttggtactccgtcgcatcagcagcaaaagtgcgc

SEQ ID NO: 386981 - DNA, 572 bp, Oryza sativa
  unsure (1)..(572): unsure at all n locations
ttcnaatcttatacaattntagaggaaagcacttttttacttaaatctatcaacacttttgccctcaaggagttaacagttgacatcattcaacatttcaccgaccagatcccatttttggcttaatggaagcaggaaggctgtcgcatgtacaacattagtttgtatctggccataacattacaaaaacgatgcaagtacaatggaaagaattaagagcatccaagaaaccgtccaattttgctcaatgtggctcgggccactcctcaatagggatgtggttattgtaatttgtaaggatatggcgtcaggtagtcttctgtatctcatgtcggtagcaattttcttcagatctccaactgaacaacgacgggcaagcagcatagttcctatttaggtggtcgacggtccgggtaaagtatgtctgcgacgttttccttgatgtaaatagctgtcttgtttagattctttgcaacgcctgaagcgaccaatcccgcgcttttcctaaacctcgcatagaaatcctgtcctgtaagttgcccgggtctttgtccttgttgccggacgcgtgg

SEQ ID NO: 386982 - DNA, 1336 bp, Oryza sativa
aagtacgagtaggtaaaagtggccatgggtaccaccagaacgggaagtatgacagtttccatagaaatggatccagtccacagcaattagcaaaaataacaatacatgctcctaatcgatacatgtgctgttccatgttacatcatcaccaagaagggaagggaagggaagtgagccaagccaacaaagtcctggctggctggtgtctaattcattttcttcttatcacgacgatgatagtagatgtaattattacttaatcgaaggaaggagcatatatatatagcgaaagaaggataaggcggatatgaatgatgatggatgggctactcggagcgggcggcgaagcgctccaccttaggatcggagaggttgatgccaaccatggcctcgccgagcccgctgctgacctccgccaagatcttggggtcgctgtagtgggtgacggcctgcacgatggcgcgggcgcggcgcgcggggtcgccgctcttgaagatgccggagccgacgaagacgccgtcgcagccgagctgcatcatgagggcagcgtcggcgggggtggccacaccgccggccgcaaactgaacgactggtagacggcccagctgcttggtctgcatgacaaggtcgtagggcgcggcgatgcgcttggcgtaggagaagacctcgtcgtcgtccatgttgcggagcgcgcggatgtcgcccatgacggagcggacgtggcggacggcctcgacgacgttgccggtgccggcctcgcccttggtgcggatcatggcggcgccctcgcggatgcggcggagggcctcgccgaggtcgcggcagccgcagacgaaggggacgcggaagttgtgcttgttgatgtggtgggcgtcgtcggcgagggtgaggacctcgctctcgtcgacgtagtcgacgccgatggcctcgaggatctgggcctcgacgaagtggccgatgcgggccttggccatgacggggatggtgacggcgcgcttgatgtcgcggatgaggccagggtcggacatgcgggcgacgccgccctgggcgcggatgtcggcggggacgcgctccagcgccatcacagcgcaggcgccggcctcctcggcgatgcgcgcctgttcgggggtgaccacgtccatgatgacgccgccccgcagcatctgggcgaggcccaccttgacggagaagctaccggacttgtgcgagaggccattggcgccgccgtagagcgccacgacatcggtgccgtcggaggccatgggcgtcagtgtttgtgtttgtgtggcaataacaactcaacgatagatcgatccagctccgcccggacgcgtgg

SEQ ID NO: 386983 - DNA, 582 bp, Oryza sativa
agcggcgccctcgcggatgcggcggagggcctcgccgaggtcgcggcagccgcagacgaaggggacgcggaagttgtgcttgttgatgtggtgggcgtcgtcggcgagggtgaggacctcgctctcgtcgacgtagtcgacgccgatggcctcgaggatctgggcctcgacgaagtggccgatgcgggccttggccatgacggggatggtgacggcgcgcttgatgtcgcggatgaggccagggtcggacatgcgggcgacgccgccctgggcgcggatgtcggcggggacgcgctcgagggccatgacggcgcaggcaccggcctcctcggcgatgcgcgcctgttcgggggtgacgacgtccatgatgacgccgccgcgcagcatctgggcgaggcccaccttgacggagaaggtggcggacttgtggttggagggctcgagcaaggcggcaccgttggtgccggagccgtagacggtgacgacgcctgtgccgtcggtggccatggccggaggggaaatttggggatggggaaggagaggccttaagagcgcagatgcggcggcggccgggggagtggg

SEQ ID NO: 386984 - DNA, 627 bp, Oryza sativa
  unsure (1)..(627): unsure at all n locations
tttttttttttttttttttatacacnatgtttgttgtttattttcaatatatgacaaccatcgatcacagatatggcagtaattatgaggaaggaattggtggcagtggtggcaggggacggaaaggaaggatggcactctacgttgctagctagtcggagcgggcggcgaacgctcgacatgtatcttggggtcggagaggttgatgccaaccatggcctcgccgagcccactgctgacctccgccagaatcttgggatcgctgtagtgggtgacagcctgcacgatggcacgggcgcgcaccgcggggtcgccgctcttgaagatgccggagccgacgaagacgccgtcgcagccgagctgcatcatgagggcagcgtcggcgggggtggccaccccacctgccgcgaactgcacgacggggagacgccccagctgcttggtctgcatgaccaggtcgtagggcgccgcgatgcgcttggcgtaggagaagacctcgtcgtcgtccatgctgcggagcgcgcggatgtcgcccatcacggagcgcacgtggcggacggcctccacgacgttgcccgtgcccacgcgtccgcggacgcgtgggcggacgcgtgggcggacgcgtgg

SEQ ID NO: 386985 - DNA, 127 bp, Oryza sativa
  unsure (1)..(127): unsure at all n locations
ttaataatnttaanatnggggaagcccacggtctaatctttagatcaacagaacactgcatagtgtggtgggatgaatacagaggaagatctaggaccaattggggtttaaggaatactcactatca

SEQ ID NO: 386986 - DNA, 558 bp, Oryza sativa
caatagtagtctagttccacattgcaatattaacaatttaaaatatggtcatgttaacataaaaggtatcacatacatttgtgcgggcgtgcggcaaataatagtacagacacaatactttcttattcatatattgcaaatagcaataccatagtagcacaacttggcgatagccatggctctttcaagcaacatgtcttattcaaaccagagcctatgtagtgaagacgcataagtggagaataccatactattggaaccgcatttaagaaggttgatacatgcttgcgctcttctgcagtgcccaagccctgtgcttgagcttgatgaagtctgaagctactgaatctacatccttgttcttgtcatctttcatcctttggtcatgcaccaacttctcatttgttcctattggtacttccttcataatattggcttggttatcctgaaatctgacctttctttgggcttggaaatagaggacctgattatgagagtgagacattgttgcctggctccttgtaaaggtattgaggaagtgtaggaacggccgcgaat

SEQ ID NO: 386987 - DNA, 688 bp, Oryza sativa
  unsure (1)..(688): unsure at all n locations
nnnnnnnnnnnnnnnnnnnnnnnncggaagcatcacaagctttactgaaagtatgaaactacaccaacgatgttcagtgtaagaaactgtacaaaagaactttgtctttggatatccttgacaccttacatccacacacgtccagcttacacgttaactgttggctagatacaatttagaaaacataaatacgtgtgctacatgataaacgcagcttatctagatctgaagcaaaatatgatccctactgacaaactctacaatgtacgaggtccatggcctaacctagcacacgaagttagcctgtatatatatgcaacaccaccatacactgctgactgtaggtcagggcaatcatactttcactcttcaaacaaaatctgacactgaccaccaggataaccgtggcacagcaatctcctgaagtttggacagccctagctcccttggacaccatgatcttgccgaacaaactgacccttaacccgcggtcgctgctcggctagtagcttcctgctctggtatcgcaccttcttctcaaagcacctgtctttcctcttaagccggaacttgttcagtgcagcctctcgttggctcaggtggcgtaaaccatcaggattttcaggaacaacatttgatgattcagtaggggcaatcatgtggttggaagagctgtccggacgcgtgg

SEQ ID NO: 386988 - DNA, 705 bp, Oryza sativa
ttggaccaaataatccgcggcgataattcaatgttcaaataattccctttaattatactccctcgaaacactcaatatttctcaactacaaagcaaagtttacactttcacttcaacaactagctcccttccgtgatgtacaattgaacaatcccatttcttccttgctaattcatctcctcattgcgtcaatacgcagatccgtctcccctcttcagcgtcaccaacttaattaacaccacgaatcacaagcagtaattcacaaactttaattactctgcaaatgcgtatgttcatatgctgaatcagtcacgagaagccgtcccggcgatcctgctcctccgcctccttgttcgccgtctgcacggccttgaaccacaagaatccggaggtgggtatcccggtgaagacgaagaaccctaggagcggcgcgtacagggcgctgtcggggctcaccacgccgaacaccggccgctggttcgcgtactcgaagatggacccgatggcggcgatggcggtgatggcggaggcgagaaggtaggcgaagaaggggagctcgacggcgccgggctcctgctggcccccgccgccgccgccctcgcgtgcccacggcggcggctcgtcggagcccgggcgcgcccacgaggggacctgctcgtccgcctcccccgacgacttcgccgacccctccgtccggacgcgtgg

SEQ ID NO: 386989 - DNA, 642 bp, Oryza sativa
  unsure (1)..(642): unsure at all n locations
ttaagcggcgccttntttttttttttatagttnncnntgggcgcgagaagttttttaaactaacatgcccttgaatttagaagatccacaatgtacaacttccttaactgatcaaaacagatcagaattttagccgtctcatatttgtgcgtgagttgttcacataggaacataccacaaacctaaactaggtaaaaaaaaaaaaaaaacatagcaccaagccttctgaccataatttcccttgcaaaccaaaaacttggtttcatgttgccagtgtgattaggcaatcccaattatcagcaaaacctcaaggcttattcaagttccttctcatcagcacagctgtaacccaactgatatgcgcgtgcaaatcgtccagaacccataaatggctctgcttcatcggtcataccagcttgttgtagatcagtatcatcatcagcatcccactcatcatcaggacacaaccacctttcaaagcagtgcccagatattgtacaaagcagcagcccactagactggtccaagacaaattcacgacaagcgtcatcgcaaacatgaacacggcctgtcttctcacaaatataagcatcaccaatctgggtgtaagagcatgtattcccagaacaagcggacgcgtgg

SEQ ID NO: 386990 - DNA, 964 bp, Oryza sativa
tgttctagatcgcgagcgccgcccttttttttttttttttttgtttcaacaccggatcattctttattccaaaagataacaaacaatgttatttacgatcgcaccgctggtattgcagcaaacttaacattataagtgagcctgctatgcgtgattatcattaacacagggtgctccttgtagggctcttacaacaccagggaattcaccatttcacctaggtggcctaaatgactatatgcctgaatcacctttaaacctatccaaattccaaagatacaacaatagcaggaaatgctaagtcgactagtttccgtaaatgacaccatttgggctcacaggagagccattgtgttgaagatcctcttcctcaacttctgacaagaaaccgttctcaaagaatgctgaatgaagggcctgtatacactgtttcgcctcgctatcatggaccaccaatgaaatgttcaccttggatgccccttgtgagatcatctggacgttaacgccatttctccgtagaacattgaaagccttctcaagaatcaatgacgatctctgtacattccctatcagtgagatgatagacctgtgctgcagtagatgaacaactgcaattttttcaagttcttcaactacatgatcaagttcctgctggatcaattcacgacaccatagttttgatggatctagtgtcaatgatatactgacttcactggtagccacacaatcaacagagatacctaaatcttcaaatattgagaaaaccttcgccagaaaaccatactggccaagcatccttgtgctcactatatccagcatagtaatgtttgacttcaatacaatgctggttaatatactcttgctcaaatctcttgttttagtaataacagtaccaggtgctcgacggttatatgaattcttaactctaactggtatatcaccttctttggctgcggacgcgtgg

SEQ ID NO: 386991 - DNA, 1222 bp, Oryza sativa
tttttaatctcacttcgattcaatggtcatcccaaattgcaagtctcaggctctgagcagaacaaatgccaatacaaaggccaaaaaatcaacttcagttcaagaaaactcacatggataaggatcaagaaattccacacacaaaccagcaacacaactactaggtagcagggtaacacaagaaaaatatcactagatatttgagacagtaacattcttagatagatcagaatttccgtcttttgtcacattcagaggtcatagtccacccaaaatatcaagaatgatgatgatccacatgatccaaaattccaaatgcagcctgcatgaatcgcttgcacagctctggatgatattttgggttgaggatagatttgtctgtcagagctttcccgtatgcgacgccaagtggtagaattagctagtaagcaagttctttctttccattacgtggatgagtgcctcatgaagaagaggctgactcaggctgagcagtctgcggccttggtctcctgcttgctgggggtccatctcttcgcctttcataccgtctgctttcatatttggatgtcctccgctcttttggttggtaggttgggtaagtgcatggaattatctctccgtttatgtatttatcacccccgtagtctttgttcttgacatcgatgtaggaatcaggaagcacccacagaacgccgggtaaacccttgaacttctctgatgtttcctcgtcgacagtgcactggaaaccagtgtaggtggttgtgctgaaggcatacatgttcttcttggcttcctccatgctgccaaggacggtggcgagggtgttgaggtaggtgtcgatcatctgctcccgcgtcggggcggggtccttggggaactccatcacgatcagccagtggttgtagtcgcacccggggagcagtatcgtctccctctgctcgctccccgtccccgcccccgccgccgcggccaccaccggctgcctcgccttcccgcttcctcgcacagccagcgtcgggaacgccgccgccgcggcggtgcgggggaagagcgcggatggtgcggcggcggaggaggatggcttcggcgcgagggcgaaggcgaatgcctgcgcggcggcggcggcggcggtggtcgggaaggaagccatgggaggaggcgcgagagtggggagagggagaggtttacgagtttggcggacgcgtgggcggacgcgtgg

SEQ ID NO: 386992 - DNA, 616 bp, Oryza sativa
ttttgatggcaggtgatgtgtgatttggaccggataccgaaacaaaaatgtacaggagtttccaagaagaaagcaatctatcatattcacaaatttgagtgaattgagtcagtgtctagcatgtctaacactgtttcattataaatttataatatttacgagctggaacaacctatattcatgtgccccccttgtccatctctgaaggtattgctgaagttttgcatattggacaccagttcttctgtctaagccattcatgaatgcaggacacatggtattgatgctcacactgcatcctaccaacttcttcgccctcaatgtattcctcctgacatatgctgcacttggcgtcatctagtacagctctgttcgcttcaagatctgaatttggtaacttatacaccatttcgcttgagacacttcacaagctgctcatcagatagggcagtgctgacagaaccgattcgctcctctagtgctaatagttcctcataagacatgttggtcaataatccatcgcatatctctgtgctggtcatgcaggccaagggcgctaagaaaccaagttagtttctagcaccagcaattgctccataagtcaattcatcatctt

SEQ ID NO: 386993 - DNA, 671 bp, Oryza sativa
attcaatggagcaattccacaagttctatttacagttcacatcaaggcattggtagcgcgagtacgatctaactttcgatcgatattcacacttcaagaatcaggtttcagaattattgacattctttctaccgcaagagctatcttttgattctgacttcatctccgctccttgaaagtatacatcctgcaaaagctgttctcttcgccgtcaatcctatcaactgcaggagtatctggagttctgtttcgcccgcttgattatccaagctcatacatcccatttggccaatccaaacttcaaccaaggatatgcctctatttatccccatttgcacatcatttcaatgcccctttcatcttgctctcaaaattgtaaccatgttgacctgcaaaccggtggagctggtcttacccagcaagaactccagctcctgccattcctgagagaatatttgcgccgacccctctgaatagtgtgaagaacccttcagtagaaactatctgttttgctgcatggaaggcgttcttatatttcaatggctgcccagaagttaacatcattctgcgacggagtgtatcaaatggataggcgcaggctccagagaacgtagttattgcccagcccaaggcaaaactggcgaagaacccacgcgtccgcggacgcgtgg

SEQ ID NO: 386994 - DNA, 957 bp, Oryza sativa
tttttttttttttttcttgtaacaaacaatagcactatattttatagcacctcaaatttgagcgttaatacattgtacaccatacaaccggttttttggtctcaaaatcccagcttagctagttctaatcctcagaaactgcagtaacagcagtatgcccctagtctgctaaacgaacactcctttttgtctcgaactagatcttttcatgaactgatctaacatggacaaaccaacccagaatatgcaacaatggcactatctgaactgcaaaaaaggcttgatctgcatcatctgctgtattggactattggtacgatgacagctttgcgggcgaccttttgtaccttctgttgaaaaatgataagcgaagaattgttcattaggacttaacttcatctccttcctggtcctgcaaacctcctcgccgtaccaaatatgagagcctttgttaacagtccatggtcaaacgtgcatgccagggcaactgccccacctacaaggatgactttgggtatattgcctgtccagtgctttggtttctcagcttcagcgttgttggttgaactggcctctgtcttgtcctctgcagtgatgagctcatcaggatcaaccttcgtgttgacatgtgccatggcagcgcattttgaaaggggctcgccagcagtccttgcgatttggtatgccctcaagccaggctcaatccttttgacgcagccccacatcccctgccgaacaccgagctttgcaatttcccttggaatccccatttcctcatgatggaacaggagcacctcacatgcggtcattgagccatcaccgtttcttgattcaaccggacggatgcaccaactagagtagtacacgtccacacgacgaggtttgttgcaccttggaacagaggggcgaggcacaccctttgttacacagtaatacgtctttccagatgcccatatc

SEQ ID NO: 386995 - DNA, 392 bp, Oryza sativa
tttttttttttttttttttggagagaacgggccagggccacattaactgaattaattgaatgcaactatgcaaggagactttttacatgggcgacattgcattgcatttccttgtttctgtaatctgtatacattacaaccacccctcctcctagatgcccttcagatcttttgactattgcaacgtgcaataattgctgctgcagatcatggacaaactaaccgacaccacgtgattttcccggccgtgtcaacattctgccagctcctgccagcaggctgagctctgctacggaggagcaactcaccagaattaagattagtaaaggcttcaagggtatttggtacaataattaccggacgcgtgggcggacgcgtgggtcgacccggga

SEQ ID NO: 386996 - DNA, 885 bp, Oryza sativa
gatgcccgttcgagaaaaaaattttgcacatacaactcagtagtaataatttcaaagcctccaccgattcgattccactcgacaagagcaaagccgacgcccggccccatcgcgacgcgacggtagtatagtagttacaaaaagtgaatgtgccgcgtacgcacgcgcgtgcgtgcgtctcacacgagaaagggagaatcggtggccgtaagcactcggctcaatcaatcatcactcacctcaccggccgcggagcagggccttctcggcggtgtccatctcctcgaggatgcgggcgcggcgcttgttggggatgggggccgtggggccgaagctgatgtagtggcccgacacggcgttgagcgcggagtacatctccctgaaggacgggcggcccagcagcgacttctccctgcggtacttggccacccacgagttggacagctcgcggagctccgccaccgcgtccgccaccccggggtccgccctgtccatgttgatcgtcgaccgcaccttcccgatcacgtccttcgtctcgctcacgtactcgtcgtccgacgccgcccgcgccgctcccccgcacggccacagcgccaccgccgccgccgccacccctcccgccgccaccaccaactcgcgcctgctggcttgaagcgcgcgttgaggcggcgttggctttacggcgatggcggcagtggcagcggtagccggggccgtgaggacggccggcacgggggacgacgctggcctcatctcgttcgtgtcctacgcgagctcgcggtgtgaggggggaaggggggagagggatagcgcgcgggtttgtgagataggcttgggttgggttggggagggaggccggagggcgggaagaggtgacacgtcgaa

SEQ ID NO: 386997 - DNA, 447 bp, Oryza sativa
  unsure (1)..(447): unsure at all n locations
tntaaagatgaantaacatttacctttcagacagcccatatttcataacaaaaatgtatatttccagcataattngaagcaaggagaaccttaaaacccacatttttcctttggccctataataagatctttggccgataaaacatcctactcacaggcggcccaaaatttttacttgagctgtgcaccgctccacaactgttaacaaatacaattgagggaacggcaatatcgtttctatctccctgaaatgtaaattgacaacagtgggctgcatatatgtctgctgaatagaaagggcgagggggaaaaatgggtgaaacaagaaggaagatatttctttttgcccctgctgtcagaagcaccagatgctgaacctggttttatcttgaatttgacaacatttggctatttcactgatataaattctattggatgctctgtaca

SEQ ID NO: 386998 - DNA, 343 bp, Oryza sativa
aagaaggaaacccgtctttcatatacaccaagctgccagcaaaattctgggcagttcacaacggtttctcattttctacaaaattaccggggatcatttgctcaattggcacttaatcctacagaagcactagtgctggactcctgaaccaaaatgggggattatatattacaggtgggtcggggaaaaggtaaattagtttgtaaccacttacccaaacttaaaagcagtgattgccaatatagtgatagctctgaagagaatgtcgttcatgctcttttgtattctgactgcaacctcttcgtccttcaagttcatgtcacctgggcttctaaatatgcta

SEQ ID NO: 386999 - DNA, 886 bp, Oryza sativa
  unsure (1)..(886): unsure at all n locations
nnnnnnnnnnnnnnnnnnnnnnnnnnnnnnnnnnnnnnnnngtagagaatacaagaacacacaaactaattactgataaatttataatatccattcataccatccaccagttcaagagcaaacaagaccaatgaatgattgaaattacattcaggtcgtccaatcaaattaatgtgcatgctcttgggtttgtcagtgttccgaagctaattacctaaattactttgaattaaatatggtggaaaggattattccttgtaccattctagctaataaataatgttgggttcttcaaacccaacatctgtaccaactcctgagttgaagtttgtgcttgatttcctcatgctttcttggccttaggtttaggtgccggtggtgggaacacggccctgaagacccaggcagcaagaacagcgccaacaaaagggcatatccagtagacgtagaattgctcccatgtgttgtggcgattgttcacatatgcccagccaaacgcattggcagggttcatggatgggccagtgtaggcagcgccggtgaggacgaggcaaacggtggagatggagagcatccaggtcttgacgatgggattacggggccccttgacgatgatccagagcacggccaaggtgatgacgaaggtgagcaccagctcggcggcggcacccgtgtggagatccaccttgagcgatggccccccgagcatgtgcttgtactgctccggcatcagctccgagatcgccatcgccccacccaccgcacccgcggcctgggcggggaagcggagggcgagggggaagagggaggagtggcggggggaggagaggccggcggcgtggaaggcggcgagggcggtggggcccacgcgtccgcggacgcgtgg

SEQ ID NO: 387000 - DNA, 343 bp, Oryza sativa
tggtgatcttgtccgggtgccacttcatggcgaggcggtggtacgcggcgcgtatctcggcggcggacgcgccggggtgaacgccgagcacggcgtagtacgacgatccctgcatcatcctcctcctccccctcccctgctgcatccgcccgatcgaccgatcgatcgcgatatcctactccgacgcagcagcagcagcacacactatccctctctagtctctacctcccgctcgatcgatcgcgatgaatctatctatcttgggtggcgcgggggctagaacaacattgggggtgaagtgaaagaacgatggcgcggctggagaatgtacgcggacgcgtgg

SEQ ID NO: 387001 - DNA, 941 bp, Oryza sativa
tggtgtttttgtagagaagcgccacatgcaaaagtatatattccagtgtataatatccaggtaaagccaaagcctacacaaaccaaccacagaaccacattctcaccaggtcacctaaacttctaaacaagtctttgtgggagatatccaggtagtatatatattgggaatcctcacccagagtttaccatgtagaagattgagatgtactgcacacaggaatggtcatcagtaccatataacggacgattgctgattactattactggttgcaatgtaacacttcggatacaatagtacattacagagctagctaaatgcgaagccacaataccgtcagcgcaagacgatcataaataaagcttacacaacatagccaacatgcaaaccattcggactgaccagagatgagggttcttgaagctgccgtggtgtgccatgcatcacaaatgccgaacaactagattgtagcagccaacatgaaaggaaaaggcatggataatgcagcaaagatggatgatgaagaccgcagattgtgacgcttcgttcaccaaccatatgaaacccctaaattttgtcaagtttctccgccttcaccaccggattagccttggcaatagcatccctagcagcggtccgatagtcaaactggcagtcatgcttatcggaatagcggtgcattgcgcagtacaagttgccacatcggcagttgaatccggtaagaccaaccctcttccgacaagtggagcaccgatttggtccttccctccccttggggttcaccgtgaccccctcactaggaccagcaatctcagcaggctgcgcaacaagcgtcttcacctcgacttgagcaacagcttactttcagcgcccccgcctccgcccacgcgtccgcccacgcgtccgcccacgcgtccgcccacgcgtccgcggacgcgtgg

SEQ ID NO: 387002 - DNA, 1109 bp, Oryza sativa
tcgcgatctatagctggtgtttagatcgcgagcgcccccttttttttttttggcaatatgatggaccattgctgataactattactgattgaaatgtagcaagcatgggacatagtacatcacagagctagctaaatgagacaccacaatactgaccgaaaaccaccaagaataaagattacacaacatacccaacacgcaaaccacttgacttgactgagaggatgaattctttcggctgccaggatgcagtgtgcatcacaaagttgaacaatttaagaaatgtagcagccgacaagaagaagtgtgaggatagagcagcaaaggtggatgttgaaatcttgtaggttgcaatccattccacgcccctagccgccttagatcttgtcgagcttctcagccttcaccactgggttggccttggcgatggcatccctagccgcagtccggtagtcgaactggcattcatgcttgtcggagtagcggtgcaacgcacagtacatgttaccgcaccggcagttgaatcccgtcagcccaaccctcttcctacaggtagcgcaccggttcggcccttccttgaccttggggactacagcaacctcctcgctggtgcccgcgacatcggtaggctgcacaacgagcgtcttcgcctcgacctgagccaccgccaccgccgtgctaccactggcagcaacaatatgctccttcccaccgtcacaaccattgacaatgctatcgatggaggaggcagcaagcttggcctgctcctccttcatgatcatctccttgtggcacttggagcacatgttcatggtcgccgcgctgccaaagaagccgcagttattgatgcaaaggattgggccctcgggctgctggcagccagcctccttgtgttccatcgcaactgtgatcctggtcgcggcggcggcggaggccgaggcggcggtggcggaggaggcgtgcggggattggaatcgcgagctcggtgcgcgtggtggcgtctcctctctctctctctctctctctctcactctctctcggacgcgtgggcggacgcgtgggcggacgcgtgggcggacgcgtgggcggacgcgtgggcggacgcgtgg

SEQ ID NO: 387003 - DNA, 636 bp, Oryza sativa
gccttggcaatagcatccctagcagcggtccgatagtcaaactggcagtcatgcttatcggaatagcggtgcgttgcgcagtacaagttgccacatcggcagttgaatccggtaagaccaaccctcttccgacaagtggagcaccgatttggtccttccctccccttggggttcaccgtgaccccctcactaggaccagcaatctcagcaggctgcgcaacaagcgtcttcacctcgacttgagcaacagctacttcagcgtgaccagcaataattggttccttcccggaatcaccaccattgacaatgctgtcgatagaggaggctgccagcttggcctgctcctgcttcattatcatctccttgtggcactttgagcacatgttcatggtagccgcactgccaaagaagccgcagttattgatgcaaaggatcgggccttctggctgctggcatccagtctccttgtgctccatggcttccttttaacttagacgacgaggaagcccttttctttttttttcctccgcgcgattcctctccggcgatcccctaggagggggaggacgaggaggcgaggggagaggaatcgcgaggaatggaattcggtgggcttcgaaatggggggcgaaaagg

SEQ ID NO: 387004 - DNA, 505 bp, Oryza sativa
  unsure (1)..(505): unsure at all n locations
ttaggtcttnaacttccgtggtntccatgcatccaaatgccgaacaactagattgtagnagccaacatgaaggaaaaggcatggataatgcancaaagatggatgatgaagaccgcagattgtgacgctcgttcaccaaccatatgaaacccctaaattttgtcaagtttctccgccttcaccaccggattagccttggcaatagcatccctagcagcggtccgatagtcaaactggcagtcatgcttatcggaatagcggtgcattgcgcagtacaagttcatggtagccgcactgccaaagaagccgcagttattgatgcaaaggatcgggccttctggctgctggcatccagtctccttgtgctccatggcttccttttaacttagacgacgaggaagcccttttcttttttttttcctccgcgcgattcctctccggcgatcccctaggagggggaggacgaggaggcgaggggagaggaatcgcgaggaatggaattcgg

SEQ ID NO: 387005 - DNA, 675 bp, Oryza sativa
ttttacggtaagaaacgcgggtgaaatcctcaaaatgacatcctcaaaagtaccataaacaaagtatacgttagcatctgcggagtagcaaaattaacacaaacacatcctaataaaattctcggaagtaccatgaacgacagcaattcaaatacgtgcatgcccaattgcccagatacatcttttcaagtattattacgggccattcagcacttagcagcagacctaaactgctgtctaagtgagggcagcatttctcacactaagtttctagttatccgatagattcttaatatgccgtatctcaaggagatactcctgtttccggttcgaatgtaagcttttaagcagtccacccggatctttacgaaggcatatatgtcgaagtatcaatctgctcaggaagctcctttatgtcaacctcgaatctttcttgcacttgattaagaacatcagagtcagaggcagaggaaacaaatgttattgcaagtcctttggttccaaaacgcccagcccttccaaccctgtgtagatacgactcagcagaatcgggcatgtcatagtttatgacaatgttgacacgttcaatatcaacccacgcgtcaactaaatcagtagccacaagaatcctcttgtgtcccccacgcgtccgcggacgcgtgggcggacgcgtgg

SEQ ID NO: 387006 - DNA, 2080 bp, Oryza sativa
  unsure (1)..(2080): unsure at all n locations
nnnnnnnnnttttgttttttttttttttttggttcatcagaaaaagattttattagcaaagaacaggggataaattattccacatgccgacttgatgaatgatactaattatttccagtgttaaatggaattaagttggcgtaaaaaaaattctagctgaaacaacaccagctgaactggcatgccaattggcagtacgctgccttattctatttacttttgaccgtgatacccttcggctgttcttgggataattttctatggtttaccattcaactggactttagctagcttctctccgctttcttcggcgccatccaccttaccaggaaatgacctcccactacttgtgacaagttccttgatggttgcttggatgtccttatcgtccaacagcgaatccaatgtcacatgtagccggaatctccaataatgcttcgggttagttgggtcattgattgtttcctcttttgctggtcttgtggtgtacttgtctttaagtgcaagcaggtcctgtagtgggaagattgcccacattgatggagcatcaaaatgctgcttaacaataaagttcgctacttctggggtgcagcgagatggcggctcgtcatcactaccaattacagtctggtagaaacggcttcttcttcctccatcttcttcccaccaagcacgtaatgtggagcaatcatgacatgacggagcccaaaccgtcacgtagctatactgagatggaataccaaattccaagtttggttcactgggcattctctggatacgcaatccaatcaatccaagttcttgcataacagggtgaacacaggcagggataaggccaagatcttccccacatgccaacatatccgatgagttcaaaagcacaggcagagccttgagcgcattttgacgccagagattctcttggcgagcaaaataatagtcatagtacaatcttctgaggatatttttgctatgttcatctagatcgttaaaacttgaagtatcctcctggttgaagcggggataaaattttgtgctgtcctctggatctctaataaggactatattctgtagtagatcaaacaaaccacgccgaatgctgtcttctttctccagccataatgatttttcagaactgttcttaagctttgcaattatctttttctctgtattgcagtcctctttgaactcgtaatgttgtttcttgtactcatttagaaagttagctgcaattactgtccaaaaggacccaaacttctcctccagtgtttcctgaagaatataagggcggctcattctatcgaaatcccataggccttcactaagaagctcctcctgactgagagcaattgaaggcctaaatttcccaactagacctgtggctgcatgatctggaagctcccatatcctaaagaaacccaagatatggtctatcctatatgcagtgaagtattttgccatctgtgtcagacgagctcgccaccacccatagattatcctttgacatttcctcccagttatatgtaggaaaaccccaattttgtccatttttgtcgaaataatctggaggtgcaccagtagctgtattcatgcgaaataaagtggggtatacccaagtatccacactattcctatcaacaccaataggtaaatctcctttcagaataacctttttcttccttgcataggcagctgcctctgataattgcatatatagatggtactggatgtagtaatggaaacatataacgtcatggtgcaaggtaccttcagaaacaagcttatctagcttctccttggaaaactgagaaaaacggccccattggctgtgatctgatgtctcaaagaagtcccgcagaaaacacaatgcagcatatggtttcaaccactcctcgttttcagataaaaactgcttgaacgaactggaatttagtactttgtctttctctaatttgaatatttttcttgctatcgagagttttgaggccagtgatgcctcatagtcaacatcctttttgtccaactgcttctttgcctgtgaaatctcgtccttaacatcccctggaattgaatctgaaag

SEQ ID NO: 387007 - DNA, 527 bp, Oryza sativa
  unsure (1)..(527): unsure at all n locations
nnnnnnnnnnnnnnnnnnnnnnnnnnnnnnnnnnnnnaaaaaaaaatgngcagccaccgcccaccgccatnccggccggtagcagtagcttcccattctcctcacattcccccatccagattcaacatcaaaccaaatcaaatacatagaaacatcacagattaacatacatcatagtggttcacaatcaaatcaaatcaaatcacaaattttcccacgcaagtcgtcatcgccgtcgcacgaatgcaccccgccgccggcctcccccctcaccccttcggccagatctgggagggagggagggaggggagcctcccccagctgcctggcgtagtccagcgtgcgacgccctaggcctgcacttttagctaactaccctgttttcagacctggagggaggggctgtcttcggcgccatccaccttaccaggaaatgacctcccactacttgtgacaagttccttgatggttgcttggatgtccttatcgtccaacagcgaatccaatgtcacatgtagccggaatct

SEQ ID NO: 387008 - DNA, 436 bp, Oryza sativa
ttagaggactaaccaaggaaggtagggccattgaacagagaaaaaattaagaatgtaacttacattgttttaacaaaatcattcattgataaatgaaaaatggacaattataatctctcttttgttaggaagagatcatggacataataaccatggggaacatatgaattttaacccactaaaataaagactcatctgagctaatcaaaagaatactagttaggaccccaagtaatgaggttgtttaccaatctctggaactgatttcagctaccaatctgtgaccaaatgttttgttgaacttgaccaccatctctgactttgcccaccaaaaatttcaagaattaaaaagaataaattattatttactaggaccaacaactattctttggtaaaataaccttggcaaaataaagggcttcattcactttgggac

SEQ ID NO: 387009 - DNA, 844 bp, Oryza sativa
  unsure (1)..(844): unsure at all n locations
tatcaattagtatctcattggccttgattctagcatatgtccagttcaaaaactacattacaggcagttttcaatggcaaacaaaacacagaacacgatgtgatgtttaagctttcggtgcaatggaagtcgtctatgtatgaatctcacgtgatgaatcacatatacagcaaaatgtcaggcaggtcagctctgctcagtggtcaggtgaggtgctgccgcttgtatctgaaacaatgagaaactatctccacacctcaacaacactataccctaagctgactgagggaatccggaccaacgaggtatattcgtcttcgactactcttgtaccggaagactactactcctttataagctgttcttggaatgccatccttccattcttcaaatattccaaattgacgagctatccgctcaaagtcttcctgatcgttatactggatccttacatccgcatccatattgtgggctttcaacgcgggcatcagatccatggagaggggtggcactagcgacgtctttcccaaattggattcaggaacttgtcctccttgagggtagctccaggtccccagaattccacttgatatgggcatcatttagcttgattgggttccaagtactgtctgaagaattgccccatgctttgacccatgttcgccaaaattgtatgttctggcagacttccgggcgaataaattgccggtctctgtgtacctctttttagcctcaccccagtcatcccaaaaaagctttgggccacttaggtgacagctcaatccatggtagggctttgttaacatccatcccaaggnccagggaaagaaatccggancgggna

SEQ ID NO: 387010 - DNA, 515 bp, Oryza sativa
aattttccattatttaaaaatataaaaaaccaaattttttttttttttttttatcggagtctccggacgaccggacccaagcaatacttcaaaatattccgattgagcaacaaaacaatgttatgcacacagtgccttctgtaagcaccggccttattgcgatatactatacagttagagaactcatcatcatcagttttacattggataaacagaagcaagtctgtatcccccatctctggttgcagcaagggccatagaacgatagcccaatgttcaccagggtgcaaagcttattggtgccgtgtgagatgatatagaaccgcagagagggagccctactgctcgtttctcaatctcgatcacgtagaataaatgctacttgaaactacttgatttctctcaaagttaaacattgtctttcagtataccaaattgttgtagagctgacttaaggttatctggaccatatccctcgattgaagtaattcctggtttgcggacgcgatgacatc

SEQ ID NO: 387011 - DNA, 404 bp, Oryza sativa
ggaggaaagtgagacatattactatatttaaaaacttttggcatcaggcagtgagagaaatacattaattaatatcctataggaagaacgtaactataaacaaaggcatttacacgtataatcacaaagcgtctttcttcagatcgagccaaagaagcagccttcgaggccggccaagaaatctagccttccatgcaggctcctaactctcatagacaaatccacatttgttgtacagcttctgtgctgcctcattgttgatggcaacatggacatacagatcagttataccccattcacgagccagtttcttagacttgtcaaccagggcataacccaatccatttctttgaagctccttagcaacacaaacattgctcagataagcccttgtatggctggac

SEQ ID NO: 387012 - DNA, 960 bp, Oryza sativa
  unsure (1)..(960): unsure at all n locations
gnggggngggttcccccncaaatttcccctttggggccatttnaacctctccccgggttccaaanaaggttnttgnctaaacttccccgntttaaatttnccatggggccnggcngggccntaggagcccncaatgnaattgttccagnttaggtttnacccccccttntggatcaccntccccttggtgtattgggtgacagctttttctcaacaagatcgagggagtttctcggaggttccccgcccaggaattgagtataccattactgtcttgtgctgtgcggaagcatacaacacccattggcctgtcaatcttcgcaatcagcgactttgagtttaccatgtccgaaaggtgtttctctgcctcctgcaagctcaagcaaagaagatctgcgagcctcttcagggtaatccttgaatagtacttcgaaacaaccaagatattatgttcaatgatcctcaatttcagatcctctgcagctttgtcacccaaagctcctccgagaaaattcttctcattcgcatattcatctttaaagaattcccacaagcttgtccactgaatcacctccatggttacaagttgcttcagcagtaaccggaaatttggtatctcggagagatttttgtcttcgagtgtggcattgagaaggcttgattgcatcggatcatgaggcgccaacaccaaataccaacagatctttctaagaaccggtatccactttgatggatcctcttttattgatggaatttcataaatcgacttgtagcaacggcagatttccaggtaatcattgttgtgcgagtaatagcgaatcatcagttcatagtagatgcgcttcagttccaggagggaaggtatctctgctggggcttcctgaacaatattatcaccttctttcggtttctttttttcctttgacgggtctgcatcaaataccctaggactgattttcc

SEQ ID NO: 387013 - DNA, 762 bp, Oryza sativa
  unsure (1)..(762): unsure at all n locations
nnnngattgaataatctagaattcaaataatattcgggaagatacacatgttaagcaaattggaggacagcgattgaaccccaacaacaaataatatgtcatcattctgtggtcacagtatttaagatcattcacgcacgagttcccaaagcaaacaggtgatgcttgagctgagaaaagcttgacgtcctgtgattgtaaaatttgaccatagaaggccaggcagagaacctaagcaagccagccaatgcaaaatggtttacagattaagctttcaacaccgccttatggatcatcgtctccttgtgtatttggtgacagctcttctcaacaagatcgaggagtttctcgaggttcgccgcccaggaattgagtataccattactgtcttgtgctgtgcggaagcatacaacacccattggcctgtcaatcttcgcaatcagcgactttgagtttaccatgtccgaaaggtgtttctctgcctcctgcaagctcaagcaaagaagatctgcgagcctcttcagggtaatccttgaatagtacttcgaaacaaccaagatattatgttcaatgatcctcaattttcagatcctctgcagctttgtcacccaaagctcctccgggaaaattcttctcattcggcatattcatctttaaagaattccccacaagcttggccactgaatcacctccatggttacaagttgcttcagcagtaaccggaaattttggnatctcggagagatttttggcctcgagtgt

SEQ ID NO: 387014 - DNA, 492 bp, Oryza sativa
ttagtctcaaactctcaaagctgccgttacagagtataaactgttcatataaacaaatctgaaaataaaaagggagtcagagaacatatccaagaataaccccgcaaaagaaatcgatcatgttgctattctcacacacgattcattgactatatacatcgctcccggtagtttaagcacacagaagcatctgatttcatgaaatgcttggacatttcgtacaaattttttccatacaatgcaaacatttgaatgtacggtacatcatgaatttgcttgtggaatcttgtttttttttttcgccgggaccttgtggaatcttgttgctgattagttccataagacagccccagtcaaaaacctatggttcagtacagcttcagcaattggacgcttacgatagtccggatttagcattgcctgcaacaactcccagccggcaccatcacccaagtctagaaaatctacagcttcggacaaccggacgcgtgg

SEQ ID NO: 387015 - DNA, 834 bp, Oryza sativa
acacagaaaaatatattcatgttctgaacaaaagcctcaggtacacttgtatagtccacaaacaagtttgcagtgcacacttcttgtttttgcacctgctgatcgagaagcggatcagtgggaagacaggatgcataacttccacatcctaactcaaaagtgtcaaaactttataagccagcttgaagcataagttgaggctttttaagagcccagtacactgaatgacaagaatgctataggttattactgctactgctacatcatttgcaaagttgcaaaacataccatggtaaattaaaacggatcacagcctcacatacattatgacattattaatacatataagagccaggggccaagaccttcctctgtgggaggtttatagccctagaaacaagtcgtgcgcacgcatgagttcgtcaaataagcattccatctcgctctgatgtagcttttttttccagactacccaaaatctctgcctgagcttcagtgcactcagccatcctgcgattcttcttcttcacttgtactcgaaggttgggatcggagtgctcggcgtgtcgaagctctccaacatctccgacttgccgccgctagggctcgccttcttctcctcctccttcttgccgaacaggctcccgaaccatccactcccaccgccgctggagctcgcgacctcaggtggcgccccggggacctgcgggatcccggggatcccgccgccgccgcccatgacggcggggaggttggggtcatcgacggggaccggcgggggcgtggcgagaacgcggttgagcatgaggcccgcgccctcgatcggacgcgtgg

SEQ ID NO: 387016 - DNA, 164 bp, Oryza sativa
gtgtggaaattttcgcatctggtgatattcaggaagagccatttttcacgacgtcaggcagattacatacctaagcaatgtgcataatgattctatagcacccgtatgtggcactaaatatatatctacttatgaacaaccctctttgaaaatttcaaaataca

SEQ ID NO: 387017 - DNA, 866 bp, Oryza sativa
ccggaaacaggggggtaattgtttgaactaaacacaatgcatatgtattgttacaaaactctcagcattttaagtttgttcattcgaacgatacaattaagagcccaggcacacaaatcagccaatacaacatattacgaggccaaaactgcaacggtacgatgcaccatctaatacctttctgctaacctagcagaaacagcccttagcttagaatagactttgcctgcaggagaacctaagataagactacagagtgaatcccgagcaaccttgatgttaacaaaggatccaagtatatggatcttcgtatcagcgataactatgcgagtcctcgtagaattctcgatggcatatttggtcttgcctccttttcctgacaagcggccaatagcacgtgacagatgctctcctcggagtgtcttcacgtccttgatctcaaaggaatccacatacaggtcatcgagacggagcagcgcaacagcatcggcgatgtcaaaaccaagcataaaagcatgtacgaagtctgcacacttctgaaggttgctcacgtcaggtgtgtcttgtcttgttttcagctccacccttcttgccttaaggttcatgcggatgtcgatcttcatgtgctcgtagacgggggtgtagatatccatccacgccttcttggagcggcgcgaagcggtgctgcggcaccggcaccttccggaactgtggcctcccgccgctcatctcgctcggcatcagcgcctcgaaccgcggcttctccaccgccatcgcgccggcggaggaggactcccccgcagcggcggcgctcgcggccctgtcgacctccatctcgtcgcggcgacggaggcggaggagaaaag

SEQ ID NO: 387018 - DNA, 419 bp, Oryza sativa
actcttaaaggttgctcacgtaagtgtgtcttgtcttgttttcaactccacccttcttgccttaaggttcatgcggatgtcgatcttcatgtgctcgtagacggggttgtagatatccatccacgccttcttgagcggcgcgaaagcgtgctgcggcaccggcaccttcctgaactgtggcctcccgccgctcatctcgctcggcatcagcgcctcgaaccgcggcttctccacgccgccagccgcgtccaccgccatcgcgccggaggacgaggaggattctccctgcccggcagcgctcgccggcctgccagcctccatcctgctgcccgttggctgtggcggtggcggcaatggaagccggcggcggagggtgtcggctctcgtcttctcctaggctagggtttgggacgcgtggg

SEQ ID NO: 387019 - DNA, 994 bp, Oryza sativa
tttttttttttttttgcgatttgagttgaactcataaagcatttcggagcacacatttcatcgatcagaaaagttaagatcgaactgatgtatactataaaaccagaaataaataagatagcaaactggcagtcaaaattggtgtttccaatgcaggacacgctttgggcggtgcaagatgaactggaatactaacatgtttttccctgcatcataaacaaaaggtggcaagtatcatgagttacttgcattagagcatagctcttcaatcagttcttttcttttctttttcttgtcgatacgaaaccagctcacttgtcgtctcatgagagcactgccatccaaatcatcataaaaaactgggaggagcccagccgagatggctgagttggttttgctgaaatgctccaacctgagctccagaagccatggctgccatatcaatgccgatatttccagccaacggcggacaggctggctgatgcaccatgggttgtgggttctgcaccatggtcatcgttgtcggctgcagtccgtggggcatggctgggaactgcaggtgagcagggtgttgaactgggctgaaaggggcatgaccattgtgcggtggcaagtatgctgtatggggagacattggttggcccatcatgttgtagaatggtgttgacggcatgacgggaatatctgtaggagccctgaatccacacatctgctgtttcagcctgagggttgagtgtgtaaagattgttgtccttatatttactcatattggcatcttcgacactaccagtgccaccaattacaccagtattgactgggtaaccattctgatttgtaaaaccaccgtatccagcagggccaccagggaacatttgcttacactgatgaggtggtccatatttcatgccattgggtgctagctgtgacgttccgtttggcattaccaaatagctgctggcacttggcaattgtgtaaatgctggattgcttgaat

SEQ ID NO: 387020 - DNA, 715 bp, Oryza sativa
  unsure (1)..(715): unsure at all n locations
nnnnnnnnnnnnnnnnnnnngggtagaatgagagcgatatttatatgattatatctccagcagaaatgtttcttaagtggaataaaaaaggaaaacaaatacagggaacatattgcaagtgtaatgggaaagggaaaaaaatacagggaacatattttatcacctcaaaagaccaaaaccaaatcgtgaatgggattaggttgggatttaatcattcagaatcaaatctgagtgagattagctaggtcagtatcatcagaattggatgaaggcattcaaaccaagctaactattgctctatgctttagcaaacaattgttaacaataacggggaaaaaataataccaccaaccctcactcaacaagcttataaacttgagcatatccgactgccttcttaacttgcaagtgtcaattcatttcctccgaaccgtgatagcaacatctcaggtaaaactccctcaacatctcggtgcgtgttccacgtttaaccatttgaggcactgatgcacatcaaacagcaggaaacataaatatatggacctttacattataggccattgatgtcttctgaatttaccaggagctatgtatccaacaatttatcttgggtcaggctagcttcatgctttttactttcttcccttatgacacgtttaaagttagttagctccgcggactcctcaccatacaccatcttgatggtatcgggcgc

SEQ ID NO: 387021 - DNA, 976 bp, Oryza sativa
ttgtttttttttaattttggtctgaatattcaacattaggctgcttgctattgcacatcatcagaacattaacaggagtgcacactactacattcttcttccacttcttctttttggaattttcctagacgaactctagatgaacattaaacttacaaggcaacactgaacaaaggttgcattttgttcatactttttttagggtcattttggtttatactatacaaaaggacacaactaaattcctagataaactctagggacaaacccagactttgagtagaccacaccagcagcagcagccgggaggaaggaagcaaagcaaaacaccgcggcgcaaagacgcaatgcttttgctacatcctttagtttttgccatcctagccatcgcagcctaccaaggctggtggatgacgcggggagcgccgccgctcctcgggctgccggcgtacttggtgggcttctcggagtgccggggcttctcccggagcccccgcggcgcgtcgccgcccttgggagacaccaggctcagcgccttgagcaccgcatcagtcttgagagcggcgggcggctgcgggggatcgacgaggaggttatgggtctggtcgaagaagaggtcgtcgtcgtcgtcgtcgtcgaaggcgtcgtcggggaggaggccggcgaggtcgtcgtcgtcggcggcggcgtcgtggagggcgagggagtcggccatctcgtcgagctgctggtgctcgtggaaccagtggtcgcggaaccaggcggtggtcttgacgaggtcccaccactgcggcgagaagtcctccacctgccggaacgccgccgggatgaagagcggcgcgtccgggttcagcgacgacaccgccgtggcgctcatccttccttccttcctcctcttttttttttctcctttgcgatggcgacgggagcagggggagagaaaatatccgtggcggacgcgtgggcggacgcgtgg

SEQ ID NO: 387022 - DNA, 750 bp, Oryza sativa
aattaaaatgttgatatactatagagaactagtagtatcaattgagttaggtgtagagtatatcggcgtacaactatagcttaatcgagctaaatacattaaccataaatgttcataacttaattataggtacagtattatgcatcatccattggaactatcagaagtcatccagggccagtttggcagctaatatattacgaggttcagggtcagtacacgctacaggtccgatttttgctgtattttgtttatccatgacaattgagctcccttagcctgtccgctatatcacttccagtatcagataccacctggagcagacatgtagggactgtaaaactactgcagaaaaagatatcggcattttccaaaagctgacgagaaacaggagtgatcaaatgaatacaatctcgtgaaacatctatggctttgatgaaacctagtccaatgcaacaaggtgtggaacactgatttgacaaagctacagatgcacttgttgcaatgccaacaatagtacctttcaagaagtgatgcactgtataatcagacacctggctgtgcagatcaataacctgaagttttgacaaaggaagctgaaacggttcaatagaagcaaagccttgaattaaatcattgtaagagaaaacaggaaactccatgggtaagcactgcctgaagtatgcaattatccttagatcacgaatgatccttgcctctttctttattaatagactgccggacgcgtgg

SEQ ID NO: 387023 - DNA, 1331 bp, Oryza sativa
cttgggagatgaaacctgctcttctataatagcaaacacaccaagcactatataaataccaccacattgtatatgtacatatctagcagagcacacaaaggctcatccttattaacaccaacaacatgatgagcttccaatgtagcattaccagatgatagggcacatacaaatcacaccagaatgcgcttccaatcaaacccaaatgtttaggccttgcgaccagtagtatacacatataccattggttctctctctgaaagaaccattttacagttgcaagatgcaatgttcttgcttatttgaggtagtttcagctttctaggccgcaaccgcctcgcgcagtttgctgctgtccgctgatggcgtcaagctgtcgtagtattcaacaaggaccttccagccacccgggcacatgaatccgtcaggggggctctggcagttcttggcaagagtacgcatctttgtgccagagatgaacaggaaatcatctttccttgatggatcgaaaaagtccattttcttttgctttgtgtcatatgcagccaccttgaaaggaaggatattgagcttctcaagcccaggagccatgctcaacacctttttcccatgatcagcatcatacaggtccctcttttcagttgggtggcccataccagcaggatctcttccaactatgtagaagtttgcaccagcatttatacgagccttagcatgccattgcacttcagttggccctgcataatgcattggagaggggaagattgcaacgacagttgattctgggttgaggacaccttcctcaagaaccttttcatgctgcttcattctccaactaagaggcacatcatctgcttttgtgaatcctcccaatggatgaagcagaagaacaggatttttgtaacccatctcaagaaggcgtttgcgtgtatcagtcatgagcaaagcatgtccattgtgtacaggattgcgaagctgaaacgcgaataccgcatcagcattgcgtctggcaaactcttcacgcagctgggctggagacaagcgatactgatcaagaccatcattgtacttgattggttctataacctccaagtcaccaccaattaaccaatcaccagcatttgtaatcgcctcatcaacataaggcagcccaggtgcagttgttccccatgtccgtgcaatcctttcttctttgttatgcttgtagatctcaatgtcgctgaggacggcgagggggcggtcggcggcgtcgacgagcgcgacgcggcgggcgccggacgcctcgatggcgcggcgctgggcgtcaccgagggggaggaccggacgcgtgg

SEQ ID NO: 387024 - DNA, 557 bp, Oryza sativa
  unsure (1)..(557): unsure at all n locations
gattagtaagatgattgttgtagtaatatatgatttttttttttttnatataaataccaccacattgtatatgtacatatctagcagagcacacaaaggctcatccttattaacaccaacaacatgatgagcttcccaatgtagcattaccagatgatagggcaccatacaaatcacacccagaatgcgcttccaaatcaaacccaaaatgtttaggccttgcgaccaagtagtatacacatataccattggttctctctctgaaaagaaccattttacaagttgcaaagatgcaaatgttcttgcttatttgaggtagtttcaagctttctagcccgcaaccgcctcgcgcagtttgctgctgtccgctgatggcgtcaaactgtcgtagtattcaacaaggaccttccagccacccgggcacatgaatccgtcaggggggctctggcagttcttggcaagagtacgcatctatataacacaggcaatgttggggactgggctggaaaaaaacattggtgctcaaaattaactggtgtaccaaaacaggattgaaa

SEQ ID NO: 387025 - DNA, 412 bp, Oryza sativa
ccccgattatccatgcataattccagattgcaaggggccttcccttgctatataaataccaccacattgtatatgtacatatctagcagagcacacaaaggctcatccttagtagcaccggcaacatgatgagcttccaatgtagcattaccagatgatagggcacatacaaatcacaccagaatgcgcttccaatcaaacccaaatgtttaggccttgcgaccagtagtatacacatataccattggttctctctctgaaagagccattttacagttgcaagatgcaatgttcttgcttatttgaggtagtttcagctttctaggccgcaaccgcctcgcgcagtttgctgctgtccgctgatggcctcaagactcttcgtggcaggtggagatcatatttgccacttggc

SEQ ID NO: 387026 - DNA, 869 bp, Oryza sativa
  unsure (1)..(869): unsure at all n locations
ggggnncaagcatcgtgaaggcgtttattgtgatcgatgatcacgataaagcaagcaaaaatatttattccgagactgttgtataggtctctctcgagcacaacaatgccaaggatttgcaaaggagcttgtacatcaacaaaacagacatgaaagtaagcatcagcttcaaaattcaccgagctgacggttttgcaggacttgggctacacgtacagaacttcagtcaatgagcgggcttattctcgactgtgtagggatagtactctttgccattgtccactctggtagtgttgccgccaacgtccagcgcagcagatgtaaaagccaggcaagaaccagctatgagcgcagaagggatgctccttcctttgtagccgaatatggtggcgccggcgacgaaggcgccgacggccccgttgacgtagtcgttcttcttgcgctggctcagcacgagctgctcgacgccgatgtagaggcccccgacggcggcgaacgtggccccgtagctgccgcacatcttgagcgtccggatgagccccgggagcgcgacgtggcgctcgacccggggcacgtcgtgccatgtcgcgacgaccgtgccccagatggtccccgcggccagccccgtcgccgcggccttcaccgtcttcgtcaccggcgtgtcctcctccaaccccatccctcccttcccaacaccaacccgcccgctcctctcctctccactccctggggggaaccctccgcggcgcttgccggcggcgaaggatcaaaaaattgttgggattttcgggggcggaggtagtgaggtaaaaatgggggaatcgcggcgtggttggagaggagaggagagagggggtgcggacgcgtgg

SEQ ID NO: 387027 - DNA, 1331 bp, Oryza sativa
  unsure (1)..(1331): unsure at all n locations
agccttacctgcatcccataataccagtaaacaaaataatgtcttcaagctaattaaattttctgttngtcaatattactagaacaaataaaaccattcaatttgcatccacttcaaagataaaatatagcatctttcttactgccagattggtttaaagttgagacatgtcctgttcagcagccagcgctaattcttacctgatccttctgccagtcaccatccaactcaactaattcgatataactatataagtcagagttattcatatttgctatttatgccaagaatgttaaaatcgtatgataaattggtgccagtggaacttccattacagtcatttgagtctaaaaacttgtaaaggtacaactcatttaatgactgctcatacccagggagctaggatgctattaataacagatgtttggtgatgtaatagatgaataccttgatagttacatcctctgccccatcagcaacgataattctaactggaggaacatctttatcggaattcatatatcgttcctgtactgcacgcaaggagttcttcaccaattcaaatagcatgagatgtagatgtgatgaacggacatatggaaatgtaaaagttgggtctccatagatgtcaatctcaggagctgatccatattccctcaaacaaatagaacgggcatcttcactggcagcttgagccacctgtataggggacaattctgtattaatgaggcctatgacgccaggctctgggtcaggatcatgcaaagccacatgctgccctataagcatgcggatcccaatccttgacatgtagaatctgtcaagaaactcgtggatctcgtcaaatgcagtggggatcttccttgtgcgatactgctcgttcttgagctgttgaactcccagtgccatcgttggaaccacattattgtggcgtactttgatcatcttgatcatctgcgtaaaagcgagctcgtcgttcctattcctcacttctggaaagtatctgatgtcgcggaaagagtccaagtaccaatcccgcaccttgaggatggcgggcttgcgggagaggccgaaggggagggactcgagctcgcaggccggcgcgcgatccggattgggagctccttctgcaggaactgcgcggagagcagcaggttccgctccgtggggcgcgacccgaactccatcatgtagcgcaggctcacccccgtctgcttcatgctcccccacctccccacctcctccgccaccgccctcgccaccggctccgacgccatcctccccccacctccacctccacttctacctccttcaccggcggcgagatttgg

SEQ ID NO: 387028 - DNA, 953 bp, Oryza sativa
gtagaacattttttttttttttgatgaagttagcttactactgataactatcaaagtacaatctgcaccaagccatgaagctcaacaagtacgagaagtatgaacaatgccatgtgcgtggcagaagaattctacatttcgctacaaggcagagtagagagagagagaaagagagagaggagacttgtgctcatgctgctgcaaagctgaagtgatgaaaccgtggcaactactgtagaaggttaacagctataggtggctggcacttgaaaacaatattccaaaccagcccaggaattacaagagacaagagcaacctaattaattacagagatggtatcaggacagggaagccttcaaggcaagggctcctccgaatctcccaaccgtgacaagtgcaggtaagcatcggtgccgtatccttccatagagatgatttgcaggtcaccaccaaaattatcgagcatacaggcgactgattggaagaccatagccatatccagccatagttactccttcactagggcaatccatatcaggtggattctttgcagtgctatatagatatgtgaaaattcttggaaggccgctccttggtattccaccaccttcatcactaaccttgataagttacatcctctgccccatcagcaacgataattctaactggaggaacatctttatcggaattcatatatcgttcctgtactgcacgcaaggagttcttcaccaattcaaatagcatgagatgtagatgtgatgaaacatatggaaatgtaaaagttgggtctccatagatgtcaatctcaggagctgatccatattccctcaaacaaatagaacgggcatcttcactggcagcttgagccacctgcccacgcgtccgcccacgcgtccgcccacgcgtccgcccacgcgtccgcccacgcgtccgcggacgcgtgggtcgaccc

SEQ ID NO: 387029 - DNA, 773 bp, Oryza sativa
ttgatgaagttagcttactactggtgactatcaaagtacaatctgcaccaagccatgaagctcaacaagtacgagaagtatgaacaatgccatgtgcgtggcagaagaattctacatttcgctacaaggcagagtagagagagagagaaagagagagaggagacttgtgctcatgctgctgcaaagctgaagtgatgaaaccgtggcaactactgtagaaggttaacagctataggtggctggcacttgaaaacaatattccaaaccagcccaggaattacaagagacaagcgcaacctaattaattacagagatggtatcaggacagggaagccttcaaggcaagggctcctccgaatctcccaaccgtgacaagtgcaggtaagcatctgtgccttaatgaccgaaaaggcagactggtcagatcaacatatagtggattataaatctagaatttgtgataattgcaaaacaaagagatacacacaaaataatcagttaaacatgaatggattgttcagcatctaattctataacaagtaattggccttagtcagcacatagtagagcagacagcctcagctgaacaaagggtaaattattagacattcaccttggttattaaatcagatacgtgaatatagtgttgcgagcctgtatccatagatagaaataatttgcaggtccccgcgccgacaattcacagcatacaagagcctcattgtgaccccatagccacccacgcgtccgcggacgcgtgagcgtacgcgtgg

SEQ ID NO: 387030 - DNA, 976 bp, Oryza sativa
cgggtggggggtttttttgagcccccaactcatgtttttcctttcccccttgatatatatcactcagaatttcttgctagataagagagggcaccagcaatctgctgagcttcttgttacacagtcaaaaacctgtgaagatattggcagcctattgaaggccatatacaagcaaagcccctactccggcaatgccgattatcaaaccgaccatcactgtaataggtgggggcgcaccaccaatcgccctcccgggttctgcatcatatttcgcgaaccgcttctttggtgccttgcattgggggcagccatattcatcaggctgttcttcgaaaggcttgggaaggaagtatatgtatccacaatcaaggcaaatgtgtgttgctctagccttttgtgattccgtcaatttccggccaaatctcggaggcgccggccttttcggaagtcgcttcacatcaacttgtgcacccctgctaaccacaaagtagacagagtctggctttgcctggatggctgtcttggtgaaccccaagcttatctgcaggccatagttcatctccaaagaagctacttgtgtagagcacctggtcacctgatttcaggcctgctcttgccgcgttccctccagaatccacagcggtgatgacgacgccgccgccggtcttctggccgagggtgaggccgagcggcttgtcgacctccacctcgatgttcttcgccgcgccggccgtcctcgcgttcacctgaagcaccctccgccgccgcccgctgccgccgccgacagaggccgcccaccgcctgtccaccagtgacagcccatggaaggccgtcttagttgatgatgagaggatggaagggggaggggagtgctgggctctgacaatggagcagtgcttggagggggcaggagcagaggagagtgtggcagccatggcggtggtgagaggatgcggacgcgtgggcggacgcgtgg

SEQ ID NO: 387031 - DNA, 1021 bp, Oryza sativa
ttttattcaatcaaaacgcgggaaggtagtacaaaatactggaaagtgaaatgctgaaagtatccatgaaacattgagaccatgatgctgattcactaccgacacacggtgacagcatcgctcaggtggaataaaccatccgtgtgcagcgaggccacaacacagacagaagaaggtaccagggttaaaaagtcctgtaaaacaagctagctgatacaatgtcggatgacaacaggtcataagagattagggcaaacaacctggggtcagaccttatcagcaacattcaatattgtctgatcaagagcttcacggctaagccacagcatttagatgagcttgttacaaagtcacttgctactgagtgcccctacacaactttgattaagatacaccatgtgagatcatgaaatgacacctgatgagctgatatttacacaggttatcttattacttccagagattggcatacaagatcgttctgtcagataactattggcaatatattgctcggtctatctgaggtggtattggttttatctcggttccaagctcttgttcaatgcgatacaagttaaaacggtcctcataggtgatcaaattcacagccaaaaccaaggtggccgaatctgccagatctaccaaccctatggagatatgtttctgcgctcttggggaaatcaaaattgataacaacattaacagcttggatatctattccccttgtaaaaagatctgtacaaaccaagttcctgcatgcaccattgcgaaaatcatggaaaaccctgttccgatggtcttgcaacattttagcatggatatagaagcaagaataaccaagctctgtgatcttctttgccaatagttcaacacgatttaccgagttacagaatattatcgattgattaatttgcagcttggaaaaaagagtattaagacagtggactttctgcctctcttcaacaaaagcataaaactgtgtaattcggacgcgtgggcggacgcgtgggcggacgcgtgg

SEQ ID NO: 387032 - DNA, 566 bp, Oryza sativa
gaacggcaacacaaggtcagataccttggtcgaaattattacagaagagcaaagatgagaccttttacagaagcaagaaagatgagaccttttacttttacagcaagggcaaggtgcaactggagcagccgtaattttcacaggagccaaaaaaaaaaaagccggtgcgtgcatacacttaggacatgtattttcttcacagcgttctcaatttttcatggctatatacagctgttaaaaatgtagaatattatcatcatcagattacaatagattcaagtacctaccgtgtagcaaccatatatcagcaactcttattctttcctgcaaaccagcttttattctattttgcacatgctttaagtaacctgtaagtgtttcccacacgcacaatcattgagccccatcttttgcagcaacatcaaaagcccttgtgaatgcatttggaggctggccgccgctgagctgaaatttcccatttatcacaaagtgaggaacaccagaaattccagaggaatatttgttgagttcttccttgacctcatcgactcctttcggacgcgtgg

SEQ ID NO: 387033 - DNA, 958 bp, Oryza sativa
tttttttttttttttcttccctaaattaatttgccattgttatttttacttgaccatccgtcaaaatttacatgaatacacaacgcacggacgaacgatttattcatgtgaaggcatgatttacatccttaaaattctctcgcatctagatatagctagagagtggccagctgctgactatgcatggagctggcacggcagtagtgtacaatgctactgtaattttgtattgctacaagtactagacaggtacagggctgaggccagtggatggctgtaggctggcagcatactccctcgcccacagatcataatgtatgatctcctccagtgatggccttgttactagctcattccgatgagcgtcgcatgtcagctccaccaccttgaagatgtccaggtacccgatcttttcatcgatgaacaactccacagccttctcattagcagcactcagaactcctgtcatggtgcccccagctcttccagctgcataggcgagatccatcgacgggtatttcacattgtcaggagctttgaatgtcagtgaacccagcttgcaaagatctagtcggggccaggtgacctctgagcaatagattctgtctggccaagacatggtgtataagattggtatccgcatatctggccatcccagttgagccaacacagatgaatcctgggtttcaatcatagagtgtatgatagattgtgggtggatcacaatttcaatgtcatcgtattcagcaccaaataaataatgtgcttcaataacttctaaacccttgttgaataatgtagcagaatctacagtaatcttcttccccatattccagttcgggtgctttaaagcatccgcaacttttacttctttcaacttgtcaactggccagtccctgaaagcaccacctgatgcagtcaaaataatgcggcgaagtgctccttcgggcaaacacga

SEQ ID NO: 387034 - DNA, 1084 bp, Oryza sativa
attttagccagactggcccaagagtaggctaagcaaattcattaagattatgagatggtgttacaaactaagcgtccacacgaagttgtcgaaaccggttacaaagagcgggagagaaaaaactgcaaaaggaataatgccaatcgtttttcgcctaccatgaagcctgcctccctccagattgtgatttcttctttgatgtcaccaaagagctgcacaaccatacaacttcctgagacaatctctgaagaagaagagtgtaccgaaaacttttctgagataatctctgaagcttctccttgaagccatccgccaatcagccaagtctacattgaggtcactgggaagcggaaagccaacattcacctagctcctgagcaatctccaaatcctgtttgtgaaagcacattgaacaaaaaggttgggtgttatttttgaaatgtcaggttgcatagggagcaattcgcctgatgaggccacccgtctgttgttttagagccattagacaatcagaatatgaaggcataaaaatacataaaacggcatgtacttcggagtatactcttatgaagctatataaattaaaggatgcgaccacacaaatgaaaattgaaaccggatctagatcaaagcttatcgcaatgcagttaataagctgaacatataatttacttcaatactccagcatttactatacaaatagctcctaaataccgtgcgccaaacagtgaaatgccatggtgaaacatgataggattttaccaaaatctccagttggccacaatgtcaaccttggatttatgcatatccttgaagcgaaggggcacatcgcagtgatcaagaaggtagtcggccatcatttcgttcctacttgtaaatgtaagatggatgacaggaaatatagccaagaaagcaagaaaatcaacttctaaagtgaaatggagaatccagtttaataacctatgtaatttgtacaaaagacacatgattccccactatgggagagatattaccagtgcagccccttcctgaatggattagcactcagcgggaatcgtgtgatggattggcaggaatagtcaac

SEQ ID NO: 387035 - DNA, 1050 bp, Oryza sativa
cacagaaattcaggtatctggtgtgatttgtttttacatccctgatacagatagtatggaaaaggtgctgttcaagatgtaaacaaaactaacatgctgaggctaatccatctactataaatgtgttttgtttatgttaagagaggttttgagtaaccgatatagaaatagacaaatagctgggaacctataattcaactgtaagttctgcacattaacgtagagcagaactagaacctaacccagcaacgggtgcactgcgccatgcagtcccctcggcagtccacattgtaccccaaaacttttggattccttaaaagaagactccggagtgtttttccatttattccccagtcactgtccagcttgcctacattcagtttcacctcgctgtcaagatcacatccaagtacttctgggaatttcttcagcaatttgcgaaggtcatcatcggagagcccaagagttctaatgtagttcagtactccactaaccacctcagcatttggaacctccttctttctctcttcactccagtatggtgaatgaatccatccaaatgccttcttcagcattttgtcggcgtcttcaatggagtaatccagtgatgttagtatctgtttggcttcttcccatgttttgttgtcaccagcatcgacaacggtagcttgagcttgatcagcggagaatgtcctccattttctctgagtcctactattttgagtttttccaaattcaatgtttggctggatagttaatcttcctccatatttcttcttggaaaatctcgcatttggtgaactaaagagatcacagcttggagagaggctgatcgcagcagtttcagtagcagttaagaaaggcaatgatggggatttcgccaacatcgcacgcacaggagggaggaaccgcgcgcgaatctggccgcctcctgattcctgaaggctttgctcttgctccgctagccggttgctagctcctcgaggagaagacgagttgtgtctgtgtggctgaacccacgcgtccgcccacgcgtccgcggacgcgtgg

SEQ ID NO: 387036 - DNA, 593 bp, Oryza sativa
tgcatcagcaaaggtcaagatgatagatactaatcttagaaatcagaacggtgacctgttaggtctcaagaagagttacaaggaagactgcacttgggcacatataataactcggctatcaaaacaaagcacaaatcattcttgtctgacgaacacacgcgaacatgttaaaaacactctcgaaactgttggttgaatggcgtggaccctccatcctcagcgctcgaggcacaggctcagctagtccgagctgcttaaaccctgcagctggtcaggatacacgcacgccatggtcggcaagcaacttaaccccaactataacaaagggtaaaggcctcagtagccggtgtgctgctgccacccctggtgagacggctgtgattgggcattctggaaaccgttcaggcctccctcggccgggttctggtggtgctcttggctttgagaatggtagaaagctggatacccatggccaccgaattgcgagtgctgctgcggttgctgcgcctgacgaaagccaccctgctgactctgtcccctggaagccatagaagtgactcggtggaagcgccgacgttgcctcttgccaaagc

SEQ ID NO: 387037 - DNA, 916 bp, Oryza sativa
taatactcctatttcatatgcagggtactaaaattattgatccagaacacaaagaggaatgaatggatcggcaatgtcgccagatcagatggagatgctgttgggcacgccgcggcaggtgacccccggcggcgagctgggcgccagcagttcgtacggcagcaccccggcgccgcaccggttcttccggccgtggtcggcgttccgcctctcgatggtctcctcggcgcgtcgcacatcggccgcgaacatgccgtgcgccgccacggccgcctcgtccgccgtccacggcacgccgccctcgtcccgcccctcgccgaggtactcctcgtcgggcgagtgcgtcgacagcgtgtccaccaccgccatgaacttggtcgcctccagcacccccggcatcgcgttcaaggaagaaccggtgcgggtcggcgaggaacgcggcgtactccgccgcgtcgcgctccaggtccggcagcagccgccgtatcagcggcggccggttcgggacgtacccgcccagcgggtactgcccgaagttgagcgccgcgtgctgcgccgacgcgagccagaccagcgtcgtcaggatggacgccaggtccaccggcgtggagagcggcggccaccacggcgcgtgccggaggtcgccgtgccccccatggatcgactcgtggtaccccccctgcagctcaagatcgcactgcaccgtcccggcgtccgggtagtagagctgcacgtaggactccacccagcttcgaattgccgaccagagcaggagcccatcattcgcgtatgggtagtcctcgatgagaagcctgacgccatggggctgcgtcgcgtcctccacagcaactccctgcggatgaggtcggaagggaggccctccaggtcgaaccgccagtggttacggtagtaagca

SEQ ID NO: 387038 - DNA, 914 bp, Oryza sativa
ggaaagaaagcagcaggggcatggctttccatttttttgcttacttccatagggcttaattacagagggggatacagagcgaacactctcattacatcctcataccatttcagacatctctctagctagatcgcctatgactccactaacactatcactactagtatttgatatttcagggatctatcggcgtaggcgcatagttacataggaaaaaaaaaacactgcacgcattgccagcgaccacctcacacacagacacacggattcaagacacagacacagattcatgagacacaacggatgcgtgaagcctcaggcacgtcagctagctagcttcctttgtcataaatattcctctgctcgattggttattttgttttttcagatttttcagaactttttcaccacgctggatcgcgctatagttcatcggtccaacgaactgatgaccacccagtcgtagacggtggggcttctcggcccgacggcggcggcggcctccggcgcggcgtcggtggccgtcttgggtttccggcgaagcctcctccagctgtcccccttgggcgtagtagctcacgcgaacggggagtccggcgcgctggctggggaggacggcacggacgagctgtactcgccgccgccgccgcgcggcgacgggacggacagcgacggcggccggacgatggtgatgctgcgcgtcaccgtcgcggccggcgcatccggcggcgccgtcccgggggcggcggcggcggcggaggaggaggagggcgagaaggaggagtacttgcggagcttgccgaggccggagtccgggcgcgggccggccaccgtctcgtcccagagctggtcaaggagccccatgggcgttcgtgcgcgcccacgcgtccgcggacgcgtgggcggacgcgtgg

SEQ ID NO: 387039 - DNA, 612 bp, Oryza sativa
caggctgaatcaatgattatgtaaggaaaaaacccacgaatacatttgcaggggatgctgttgatgagtaattttgcatacatcgttgtacagattctgctgagaacaaaactcttacacattacaatctaaagatgaagcaccaatgcatataaaaaatgaaaataaagttttacataatgatcggagtaatgtgtccatggtgatggtacaactatatttgatcatacaaatctaccagtcaaaagaagacattgtggcaataacattctccgctgaaaggttcacatctggagtactaattgcaatggacctttcatcgcttgagttgcctgaagctgaaagccattcaagatccagaaagtttgaatcaccagaatgaatgcaactttcactttcaacggctggaacatgatgtattctgaggtaccatgggtgtatacctgtagcaaattttgagagaggaattaaggtttcaaaaacaaaaatggtagtagtccactatttaagacaccatgctttttcatgatttcctagtaaaatacttgtatgagaaggatgaggtcaacccttgacgaatagaaacaaccttattttgatactactttacag

SEQ ID NO: 387040 - DNA, 918 bp, Oryza sativa
  unsure (1)..(918): unsure at all n locations
ttacgaatagagaatgcacgtgcatgatagattatccagaaccagaacttagtgacaagtactgaatgtttggaagaaatactgtacaaggctcatccatacataagacaacccaaggtctacaacttcaacatatctagcagctccaccaaaattgaaccaactgttcccgtcggaagcaacaataatgatcacaacaaatgtgcagagattctaggaacaggcgggttcatcttatgtacggacagagatgaaccagatcatcatataagacaattcctaagcagaagtttcccattacttggttgttcaaataacatacctagcaatatattgcctaccaggaacaatcggtccaaatgccccccaaaaaaatatgaacaggtctacatttacaatatcatgcaataattagagctgaacaagctatgaagatgatcgattatctggcttccatgtcgacagtgcgaacaaaatgcgccctttccatccttgtagtaaccacctgttgtcctcatcgatgatgaagtccttgtggtagcacctgaccttctcccgcgcacgcttcatcatatcctggttcaatggcaactgcttgaacccaaccctctggttccgtacctgccattgcttgtatgtctctggcctctccatcctctccagtccctcacaagagatcacattgattgcctcccggctaaatagagcagactcaatgagcaacctctgctcattatccttgggaatgttagtctccaacatgtcgaagatagcagaatagtggaacaaggcctcccggaagcgtgtcacaaaaaatggtgcattgtaagatccattcaccacnccatgaatgaacacatgtgggttcatcttcctaattggcttcaatgccatggttccttggactctcagccacca

SEQ ID NO: 387041 - DNA, 903 bp, Oryza sativa
tttgttttccacgtaacagaataaaacaccccttttttcagcttacatatatgagtacaatattctggttttacatgacaaacaccagtgctaaaaagaatcgataaaatgtcaatgtggcaagagaaaaaagaaaaaggagagaatttttttcgttttcacattacaatttatacaacagaaagcatccaatccctgtcttctgcacactcgttacaacattaagatcaccatgacgcatcctccagaaaccttcagttccagctcccaagcatatttgacgggtgttaaagtatgtatatttctaggatttgaatggctctaaaattggatgtcaaaatgaattcacaagagctgcgaacacaggaaagcagatacaaaatcctagagcgagacattgtacatcatcatcaggcaggcggcgtatcacagtatggtacacccacatctgttctgcttgggggaattcgcaagctgcttcttgtttttgtcgggttgtggagggcgtactaccacatgcattgtaattccacctcctggaacctctcctactggaacacgggactcagcaagtgtccggttattctccaatatccgtccggcattaatgagcttcaggtcattgacagtttttggagttatttccttatcttgcggccaccgagcgaggatgaactccttgagcgcggagacggtggtggaggggtcgtacttgctcgggccgatgtccgtaccatcaaaaagccggaacttgacctcgatcggctccttcccgccggccatctcccggccagatcgccgccccccacctcctactccccaagatccaagaaaccccggatcagaaatccatagcaccaaacagatcgcaagaaatccacggggccacgcccggacgcgtgg

SEQ ID NO: 387042 - DNA, 783 bp, Oryza sativa
tttttttttttttttgaagtcaaaacaaaaggtggcgttccatcaattccacaaaaggacggagaaggttaatacatccgtcaaatggtttaccacagacgatgagtttaaaccgtgtccaatttctctttcgctgtatccatacagattaaacggtggtttttggatgattaatgtctactctacatcacataacacaagtgtccagtacaaatccaaaaaataaaccccactaacttaagctagcatataatacacctgagcacatcttctccggggaagtctttactccaatcctatcctcttttgcctccatcgagctaaccagttatgtacaaaacgagaattatcccaacaacagcgcagcaaagcctttttctcagccaaggtttcgccctcttgaggaagcacttctgtagttagtcctaggacccttttcgcctggaactttggaaactataagggaactctgcagaccctccagtaaccgtgaggttggttgaattcggcggttcgaccttctgggttcagtagaatcagcactcttccctggaatttcagatgttttgtttgtggtcctgttcgaattatccatagaaggaacaagtttccttttagctcgatcagtagtggttaaattcttcctggaagtaggagcagcagatgcagcttggatgtgtgggtcagaaacagaagaatcttcagatctaaaggccaacggccattggacagaactattcttttctacagagaggtcaggtttgttggaagaaacctattgga

SEQ ID NO: 387043 - DNA, 587 bp, Oryza sativa
  unsure (1)..(587): unsure at all n locations
tttggttttttttttttttttctcaaaaacactaccaaatgaacatttggtaaggcttttaattaaacaattagatactggtacaaactgacatatacatgtctatatatcacacaacacttagatagctcctctgtgcttccttattctgcagtactcttgagttgtaggaaacaactagagacttaaggcaatgggggcatataaagagtcttctcaagaattgaagggataatcactccttccatagttgaatttcacattttacaatcttccaataaataatgcaactgcgttggttgcaaataatagccatggtcacagccacgtatagtttagcttcgagaaggtttaaaaggctttctattcgaggtaacacactttcaaagaaagctcatgtgcttttccccgttagaggtcaattgaacctatctgaaacctttggattgccattagattctctccctccccaaacccaaacccaaaaacnttgctttaatcccttgtcccaattaatntttccnttnaaacaanttcaaaattcnaatccnggttttttnttccagtgaaccccccatgcccctcnn

SEQ ID NO: 387044 - DNA, 1718 bp, Oryza sativa
  unsure (1)..(1718): unsure at all n locations
tacaacctctngaaanaaactgntcatatgctactacaggtcgcgtcaagtcacaggttattngatctctctactcaanacggcgtgaagttcatagcagacaggctacgtgaaggtgtcctccctatcacnttcngcgacctcgccctcgtcgatgttgctgaactcgagaaaatgtgtcgcccgatggtcctcgtgatagaagtcccggggcgtgccaagcttcatgttgtacttcatcagcgggtcgtgcttcactcccatgaagttgaagttccaaggggtgttatccggcaccatgtagaatcctaggaatctgtcactgagaagcatctggaccttctcgtagtgagtcgggagatatccatgtgggttgcttccactgtccttgttgctacggccccactcgtaaccgcttggcgtcagcttgtacgcggtcaatgaacaagatcctggggtaaagctgcatgtcaaaatgatgcacttctcaccgtcccattgcttgttgttctccaagatcttggcatgtgatgtcaaatcctgtggtgatagctgaggagcttcatttggttgggtatgcatccatcccagtggctccaaatcattaaggaactcgtgctcgggaaggtttgcaggcagtgtccccatctgatgagttccgtgctgcggaggaatagctatgcatctgatctctttaacttggggattatcctgtgggctcagcccatacagaaaccctgcaatctgtgtccttaaatctgctatgcatatgaacttctttaatatattctttggcataatgtaagtgtagccagtctcctttatatcatctgagttaacataaatgtgattgacacgaagatacaagtttgtggcagagatagccctaacacgccaatcagtctttgatgcaaatgcttgttgctcgtatggactggtcgttgtgatgatgagctcatctccatgcacattggtcgtccttgtagtaactgcggtcagctgagtcgtctctctagactgtttctcaatttcagcaatctgttgcctctgctgtgatggtggagctatttcagcaccaagtataatgtcacgaatttcagattgtgtcagcgcagacgtattaacattgtttttctttgcataatcagacaggatgaggtccctgagtgcacattcaaccttcagccattgctcatcagtcaaggttggccaaatatgatgtggttccgtaacaatagttttgtcaggcttgagcagcatctttgccttctcattattgacatgaagtgcacgcaatataagcacaatccgagagaaagcagtgaatgatgagatacttttcaaccaatcatcatatatgttgtaaagaaccatctggggttctgtggccttgagaataagatcaccgaacttctcaatcttcaaacaagcttggaatggcagctgcagctcactgcccttgatcacaatgttagggaagtcaagcagatggacctccaaaggatccaacatacccttccttgtcacaatgatttgctttggctgctcttctacaggaagcgaccgaactaatgcagcaacctcttccagctgttttccacttggccagttgtccaagacgcttttgtccagcccatacacttgtgtggatgaccttcagaaatagttgaccagttcttggattgaaaataaaaatagcaccattgcccacgcgtcaa

SEQ ID NO: 387045 - DNA, 515 bp, Oryza sativa
gggccaagaaacactcggccgactaccagcattgctttatgattagtaggatgcaataatttatcttagccgggatctacataatacaatatcgagagtaagcaaaatcttcactgttatcatggcgtgcacttgtacaaactacaaacaccctgttctttcaagggcagactacatcagggtatacaatctcctcaaaacaagcatcatatgctactaccggttgcgtcaagttacaggttacggatctctactcgaaacagcgcgaagttcgtagcagaaaggctatggtagcataggcgttcgtggcgcctgcttacgtgaaggtgtcctccctatcaccttctgcgacctcgccctcgtcgatgttgctgaactcgaggaaatgcgtcggccgatggtcctcgtgatagaagtcccggggcgtgccaagcttcatgttgtacttcatcagcgggtcgtgcttgactcccatgaagttgaagttccaagcccacgcgtccgcgggcgcgtag

SEQ ID NO: 387046 - DNA, 825 bp, Oryza sativa
  unsure (1)..(825): unsure at all n locations
nnnnnnnnnnnnnnnnnnnnnnnnnnnnnnnnnnnnnnnnnnnnnnnnnnnnnnnnnnntaaggtaacagctaattgtaaataacaaaataccgatgcatgtttaacagacagaattgtgaaaccaaaaatggtttataggatcccccgagtaaacatagaaaaacttgcagtttcttgtccacgtctaactcgctccaaactcaaagcagtacataaattgatttctagaaccaggtccatatcgaagcatctaagagcacgccagtgttctcttaggccaccagagtgctggccgtggttgactcatacttccaggtgggtgggagcttctttgtgcgcttatagtagcgggcgaggcggtggatcctgctctcaacaagaataagcctgaacttggagtccttgtccttcctgttcctctccaaagtgcttcctaatagcaacagccttcttgatcaagaagtagaggtcctccgggatctccggggcaagcccgtgggccttgaggatgcggaggatcttgctgccggtgacgctcttgacgagggggattccgtgctggtcacggagcaccacgccgatctgcgacggcatctgacccttcttcgcggccttcatgatcatctcctccacatcggaggcggcggtcttgagccagctcgggggagtcctcttgtacggcagcgccgacgacgagatacccttcccgcggctgtgcatgcgccccatggcggcgtcgaggggtttagctccggcgacggcgggcggcggcggcggcgcgcgagggcgagaggggcgccccacgcgtnccngtcacgtccgc

SEQ ID NO: 387047 - DNA, 809 bp, Oryza sativa
  unsure (1)..(809): unsure at all n locations
tttttttttttttttttttagagtacagaatgattataataaacaaaatctcgatgcacattactagaagtttaacgttcagaatattgaatgcataagggttttatggcattctccagacaaaggaaaattagcagctcctgcttgtctcaagactcataatgcgctacataaataaaatccattcctagaacaagctaagcttgaagcagcaaggagcacagcagaagcagagctctctctctaggccaccagagtgctggctgtggtcgactcatacttccaggtgggcgggagcttcttggtgcgcttgtagtagcgagcgaggcggtggatcctgctctcaacaaggatgagcctaaacttggagtccttgtccttcctgttcctctccaaatgcttcctaatagcaacagccttcttgatcaggaagtacaggtcctccgggatctccggcgcaagaccatgggccttgaggatgcggaggatcttgctgccggtgacgctcttgacgagggggattccgtgctggtcacggagcaccacgccgatctgcgacggcatctggcccttcttcgcggccttcatgatcatctcctccacatcggcggcggcggtcttgacccagcttgggggagtcctcttgtacggaatcgccgacgacgagatgcccttcccgcggctgtgcatacgccccatggtggcagtggggaatttggcgccggcgaccggcgacggcggttggcgactgcgcggcggaggaggcggcggcggcgggaagagcgagtagtgaggcggcgnntacgtcc

SEQ ID NO: 387048 - DNA, 455 bp, Oryza sativa
  unsure (1)..(455): unsure at all n locations
tttttttttttttttttttggatgcaaacgatgccgaacattatggtaaggtaacagctaattgtaaataacaaaataccgatgcatgtgtggcagacagaattgtgaaaccaaaaatggtttataggatcccccgagtaaacatagaaatacttgcagcttcttgtccacgtctaactcgctcctaactcaaagcagtacataaattgatttctagaaccaggtccatatcggagcatctaagagcacgccagcgtctccttaggccaccagaagtgctggccgtggttgactcatacttccaggtgggtgggagcttctttgggcgcttatagtagcggccgaggcggtggatcctgctctcaacaagaataagcctgaacttggagtccttgtccttcnggttcctctccaagtggttcctattagcaacagcttcttgatcaagaagagag

SEQ ID NO: 387049 - DNA, 516 bp, Oryza sativa
ggttgggaacaagttgaaggtttcactgtatttacatataagaagaatggatccatgttacatatcagtagagaaacgcctagggtcttccggctagctccacaaggggatgggctagccggcttgggttcgaagcctcaccttttctatttatttgatattaggtccttccctaatattcatgtttttttatgttgcataccagtacatgacacaacagacttatgacagaaaatgagccagagtaactgactcaaattaatgtgctggtaataggcagcgaacaataagcaaattcaattcaagataccgaccggtcctcaatgagatgaaaggatttgatttgatatggttcagggagatggagaggtggcgaggaggaagacatggatggcatgcataagaccagaggcatcgggagatcggcagctaggagggacgtacttggccgcgtgttccatggtatactcgccgatctcagctgcctcgccaccgcagcgcagcccggacgcgtgg

SEQ ID NO: 387050 - DNA, 512 bp, Oryza sativa
tttttgtttacaccatatagcatggttccgccccaggtgagaatgcagtctcaaaacatctacatcttatctgcagttatgcagaagtagggattaaaaagccatacacaggagaatcacactatttaacattttcctgccccaggagagaatgtaatatcaaaacatctacaaccatatctgcagttatgcagaagtagggatacaaaggacaggtggcaaggaaatctagttaacaactgacatctacaattaaaaaaaaatcaatcaaatactagaaaaactaaactaaagagcacaagacccacgaatggggaaaactattggttatgtcagtgtggatcattgaaggtgccatctttcttcaaggattgatgttacactcccgcaggaagggctggtcataatcgaggtatgccgaccagtagtttcggaatttgggcagaccaatctccagccaaggctttattttgccattgtaatgtttgacccccccccccctaatttttttt

SEQ ID NO: 387051 - DNA, 815 bp, Oryza sativa
  unsure (1)..(815): unsure at all n locations
nnnnnnnnnnnnnnnnnnnnnnnnnnnnnnnnnnnnnnnnnnnnnnnnnnnnnnnnnnnnnnnnnnnnnnnngggaaaggagtaactttagtctgcgtatgcacgaaaagacagacatttgatctttcatgaaccacaacattatttcctgaccctcgacaggtaagaacgttttattccagccgaacaatagaggattcttctcaacttagaaatcttggcctcaactcagcatgatctctgactgcgcggagaacatgcgataagttcacagcttactatgaaaccaaaaacagcaaagtctccgggggaagaagattagccctctggcacctattagaccactggaagctccccacactcactgatgaccaccttcttcttcgggcggtcccctctgtcagtctcctgcgattcgatcatcttaacgatgtccatgccttcaataacctgcccaaacacgacgtgcctcccatccaaccaaggtgtcttgacagtgcagatgaagaactggctgccattggtgtttggcccagcattggccatgctggaccactccaggtccagtatgaaccaatttgaagttctcgtctttgaaggtccgggccatatatgcttttccctccagtaccgttgcccttgtcaaagtctcctccctgaatcatgaagtccttaatggacacggtgggaactgggacccctttggtaaccaaaccctttttctccaagtgcaaaagagcacgggaagaggacgcgtnggggcggacctngcaagggggggccggtaacccaatttggcctaatagtggagtcgg

SEQ ID NO: 387052 - DNA, 776 bp, Oryza sativa
ggtcccctctgtcagtctcttgcgattcgatcatcttaacgatgtccatgccttcaataacctgcccaaacacgacgtgcctcccatccaaccaaggtgtcttgacagtgcagatgaagaactggctgccattggtgtttggcccagcattggccatgctgaccactccaggtccagtatgaaccaatttgaagttctcgtctttgaaggtccggccatatatgcttttccctccagtaccgttgcccttgtcaaagtctcctccctgaatcatgaagtccttaatgacacggtggaaactggaccccttgtaaccaaaccctttttctccagtgcaaagagcacggaagttctctgcggtctggggaacatcatccccgtataggccaataacgaccctcccaacgttcttcccaacagggtttccgatgcttatgtcaaagtacaccttgtttgtgattttggactggaggtccacttccttggggtcagcggtggcggaggagacgaagcgcgcgcggctgtgagcagcggaaagcgcaggagtgaaacctccaaagacggccgatgaggggaggcgtgcggtgccggtgccggtgcggatggagaggagcggcgagggggttttggaggcgaggagggcccctccgccgccggccgcgcgatggcgagtgtggcgaaggaggttgcgaccgccattgttgatgttgaggaggagaccctttccggacgcgctcaggtggattgggattggataggtagatagggcattgcac

SEQ ID NO: 387053 - DNA, 506 bp, Oryza sativa
tttttttttttaatcaagtacagtggatctgttatgaacttatcataagggtctctgaaaattttggttccatgtcaaatatatgtacacctatttggacatcggtatatgctattgtggtctttttccgatggaacgacgatttgtactcaccagaggtagggaagtaagtaggctgtaccattaccattgctacatggcgaggtttctacagaagaaatgggcgatgcacagagggacagagctgcgtctgcctactcctcctttggtatccaccggctccaccaaatgcttttgctctggctgctaagctcatccatgctttcgttgattgtcctcacgacctttctctgtacacgcagcacggaagcaagcaagttcctccgtgcactacctttctttggtttgatttccctaagctcttgaagttgtgcctctgtaaaacctccttctgcttctgttcctgatcttgccatgaggccgacgacccaacgggctgtttcact

SEQ ID NO: 387054 - DNA, 1080 bp, Oryza sativa
  unsure (1)..(1080): unsure at all n locations
ggtcacaaaatttncttccgattagacagttgcggaggcttcgcatgccaatctgcatatatcaggattcaggacacactgcacaccgtatccgttgggtaatacagaagtattttgtcagttgagcaggtcgtcccacttgcagtactgcccgccgccgagcgcccggtagtagcggtccctgcagtagaccggccgtccgtcggcggcctccgcggcggcagcggcgaggtcgtcgtcttgcctcacctccacgggcagacgcagcagctcctcccttctgagactgggcttggaggaggcagcggatggtggtgcgttcacggagtgcaggaagtcctcgacgggggccgcgaacgcgaacagcgacaccgcgccgaccagcagagcgccggtgcccaccagcgtctgcttcagcaggttaatcaccggctttaccttgtaagatcccaagagcctgtcacgagccaatacctctggtggcttgacccacatttggccgtcgtaccatccggtttcttcgtacggcacaaccgccgacaacagcctatcaccaacgtagctccaacccagataaatccggagaacgaccaaagagacgaggagcagagttccaatcccagctgctagcacgaatttgagtggatcctttcctggactgaaacttgcagctgcaatgggcgcggcgagcaccgtgaaggtgatcagccacaggctgcctaggcgcaggaagaaagaccccgggctcagctctgcccacgagtagagtacgctatccttgagggcggagtactcgttcaccggtctttgctcgaaagggacttggatctccagcccggggtcccagctcggaaacccctccggcgaagccgctacggctgccttccggctcctccttgagcgccatcgtcaccgtccacggcgctcctcgccgccctccgcctcgccgtcgtcgtcgacgcgcccgtgcgaccgacgagctggggtgcgtcatggctgcgcggtcgcccaaggagcgccgccggatggacggcgtacgccttcagccggagcagcatggacacgatcgatcgatcgaac

SEQ ID NO: 387055 - DNA, 797 bp, Oryza sativa
ggctagtgtaatattgcatcattatcatttccctttcttttatgtgagatctcactttgctctcgatacatccaagaagattgtggcaccatgcatgttttacaaatccatgcaaagaaatgctattttgtttcgaaaagaatacggtctagtacttctgatcacttgtaggtttctataggtgggtatctgtccttgaacaacggtgtgccttcctttggcttggaccaagggtacttcatggttggatcccttgggaacttcctgaagttgacgaatggtgcccacaacatcatcccggggaagaagaggtaggtgaacatgaactgcaggtacgtctcgacgaacttgcgcttgaaccacctcagcctcatccagttcatgataatcggcgggaagacgagcaggtaaacgaaggcgatggcggccaccgtcggcaggatccccaggatgtcgaggtcctcctcgcccgtcaccgccagcgccgccggggcctcaaccgctgcccagatggcaccgcactgcagcgccgcggccagcttccgcagcggcggcgagctgatctcgtcagcggcgggcggcggtgcaggaggaggcgtgtcatggaggaggcagaggagcctcgtcgtccgcttgccggaggaggaggaggtggtggtggccgccgggtggcgccggagaagagccgcctgcctcctgggcggcggcgaggaggcggccggggggaggaggcgccatgacgcggtggtgtccatggagaggctttggtttgcgcgcgcgcggggccggacgcgtgg

SEQ ID NO: 387056 - DNA, 1420 bp, Oryza sativa
tttttttttttttttatgttcatatcttatatagtggcaggaaagccttctttttgtatttttattgctgcaactttcgttgcaaacttcagaaatacactcgccagcatttgacggctgattacatatacgcttacaggcttacagcttatttctacatacataaccaaatggcatcccatttccagctctaccaatccttgcaaattgcaaaccttcttcctgaatcctgatcaatttagctgtattcgccggacacgtactaacctgtgctgcttttctttgctgactagtttggtgtcaagacatacatcttgcagtcatgaggcgccaccgatgctgatatctgtccctgagccgcgaacgaagagtgcgcccatagatcacgagcagtgaccgcgaccgatccagcgagcccgatgttcgaccaatgtgcagtgatggttgcctggtatgactgcctgttccagagcaccacagccttcctgttgttgctgagtggcccggcccaaacctccaatccgttgtcagattgtactttctttccttggaccacctacgactatcttggttgacagcgatcacccctccgagttgctgagtatgttcttcgtctgctggctcattgagcgcacatcgcatccgatcaaaagaggagcctttgctagtgcccagatactgaagtgtgaccggtactcagcttcagacatcccaccatttcccacttcaagcatgtcaggatcattccatccaccaggtccagcataggcagcccattggtcattttcgtctgcacgagatgtcatactgccccagttgtcggcgatgtcgccagttgttctccagctgttacccatgcggcctgcccatgtagcaggattttctttcccccattcacagagtgagaagaagatattctttccataggtcttcatggcattgctcattctagtgtatctttccatgacactcctgccagcatcattgcagttgtcatacttcagataatcaactccccaagacgcgaaggtcttgacatcttgctcttcatgatcaagtgatcctggcattttgttactggcatgtttgtgacccggcatcgctgtagatgccaagcttcagcccttttgcatgcacataatctgccagtgccttgataccagaggggaacgtctgcctatttggcacagagttaccctgggaatccctactatattctgcccagcaatcatctatattcacatactggtaccccaatttcgccagaccagtgttgaccaatgcatcagcatgattattctgataagacactaagatcatcacgggtgtttgtccataaccacctactaggaagctggaacatacaactatacaagtagctagagagtggttctagtactaactatggttacatgtaaaa

SEQ ID NO: 387057 - DNA, 602 bp, Oryza sativa
ggcatatccattacctgtgtctcacagccaaaaaaaacacttgttctccgatacatagcgttggcgataagcaacgccgtctttttcttacaaaacttgcagcttctacaatctcaataatggcagtatgcttacgagacaattagctatatatctattgaaaagattttatcattatagccatcctgaacaaaacagaatgctacaaacatattcacgagagacactgctttggagcctctaatcagctggttttcttttgccagtttcaccgcatgggtcccataaaccagctgagtgcagcccagaacagcactttctaatattcgaagaagcttcgatatctaattgttataccactgtaagactatacaggtctattgatcgatatctcttgtcccagtaacatcacgagcggaaatttggtacaaaacttctgtcatttctttgcaaccttgggaggtggcgaagatgacgatgaagatgacccgatagaaaacatgctattatcagctctgtctttgctgaatgccttgcgcacattcttctttaacttacagaacccgattcttttaacattttgctcataaaagtggcatttt

SEQ ID NO: 387058 - DNA, 507 bp, Oryza sativa
tttctttagaattaggcagtgatgtttccccctggcttccaaaaaaaatagtaaagaaacactaatgacaacccttcgagttttgcgtgaaggctattcgcattacaacagtcgatccatgcggcaaactttatttacctaaccatactgatattggcgcacatccatgctatggctgtggcctgctttgcactataaaaatatctttcccaaccaggcaaccttccacatcctgtgcactcccgaacttctgctccagatactggccaatcgcagccagtcgctgaccaaactgcttcctaaaggttgtatcaaccgacaatggcttcttgctgtaatcaacagtaagacgaattacttctccattggcaggaccagagttgtgcaccaccatctcctcactgaaatttgaaaaggcaagagtggcaacttttccatcgaatttgttacatgacagcccccacggggtgccacgcggacgcggggcggacgcggggcggacgctgg

SEQ ID NO: 387059 - DNA, 696 bp, Oryza sativa
  unsure (1)..(696): unsure at all n locations
nnnnnnnnnnnnnnnnnnnnnnnnnnnnnnnnccaggtaaaagaaacttgttttcctataaaagatttaaagggataatgttgtttttgccaataatacacattaaaggcaaaaacaaaattttcccggcaaacaatgtacggtttacattgccagtgccttggtgaggtatatagcaaatcagctttgctaagtaccgcattctcctatgcccggaacgagttctttatgccgggttgacaaaacaacaggtaaaaaaaaaagatcacctttcggtgaaagcacacctcaggaattcgccgaggtttgcacggtattttgtaactctaaattctaacaatcgatctgccaaagaatgcagatgcatcagattttgtcatggaggttaaccaccaagtcatgtgcatcatctagaagcctccagacgtcgagctgcccagccatgctgttgcactccctgagtatctcatccatgctgctatacctctcaattatgagcttcctcttctgtaggacacaggcagcaatggcatagagcgccaaatcatcagttggaggggcatgcagccttatctttgaccatgtggatcttccaatcccagctcgaatggctgcttgatcagcccanatcacctcccacagacacagggtctggctcaaaagngagctcccttctgaagagaaccaccaccattc

SEQ ID NO: 387060 - DNA, 750 bp, Oryza sativa
ggtatctggggccgttcaggcagtgtaaaaaagaatgaaatatcatacatgtcttagacagttgtaacttgtaaggcgcaacattgtagagctcatacatatcatacatgtcctagacagttgtatcactagcttgaaaagaactcataggccgtatggtatttgtctagtacaacattgtagagcggatggatcggctctagcaagtttgagtaaggaccaagcacgtgctgcggcaaggggcacgcatcagaatcaaccatggcgctgtactggctaactgacagaccactcaggcagtagcacgagtggtagtgatctctgttcttcccaggcttatccctcaaccctccatccagcacctgtgcgcaaagcaggatgtattgctgcagcgcgatgttgtggaacagtgggcctatttggttgctcttctctataaaatcaaatccaaacttagcataatatgctgcttcagtagaagagctcgtaccacaagcatcatctcctggaggccttttgctggaatatgatgattttaattgctcatcaacaactgtcattagtttttgtgttaaagcaagagcagctccctgccaaaaggagtagcaaccatcaaccaatttattagttcgtccttgaaatccacattccactccttggcgaaatgccacccagccaatcaagctagccaaatcaagtttgtccacttcgttaagcaggatcatcgtagccagcccaccggacgcgtgg

SEQ ID NO: 387061 - DNA, 1190 bp, Oryza sativa
aggataaacctggaatctgcctcatttgtatttagctacatgggtactgtcaacggtaccttccaaattacccctgctactatgtaaagatgacaaaagacagtttcatgctaaagcaccgtatagatacacaaaaatgtcaaaaaaaaaaagaggtaaagacatatcgatgtaattaaacaccatcttgtgatacattaagcagcagattcacaattgcaccagcaaaaaagaaatcaaggttacttactcattttagcccagaactaatagcgtccccatctcaccttgtgagggcacacttgatacattccttgtcacagaaactacttgccaactctgcgcagattcatccaatattttgtcagggtttctctgctcccccaaatgctctgcccccatccatccacacttcttttctgggaggggttcatccttacaattatatactctcccgttcttatcaaagttccaaggaaattcaaacagtcaaaagttgtctggtttcaaaccttctggctgttgcaaggtatttccttgataacaccacaaaacgattacaatacagcaccctctgcagattatatcgtaccaaaatccagcctctcccatttgaaggatctaccagaattaaaccgcagcaaagctcgcatgaatacacaaacacaaacacagactgctgctatcgcaagcatggaatggatataggggcgagcgagcaatccccgtgaatgcataggacgtcttagcaagccagcatccaaaatagcgcactggttgcaagatcttatttgcaatgcttgaattgcagatttatttttctcaccaacattccctgattgatccatatgaatttcctctttgccaaccattatagtaacttggttgttcttcctgtccaccaatttctgtgctacaagctcattgtacgcattgttgttcctcaacttggcataagtttcaggggactgaccatcatcatctagcgctgagtgccaacagctcaaaccaatctgttgaggatcatctgtcaaagcatcaacaatatccactgcatcctcaatggatgcagccaggtgcaatggagtcaaaccacctgggccagctacatttggaaggaaggggtacaatttggaatcatcagcgttctccttgacgaacgcgtggggcgtggcgcgaattcgggatcg

SEQ ID NO: 387062 - DNA, 1049 bp, Oryza sativa
gcaccacctgcacgagggtgattaaaatatccatccgttcagcagtttttttcataattttttttgaacgaatcgatgagaccgccaatttaattgaatagaggagttttttctccacaattttactcggatcatctgcaaggctgatgttccttcacgaaggaaaatcgaccaacaactaacattacatgtagttctttttaaaaaaaaaactagcattacatgtgtgtatccgacgttcgtgccatatcaattttaggaggtagctcttgcagataaggttatggcatgaagccaatcatcggcgatgtagtggtaagctgcctcggttaagtggacgccgtcccagtacaagctcttggatggatccacacaggtggtcgcaccttcatcgccgcagattatcctgcgctgttgtagtggtattttccgggacctccacagcaaacgctgagaacatccttttgaaacccaaacttgtcaggattctggaccatctccgagacgtgtctgaacaaatcggtgtgcatgatggcgacatccgggtgcttctcccggagctcctcgacggcgtccagaagcagcgagttgtgcagcgtcgctacctcgttgggctccctcaggcagccggtgctcgcgtcgtactccgccgcgccggcgtcggcgaaggtgacgagcaccggcggcgagcatcccgacgggatcatgcccggaaccaccaccgtggtcgccccgtcgccaatcagcttctcgacggccatggagatggtacggatgatgtccgggacgaacgatctgatttcttgcatgctcctcctcccgaaggaggacgtggtagtcgttgatgccgaattcgccgacgaagaagagcgatctgccgaagaaatccttgcattcttgagttgtgctgcagagcccgcgcgtccgcccatcgaaccagctcagctgcacgcttaggctggtgttgagagggaacgggctggcgcccgggggatcgccggcgccgtggaagaagctggagtcgagtgcggtggcggccggacgcgtgg

SEQ ID NO: 387063 - DNA, 1073 bp, Oryza sativa
acgtctgtccaggaaaaaatagttcatgttgaggcagaaaaaaattttcttaggtcttctcgttatgtacccaaatgagctaaggtagaatacaacttattcttttcgctgttcaccaatggaaaagaaagggaaaaaaaagcaaacacattcctatatcagtacaactatgataacacgaaaggacacgacttattgagcaactgctgccttcttctttggtggtggattccccccagcaagtagcacatatgagtagaagcagatcatagcggcactgagtgcagtgtaaaaagcccagggaagcagtttctttgttgtggtgtacgcctggaagtgcttccatgctaccgcagcagcaacagctgcttgtgccagtatgaatggcaagcttgacttgccactcctccaaaccttaaggctaagcacaccaagggccaatattgcaaggccaggtgcaacaccgaaagtaagacttacggtactcctccaaaacagaaatccaccaaggcccatggaaaataaaattccaccaaaagggatccctaggcaaaagtcatgtattattgcacccttgtgttgaggaacagcctcttggtctatgtctatttctgcattagtaggcgatacagtggttggctgttgattttcatcttctgtatgctccgcgacagcattaggatcaacaggactgctggtatactccgccttcatgcacattgctatcaatggcttgggcagcacgacgccagcgggaacccccggagcgatccccgggcgatcgacgccgggaccgtcgacgtagcgagcggcgcgaagcggaggacgccgccggagggggccggccacctcctcgccgccgccgccgagggcccgcggagtgcgccgccaccgccgccgccatgtcgatgttctctcggtttggacttcggttcccgacgcgtggaagccggaaggggagaggagagggaggagtcgtcgtgctcggcggctaactctccttctgtctcctactctcctgccgcctctctctctctaatcaccgcgcgggggtaaagttagttgtgttaaag

SEQ ID NO: 387064 - DNA, 799 bp, Oryza sativa
ctcgtggtgggtttttttattttctgaccggagaagggaatcagatatatatagctcggggggtaagatggcacgctaacagtgacaaaccttccaaaacgattcatttggtaaacagtaaacacccttggagctacaccgatcaggcacgctagtatttccccgatgatgaactacggttgtagctagtatctccccgattatgccacgctaggtgaggattgctgttgcccgaaggaaagcttgactgcctgagcaactatcaatttgaccacacatggacaaggcctagtcggttgccggtgtatatctcctcacgctcttcatcgtagtacagagctgtgatgtcccccagtgcctcggaaggtgtactttggaacttagacaccctttgcttgttaaggttccctgcctttattttggccaagcattttccggttaagatctcactgatatttatggagcaagcattttcttctgaagaaggatcatttggatcagccttgcagtaagaaataataagatcttggttgctggtgatgtaaatactgttggtattgcaatcagggtgccacaacatatggtcctcaaaagatgtgactaattcaccacggaaattccaaacggatactgatctactacggaaggtcaggaacagctgcatctcatacagaaagataaacgcagaaggagtcacaaattcacttctgcttacttcaattgattggaagtttcttacatcaagaatttgaaggttctccccttcctgtttgatcagaagtttttcattgaattgctc

SEQ ID NO: 387065 - DNA, 613 bp, Oryza sativa
tttatttttttttgggtttgttttttaaaaagaaaatgtgtgtcaaatatcaaatcaattactattgtacatagatttttgaaaggtaaagctacaatagcaattgaaacaacaacctcacctttggatcttaacaatgatgcaaccttgagctacacatataaaacatgtatgaatcattccatatatgatgacgattacctatacatgtaatacttttggagtatacctatataatttcctgggatatgatatacaacaaggttattagcgattatcttcctgattctaggcctattaaagatttcttctcaatgctgaaatttcccgtactgacaacctccgagctaacaattgatgactctcctagtaagctctccgcctcttcaagattgtgcagtgcccaaggatggtgcaaaacctttctcaagctatcaagcttttctgcaacttccttcattgatggcctattctcaccacacatttccaagcatcgtctggccaactcagcaatctcttcaagaatctccatattctcctcgctcttaatttgatcatccaagatttcctcaagcttgttctccttgacagcagaaaggaaccggacgcgtgg

SEQ ID NO: 387066 - DNA, 695 bp, Oryza sativa
ctggaagacgtcctcaaagatactaatgatacacaaaaatgctggtgatgcccataataacaccacgaaaacagcagtataccaacagatgagcaaggctcaccacataggggcagaaacactacaacttgcacatacattactgttgatcgcttcctgcttagctcagtactgttgcaaaactacagaccgtaagaagataatttctcaagatacaaaacttgcactgcctaaagcatatgaaaggaaaattagaattccagtttcctgtgaggattgctggcgatttggcttgtctcacatggtttgaaggtaggaaccaatactagctcgcttaatatcttacaccatcacagattcacagctattggggttcagattatgattgggtcctcaattcaacaagcaccaacagctttatctgattttgcacatggatacaaatacaggaggatccaacagaacagccaaatctgacgatgctgatctaacaacagttgcatcccagaagcaacagtgcaattaattttcttcattctcttacctcttccgcctcttgcttctcttcttgtcactctcatcagagctcgattctgactctgagctggagctgtctgaagcagatcctgaatcacttgatcccgactcagaagaggcgggtttctgttgttgcggacgcgtgggcggacgcgtgg

SEQ ID NO: 387067 - DNA, 1727 bp, Oryza sativa
tttttttttttttttttttgaaatgattggcatcttacatcacatttactgctgtagaaaatgagaaaaccaatttacatatatcagctatgtatgtactgtatttcacaaagcagtacagtagtagtagtacaattacagcagatagctgctctgtcaggctatacaggcaatcaggcagctactgcttagaatttcagataagcagatctacatacttcacatgctcaaaacacacgtgaactgagtaactgaccacaaacccaaccacaccagctgcctcaaccacacttacaagttacaacagacatcaccatgttaagtatcatacaaaccaggcagcattttattttgggatacacaaagtcacaaagcttgcacatatacagtacatacacagcatatattggtgtcccgattttgtcacaaatacacagtagtccagtgtcacaaactcacaatgccatgagtcacgggctgcaggggatgccggcttcagagaaggtggtgacaagcttcggcaagagcttggctagcattatcttgaaaccggttgaggagttcttgcatccgtcatccgatatataggcgctgtcacgagcatgtccaacaagatcgccgccgagataagccttgcaggcatccagaatgtgcggcgcgcaacaagtgaagtgctccttgacaaaattctcgaaatgctttggtggcttgtgtaaaatgtacgtcatggacttgcatgacagcaggaaagcgttctcattgtaagtgatggagttcttctctccatctgctttccccatgaatttgtcatagccagcctcattgaagtaaggtttttcattgagaacaagagcttgaagggacagcagcagttgaagaacagttgaattttcagggtcccacacttcactaccagttcctgcccatgttttgagcaggctaaggcacactttgccagactcatacaaatttgggttcaaacggaggccaccggaatggtagtgaacagaaggtggctcatgaggataatcaggaggaaagaaaatatcaaagaagaaaagattgtcatgataaggtgttccagctgcacctacaaggcatgccctcaggaggtccatcctttcttcataaactctaacatgaataccatctggcagatcgttttgtaagattgaccattcctgttgtatcttcttcacccaacctcttttgacattttcgtgaccaatttctttgacaaagtggtgatcagaacagtcggtcacaacatcaaatccttttgtcatggcattttctgaagctaatgttggcttctcaaactgtgttatcagctccatggtctgtttctcttcagagatatcttctgcagatggctgcagttctgctgtcgtcacaatttgatactgagaatctgcattgaccgagctggaagatgttgaatcatgagcaccaaacaaactagaagccacatttgtcagaaaattaaatgctgtcttggaaaagaggaaagcagtggctttgcgcaaggatcctgtacagtctccagcagattcttccagcgcactcttagtatcctcaaggtgcattttctcctgctcagccatgtctaccaaatcatcagtagtgtgctcctcgatcatggattctagagaatcatctagaatcctatctaatgcaataatttcaaaatgctgaaccctagatatcgcaccactagcccaatgaac

SEQ ID NO: 387068 - DNA, 722 bp, Oryza sativa
aaggaccagtctgcaaatatcttatattacaagggaagatccgagtacacaggagcattgagaaacaaagatgagcagcacagcagctatctctataatctagacctacagcagaggcaagggcatctctgagaagcaaacaggtcgacccagagatgccatacacaagttcaattcagcacccatacaatgatgaagccagaagctagatgctccacggttaaagacaaaacgacacatgtcgttatggagcacaagcaaagctctgtaaaacttgccgtagatctagggggttctcagcacaggattctacgatcttccctgtaataaagctcccctgattgctgcccttatcattgcttgacatgatgatcttatcgccatcttcccttaacagccccccttgcttgcagatctgtgtcgaaaaggaaactttgtaagtcgagcaacttaccatagactcctccagcagatgctctctatctttttgtcctttttacaccgttttccaacctcatgcagttgatgtcagactaaccctcaatgatgccttctgtggcgcatccgagttcacacctctaactcttcgggaagaccagtttgaacgactccatttccaccgaaatgcacattttcaaccagggcacttcccatgtcctcggctctctccaatagctccccacttttgttgcctcccaaactttcacttccaacgagcccgt

SEQ ID NO: 387069 - DNA, 924 bp, Oryza sativa
tttttaataacgaacacagatacgggagataatatttcaataaaggggcaaagtgatgcagtaagccaatttcattacacgttaatactttatacattacacagcagggctacgcaaatgaaaatacagcaattccaagcacagttttattacaacattattggaagttccaagtgctcaatgcaacgcagcagtgcatctggtggcgccggcggtaaggttttaagaacttccaagcagcttcttgatgtccttctccatgctgagtggagaagtagttggcgcatagcgctccacaacacgcccctctttgtcgaccaagaacttggagaagttccatttgatattgtcaccgaaaagaccacctttgctggacttcagaaacttgtagatgggtgcagtgttgtcaccattaacatcaaccttatcaaaaattggatactcggccttgaagcgggtgcaagcaaattggacaatctcctcattagtgccaggttcctgtccaccaaactggttgcatgggaaagcaaggatctcaaaaccctggtccttgtacttctcatacaactggctcagctccgtgtagttggaattggtcaagccacactgagatgcaacattgacgataaggaggactttccccttgaaggtgctcaggtccacatctttgccacttgcatccttgacggtgaagtcgtggacggatgcggcggaggaggcggcggtggccatgctgaacagcgcgaacccggcggcgaccggacggaccagcggcgagacggctgcggagacgcgcggcgggtgaggcgcaccgacagggatagcgcggaggatgcgggggctgtgccgcggcggcgcggaggacgagaacggggagagggcggcggcggttcggaggagccggaggcgaccgcggacgcgtgg

SEQ ID NO: 387070 - DNA, 1141 bp, Oryza sativa
aagaacggccagttaattagatttaggtggcccaaaaaaaaagtatatgacgtcagcaggcccgcgtagataagcttgaagcctctaaaccgcccacccaagtcatccgacggtaaccgataacaaataggaagagcgttttttatttgccactgttttgtacaatacaaacttgtttaaaaatatccattgacaaataggccgtagcacgactggagtgcaacgccgtatgcaaacaatggtttagtctatgctgaaatttggcacagatataggtaagctgtgcgatgaattaacatcggtctttgaaaaatacaacatttcttttcatatctatggaaacatcaaagacatcatatccttccctgcgatccacgaacaatgagctgctttgaatcatgaggttcccaacagaacactccctgagcaggtcagttgatgttcatatcctcagcaccagcaccgtctccatcctcgttttctgatgaggtgttaatcaagcgcctggaacgctgctgctgttgtcgtgttggctgcaactttggcctaagtgcctcaagaggtcctttgggtttcgcagcgccttgctgtccagactttcccagagcccagtcagcagaatcaaaataggcccgttcatgatccttcgagatgagtggtggtttttttggcattagtcctccaaatttcttcttgattgctaattcctgttcttgagctgagggcatggagttatcttcagtttggtccatagggtcaggatttccaacagtttcaggtccagcagcattggtgtccttcatatccgacatgatgcaggatcccctcacctccgctgctctgctctgctcgccagatggagatcgccgcccggccctcccccctgttcgtcttggcagcggccccaaaggagaggagcggaggagacagtaacgagaacgagacgggagatttcttcttcttttacgcgctaagagagaggatgcgcgtgagcgtgacggatagggatgctcaccgggatgtgatgcggcggaagcagcaggacgccggcgcagatggagatcggcggaggcggtgcgcgaactcgcgaggagaggagaggagttgacacttgacgaagagaggacgggcggacgcgtgg

SEQ ID NO: 387071 - DNA, 510 bp, Oryza sativa
ttttttttttttttttacaatacaaacttgtttaaaaatatccattgacaaataggccgtagcacgactggagtgcaacgccgtatgcaaacaatggtttagtctatgctgaaatttggccccgatataggtaagctgtgcgatgaattaacatcggtctttgaaaattacaacatttcttttcatatctatggaaacatcaaagacatcatatccttccctgcgatccacgaacaatgagctgctttgaatcatgaggttcccaacagaacactccctgagcaggtcagttgatgttcatatcctcagtttggtccatagggtcaggatttccaacagtttcaggtccagccagcattggtgtccttcatatccgacatgatgcgggatgtgatgcggcggaagcagcaggacggcggcggagatggagatcggcggaggcggtgcgcgaactcgcgagggagaggagaggagttgacacttgacgaagagaggacggggagacgggag

SEQ ID NO: 387072 - DNA, 888 bp, Oryza sativa
ttttttggtagccaagaaggtagaagttgatttattttgcgacaaacttcaatctttataagttggtttatttcgggacagaggggagaagtgccgtacaagatgacctggttgtccagacttattaattaacaaaataaaacacgtgtagtgtcgacgtgtagtgtgggcatgtcggatcggcgcgcacacacacgcgatgataacatgatagccagccggcaggtagatcgaaaatataggaaggagcttaattagccatggatggcgcgcaggtagctgcttcattcagttgcgcacccagagcatgtcgtcctgaggcaggaagtggcagactgccaccttcccgggcgccacgccgagcctcttgtacgcctccgccaccgccacgccgtgcccgtccacgtccccgtggcacgccgccaccgccttccgccatggtcccgtcggcgccggccagcgtcaccgtgtacgccgcgcccttgatcccgtgcaccccgaacacggcgtacgcgtagggcatcctgtggcatgccaccatgtcgcccccgggcaccggcacgggcctcacggcctccaccctgtacgcctgcctcggcgtcggcccggccctgttgaccacctccgtggacacggcgtggacgtcgcgggtgccgaggctggaggcgacgagctcgaccatggactcgagcgacgtggcgcagtagtgcttgtgcttgggcgccgtctcgctggcgatccgcgcggcctcgcacacggcgagcgtggaccgcatggcgtcggcggtcggcgagccggcggggatggagagctgggagaggatctccgggagcttttcggaggcgaacgggacggagtcggccgcgcaggccgccaccgcaggtggtg

SEQ ID NO: 387073 - DNA, 604 bp, Oryza sativa
aaaaagtccaatcctgttagttcttggaggtaatatgctcttcagttcagtcttgactaatccccctcttttcctcccaaattactgcacaaaatttggccatcaagcagccccacgaacagcccctaactaggttcggaatttgccaaagagggttgaaatgtaccatcaccgggggggggggggggttactgtactcatcaatgagttctgaaccaagcaaaaagtttagcccctaactaggttcggaggtcctgttagttcagcattagcgcatacggcaagaggcaagaggcagatgtgtatttgacagtttgacacaagccatcaggagtgctttggccgccgggacaatcttctcaggttcaccctctcctgggttccatcatggtcgtattcgacaaggaagacacatctgcacccccttatatcatgttgtttccgctggatttccagaacatgcgcatcgaaatgcaatgcttcatcattgctctccttgaaacagaggacaaggtctccttccctgatgagtttgcattctgatgattccaacgggatggattgcaggcggatagccttccggacattgatcccggacgcgtgg

SEQ ID NO: 387074 - DNA, 351 bp, Oryza sativa
attaactaatagaggtagttaagtatatattaactaatagtgttaatagaggtagttaataggggaggagtgctcgctagcagcgagcacgcgctagctaggagcccccctaacaatctttcactaacattgaatctttcacaaaaatcattcacaaactacataaaagatggctcgatgcgtcagcttcaatctttcactaataacaaaaatcaagaaaaatcaaaggagggcgccaccactgccggtcaccactgccgccgccgggtcaccaccacctcctgctgccggaccactgccgcatgcaccacctccagatccgacggagggagggcgccggacgcgtgggtc

SEQ ID NO: 387075 - DNA, 589 bp, Oryza sativa
tttgctgaatcaaactaactactattttttgttctttttcttgcaagaagctaatgtagcatgtcaggatggctgcgccttcaagaataacaaactcttcgttttttttttgtctgttttctcagtagaaatgatatgttaagatggcttgcatgacagcattgcatgctgttctctgttagcggaggaagagtattcattgggggacaaacccctatttcattgggggagacagatccttcttctcttgacaattagggcaaacccagtccagagaaaatgactccttgaatgccaacttgtctacacaccttccacactcataacatctcagtatgcaaacagtacaacctttgcaattaccagatcttctgtcatcacatccttcatctgggcaatcataaacaagtttgtagttctgacaaatagggcacatctcaatatcaagagcatatccatcattgcaatctgataaaaaccgattagcatgaaggaatcttggcccccggttatgcacctcctgtgtcttgtcggtattcaacaaggataataactcttcgtactgctcctttcgtaaactgaagcggac

SEQ ID NO: 387076 - DNA, 627 bp, Oryza sativa
ttattgtgatatctgtttcttttgcttttgcctttctgtttatactttgtacaggtagcaaattgagtgaaggcataaactattcttacgcttgtatattttcactgaatcagagaggaaaacaattacaggaaactattcttctgttttgctttcctcaggtacccaaattttgcctacaattaaatgggatatgcatccatcaagtgactaactgcacatttttacacatcactttacatttttacacttggtccagttaacctgtcctcagaaagggtggtagtccatgtcgcgaagatcggtgttggctgtgagcgccatcagggcaacgacgacggatctcatggtaggcctcatcccgggctcctcatgcgtgcaggactttgcaagggacgcaatcttgagagccgagtcgaccgggtagtcccctggcaggctcggatcaatcagttcgtcaagagcttccgtggggtttggagcgctgagggcctcctcaaacaggaaaaccagtccttttgattcgctaacagattcacttgatctcacaatagcttgtttggctgaaagaagttcataaaggacgacaccaaaagcatagacacggacgcgtgggcggacgcgtgg

SEQ ID NO: 387077 - DNA, 486 bp, Oryza sativa
tacaagtaaagatgcaacctcacatacatgccaaaatttgattgatcgatatatttcttttttaaaaaactattgtaattacatcgtctttgattctgacatttgcttattctgacgatgagagaaacaaatctgtacatcaagaagagaagctctgtatctatcatatctcagctactcaagtaactagccgtacgcccggtcccaccgccatcgccggcgacgagctcggtcgccgtcgccggcgggctacgggtaggggtcggtccagcacacgtccccctccgccgcggccttccaccgccggttgaatatctgcagctcggtgtacgaccgctgcctcacggcgagccggtggacttgagcccctggaagggagcgacggtggtggccgacgacgccatcacggagggggccatctctgcagctcaccaagctctctccttctttgctcgagtacttccccacgcgtccgcggacgcgtgg

SEQ ID NO: 387078 - DNA, 750 bp, Oryza sativa
ttattagcgcagaatatagggggtctatagcaccaaacaagtaaagtcaaaagataaatactataaagcaacccaaaattattgcatcattgttgacgtcttggaagattcttagaattattgcaggcaattgcatcacattaccagtcagtagcttttcccatgtattacaggtaccaacgaaatagcggtaaatactgatgagcgtcgctcaaggccaagttagggctgaaatattttggttcaattgatgaccaaatggagttgcttttacttgtatattagagcatccctcccaggtccaacaccaatgtagtggactggaacaccaacaagctcttctatcctctcgacatagcgttgggcagctaggggaagttcactgtaactccggacagacgaaatgtcactttgccacccaggcaacacctcatatttgacctgtacttgctccagagtatcaagatcccctgggaaggattgtagcttctgcccatcaggttggttataagaaacccccagcttaacttctggtaatccagacagaacatcaagtttggtcagattaagagatgaaaacccatttatctcgcagcagtactttagtgcaacaatgtcaagccagccacaacgccttgggcggcctgttgtcgtcccaaattccattcctgatttcctaaggagatcaccttcctctccaaacagttcagttggaaaaggcccagaaccaacccttgttgtataagcttt

SEQ ID NO: 387079 - DNA, 711 bp, Oryza sativa
tgaaaaaaaaaaggcagttgttttataaatacagtatactctgattaggacaggtataaatctacaaagctcaaaacagtggtactagcgcccacttgtgtgcatgtacataatatagacaccaagataatgagtataggatgaccaaacaatcagcagaacatgttctacccatagtttccatttcacctatatttcggttgtcataaaagaaaggccctgcttaagtgcttatctattcagttagaacaatcgaccatcccgtgcgagatgtcccctttgcttttcgtttccgaccactgtaagatcgctgggtattcttccagcctttatctaccttttattttattgctaatacaattgtacaatctgccaatcataaattcaccataacttacaagttacaagctttaccctacttgtacaacatcaggtacaacatgaaacccaaaggtgtcaatacaacttgtgccgagggaactgagccaccaatcttctgcaaatgcatccgcaatcagtcccgctccgccgttcctcccagatcagttcatgaagcattaacggtgatgcaccctatgtgttgttactcccgtggcctagcaagccagagagaactcagggcacgcaaacgtgagaagtaatcatgtattgcaagtagagcacgggcagcttgtcggattgtcagaattcgctgcatttgatgtaaagtct

SEQ ID NO: 387080 - DNA, 493 bp, Oryza sativa
ttttttttttttttacgaatcgatgtacaatctctgtatacactacatttcattgcatgtacaaataactggataagagttcagaacatggatactacttctatcggttggatgtggcagaatacacgggaaactcttctgccgtttttcatggtaaagaacaaaaggtcgtacctgcactagtgtacactgcggcttccatgtccatgctctgacggcacacaatcctgacctaaccaccagttaacaaccgcggcaagtccgctaatccatgaggcgtatatctccatggaaccaatcatcaactgatcaccctaaacatactattcggtagggtgatcaacattgcaacggccaaggtcagctgcagcctgattcccaattcccctgcgccgctgagttcacgtagaggcgattggatgtcctgcattcaagtaggaccgatgcttggagataatctcaatcgacttttgtttgctcattatctacaccg

SEQ ID NO: 387081 - DNA, 580 bp, Oryza sativa
ggagcagaagaaccaaatatgttccatgtttcatgatcaataaataaggacacttcagtttcactttaaattatgtaagaaaacatcaggaccggattcataatttgtttcttttcgaaatcacccccacatactgagtcagacagacgcaacacatatataggtgctaatagtagtatatataccccgcaaatccacgcgatcatttatcacaaattcttaaattggccatcggcgagatagcccaattccccacccctagttcttaccgccgacgtactgttcggcgtcgtggatgatgacgtatccggccttcttggggctctcggagtcggacagctcgtcgtcgtcgtcttcgccgtagacctcgtcgtaggaaggagcgcaggtggaggcgaggagggaccagacgaggtacatggtcgcggcggtgagggcgccgcagccgaagccgaagaggaggccggagacgacgacgaggatgtccttggcgcgctcctggacggacgaggcggcgtcggaggcggcggggaggggatcggggcgggggatctggagggggtggtgggcggacgcgtgg

SEQ ID NO: 387082 - DNA, 796 bp, Oryza sativa
tttttttttttttttctgaaagagaatagtagttcagttttttcacacttcagtatcgaccccgagtctgaactctgaagatcagcttcaagtatacatacatacagtacatctaaataaaattgtaaatgtatagtaattctagttcatggtattttgagcacttatacaggttacatctacacaaccattttttcttttcagacaacacgcattagagtgtagtgacatctacacaaagcaagacctgaacacaccgtaaacagctgaacacagtaaaagtaccatctaactgaaagttcagacttgggagagccactaactagcctgaaactacaggcttgccttgctcctgcgacagctgctgcttggagttggattgagatggtgggttgaacttggtgaagaccctgaaggcggagatgagggagagcgccatgaagcagaggagggcggcggcgttgagcgccacggacacggtggcggcgccgcagaagcggccgaagtaggagcacacctccccccacgacacctcccggtcgccctcccgcgccaggtacaccacctccgccgccgccgacgccgacgtcagcagcaggtacgccgacgcctgatccaggaggaaaatgagccaatcaaagcgagtgatgaacctgcaggatgacagcaggatggaggccaccgagtaggcagccgtgatggcgttgatccagaccaaatacctgaagccggagaggtcggagaacctgacctccccgtagccctcgtccacctgcttgttggtgcggacgcgtgg

SEQ ID NO: 387083 - DNA, 310 bp, Oryza sativa
tcaaatcacaaatcacaagttctgacaaatctcatccaagaaacagaatccaatcacaaacatccattcatcaacacaaaacattggattcaaatccacggcaatcaacatgtaaacttagaaaaaaaaaaagaaacaacatcatcgtcgtcgccggcaaactcctttgcatgcggtggccgccgccacccccctccctcctcaggccggatctaggagggagggagggttccgccaccgccaccgccctcccctctcctcgtaggggccggatctaggagagggaggggaggggagccgcttacgcacc

SEQ ID NO: 387084 - DNA, 649 bp, Oryza sativa
  unsure (1)..(649): unsure at all n locations
caacgctatggatcaatctacagactacagtacagtactgtctggaccatgggccccacggatcaactccacatagaagtgaaacaacattaacatcatcttgtgctaacatgtgttcattattgttgaacgctgcttataaaaatttacagtgccggttcatcaccacggctgctcacagtagctcagatcaatcaactacatgagaaaacatcaaatttttccacagaatttactgggcgtgtagctactggctaacgactttcactcagctgcacagattgggatcacattggccactgaaacctgaaactctcacgcttcagagaccaaactgtctgcctcggcgtcagacggctgcgactcgtgcttcgcggcggcctggagaacccggtcttggaccgccgtcgtggagggggaagtcgccaagccaatcttgcttggctccagcttcttggccgcccacgagaacgcctccgcgcctactcttaacggggaaagcagcagttttagatcttagctccagatcctctgaaccctcgtacgtagagaatcgcagatagatagtcagaccaaggcttagaacacccgggtattgcagagtcgtttccggacgcgtgggaaaaannnnatattccggccaggtacc

SEQ ID NO: 387085 - DNA, 748 bp, Oryza sativa
cgtgcttcgcggcggcctggagaacccggtcttgaacctccgtcgtggagggggaagtcgccaagccaatcttgcttggctccagcttcttggccgcccacgagaacgcctccgcgcctactcttaacggggaaagcagcagttttagatcttgctccagatcctctgaaccctcgtacgtagagaaccgcagatagatagtcagaccaaggcttagaacacctatgtattgcagagtcgtttcccattctagcaaagcgtacgctgctgctgagaggcccaggagagatccaaggacaagtgttggagtgggctttatgccttcaaggatttcctctgcgtcctcatttattactgttaatgcggtctcaggtttcaattctttcactcgagggttctttgcccaagattgcaaaccacctttaacaaggtaaggtcgctgcacaccaagcttcttcagtaacctagcaatggcctttgatcggctcccattagcatccataattataacctttgaatcacctttgaccaacttcaagttgcggatgataactgcgagcaacgcatcatcaacatctcttccacttttaagtagcctctttactgaacctttaatctcaggtgaagcagcagttgcatatttagatctagctgcacggcgtagatccggaattccatctttcactctcaagtcctcagaccgaacatcaataagtacggctttgtcatcatttctcaacagctccgc

SEQ ID NO: 387086 - DNA, 502 bp, Oryza sativa
gttttttgaataactaacataagatagtcattaattaagccgagatagttcagtgcttgaagattacatgccggatttttttttgtgggttttagagtggtttagactgaattacaacacaagatgacgacgagggtccagggacaacacgtccataatttacattcagtttcttcagtgcgaagtagcgagagcagctaataacggggagaactaaccaacacaagcatcttctagtattaaggaacacacgcccccacccacctaccgttgtagtcagtcactacaaaacatggccatggtggcgagccgccctgccaccatcagcgattcagctcattgtcatttcatcggcttcgactgatcctaccggtagtaagcctggtggtgaaaggctggggccattgcattgctggagccgattccattgctggatccagcataggccgggtaggttatgggaggggatgggtatgacatgcccaggccgacgctggatacc

SEQ ID NO: 387087 - DNA, 394 bp, Oryza sativa
gggcttgctctcgccatctggcttcttgcccccatattgcgctttctcctcgtccgacatagcgcgccacttctccccggcagccttggtcaccgctgcgacgcccttggtgtttgggtgcttctccatgtactgcggcctgaactcagccaggaaggcgaagaacggggtgaggccgcgcttgggcttgccggcgcctccggccttcttgcgcttgccggcggccttgaactcggcgtcggcgtcggccttgcccatggtggcggaaggggggtagggctttgcggagggttagggttgcagtggctggctggaagcggagatgagagcgaagaggcggactcctgggcggtcgtataggttttacccctgtgaatttcggtgccggttacct

SEQ ID NO: 387088 - DNA, 376 bp, Oryza sativa
  unsure (1)..(376): unsure at all n locations
nnnnnnnnnnnnnnnnnttttgtagaggaagccagtgttcgtgtgcttgaataagttcacattaggtcactctattggtcacccagtctaattttcatcctcagtccagaaaaccggatacaatacatccctcaactttacaaaaccgtgcagacgagatccctcggcagtattatatctggttttggatgacgtggcgcctacgtggctggtttgactagatcctcgtcccacgtggtattgacgtggcgcttccgtggcaattggatccctgaaaaataataaaaaaaacatgggacccatatgtcagctaaaaaaattaaatggtgggcccacatgggccccacatgtcagctactcctcccttcttccccat

SEQ ID NO: 387089 - DNA, 620 bp, Oryza sativa
ttatggacagtacgagatggattgcaacaaagatataaacactaccacaacaagatcttgattgcgataaaagtcataggcaagttctttcttatccattcacaattcataccaacgtactagaaagcagaggcatatgccttccatcttaacaccaccaaatctgaaacaaatactgccgcatccagtctccgacgcaaagatgtaattcagctcggtaccgagggacggaaccagcagcagagctagctacctattgcttgaacgtgtacggctgggggagcgagatggggccccggcggtcgtcgccgccgtcgagcagccgctgcacccgcttcttggcggagtactgccggtcgaagtgcttcacccaggaggggcggcagctgttgacgaagttggcgcgggacttcttgcagtcggcggggtagaggagccccatggtggcgatctcggtgggcttcttgtccgcgtgcttctccacgcacgtgtagaaggcgtcccgggccttgtagcaggcttcccggcccttggagaggacgtcggccatcactgctccggctgcttcgccgccgccgccgccgccgccgtagtcggagtcgccgtccgcggacgcgtgg

SEQ ID NO: 387090 - DNA, 751 bp, Oryza sativa
  unsure (1)..(751): unsure at all n locations
nnnnnnnnnnnnnnnnnnnnnnnnntttaatatttgaagtattgcatttgtactatattaataccatgatggatctttaattacaggtagtgggcacaagaatttctgtatacaagcactgcatttttttacatgaggaataaataagggattattgcggaaactatctaactagtaaaatatttatgtggaaatttctcgagctcaaaggcaaagccttaattttcccaggcaaggagatcactgacggttttctgtgatctgtctatctatataccaaatgataaagagtggtacaacgtatgaactgtcgattggcgtagctactatgggctatgagctgtggtgcgagcgttttcataagaaactgaaaacgtccaacatctgaattcagcattgatgtgatgtgctctaagtctgaagtttgggacaaattggcgctgagggtgttgagatggaacatagattggcatagcagggctgttttgatgctgggtcttcttccaagggtgggggcacttggccgtaaatcatttcacagctcatatcttcaaaatttggattcatggtgagagggagtccgaactcgttggtgaagaagttttgcgtcggaattttgcacatgttgacgcacattccgacgcagccgctgttctccaggtacctgcatttctttatcagcactccactcttctgtttcaccccattgacctcaacctccacaacctttgattggcccgacgagccattg

SEQ ID NO: 387091 - DNA, 1108 bp, Oryza sativa
  unsure (1)..(1108): unsure at all n locations
ttttaattttgttaatataatttttttnnnttgtggaggatcaacgatcctacggcaacatcgattattatgctcaacaccacaacattccttgccttccacagatgtcgggtaacaccacatatagcagcaatttttcacgtgttattggtcactcactcactaacaaataataggctctcgtaacgccagccaggtctatgagaaaaaacaacacagtggcatcttgcattattccctcgtgtgccaaaacaagcacggtgattgaacacgaagtatctctatcaagcaatatggtgtggtagccgtctcgctgcctctgggtcatttatttctacagaagggttacatcaggctgcaactttcttggaagtcaccgagttgataatagtggcaaaatccggacccttcaaagaggcaccaccaacaaggaagccgtcaatatcttctttctttgctagctcggcacaattggctgcatttacagaacctccatatataattcgaatgccggaagcaacctcaggtgacacgttggttttcaaccaatcacgaacagcagcatgaacttcctgagcttgctcaggagtagcaactttcccggttccaatagcccaaacaggctcatatgcaattactacatccgcccagtttgtaatactgtctgcaaaagccttcatctgcttaaaacagacgtcaaaagttttccctgcttctctctcttccaacagctcccctatgcaggcaataacctttacattttgactcaaggcatatgcagccttcttcccaataaactgatcatcttcaccaatgacatgtctacgctctgaatgcccaagaataacccattggcagccaatgtccaccaattgctccgcactgatctctccagtgtatgctcctccttttccaatccaaacattgtgagcagatacctcaatacgatcagttagtgagttcttaacctgatcaatataaatgaatggtggtgcaaccacaacatcaacatcaggttcaagtgtagcagcattcaattcagtcacaagcttgctgacagagtccttcgttccattcccaattgagggacaagaaattatatcataag

SEQ ID NO: 387092 - DNA, 1002 bp, Oryza sativa
tttttttttttttttttaatagcaatagtatatatttattattattatttgattgctgcagacgcgctggtcatgcactcatgcatgcctgcatggtgcataaacaactggacaagcatagccgcaccacgtagtggtaatagtcctataacaatatttgacatagtagtagtagtactgtagtagctgcgatgtcacaggcaggggccagccaacgcagagcagaaacgactcaacaagcgtcacgtcactagggagcaaataacacacagttccgactcgaaacacaaggtttccatgcagacgcgcccggccatgcttgcatgcccccgaggatcagctgcatcctcgaggtgctgtcatggatggatgccaatgcaaggcaagataggagtaccagcaggctggcacatctccatttttattggggtatgagattcacaaccaatacgacactactaggaaacagcactaaaaactcttcgagggagatcggctctgttggcttcttatttttcaggatagtaggaggattggtgaaagggtagcaaagaggagtgtggcggcagcttccgtttcatcgtagtcttcagctaacgagcttcctgggaaggaaagccctgtcgcctggcatctcgtatgggcgccggaaggggtcggccggggcgtgccatgtcctggttcccacaggaggcaaaggccgcttcatggtattcccatgggttcttgccttcatatccacaaacttgtccgaagccaagcttggcaccctgttggagcccactgtcagctgagacagcttctccgcaatgtcaggcgcacgagggccctggtctttagtgaagtaatttccattgcccttactgctgctgctgctggtggtggtctggaccaaggctgattcattgcctctgccggtgtcagtttatggttaccctccggagcctcgcgtgggcggacgcgtgggcggacgcgtgggcggacgcgtgggcggacgcgtgg

SEQ ID NO: 387093 - DNA, 556 bp, Oryza sativa
cgtgccatgtcctggttcccacagaaggcaaaggccgcttcatggtattcccatgggttcttgccttcatatccacaaacttgtccgaagccaagcttggcaccctgttggagcccactggcagctgagacagcttctccgcaatagtcaaggcgcacgagggccctggtctttagtgaagtaatttccattgctccttactcctgctgctgctggtggtggtctggaccaaggctgattcattgcctctgcctttgtcagtttatggttaccctctggagcctgacaagaattcatattcacctggtgatccaactccagcttcctttgcacaccagctgctcttgccggggtgttagcgctcaagtatgagtaattaacggctggtctcccattagataagggccccacggaatatctcctagcattcttctgatccacagctcctttagccccaactgatggtggtgttgctgcatatccgtttgtccctctgaatcgaagtgaaggggggatgtaaaagcatggctgaaagaagggatgctgcaaaacatcc

SEQ ID NO: 387094 - DNA, 759 bp, Oryza sativa
ttttttttttttttttatgaaagaatcacaaggttttattagatgaattgtataacatcttattggctactcggagtcctgaattccagcttattcacacagcaaacactggaggcagtgttatatggtacaacccaaggcttgcacttgtacgtattgaaatgtaatattccaccaaaaattgactgcaaattgcagctggctcattaaaatacataaggcatcaagtagcgaacttactatatgcacaatacatttcctgctacatcagctattcaatttttccctagcacttgccctgagtttccattcagaactgctttaaaatgggcttatgattccgggggagcgtcgaactttgatggggtatcaattcccatcatacatttgagtcctgatatcaagatgatcagcagcactattccaacaaagcttccttccagcagagttgattttactaagcactccccgtcacattttccacggccaggtttagtagtattggtcttctctgcgagggacctgcctaatgggaggtttgaagggttctctagcaaaccaaaagggtgagaagcataaagaatccgtatatttagctcccagacttcttcagcagagtaaccagctcagaaagcaactcccctccggatttggggttatcctggaaacccccatcacagaagacaatcagatcagtctgtccactcgggttctttttagtttgtgatcgtacgtctgggtcgaacctgcgattcggta

SEQ ID NO: 387095 - DNA, 708 bp, Oryza sativa
  unsure (1)..(708): unsure at all n locations
tcgaagtccgaccccgaatccnccgccgccgccttccttcttccttcccngaagtccggccagttctttgacgatctcngcgacgaagcagggcgaacccggcgncgagggagacgtacatggcaatgtgcacctggttgcagaagtttccggcggcggcggtggtgcagacgccgacgcgcttccccacggcgcagtacgacatgtcccagcggcgaacgcggcggccgtcgccgagtagagcagcaccggcacggcggcgtccagcagcggcaggagcaccttcgccggcgtgccgtccttcttcttgagatggtcaggaagatgcgatcgcctccatgaacgccccgatcgagctcgccaccaccaaatacacgaaggggccaaagtccttgtaggtgatggtgtggagagggccgccgtagtagaggaagatggtgcactgctcgccgtcgccatgagcgccgccgcggcgacggcgagcccgaggacgacgatgcggagggcgaggttgacgcagtagagcgcgccgcttgacgagtccttcttcttctcgccctcacacatgattgcctacttaattaattactctctccttgcttgatccaatgaagaagaagagaagaagaagaagaagagtagtatagtatagctaactaagtatgcaagctagctagggttgcaaaaagttgttgttgacttgatgag

SEQ ID NO: 387096 - DNA, 705 bp, Oryza sativa
  unsure (1)..(705): unsure at all n locations
ttttttttttttntttattcgatgaactgtgacatcttattccaaaacaggttttaattccagcttattcacacngnaaacactagaggcagtgttatatggtacaaatcaggccttgcacgtgtacgttttgaaatgtaatattccaccaaaaattgactgcaaattgcagttggctcattaaaatacataaggcaataagtagcaaacttactatatgcacagtacagttcctgctacatcagctattcaattttcccctcgcccttgccctgagtttccattcagatctgctttaaaatgggcttacgattccgggggagcgtcgaactttggatggggtatcaattcccatcatacatttgagtcctgatatcaagatgatcagcagatctattccaggaaagcagccttcgaggagagttgattttaataagcactctccgtcacatttatggggccaggtttagtggcactgttagtctcgccacggcaccggcgagcccgaggacgacgatgcggagggcgaggttgacgcagtagagcgcgccgcttgacgagtccttcttcttctcgccctcacacatgattgcctacttaattaattactctctccttgcttgatccaatgaagaagaagagaagaagaagaagaagagtagtatagtatagctaactaagtatgcaagctagccggacgcgtgg

SEQ ID NO: 387097 - DNA, 540 bp, Oryza sativa
cgagcgatgctcccctccgtcagcatggtagcctctagtgcaggccgccctccttttttttttttgtttcagaaaatttactttattatgaaccccaacatagtagctcaaaatcagattagcaagcttatttttgaacatccctagcagcaactactgatgaataacaacattacctaacacagtactaaataaacaagaagtggacatgaataacatgaaaatttcctactttacagctgccctgtgccagtaatgaactcttttcccttgcataaggagcatgaatagcaaccctcttctctcatttacaactcaaaaagctcctccagcctcatggtgcgatcttgcagattccaatttacagtgttatataaagattgaaagcagagttgctgaagaattaggcctttgtggcctgcatttgctttgcaccaacagcgaagaactcggtgatgacttcgagcggcatgcccttcgtctcggggaccttgaggaagacgaacacgaaggcaatcgagcaaacaactgcgtatatac

SEQ ID NO: 387098 - DNA, 769 bp, Oryza sativa
  unsure (1)..(769): unsure at all n locations
tttaagtttaaggatgtacttactttaaatcatcaagcacacaaggcttaaattaagtaggtgctgatacatcaagcccacaaaagcttaaattaangtggtgctgatacatcaagcccacaaggcttaaattaagtaggtgcttccacaaggcttaaattaaggaggtactaatagattataagaccacaaggctagaattaagaaggtcctcatagagtaagaccacaggacatggagattattatttcataatctaaaatcggtcggcagcgatgattttacacagaataatttaggagggtggcattggcaacgaggaggacatatggtggtcagactgttgagtctcctcgaatagaacatcgtacatcccaaaaaatgaggtgacaaaaaaaactagaccaagattttttgcccaggcgacatcataccaaatgtgcccttcgggcggtggcctccctatgcaaggattagcatagatcttgatcctgtgggtattgcggtggacatctcgagcggctcgctgccggatgatgggatccaagagctgtggcaacctttcaaggttggccttttccatggcatcgagatgtctacgcacgtcttccgcggccttggagtggaaggcgcgccgggctgccgccatcatccttgcagcggcgaacgacatggggatcgaacggatctactcctcctgtccgtcctggttagggttagggttccacaagctctctctctctctctctcgctcttctcggacgcgtgg

SEQ ID NO: 387099 - DNA, 742 bp, Oryza sativa
  unsure (1)..(742): unsure at all n locations
cattatggttgagttttttttttttttaatttttttttttttgaaaacacatcaactttattaagcaggaacagatctagggaataaaccccattacatatccaagcaaaagagccatccttaagaaaggagagttaactgaactacgaaagcaaccttcctgaaataacctaacatcagaacagaaaaaggagcaagtcgacagggatctgcggcgaagccgcgacgactgctaccctgggcctcaaaagatgtgcagtccgcttgacaaaccgttaatccccatcggctgcctccacggaaacggcacaagaccgaggtttgatgctgagccgtagattttggtgtgtgcgtcaccggactcagcaaaggatccccacggggctcatcaggtggtccgagctcaacccgaatgacaaaccctacatggtttcttctgttagggaacaacaggatagatgaatccgaagaacagccaaccttcaaggaagaagcacttgaatggctgcaaatcagcttctgtcctgctgagatgatggagatggctgagaaagagatggcctgcaccatgaaacaacgacacaactgaaagcaactggaagcaacgacgtgggagacagccctcgcgccgncacttgtcgccgcaagccgcgttncacaccatcgccggcgctacagactggatcggcgacgcccgccgttaccacgggcccgggaccgaacccgttgccgccgcttgcgg

SEQ ID NO: 387100 - DNA, 1004 bp, Oryza sativa
gttctagatcgcgagcgtttgcttttcattgactgttttgtttctcatttgttgggttttattttttttttttttttttttttttaaaacacatcaactttgttaagcaagagcagaattaggggataaaccccattacataaccaaggataaaagctgaaagcaaaagagccacccctgagaagggagggttaactgaactacgaaatcaatcttcctgaaataacctaatagcagaaaaaggagcaagtcgatagggatctgcggcgaagccgcgacgactgctaccctgggcctcaaaagatgtgcactccgcttgacaaaccgttaatccccatcagctgcctccacggaaacggcacaagaccgaggtttgttgctgagccgtagattttggtgtgtgcatcactggactcagcgaaggatccccacgaggctcatcattgaatctgaggagctctaacatcaaccctgtcaactgaaattgcgcagatggttcgagctcaacccgaatgacaaacccagcatggtttcttctgttagggaacaacaggaagggtgaatccgaagagcagccaaccttcaacgatggagcacttgaatggctgcaaatcaacttgtcttgctgagatgatggagatggttgaggaagagatggcctgcaccatgaaactggaagcaacgagaaagggtgagctgcaactggaagcaacgacgcaggagacggccctcgcgccgccaccgtcgtcgcgggccgcgtccgcgccgcagccgccgctgaggactggatccgtgctgccgccgtcgccacgggccgcgtccgcgccgccgccgtcacgtcgggccgcaaccacatcgtcgccgccgccgcggacctgatccgcgccgccgctgccaccgcggactggatccgcaccgccgccgtcacatcgggccgcaaccacgtcgtcgccgccgccgcggaactgatccgcgccgccgctgccgccacggactggatctgc

SEQ ID NO: 387101 - DNA, 171 bp, Oryza sativa
tagttaaaatcattctttcatttcatatgtactctacataattttctcgaagtatgtgtgcacttatactacgtgttccacagtaactcgtaatttcgtatggaaaatgtatacgtgaattctatacattgctacgttggtttgtatcattggtgctgtgcggacgcgtgg

SEQ ID NO: 387102 - DNA, 647 bp, Oryza sativa
  unsure (1)..(647): unsure at all n locations
nnnnnnnnnnnnnnnnnnnnnnnnnntaaaaataacttgtgacatattcaatcttcaggctttcaccattcaggtcgaattatgttagcgaaacatctgttcaactccacagaagcaagcaacaatgacaacagagttctgtctaattgcttgaaatcataaagctcctacaaatccacacttactgaacgtgtggagcccttttttcttaactccctaatgcaagttcgattccgagaacatgacgaaaaccaagcacagctcagcgcatggtaagttggtaactatagccgcatgaagatattcacttcttcctcttctttgggggctgaagtgagtcttcatcatcatcttcctcatcatcctcattgtcctgatcttcctcttcctcatctactccatcatcatcttcaccaccatcatcatcgtcgtcgtcatcctcattgtcatcatcatcgtcatcgtcgtcatcacctccaccaccctcctggccttcaggctcttcctcatcctcctcaccattttcctcaggctcacctcttttcttgttgttatcgatgccttttggattatcatatccctcaccttctgaaacgtcctcttcgccttccccaaagtcaccatcctcgtccccgtcatcatcacca

SEQ ID NO: 387103 - DNA, 958 bp, Oryza sativa
tctactccatcatgacttctccttaatatagcttttagggttcaactaaaattaacgttcttgggtcacttcctggaagaaaaaccaagagacgcgcacgttcaaacatgacaaaattactactaccactactacataagtacaggatgcataaagcgcacgcgcacacatgaaccacaatacatgaatgaagcagccgaatttcgcatggtacaaaagaaattctcgaatccatgatacaaggtgaaggtaaaagtaagttatccaactagacacatttggagtcataaatttctcatcgacataaatttccggcagatgaagcaaagggtttttgcatgactcaaatatcatttgtgagtggcatgtataggtgtgttacggtctctcagatcaaccaactcaacattgcaatttggcagcccaaagtgccaaagaagtggccagccagtctaaaaatcatcgtcatcttcctcagccatgtgttttgccagctcctcctcctgttggagcctctcacggcgcttctccgcactttccttttccttgtgagagttcggggggaaccgcattgctttcacagcttcattgtgcatgttgagggcaaaatgcaatccgagagttgaatgcaatctgtggttcatttgtcgagtagacatcgccagtttctttcgacaccatccagccgttggcatgatctatggtggcatcaattgcgccatcccttattgccttggctacaatgctctccgcatcagcaacaggattatcagagtcgagccttagcttcttggcaatatcagcaagggagatccgtgagtatgaaatggctaaatattgcgcagtccggttcgaataacattgtggcgcaatctcacaatcaaattgcgagtcctgtcagcactaaaagtgctcacaaatttgtcggcgacagccctaaacaattccggacgcgtgg

SEQ ID NO: 387104 - DNA, 540 bp, Oryza sativa
agtcaattgagcaatgcgagctcacttttcatgatacttaataacacaatcttgtacaagttctcaaaaccactcattttattaccatatcagcatgcatttctagcatagaaaccaccgtctaagcaaaagaacagcttcagatggtatcacgcgacggcgcaagcgttcgggttctcgtcactgaactcctcggacaccagtgccgccggtggcggcggtagcgggtatggtgttgacgtactcgacatagtactggacgggcggccagaagtcatacttcttgacctcttcgatgccggcggccttcttatcctcatctggcttcttctctgcctcctctgccttcttctcctcctcccgcggcttcacctcttcgacgatgactgccggcctccgcgtcttccgctggatgctttcgatgagcacagccggatccatcacccctttgacgaccactaggccgttgaggagatcagtctcgaccgattctacaccttctgtcctgcttatacgcttttgcagaatctgcgcacaagc

SEQ ID NO: 387105 - DNA, 574 bp, Oryza sativa
ttttttttttttttttttaagtctaaatgatatttttgaacttccttaacgaaaagaaattacatacagcacaagaagcatcttgcactagataattgcgcacagctgaacataattctgcagtccagttcttcagtaaatctagtgaaagtcagatacagaagaaagttgcttaagggaggtgtatggctggagggcagattcattggaccatcggatcagggttcccagctgcaagtatgtccagcaacgagttctggggctccagctcttcatgccacagttgtagtttgtctccagggtgaaatttcctcgaaacaccatctgcgtttatagtgacggtacgaacaacccctccactagcaccatcacgggctatagcaagggaaactaccttaaccacaaacttctcagcttcttcctgggacatgccctccttccattcgtggtcaagcaatccatagaggtaactagagcctgaacctccattgaaatggttgcctcagaattgttccaccaagggggactgagaaaatttggcctccctccatatttatcccatccaccaacaatc

SEQ ID NO: 387106 - DNA, 1175 bp, Oryza sativa
gttttttttttttttttttaaaattatgatgttattttaatatatttgaataatataatgagaaaacatatatgctattatatgagagaaaatataatgatgctagccgtataatctgcgcgggccaccatgctagttaacataacagtagaaaatgcatccaactatacagttatccccaaaagtccgcgtttgaacctgaacatagcaaaggtcctacttaactcaaatgaccagatctgttccttcacctgattgtctcggactcaaaatggatgtacaagttagactactggtacctgttaaaagattcaaaatgtgaccatacccctgaactgtactcgtttggtccaagcaatatggacttcgtagttgtaaactgaagaagatggtctcgaagtggagatcgttgcctcaggtgcataggtaacaagtcacctcttgcatttacatcagaatcaatttcttcataccttcactatagaggaaacgacaggtgcaattctgctccttggcaagaccaaatagcaaagctatgtttcctaggtgcacaaagttgctgcagtagtactgtagtattgtcccaagggtctaagttccagatcgtgaggcagtttgcataaacaaggggattgcatttttactcatcttaaacttccggtaatccctggggactggtaagatggtcatcacgtggatgggctgcttccacaacgacactaacttcatctcccactttcccagttgaaaccacggctgtagcttggatccctaacctctataccaagcaaagttgccaaacgatccttaataaaacttaagaatcagggctttatacttctttccctttggttgtcttctcaagtattccaacaaccagataacgtaagttgctgctatggagtctcctggcaactttaacatgcatgcttgcaataaaggtcattccttctaggtcaccagctgaatagggtggagattcacctctaagaaaagcctgtgtatgataatgagcccacaggagtaaaatatcttggaataggggatgatcacctgtacataaccaggaatacaaaggacaccatctcgtacaggtttttgccccctccatttctgcagcgcggagcacactgatgttggcaaaactcctggcaggcccttcagacggacgcgtc

SEQ ID NO: 387107 - DNA, 645 bp, Oryza sativa
tttttttttttttgaagcaatatgttgtactggcattggtagacaatatgcaatgattaacaagggacaattacaaattccttttgacacatctcgaatcaatgacaagggcatttggcccctgaagacgagataactaatttctggggcttctttgcctacaatctaacatcacagttatcagcctatttatattatcattacagcctatactaactatacaacctacggtagattacaatattatacatggagctatgctgaatttcatctgcagatgccactatgaacctgaccaactaaatgtggacatacaaaggattctggcttacagaagtacctacgaagcagatccctttgatttctcaatttccaatgcttgctctgccaccatgatacatgaatccatctccagatttgtggctttgtcgtcctcttttagcgaaggtgctcttggcaaagataacatttcaggggtgcattgtatgtcaggttggatgcctacttggtcgatttcatgcagtgctggagagagatattttgcgaccgtgataaacagagcagatccatcatccaattcagtcacactctgtatttttccttttccaaaagttctgtggccgaccaaaatagccggacgcgtgg

SEQ ID NO: 387108 - DNA, 511 bp, Oryza sativa
aatggatgccttccagtgccagtgcgaagcctgaagggagctgaagtttattactactagggataagtttctttatcgagccatttgtacatggatgggcggacttcagctcgcagcaagtaataccgactactagcattattactaattattattacacatgcattggaaggaaaatagaattacaagtactagtctagtagtagaaggagacgatccaaagcagctaaaattaattccgacaagtgcagccgcgactacggcgcctctcttccaccttggcctcgccctccccctacacacaaaggctgggccttgcaccttggatcctttcctctcctcctcctcctcctcctcctcctccaccagctagaagcttctagaagccaaggttccttccttcactggcagctcgtcctctccaggagttactttaatttgtttcttcctcttactacttccttggcttgagcaagtcgccttcttcgatcttggcaaaccggacgcgtgg

SEQ ID NO: 387109 - DNA, 485 bp, Oryza sativa
ggcagaatacattcatatttataaggaattcatgggttaactacaatagttaaccccctcatctacttttcatggggttaaatcagcaacataaagagtacaaaaattacaacacttgctcagtacacatagacacattgtaaattagactttggtatacgtgctaaactgtaaaatggaaaaggagaaaaaaatgatatacctgtattgtttagcattgaagctcattttctgatgatcttgaaccatggtaccagcttgcaagttaatggtcagactaaaaaaagtttgacctaagtgatgaaagcagtggccaattgaagctatctgcacttccgcagtatgagttcatactttccctgcagattcattcaactccaagacgatgggctgtatctgagttggacgggcagagctagagaaatcctcaagtcaattatggtttgtttcttcgtcatctgcattacctgattcctctggaagga

SEQ ID NO: 387110 - DNA, 931 bp, Oryza sativa
taataaaaagaaaaacacattggctcttattccaatttttttcatttgtattacatatataaccataccttacagattctacattaacatcaagaataaattttaaaaactatacaccagaaatctgaaattagtagccactgaaatacaaaaagtaccaaacgtatttttctcataattcctgtaaaaaaacctggaccgcttttaattacaagaaatgttccagttttgacttttcaggattctagtgaatattgcgagtaattaggccctcaaagatggtgtataggtccttgttatctggaccaaatatttcgtcagccttccttagtgtatcctctctggtctgtttgtgtgagttcaactcctttacattggctagaaatgcactgaactgctcataagacaaacggtttctgacttgacggaagaactcttttccatcaactcgtgttcgtcctgtgtgacttcctgcatcaaatggagatgtcactgaactatgaccagaataggccgaggacctgtcatcaaacaaattccttgatgtaattgaaattgaatgccgccttggaggtgatattgacgcgaaactccttggaggtgagtctgggggagtaacccttggtgtactgttgtacgatggcaaaaatacatgtggacggggtggcctgggtacatctggctcaacatgactactttcctctgagactgaacttgcggtttctgataattgtgacgatttggaaactggaaatgcagaatcttcatctccaacagatgttgcagaggagaaatttgaagtttcgctgacccttgccttaggagtagtgttagcaggatcttcatcttcctggagtgactgcataagcgtcttcttgaacacttccaacttggcaacatctctgttcagcctcctgacgcggacgcgtgg

SEQ ID NO: 387111 - DNA, 534 bp, Oryza sativa
tttgtgtttttaaaatttttgggggttttttctgggctgtaatattctgatgctcttcatttcatcatatatattcttgtacatagataatcagaagccatatacaattacacggtagcactcaaatccatccaccttcctgtgcacccacccaggtagcatagcaaccaccatagccaaaaaggacgagagagcacaaggcccaaacacagcaacactcttcatccccttctcatagccaccaccacccaacacaaagcgcctcccaaaaaaaccagaggacgcgcgcgcgcgcactgtcagtgtgtgcacacagaacagtgtacaggagagctacgataataactaaaagataatgctccctctctaattaatcacccctccccttaattacatatatttatatactactaatacccttgatgatgataataataataataataatctttctccgatcctaacccaaaacccctaggagcagagcagagcagtagcagagagagagagagagatagctgtcgggaaatgtgg

SEQ ID NO: 387112 - DNA, 728 bp, Oryza sativa
  unsure (1)..(728): unsure at all n locations
ttaattatagaaattgtgcaatttaaggtggagaaccactacttngtcaaaaagtacggctgaagcgtgtaagctttttacgtcacactgtctaatatgctggacatcagtaattgtacttgttagtgcagttgagatcttaagaaatagagctacaagacaacaagcgnaaatatgatccgatcaaacaacagaataaaacttaccactcagctgctgattggagcatgccatctgtaatatgccgagcacctgaaagaagggctcctaaaccgataccaggaaacagatacatattgtttgcttgattagcgtacccttgtctaccattgcctaaagtgacattactgaaagggcttccactggcaaatactgcattgtctccaacatatttgaatacatcttcaggagtacattcggctttagtagttgggttggacattgcaaaaattgcaggacgaggggaatcggattctttcatagccttgagaacctcctcattaaatatgcccccaactccagaaagtcctaaaagcacatgaggcttcactttcctgaccacttcaacaagactagccccctcatggagatcttgcacctcttcaggaccaaaacctctggcatagcgagcaactgcaggatccaggccctttctggatttggtaataagtccatctttgtccagaacccagaattgattatgcccggacgcgtgggcggacgcgtgg

SEQ ID NO: 387113 - DNA, 1118 bp, Oryza sativa
  unsure (1)..(1118): unsure at all n locations
nnnnnnnnnnnnnnnnnnnnnnnnnnntttttttttttagatcaatatccaaaaaaaatatattagtagaatgtagtaaagcacgagatgtaaatttatgtagctcaactaatcttgaaattgagcaacgtttgatgacggaagctgtcaaaacagaacaaaaaaatggcgtggcgtgataacatagccatagacgtgggcatcggtatctgctgaattaccctccagtagcgcagctaaatgaaaatagcaacaaaaaaaataagtctgaacaaatatgtgactgatagttgttcaggtgctacatctggttcatgcaacgtcagatttttcacttcatcgagcttcacttatcgttcacgagggggctgtaaatagggtaccacatcttccgagccacaaagtcgactgtgtccgcctcagtcatgctcttgaggtccctagcgtctacatcacaacgcccctcggccagatcttcatcaacagcggcacggacgactgcggcgccgacacgtgcggtgatgtgcctgatacttgagattgatggaaagaggatgccttttcgaatttcatcgtctgtgatgtatgacgcaaggcactcagctgctgattggagcatgccatctgtaatatgccgagcacctgaaagaagggctcctaaaccgataccaggaaacagatacatattgtttgcttgattagcgtacccttgtctaccattgcctaaagtgacattactgaaagggcttccactggcaaatactgcattgtctccaacatatttgaatacatcttcaggagtacattcggctttagtagttgggttggacattgcaaaaattgcaggacgaggggaatcggattctttcatagccttgagaacctcctcattaaatatgcccccaactccagaaagtcctaaaagcacatgaggcttcactttcctgaccacttcaacaagactagccccctcatggagatcttgcacctcttcaggaccaaaacctctggcatagcgagcaactgcaggatccaggccctttctggatttggtaataagtccatctttgtccagaacccagaattgattatgcccggacgcgtgggcggacgcgtgg

SEQ ID NO: 387114 - DNA, 1183 bp, Oryza sativa
  unsure (1)..(1183): unsure at all n locations
cctttttttttttttttttttaagaagaatacttggtcacatggattactggattaccatctccactagtgaattctatctgaaaaatacaacaaccttggcaggaaggcagcataaactacatattcatcgtattcatagatgacccaataacacaaaagccactgcagtaagcaacgttttcgtcagcctgaatctattccaaaccctgacaggatttcttcttgcatgcaaatgtaacaggtaggctgctctgaataggacaaccacgcgtatcatcgtcgatattaagctagtgtatggttttgatctgacgttctagtctatctagggacacttggagttgaccatcgcccagctccagctgctgggcgcttccccgattgccgcatctcctgtgctttggccaactgcgcggtcagatcctttggtttgaaggaaccatccaaagagtgcaagattgtatctgcaagcccataatcgatggcctcctgcgcacggaagtaccttggacctttgagaaactctgcgagctcttcctttggttttccaactccttttgacaacagttcaaggtagtaatccgtgttcgtgtctaactcttttgccttaatccacatgtcaatagcagctccaccagatttgtggaccttaggcaggtacagtttagtgattgaatttggtagcactcctcttttacccttgacgccaagggacagaagcattgcagcctgaccatatgccatgctaagattgattgtgtagaccttggatttgcttcgattgataaaatcagcaattgcaaatgcatcagtttcagatgcaaccagctcattgttttcatccatggttcctgtggagtttatatacaagtaaattggcttggtgcggtcatcataatctagccacagaaattgcgcagcaataagctctgttactgctggaacaataggcattccaaggaatataattcgagagtccaatagcaatgatggcagatctggagctgaacccttctcattnttatatatcctcgccctgccctgcccatgctcatggtgcccattcccatacccnngctgtnacntgcagggccctcatgcataccggacaagttgtacatgccaaaaaaatcatagttcntagaagcagaaatgtttcctctgctcaaccggatctcacc

SEQ ID NO: 387115 - DNA, 400 bp, Oryza sativa
attatattgaacaggataaccatctccactagggaattctatctgaaaaatacaacaaccttggcaggaaggcagcataaactacatattcatcggattcatagatgacccaataacacaaaagccactgcagtaagcaacgttttcgtcagcctgaatctattccaaaccctgacaggatttcttcttgcatgcaaatgtaacaggggggctgctctgaataggacaaccacccgtatcatcggcgatattaagctaggggatggttttgatctgaccttctagtctatctagggacacttggagttgaccatcgcccagctccagctgctgggcgcggacccgtgggcggacccctgggcggacccgtgggcggacccgttggcagacccttgggtta

SEQ ID NO: 387116 - DNA, 783 bp, Oryza sativa
ttttttttttttttttttagctcaaatcatgatcctcgactagctcttcgtattcatttaaaacagggaaacactatggccggcgaaaagccaactgggttcccacatcagagattaggcgagggcgttaatttatacaaattttcttatgctgcaacaacaaacaagaatctatcgaataggagtgcaatttacagctgtaaatttgctgcaggattacgtgggtacaacctcgccaagcgagggtgttccgtcatcatcaggctgaggggttttggccgcctcttggttcttgctgtcttcttcatcctggaacccttgcttgaagaggtcgtagttagttggctcggatgccttgaaaggccgttctcctaataccctaaccaaatcgtcctggtggaggacctccttctcaagcagcatttcagcgattttggcgacttgctccttgtgctcagttatcagttccactgtttttttgtacgccttgccaacccattccctcacctcatcgtcgatgatggatgctgtttggttgctgtaaggtttggtcatttcaaagccatcgtccctctgagggaaggacagaagcccaaccttttcgctgaaaccgtatacagcaacctgcgcataggtcattttggtaactttctccaggtcattctgagcaccagtggagatccttccaatcaaaacctcctctgcagctcggccacctaatgtcatgcatgtcatatcaaaaagctgttcttttgtcatcaaaagattttcacggacgcgtgg

SEQ ID NO: 387117 - DNA, 1423 bp, Oryza sativa
  unsure (1)..(1423): unsure at all n locations
ggaaaaagaaaggagagggagatcataggttattctgataaatgtggaattacatagagagagtccatctatatagttcagtgacagcacaatctgaagatacataatttgtaatggggaattaaagtacaaattgaaaatttatttagagtatagcaatttcgttcatcaaatactcaatgcctaggttgattatccaagttagtccactggcactggctgcatggcctcagcctccgctctcaattcctcaaacaatgcagatgacaggtatctctcccctaaactcggaagaacagtcacaatgagcttccctttgttttctggcttctttgctagttcaagagcagcaactgtgttagctcctgatgatattccaaccagaagaccctccttcagtgccaattctcgagccatcttaacagcatcctcacctttcacctcaataaccttttccattatatccatattcaaaatttccggcttaaatcccactccatttccagtgatgaggtgaggacctggtttgccaccattcaaaacatttgcttcagcaggttcaactccatagatctttgcattggggttcttctccttaagatacttgccaacaccagtgaacggtgcccgccgctcccgattcccatgacaaaaatatcaacctgcccaagtgtatcctcccagatttctggaccagttgtctcatagtgtaccttgaacatttgcaggattctcaaactgctgcagcatgaacgcgctaggatggttctcatacagctcggcggccttcctcaccgtgcctcccataccttttgttgggtcggtaaggacgagttctgcgccgaaggccctcatggtcaccctcctctcaaggctggtgtatgaaggcattgtgagtatgagttcataccctttaagagcagccatgaatgccaggccaatacccatgttccctgatgtcggctcgatcagtgtggtcttacctggggtgatcaaccccttcttttcagcatcttccaacattgaaattgctggtctgtccttgacgctgaaggacggctgcaagaactcgagcttagcagcaatccgggccccacatccttcagtgaccttgttcaggtaaaccatgggtgtcctcccaatcagctgtgacgcagagtccctgatcttgagccctggcaagatgccaggcgactggaccgggtctgcggcggctgcttgctgcagggtggagaagaatggtgagccaccggcggcggcggccatcgccggcggtgctcgtccgccgctctggaggagggagcgccgcctcatgaggctcatcagagccctctccattgctgatttgctgattggttgctgttggtcactgccggcggtgctgtggctnactggcgatgctgctggctggctttgtttattc

SEQ ID NO: 387118 - DNA, 1434 bp, Oryza sativa
ggtacaaacatcatacattcatacgggccaaatctttcaataccactataactggtgtacataaagtatttcatcagaagtgcagttcaactgctgaataagcaggtacagagctgaatatcgatggtttacaaattccctctccagcttatccagagtaggatcttatcagatacttctgagctgatatctcagcgttatcagaggacagctgaagtaaaagcttgagatatcaagtatcatgatgtctatgtacaaagccatgtttaagatctatcaattacataatactagcacactttgccgtacaccaacctacctatgttttcttagcacattgtacgagttctcatcaaccaaaagctgacgcggtgcaaatcatgatgcagaattgtggataaatctgagaacaatccatcagagttcagatgataaatcagaggacggtgaggctctgctggtgagtgcaggcctcatggtgaccaaagcagattcatttgcaccagctcttagagcaatcctgccagcttccaaaaatctagcaacagcatcctctgcatagcggtttgcttcacccacagtcatagtcctgccaatatctgggtaggtgttgagtacatggtcaccattgagctgagaagcaagctgaatcaactccacttgaaactctgacagagatgaatcttccttagggccaaacggttgcagagactttgtgacctctgggagtttctctggacaatcagttctgggtgttttccggattttgaagtagttctcaaaggtcccagcccatgcatccctctttgtcaggaagttagaatgtaaattaaatagcttctttactgttgcagggatggatgagtgctcatattgtgaggagtcctgcggcccatttggttcatggatcacagtgcgcttctcgatccatggtgagataaggaaagaaggcacgcgcactccaagccgatcaaacttgaagtagtaaggatcagggccaacaattccatcaggctgtggaaccccgacaaccggcgtaggcacatggtcatagaatccaccatgctcatcataggtgatgatcagagcagtctcgttccactgcggactcgctcgcagcgtctcatacacctccttgacgaacctctgccccctcgctacgtcgtgcgaggggtggtcatcgtttgcagggaacatctcgcaatcgaagtacctctgctcaatcaccgcgtaattcggcagctttccccacttggcgtgaagcttgaacttgaggctgtactggtggaacttgacggggtcctctgaggcggcggaggctctggtagaagagcgtggccgggatgttctggtagtagatgccaaaggacaagccgttctcctcgaggctatcgaagatggtcttctgcgggaagccatggatgaggtccttgc

SEQ ID NO: 387119 - DNA, 771 bp, Oryza sativa
gaaggagctatcttataagtatacggtttttttgtaaggaaattaggcctacagtactgaatacattgtcctttgggagatgaatcaagaaccttgtttcctatatagagcatactatatagcatggcaacctgaccatactaaaagaaaaactgtacggtgtacttgctgattcccgtcggagaaaagttttgagaaactaaatgggttgggcaaagccatggacatggcaattgcgaatttctggtctacaaaatctcttttctacctgtagcagaaaaatggatttgagaagtacaaagatccccaaccaatgctcttctcacctttgagaagtgtccaaggggatggggcctgttatatctatattgctccttaatactctacatgccctagagctcagaggatcaaataaaagagctcatagaatcatacgttacagtgtttgttgggttatctgtacattgatgaagttgtgagactttgtatgctccaccccgacaagtttctgaaagaggagggttggcatatgaccctagcaccccttgaatgataatcttgtaggttgcctccgtgaagtggagaccatcccatgaagtgtactttgatgggtcagagcagaccacagacccagggtgcccgcacaatattgacggagaacaattgtatggagcatcacttccacaacacgagttcagcgggacagtgaaaccaaactggagtggggcaaggaatatattcaacgcagcaccataataatcagcataaata

SEQ ID NO: 387120 - DNA, 568 bp, Oryza sativa
  unsure (1)..(568): unsure at all n locations
nnnnnnnnnnnnnnnnnnnnnnnnnnnnnnnnnnnnnnnnnnnnnnnaacgggataaatgatgccagatgcgaacacgaagcaccaaaatggcattccagttttattcagaggagcagtaaaaaggatttccaagggaacatgatgctgctgatcaagcacttcattacataggacagaggagctcgagagcactgaaccaccaaacattaaatatgcgtaaatttgctaatacaatcaatgttcaataagcgtgattggcactgacggaactcctaaatttccctgtcccagagctcctcatggggtcttgtaaacgctctgtggattgacaatgaagttgcccctgagcagcctaacctgcttaatctccgagaacttagcaagcaagtcctctggaatagaccagtcataaacatctaagtttctgctttatcctttcttcactcacactttttgggagtccactgtgacccatctgaatgttccagcgcagcgccacttgtgcaggagttttgccaagcttctctgcaatcgagataatgatgggttccttaaggacattgccg

SEQ ID NO: 387121 - DNA, 742 bp, Oryza sativa
acagagatcaatcacaattcatttccataaacaaaaccgtatccgaaaacagtttgaatcgatctacagggtcatgtaacaacaaagatccgtgtaaataaagcaagaaaaaaagaaacaaggttctcaaggatgggagaattgagatatcctcttaggttgacaagctgccaccaccctgttgccaaaggttgatgatatcagtggcctgatccagatggatgttcatctgtttctgagagttcccctcgttctcctccagcgtatgctcttagctcctcccaggcatctttccgtggccagaagtagtatgggcttaacggaatgctgccatagccgggaaccaactggtcgagggctatgccaatgttcttctccatccatatgaacttcagaacaagcattggatcctgcctttcaggcaccttaaccttgtactcctgcgcttcctcgccggcgctcgcatccccacctccgacttgcttctcctcttctccctcctccgcttcgacggcgccagaagcggcggcggcggcgaggccacggagcgagcgaaggggaagcctcctgctgccgaggtggacgaggcgtggagtggaggaggaggaggtggtgcagggggaggcggcggaaagcttgggccgggagatgcgggcgcgcgaggcgagggccggcgtggcggcggggtggacggacatcgccagcatcgtgtccgagcccgaggctcctgtgcggataagag

SEQ ID NO: 387122 - DNA, 868 bp, Oryza sativa
ttttttttttttttttttccatataatataacccgaaaagcatgcggattaacataatttgatacagtgagacaacctaggatcacagaattaacagtacaaaaacagatacagttgctcggcaattacagcgagattcaagctcacatgttctcacatcaacagaccgcaataatttcgggccacaatgttctctccctaaaaactaggtaaaaacaagcagcagcttaccgtacaagtttgtcatgactgcttgtgaagtttgaagccaaaaacttttggaacatactgctgagatggcttttgtggcttcaagtgtggatatgtcatcaggaagagatgtgggaatgttgtcccaaagtacgctccgtcaatgttgccttggtacttggatcttggataatgtaaatcttcacattttggacagtatatcttcactgtgctagacctaggaatatctgattgccctgcaggaagacagggttggccacaacagtatacccgggggcatcttccaaagtcatagttcttgaacttccccaccattgcagccagacccttgctggttaagatatatcttgcatgaattaatccatacagcatctctgcagatgactcaattaattcattttgctcctcagtgaacacatcaccattagaagactcgatgtctaagataagatcaagtgcatagtcataatatggcacctgattgctcagaccacaaaggttgaaatcatcctgtatataatcatcatcgatctcacagaagaactcattgccgcgcaaactgcagaaccatgaaatccaagatgtgtcctctccctcagaaccactgacatctgcggacgcgtgggcggacgcgtgg

SEQ ID NO: 387123 - DNA, 586 bp, Oryza sativa
atcacgatagaatatcacgatggtctgaattttgattgatgtaatcgtaccataatttttttataatcaatgttacactaacaatgggtatctcggtgcatagtacaattacaacaacgtgagtaaaataaacaacatttgtatttcaatacctagctgtacccaggaagaccaatggggcgatgattaattagaaggatagtcaatcaaaactgtgtcagcacatcacaggtagtaattgcaacttatattgtacatattttacaatctatactaagacggccatgaaaaaaaaacaaatagaaatcaaggtttacttctccatgatccagaacctatgaatttgtagccagttctgcagatatgagagttcaatattcttgccagcttgtcaataattagcatcaatctactttagccaccaataaaagaaaaagggaagtagatccaccttttaaccttgatgaagagcatcaatatgttcttagtacatgatatataaaataatgaacaccatgcatatcccacgtaactgttaaaaatatattttcaacggaatgcaaacagtttctaatcggacgcgtgg

SEQ ID NO: 387124 - DNA, 1437 bp, Oryza sativa
ttttttttttttttttattcttctagttatgatccatttcttgaatccaataattaaaatatttagcagcagcacaataatgttatcagaaactccgtttcagatcgaaatgtttcaagaaacccagtttcaaaaacaaaatgattcgagaaacattgtggtgtacccctcaaaaaaaaaagaaacattgtggtgcataacatagaggttttaatatgttatattctcaattgtctgccagaacgacacaccacgagcattttattgtggaatcggaaattggtgaaaaatcactaagcagcaaacacagagaagccgtgtacaacagagattcctgagaagggaagaggggtgatctaccatgattgtagtggcagcatttatggaccctgtgtatgtcctcccaatgttgtggagctcatgtaccttttcaaggatagatgactccacaaaggtggaccttatcatgatttctcgccatccaatgttagaagcactttatatagatcaggacgccggtccctaaatatcccccaaccatgcctggtagacttgatctcgtccaagtcgaactctgctacaagaacgtcttcatctttgtcatttgcaagcttcacaatttcaccggttggccctgctatgaatgaattcccgaagaatgttatagtgctttcaccatgctcagtctcaacggtttcccttcctatcctgttagaagcaacaaggggaaccaggttagcaccagcatgtccttgcatgacgcgcttccagtgttctcgggaatctaggttattatcctggggctcagaaccaattgcagttggatagaacaaaatttcagccccctgaagcaccatggcccttgcacactctgggaaccactgatcccaacaaattccaacaccaattgtagcatacttcgttttgaaagccttgaagccggtgtcaccaggattgaaataaaatttcccttgataacctggtccatctggaatatgtgatttgcggtacaggccaagatcagtgccatcagcatcaataatggctactgaattgtaatgtgcattgttcgcctcctcaaaaaagctgacaggtattacaacttccagctcctttgcaagtttttgaaacctgattatagttgggttccctttataaggcttagcacgttgaaagaagtccaacctttgagcttgacagaagtactgcccctcaaacagttcctgaacaaggacaatgtttgctcctttcttatgagcttctcttatcaacctctccgcggtgtcgacgttctcggactcgacgtcggtgcaggcgaactgcacggcggcgaccgacaccttactccccgcgcccccgccccccgccatctccctccctccccactcgcttcacctgctcgacctcccgctgtcgcttcggcgcgcggacgcgtgg

SEQ ID NO: 387125 - DNA, 1090 bp, Oryza sativa
ttcttcaccaagttgagctcttctagagggatccatcttatctagtaacatggaaagaccctgtggcagggcttgcaaatctgagctggaatctgaaagacttgagagggattgggatactctttgagccttaagatattgaatataatccttgtagttttcagggttatccatccaagcaacaaaagcatcgtcatcatcccaattcagctgcatgtgaagctgaataccattcctggatcagctcgattgctggttggtgggaaaactgctcacctgctacagctctaatttcttttgcaagaacatcctcagagatcctcctccgtaatctcttatagaaagaaagatcgtgattcttcccagtccacaactttcttaatcacacctttcgcagccattctgagggatgtatcatgcaattcagcaaaccgtatcgcaatctgagtatatagaggcatcaactgttttgttcgagcttctatattttcttgaagcgattttgtgtcagcacttccatttttatttgctacttcgagttttgctttcagatcaattaatgttgggtcaagccgactcatgcaatcctggagttcctctgacctgaacttgatctcaattaacccttgcggttccagaacattgccttttgcagtcctctcagcatagcactcaatgcggtctgggtttatcttgctatcaaccacaacccaagcccctcctcgtagctctgcagccatgggaatgtagacaaaggcaggctgattgtatgtcctaaggttctcaacaatagtcgagccagcctgaagaattccttcaaaaagatctctttgtccaccagagaagcctctccagttagcgaggatgaacagaggtaatccttcacggttgaagtccagcaatgcctgcgcagtcttggttgcagaatctggaaaccggacacttgtccagcacgaggaacagattgctcacgggaatcaagctgaccagggtcagcagggatagtttgcatcatggtctgagtctccacagctatcacacccactggaattccaccaagctttgctctgccagtaacccggacgcgtgg

SEQ ID NO: 387126 - DNA, 552 bp, Oryza sativa
tttttgttttttttttttttgggtagagcacaaacatattggcatcttgtgtgttaactcaacagacaatttatttcacatacagacgcatttatgcctacaaaatcatattattcgtgtccaaaattgaatcaacagctcaaccgtatactgtggatccgcggagactcactaattacagcgtctaacagatgatagtagatcacggaactagcgcgaaacaacgattgtcataaaggaccatttgtaaacaagcactcaggttaaccggtgttcttgccaactgacggtatcatgaatcatcagacttgcactttcatctggcagaactaacaaatccaatatacactcaccaacaatccgacagggtccacaagctatttgtgcctccaataatagttttggcatcatatgattcaaccaaggaccttcctgatttcttcaacaagttgagctcttctagagggatccatcttatctagtaacatggaaagaccctgtggcagggcttgcaaatctgagctggaatctgaaagacttgcggacgcgtgg

SEQ ID NO: 387127 - DNA, 579 bp, Oryza sativa
  unsure (1)..(579): unsure at all n locations
nnnnnnnnnnnnnnnnnnnnnnnnnnnnnnnnngcaacctaactaaataataaaaataataataatgtttcactaatttattttcaactgtacgtctgtgcgaaagaaaaaaaaaagcttttgtggacaaaaatacagtaactagctagttttctatatccacactaaacacatcgaacatactccatccgtcccaaaaaaaaaaaaaactcaacatagaaggggatgtgacccctcctagaacaacgaatctggattatccttaggttgagtttttttttttgggacactgcttactactgagacaagtcctacactcctactagagaggcaaaacctttgctttggttatttaggaaaccatagttattatacttctgaccatgcagcacaggggactgaagatcttataagttggcacggaaatatttccgggactcctgctgttttatgctgtccgccanatgggcgatgacgccggnaccggcattntgaagccactcattcttaanatgtatgttgttatgngcaaagtaaggccanagtgctgtatggaagttgacatctactttcttccaa

SEQ ID NO: 387128 - DNA, 589 bp, Oryza sativa
aaattccggggggaaaaaaccaaacaaaatacccacagaaatacttacagcaagatttaaacaaaaggcagtggtaggtgagacatgtgaaacatttggctatcaggaaaatgccgataagttataagcaactacaaagtcttatcacaatgaaatattggtcagaagccacgggaggcatcaagctgtgaacctagaattctccctactcccaacaaacattggttagaaagacttctcccccctgtgatcacaaaaaaataaccctgatactcgctacggccgactcgaaatgggactaactattggcaacaaacatcgaggacaattccataatttaccatcagaaccaactctgaacaggatgaagaaaattcacacagcatgagctcctggaagaattaatgagtgcatgccaagtaggggcagcatctgatgggcctttccagttgtcaataaaaaaaaggctggtctgatgccaaaaactccatggtgccaacacccatgaatcggtaagctagtaacaaagcttctttatgctttcatgaaggcatccaacttcgatctcttgagatgctgtggtctaaaa

SEQ ID NO: 387129 - DNA, 764 bp, Oryza sativa
  unsure (1)..(764): unsure at all n locations
ntttttttttttagagacaatgaatatgtatatcagagacaaagtagctcagcaacacaagtacattgaatttaagtagcgattgatatatagccggcttggaacactggaattagaccatatatatggaattattccagcgttccaaactaacgattatagtatatagttatatagacgacgcacacagatggtgagatacacacatgtatatagtgatcagatgatcagaagctggcagctggatgatgatggatggatggatggatcgtcgatgaagcaggtaggtagagatggatgattacttgtcgatctggccgagcttgccgaggccgttgcagttggggcagacgatctgggggaggtccttccgggcggcgttggcgcgcagcgtggcgccccccttgcgcacgaacccggcgccgtcgcactccgggcacgtgtccttccgcgagaacagtatcgggaacgccgtccccaccagcgccaccgccaccgcccccgcgatcaggtacgtgttcccctccgccgccacctcccccaccgccgccgcccgccacctcctccccatcgaagaattgttattgttgcagcaactccaactccaactactcctcccccgcggcagcagcagcccgccggtggccgccggcgcattcacgacggcggcggcagtggaagcaggagaagcagccatgggtggctaacgacgagctagctagagcaaatcgcccagtgcagtacactagctgcaatataaacga

SEQ ID NO: 387130 - DNA, 917 bp, Oryza sativa
  unsure (1)..(917): unsure at all n locations
nnnnnnnnnnnnnnnnnnnnnnnnnnnnnnnnnnnnnnngtcaanggcattttggttacataagggtaacttgacaaaagtacagttcaaactccagaggacaaaagtacaaaatcatttccctcgcagaaaacagtgtgacaacgagggctacaatgtcgaccagaccattgaccaacaatggcaacaggaacccatattatggtgtgctacagcaatacatacattctacttacaagcgatgacgacaaaatggacgcaacatattcgcacctgcaacagctccagctacttacttccttacctattgaattgcgactttggtgctgggctaaaacctataataaggggcactaaaaggagattcaaccaacgtccacataatacattttataggttggcagctctctccagaaacatgaaagtatggacaccgtgcaatatatacagcgatatgtacagcttacaggaatagacgtcataactcaaaacctccattcaattgaacagataaagatggtctagccaagttgtccagcggtgtttccaaggtgattactagtcctgaactgccgacttgtccattccacttgcctcgcccgagagaaacacctgtcaaggccgagggatgtctggcacaagagaaaccacacattacattgagttcctccttcaatgaatggacaaactctgcccgtatcccaggatcgcttcctccaaatgtggggcaaacactgacttgaatgctgggcctcaccataaggccagatcttttccacgctaaggcttgtgcaactccaaatgaaagagaattgtcaggccattgaaacataggggtgaaccttgtgccttgtttgctcttgaaggagaagcttaatcttgtttccccaggacattttccatgagcggacgcgtgg

SEQ ID NO: 387131 - DNA, 542 bp, Oryza sativa
  unsure (1)..(542): unsure at all n locations
aagctgagtgcttcaggagcaacaaacgcaaaataatgatgaagtcaaaaatttacaatggcttaagctcaaatacattgcaagcaattccatctcccccctaccaggtcgtacaaaatctactgaatgtcttcaacaagaaaacactcaaatattcccagaccgacgcagcaaggtaatgcttatctcactagtcctaactgactaaaatgctaaactatatcctaaacaagcccaagaagttccttcctggcactgagtgggacccacgaagatttgttcatgagctcagcaatgttctcaaaaccagaagcatgccccaatcaatacgacctgatgccaggaggggatgcaaatccaaaagaagctcgaagcggtctattaccaaatgggtgtgacataagttgtgatccagaaggccgttgctctggatcaacttgtacacactggctaatgaaatcttgagcatcttttgacaaatagctgggaatttgaggtcgttctccttttccaatcataanaaagccggacgcgtgggtcga

SEQ ID NO: 387132 - DNA, 683 bp, Oryza sativa
ccactatttaagagctatgcacgcggcatgcgacgcccacgcaagcgtcgggagtcctcttattgtgggggcgccctcttttttttttttttttttaacaagaggatctgtgcatattgcatctttggggaaaaatcttcccctcgtgtacaatttcagactttcagtctctcatcaaccgcatcaattttccttttcgccatattggtgtacaatagtagaagctacaaactaacatcttggaagcacatcatcaacctctaaatcaacataaccaaaaaaaaaatctcaaaattggcgccttggctttgattctgcaactgtaactcggatctgcctgccgtccaggtcaacgccgtcaagatttgatatggcattgttgacttcttcagcggagccataggtgacaaaaccaaaacccctcgacctgccgctctccctgtcgtagatgaccttggcatcgagcaccggttccctgctcactgaacaggtttctcgagtgtcgagttgtcgacaccccaagcaaggttccctacatagagcttgttggatgaatcaaagttgctcccaccacccctaggtgatcttggcgcgaaatcatcccgaggcggaagcggccctgagtttaccctcagaggtcttccttggaatgtgtatccattgaattgttcgacggcagcacc

SEQ ID NO: 387133 - DNA, 564 bp, Oryza sativa
ttgacaataacagcttgccttctgttacttaattatcacaggggccatggtacaaatgctttcgattcagatatgccattttcctatatggggcctagtccttccaagttttttctcatttctttttgttccaagtatgaagtaacttttttgtatggctttacatcattattaaaaggttcaagtatccttaaatggaagacgaatgaaaatgaaagatagctcaagtatccttataaggaagacaaataaaagcgaaagacaagtatatatcctagagtacgagtctacgcctttggcatccagccatttatagtaagacttggcagaaacaatctggattttgaagctttcacctaacattaagaatcattttgtctttctcaagcgctgctttcatttgttgtcaaccttcatttcatgactgtcatcttggggattatgtactgcggttgaaggcctctaccggaggtgcagttcctcctgaggcttttgactttgagtcattaagctcctttggaaatgtctttttctgtgtccagctgcacagcttgttctgtgctt

SEQ ID NO: 387134 - DNA, 1361 bp, Oryza sativa
  unsure (1)..(1361): unsure at all n locations
nnnnnnnnnnnnnnnnnnnngtgaaattgtatgttccattaccagtgatgtctgcactgaaatattgtaacatgtttacgagtataaaatcgggcagtaaattgccggtacaaaagacaagtgtggaaaagcggaaaacaaaagtaagttcttaggacctgataagctaaggatgcagtaaactctcaggaactgacttagaatggacagctgataatagagcttttgcactgcacattgattgtactctgtcaacctggttgctaaatgctaaaagttctgtaagatagtaaaaccagcaagcaaattgcctttggatctaagcagaccaagtactgctatgatacaactgcgtattactacaagcgagatagaaaccaaataggcagcacagatatcatcttctccttggagcagcatttggtgccctttgagctccaggttggccctgccctccagcttgctcctccggcatgttcgctgctgccgtgacagcattcatgacaatgagaccaagaggaatgatgtacatccaatatttagcccagaaagacttctcaggtgatttcaccacttcaccaagaccattttcggcttctattaactgatctacaaatgatggagttcttggtgcttgttcagaagtcttcagaacagtgtatgaattgaatacccactttgatggcattttcactggacggggatatgtgcacccgccaacagaaccataattaactgctaaaatatttacaccatccatgtggataacaatatgttcatccaaactttcacgtggtatgcatctagctttgattgaggaaacaacatagtcttttcttgcaggatccaacacattagacagcaacctaattgaataaaaccatcttcatccagcaattttttaaatgcatccttttcatcaccagtcaactcgttccttgtgaaccgaagcttagtgagagtctgggagccgtgcgcggaggacttgaggcgggcggagaaggaccccgcggggacgaacccggcgccgaggtcgtgctcgagcgagaactgcacggcgctggactccgccgccgccgcgctgctgtccccgggccgccggcgggaggaggagaccgccgccgccgcgggcgcgggcggccctggcgtggggcgggcgcccgcgccctcgaactcgtcgtcgtcgtggaggagcagctcgtcggactggaaggcggaggcggcggcgagggagagggagagggcgaggaggaggaggagggggaggaggcgagggcggcgcggcgcggccatggcttctggtcggcggagggaggtcggagaggagtggaggtggaggagatcgccgatcggacgcgtgg

SEQ ID NO: 387135 - DNA, 1057 bp, Oryza sativa
tttttttttttttttttttacaaaagacattaattaataatactagtatttagcacaaatattccagcaatgtgaaaaatctaatggtacaaaacttagtcttacggactacatggggtctcaaagtcatacagtcgaccaaaacgctaggctcctgcttcaacaattgtatcagcagcggcggggtttttcccgaaggtacacaaatgcttccgaagaacatactcaatccctatagcttttcaagactccataacacaagcgcttacaaaaacacaccgagcccccctaacatttccagcaaattggaactaggcgggttacgcgttatttgcgtagggggactcctcgcggttggctggctgtgctggtgatctgctgtagcttcgctcacgaggaggtggaggtgatcggctgtagcttcgtgcacgagctggtggtggcgacctgctgtagctgcgcctctttggagaacgatcccgtgggctgtaactccttctaccatagcttgggctcctccggtatcttgggctgcggctgcgactacgaccgcggtaccttggactccggctacggctgcggctgcggcgtcttccactgccaaggcctccagaaccaatccgtaagcggcattcacgtgcaaaatgaccaggttcgccacattcatagcacttcatgtcagaaccaccggaacgatctcggccacgaccactaccagctttggttgacagctcaaccctccatccattcttgccatctaaatcacgaattgcatcttctgcatccctgcggtcatcaaagtcaataaaggcaaaacctggtggttttctagcaacccatacactcctcagaaccccaaacacgcggaactcgtcctcgatctcccgcgccgtcacgcgcggatccaggttccccacgtacacgcgagccatgagcgcgctcgaccctttgcgggcgcgtccgccttgggggggatttgggtttcggggtaggcgaggaggaggaggaggagcggctctagggttttaagctcgagccgtcgagccggacgcgtcca

SEQ ID NO: 387136 - DNA, 781 bp, Oryza sativa
gctaaatgaatttattttccagagcccacactaggggaaacgaattcacaatttaatacggaatgggaagtctatacacgatgggacaattattctcatgcgtatgtaatttacacgaaagcaacaaagacgcttctgggcctcaggccaaggaataacaccctaaagactattcctcctgcactagcgcgccaacaaactgctcttttctctttactctacacaatttctccacaaaaatctgactaccaccttgtgtcccctgtgtcctgaatagactggtcttcatcatctccacgaaagacgcaaaacatagtcttagtagaacttgtctcaggtgcccgaagttgcagtctcaccagaatagctcacttcatcaaatccaagaacacaaaaccgttccataggctgtgcaacaccattgacgccaacaagttgcgggatcttgcaaagacctcctcccatcacaacaccaagaaaaaccaaaggcataaccctctgtgcattgaagtgtgccagtgcaaaagctgcagcgcttaccaggattgaccatggaagtggcatgtaacgcgttagagatggaaggaggaaacctcggaacacaatctcttcccatataggtgcacatacagtgaccaccacagcatacaaaaccatcgccactggatcacgggccacaatggactgttctacactggaaaccccagggactggccctgatgacattggtattaggttgatgttgatgtgagagagaaaattgaccagcgcggacgcgtgg

SEQ ID NO: 387137 - DNA, 795 bp, Oryza sativa
ttaaaacgttaagaaatatttgcactgccattatactgaacgacgcaagtcaaactttcttgtcagcttggatttatcaagaaaggggatccaactgtaactctgcacccagtgaaattcaagcgcacgcggaggtgaaggacgagagcagaacaaagtgctcgatataggacgatcaccagtctttcaaatcttttacagcatggaagttatgcaaaaccattaccgctaactgattactgtacgctatagctatatgtatgactgcgctcaagctgtgtcaagtgtcaattatgagttgcccccggatttacgataccaactgatgatcacacatcaacacttcaaactgtaactgtctacgaaggaactgcatcctcctgctcccgtgtaaccttagccagggataattttcctatgaagttggtcgcaaggctgccgaggaagagatctccgttgaactctgtcaccgaagtgaccatgttgatcacattcccttcagagtcaccaagaaccctcacgatctcgccgttcaacgacacctgagccaccactgctcccttgagcgtcgccttggtcctctcgacgagcgccgggaacgacgcgatgaccctcctcgtcaagctccagcgagagatcaggtccagccatggagacctcacctggagaagggcaatccagaagtgaccatctgaacccagccgaatgttgtctgcattccccggcaggttgtccacgaagatctctgcctccccagccttctcccctttcagccacactctcacggacgcgtgg

SEQ ID NO: 387138 - DNA, 486 bp, Oryza sativa
tttagagcaaggaaacaaaaattttataggtaccgctttctcttctgaaaaccttaacaaggcagtcttcaaaaagaagaaaagaacttgacaaggccattatcaggtccaaaacaatggcaaacaatatctccccgaggggcttgacgctacaaagctacatacacttggatgtcctattatccacctgctccggtgtcgccgtttagtatatctaccaaaatctggaaaaaaaattaagcagtactagcttcctcctgtttcgccgcagagagctcgttctggatgtgctgggggacgacgtcgaacttggcgagctgcatcgtgtaagacgcgcgccccttggtcattcctctcagcgtgctgacgtactggaacatctccgcaagtggcacgaaagcatcgacaaccttcaggccaccaggtttatccccgaagctattgacctgtcctcttctggagttcaaatcaccacccacgcgacaa

SEQ ID NO: 387139 - DNA, 494 bp, Oryza sativa
tttttccagtacaagcatatttttatacatggtaaactttaaataaacattatcccaggattggtacaacctgtacgcataaaccaaagaacagaaaaataaacagaaaacaagaaacctgtggatttatgccgctatagcaccttccacaaaactcgtcattttcttttattgcctaccgcagattccaccatataatatctaaagttgaatggtctttcattcaacttattctaattactgaatcttctatattatcaggtgcaggcagtgtggtaataaaatgataactgtataactatcgaaaaatgtgagagagacatcaacttttttcagcaaggctttcatagaagagtatgtagccgttatcagtgttaccactgaactcttgtgctgagccaaagaatgtctgtaccatggactcatcagtcatctcaacattctcgtcgtcgaagaacaaccagtggttgtggctcttcactaagctgatatag

SEQ ID NO: 387140 - DNA, 2160 bp, Oryza sativa
  unsure (1)..(2160): unsure at all n locations
aatctgtatgattttgcagccnccaaactgtactggatctgtatggcggtccctgattagctccaaaattagcaacccccaacaaagctagtacttcccaattgctggagaaaaaacggaaatcccacataagcatcgctgagaagatgctaaaccggatggtaagtactaaaataatgagtgggtgaatttggcttaatgatctttttccagttatatgatagttgctccagtccaccgtaatatcaaaagatccatcctctactcttggatttaatctcccgatagccacccttctgcatcatctaaaacaaggacaaacacacaaaccacaaaaaaaaaactaactcaggtctcaagtctagaatccactaaaattacgagatactgcaactgatggctggccatcagggaagaccccacacagaaacgccaagccaaacgatccatatgctgaaataatcccaggtaacaataatctgcgaaatcaatcagaccttgtgtgcattcagagctccaacccccagaccaacccagagactatcggataaacataggtaacaattgaaggtgataaaacacaaaccgaacaagccaacagcctccaatcaataaccttgtcaacttgggagaaaattaaggaatctgcgaccaacaaagaaagacataggcacaccaaaatctaagctacatgtatgaagcaattctgatgaccgaaatagaaactaaacaggaagttaagtattaggcaaactaggaaaagtatgttttggttgtagaattctccagtagtcacatctatcttgaagctccaaaattcctacgcaattccatttctgcagataaatccaagcacttaaattctacccttggtgagtacttctaatgatgaattgaataaggggatttaaagatttcactcagtgaaggctggccatgcaaaattatgaactaggacctgcagtgagcaagagaccacttattcgagaagaaattcaactttgcaagcaattaacttctgatggtaaattgaagagaaaggggtgatgatttaaaggattcactcagattggccatagaaattatgtagaaacctgcagattggccatagaaattatgcagaaacctgcagtgagcaatagattggacttaaatatatctttgtgaggtatataacttctaatgatgaattgaagagaagggtggtgatttaaagatttcactcggtgaaggttggccttgcaaaattatgagataggcctgcagcaagcaagagaacatttatttgggaagaaattcaactttgtaaatttttaacttctaacgatgaattgaagagaaaaagggtagtgagcttcactgagacgagccataacaattactcttatttagagacctacagtgagcaagagtattattttgcccgaggaaagcagcttaagcatagaaaacatgccactaaagactgagtggcataggtataaagcctgtcttgagctcgcagaccgaggcaggtttggattgcaaattccatcttagttgtgtgctatctgcaagaactaagaattactgatgaagaacatggaaaatttgattaaggggaagattgtcgatccacagaaaaagaactgccagcggcctgtatgtatggtgattccaattcatgcagcaaataggactcgccgtgagatgcaactcccaataattctgaagaacaaccaacggcccaaatcagacttttcaaggcattaatcaaattatgctgacaacaactagatcaaatcaaggggggttcacgaatccaaacgaagcattgctattccatctgacaatcccccgtaaatctatctccaaatcacttagaaatctgcacatcttggggatctgacccaaaggaaatccagtgaacgttgtcacgacaccacaaactttcgtgtcagaataatttcagaaccaccatgaactaatcaaaaagccatgaaccataacaatcaaacctccacctccccgattcatcataataatcaaagcaaccatgaacctggaccatnataatcaaacctccaccaattcggttcatctcaacagcctcnctcnctcctgcatcatctagagcagcacaaacacataccacaagccagatcagcggttacaaataac

SEQ ID NO: 387141 - DNA, 509 bp, Oryza sativa
acaacattaatgttacatttctttgtaattaccatctgaaagagccaggcacggcaactgaccacctcaacacactacatttagacagaagaattacaaacttacatttgctaattagaaccctacactttgtatggtttttgtatggtcaaatacattccaattcatagggctttacatgctagggagagctgttttctctgcttgtttttcctcctcctcccctacaatcttcttccagaaccaatgcttcctccagacctgctccatctgctccatgggcagcttctttgtctccggcaggaagaaataaacaaacactgtcatcaagcagatccatcctgcaaagaagaagaatgtccctgacttgatgcggcatagaactgcaaggaatgtctgtccaatcacaaatgtcatcaggaagaccactgcaacaacaatactctgccctgctgatctgatctcaagtggacatatctcagttgggaccaagaatgtcaatggccccc

SEQ ID NO: 387142 - DNA, 744 bp, Oryza sativa
tgactgcacacgcacgcgagcttgagttctgtacagcggccgccctcgcccttttttttttttttttttttaaggactaaaataatggcggcaacgactcaagatttaaataaatcaatgaggaacatttacaatgacatacccgttcttttcctcttacaacgcacaccgaacatgagcataatacataatgaatgaccaggcctctgcagcgagttttctattcctcctgtctatatgcacttgcctatcagggtctcctttttagggccatttatcacacaaccgaaacctggattttgcgataaacttgctcaccaggctcggcaaatcagcagttagcaactgacgttcctcgctcaagcttgcttctagatatcggagctgttttactataggacgaaatggtcgatcatatggtttatgacatcggcaccttcgctatgcataacgggatctttgacctgaatcacactatgtgctgcagatcttactttgctgttgtggaagctgacatccaccttttcccacgacacaagcttcagacctcttaaaagccgttcttctaacatgcagctgtccacatcggcaacatcagtacattgattcattgtttctgctttggatagttcttcatatacaatatgtgggtaaatcttgcttcctgaatcagtccacttcggtagctcagaatttcgcctgatggatgatgttctccacccaacaatatgatcggacgcgtgg

SEQ ID NO: 387143 - DNA, 1247 bp, Oryza sativa
attattattgcatacacttctatcattaatggtgtactgaagatatcaagatactacttgaacgagttctcaatgtcgattacaaagcgaaatctgacatcccggtcaacaagcctctgaagagcctcgttgatgtaatctatcttgatcatctcgatatctgggtagattttgtttgccgcacagaagtttatcatctcctggatgtccttcgtacctccagttacactaccagataaactccgcccaccgagattaaggtttgcaggatgcactttgatttcacttgggaagctaagtagtgccattacaccaccaactttcagaagcgtgagataaggatcgaatgggtgatcgccggaggctgtgtcaataatgaagttcagagagcttttcaaggtctccatctgattttcatccgatgacaccacgaaattatctgcaccaagaaggtcaatagcttcttttctctttgattcactagtactaataactgtgactttcagtccaaaggctttcccaaattttactgccatgtgacccaagccaccaagtccaatgacgccgagtgacttccctggctggttcatattatgccgcatcatcggactatatccagtgatgccagcacaaagtaaaggtgctgccttttccaaagggtagccatcaggtattttaaagcaatacctctcatgtactactatgtgagtagaatatcctccctttgtgacagtcccatcagtgtcaacaccattgaaacccgtgaagacatgttgtgagcagtagttctctagagagctattgcagttctcacagtcccggcatgaattcacgtatgtgccaacacctacatggtcacccactttgaagctcttgacgtctgcaccaacctcagttacaactcctgctatctcatgcccagggactaaagggtacatcgaattgttgagtatattccgttgtccatgcaacatcagcataacaaactccacagtgtgtgatcctcaaggaaacatcgtcactttgtacagccctgcggttgaacttgtacggggagaggatccctgaaggatctctcgctgcccaagcatcacagttgccacttccacattcagcagccatgccactctaacaagatcccttcccctcccctgctctgctcgccagatgggagatcgccgcctctccgctgttgagccgcgactcgtcttggcgcaaggagcggaggagacgacgcggacgcgtgg

SEQ ID NO: 387144 - DNA, 2327 bp, Oryza sativa
  unsure (1)..(2327): unsure at all n locations
annntttcaatttccggttttcaaatttccnttaattccccccnttncnncctttggaggcacgggggccttncatttccccnttccaaggggttccncagcnttattggtacccgggttnccngtncgccttntaacnccgcccgttgatntatcgcncctntgggcgaattggtnccggnccccccctcgggtcgacggtttcttagcttgatagataagcaaaaaaaacatcgatatatcgcttatataaagtaccctcttcagtttcagaactgacaacattatcgccgcacactttaccggacctgcagcagaaacgcagtattggcaagaaaacgagaacagttgatacatacacgtttattcggggagagatgtaaaaaggctatcaaacaggaggccataaagaaagttcatgggtagcctcaaaagcattctagaatggctcttgaaaagtttatgtgatgacggtgggagcagatcggccagtgtactcttgcatctttgacagcttcagtgcaacatcaaccagaggagcaagggcatcctgcgaatccctgccggtcttggaagaatccttctcatactgctcgatgtagacacggatagtagcaccaacagagccagttccagagaggcggaacaccagccgggaaccatctccgaagaggtaccggacaccctgatgcttggagacagaaccatcaacaggatccttatactcaaactcatctgcggcaaccacatcagaaacatctgaccgaatctccttgatcaatttgttaacatcagaaagggacgactgcatgctgacaaggtttgccataagttctttagcagctccagcatcaacattctcatagtcatatcgtgtataataatggcgaccataagtaccccagtgctggcgaacaatatcttcaacagtaacaagcttatcgcctccaaggttgtccttgttcttgaaagcaagaatagataaccatgctagaacagcccaaataccatctttctcacgaatgtgatcagaaccagtgccaaagctttcttcaccacaaattgagcacattccagcatccatcaagttcccaaaaaatttccacccagtaggcacctcaaagaacttgagattcaaattcttagcgacaacatcaagggcagctgatgtgggcatgctcctggcaactcccttaaggccagaagaaaagtaaggaatcgactgaacagcattggctgcaataatggcaaccgaatctgaaggtgttacgaagaatcttttacccagaatcatgttgcgatcagcatcaccatcagctgcagcaccaaattctgggggttcagcatttgaggattttccaaggcccatccggtcaacaagttcttttgcataggtgaggttaggatctggatggccccctccaaagtcttccttcggaacacagttcaacaatgagctttcagcagcaccaagctcttccacaaagatgcgtgttgcgtaagtcccagcaacaccatggagagcatcataacagaatgtaaacttcggagatgccagaagctttttaattgactcaaagtcaaagattgtcttcattaactttatgtaatctatagtagagtcaaaaacatcaacatcaaaagggccttcaggtccactgaaggtagtgacacctacaacagaaatatcgacatctggaaggtcttccgcgatgagatattcagtaattgtcgttgtattagagaagatcttatcagtaaccgattcaggggcaggtccaccattttccatgttatatttgattccgaagtcctcagtaggaccaccagggttgtgactagctgttaaaatgaaggcaccagtagcctttgatccatctgcaccaacttctttcacggataacagcagatacagctggagtagacatgaggctgttttgtccaacccaaacacgtcttactccattagcggcagccatttttgtaatgatctgaacagcatccttcgagaaatagcggccatcaccagacacaacaatggttgcaccttttactttgtcggcaggaagggcattaaatgtggattgcacaaagttctggaggtaatgaggctgctggaatacagtaaccttcttgcggaggccggaggtgccgggcttctggccgtcgaagggcgtggtggccttcttcgtcaccgagaacagcaccatggctgctgctggctcacgccgccgccgccgccgcgcgaggaggaggagtcggtggttgtgagatcgggagcggaggagatggaggaggagggagtggtggtgcgggggcgagaacga

SEQ ID NO: 387145 - DNA, 685 bp, Oryza sativa
  unsure (1)..(685): unsure at all n locations
agtaagctggtagaccagctaaatacagccatctactgtagtgaaaaaaaaaccaaattaagattagattaggagtacaatggataagcagtcttagccccctaaggggcagcacaactgcatgcctaacaagttaaaaacacccttacaagttacagccactgccatacaataacttaacaaagttaaaaatcatcctcacgagttacagccattgcaaataagaatagccgctgcactgcactatgcagactgctcctaccacacggcgagcccaaatcttaactctggatgggctcgccgtgccacaccttaggacgggcgcgcacgcttgccgttgccgctgacgccgccgccaccgccgttgccgccgctgcaggaggggcacttgtactgcttgatgtgctccgccttggccggggtgatcttgacgcacttgccgtggaaccacttctcgcagatgtcgcagcagatccagaactcgtcggcgccgtagctctccccgcacgcgccgcacagcgtctccccgtgctcctcctccctaccgcctcctccgccgccaccgccgccttcctcgtcgtccgggccgccttcctcctcgcggccttcgttcttcantgggggctggggctgcggctttggctnttcgcccgaggctnagaanacttcgtntntcncacgtccg

SEQ ID NO: 387146 - DNA, 851 bp, Oryza sativa
  unsure (1)..(851): unsure at all n locations
nnnnnnnnnnnnnnnnnnnnagttaataggctgttgtattagtgggagcgtgttttcccatgttcaaaagcaagaacatgaaagctaaggaacgacaaattgttgtttactacacatcttatcatgaccgatttcatcggtagaatgtcatcttacagagactacatatacaaactctggtgtcaagcagaataatggaagaaaaggtgcactgaggttatatctttgatgttgcgtctttgatctcctccaaggttatagcctggtcttgtccagcaaagtcattgtcgggggtaagaaaaagcatgcaatggcattccttcctctcacgcatgggaacacaagggcagttccaaaatccttgtgctacctcagcagctttgtcatcataatgcctacaagggcatagaggagctccaagttgatccttgtgatcagcaagtcccttgataacaacggcggtgacggacttctcggaacagaagaaggtgttggagcggcgggcgtactgctcagagaatttgcgcataatctcgagcgacttatcagatgcatccgctccggcagctccagcttgaactcgaactgtgcatttgcgtcctctgggcatgggtgaagggcaaaaggggctggcggtggtggaggccatcgacatcattgctggacagcagcccaccgatcctgcttctcggattgggaggggctgagagggagtgaggagaactcctcgtcggcacgcgcgcgcggcggacgaggggggcgggcggtggcggcgccgccggcggcggcacgcgcgggagggagggagcgagagagagagagagagagcggacgcgtgggcggacgcgtgg

SEQ ID NO: 387147 - DNA, 416 bp, Oryza sativa
caggtaacacacaactttactgctattttgttcttcggttagctacatttggatcaaatgtatgtggactaaagaatgaatctgtgtactccttttggacaaagaaaaaaaatcttccctagttaacgagcaaacgacaaatttacagctaccactgagtttgatttacaaccttcaggccccaactgacgtcctcgcagtgcctcacgaacggcaccatcttgcccaggtcagcgttcctcttcgccttgcagtcgtagaagggagcctgatggaagcacggctccatcgacatggcgcggcggcacggcgggtccggcatggcgtggttctcccacctgaacatgatccacggcgtcaggccggagaggccctgcgcggcgtagccgaaggtggagaagccaccggacgcgtgg

SEQ ID NO: 387148 - DNA, 682 bp, Oryza sativa
ttaaaaacgacaccagatgcccactcaaatcatgcggggccgctttatacaaatgagcaaattgtggtgctactgtactgctactcttttctctctcagcaaaataatctaagtagcagtagtagtatagtaccacttaaaaacctctgaaaataattaataacctggttagaatcctcttgagaatttaagaacaaataagtaacaaatctacccctagaaagatcacatcttagctgctgctgcatgcatggctgttgaaaattatattatagctgaattaattaagaacccccatgcttagctgggatggagatcatcatgcatccaattagtccaccttagctgcactcttgcttgatgaagaggtttcagtttcggataaatccaccctatgccactgagtcttcatccatctctctttttttttcaatttttttcatcgataatgggaaattaatcaatccagccttctggatcgtcgatttgatttaatttcttgaattcatgcgcaccacagggagaggaggctgctgccattggaccatctgtgcaggagctggctgaggcacagcacggcgtaggcgagcaggatgagcttgaagatgagctggaagtagtgcgacacctcgaagctggatgcattcatcacctgcaaaaaccaaaaaacacggacgcgtgg

SEQ ID NO: 387149 - DNA, 580 bp, Oryza sativa
ggttgggccgaccaatttgatggggcgtatcattttgaagcgtaatccactcatcatgtacatttgccttgctcagttgctgtcgtgagcccagcaggcaaatcagacaacgcaggatatgcagggctctgctctgatctgatctgaactagtactagtataataaataagaaagataatttgtgtgtctctcgtggcaagaagtggagtactcctaggagagatcagtcgtcctggacgcagaagatggtgggcttgacgggctcggtgatctcgacggtgccctcgagcatcttggcgaccttgcccatggagggcctcatgtcggcgcggtcctgaaggcaccacatggccgtcttgaccatgcgctcgacggtggcgaggctggcggggtcgtcgtcgtaggcctcggcctggacgatgcgagggtcgatgatgtcgtcgatgcggcgctcgacgtagaccttctcgaaggcccacttggggaagtaccagtcctcgctgccgacggagtcctggcggaagccgtagttgcggcggccggagacgatctcaagcagaaccatgcccaaactgtaga

SEQ ID NO: 387150 - DNA, 541 bp, Oryza sativa
tgattcataccaacaatatttttctttgtatttgattaataactgttggatcagcattttattgcctgaattattgttgttattatttatcaatgctatgaacctaaattatcaatagttactacaatatggaaacctctggtcacccaatacaactaaatatgcacatcagctgggtagtctgcagggtgcttcttgattgtatccctcagcaatcgctcttgctctcttaggttggaaggaacttcatcataaacatcggtgaatagttcagcgagcggcggtttcggcattctttctgccacctgaatggctttcagaagctcttgcctcacattgttcctgagttcagattcctcttcatcacaccaccagccattcccctgaacccattttctgtacctggaaatcggatctcgcgctgttcgccagtgctcgatctcatcgaccggcctgtacttggttgaatcatcggatgtcgagtgatggccgacccggtaagtcagtgcctcaactaaaattggccttcctggccgcgtgg

SEQ ID NO: 387151 - DNA, 889 bp, Oryza sativa
  unsure (1)..(889): unsure at all n locations
nnnnnnnnnnnnnnnnnnnnnttaagatataaatgtgatttatcagattgctctagggtccgttgtacatagtatgacaacatagcagctatatcagctggaaaatctctgttaccattggtttttttatttttgctcaaaggttgtacaaggaaccaggatttggataagctattctagcctaaaaactctagagatccacatgttaccaagcaataggcaatgcagctacacagctagcgacagagagctccagtgaaatcataactcgttcaccaatcttctttcttgatccagtgcattccccacaatctggtcctgatcttttgtgcagcctataaacgtgccaaccttctcaccaacaatagctttcgcaatatttccaggtttttgcaaattaaacacgacaacaggaatgttgttttcttggcatagcgtaatggcagtcatgtccattactgagaggtctcttgtttgcacctcatggtagctcacagcctcaagaaggcgggcatttgggttacgcttggggtctgcgtcgtacacaccgtcaacatttgttgccttaagtactacctctgcattgatttctgcacaacgaagagcagcagctgtaatcagttgtaaaagaatgggttccctgtaccagcagcaaatataacaactcttccttctctctaaatgcctgacagctcttcggcgtatgtatggttctgcaacttctgacatacgaaatgcagtttggacacgggttggtattccaatgctctccattgttgcttgaagaaatatggcattcatcacagtagccaacatgccaatgtaatctgctgatgagcggtcgagtccactacatccagcccaagcccacgcgtccgcggacgcgtgg

SEQ ID NO: 387152 - DNA, 884 bp, Oryza sativa
gcaggaaaaggcagtaagcccccatcttactcaagacattcaatagattatccttacatcgtcccaagactgctcatgataataacaatggtgcgcacaaacgacaaagcaaacatctcaacacatgtaaaccccccatctagatgaggtagaatggaaacggaatcaaatgatcgaacgcgaatctcgctaagttgtgagttccatgatggctgtgacgatgtcgccattggcagccttgagtgccttcaccgccttggacctcgacacggtggcctgggtcatcaccagctcgatgtccttcggctcgacaccagtctcgtcgacggcctcatcatcttcctgggctgctgtcgacgcctccggcttcgagagcatgctgctcagatccggcgccttgaactgctctgcagcctgggtctgcagctgcgagctcaggtcctcgatcttggcctcgccaaaaatgacataggtgtcggatgtagggctcttgaagacatccggtttggagatgacaaaaaggatattcttgctcttcttgacagtaacacggctcacaccagtgatagacttcatgccaagcttcaccatggccttcctgctttttttctcactacgactctgcttagatcttccacttgcatcacctccctccgcatcatcgtcatctttgtcatcctcgtcgtcatcatcttcatcgtcatcgtcatcttcaacaacgactggctcatctccctcgttgagcttctgctcctcgatctgggcgcggagctcctcctcctgcttcccgatctcggccgccgtcatggttgggaggggaagagaaggtggaggaggtggcggcgcagacgagcaagggaaaaaccctagagccggacgcgtgg

SEQ ID NO: 387153 - DNA, 1611 bp, Oryza sativa
ggtaaacatgcttgaggctaaattgggtggtacataattagacataacaggcaccaaactgattacaaaccacacaggtttcataaaggaaacgcgaatagcttgtctagcggattaaactttaaaatatgtacagaaaccacgagatataaagatgccggcctctcaggagtcccatttcagaactccattgacatattgcaagcccaggcccagcgctggcttcagctctcagaagagtgtggtgcattatcatcagatgaggatgaggatgaggatgatggatttgagaaaagtgcactcaaagcagagaatataggactaccaggttggttagcactatctacgtcactacttgtaccagcatcatctccatcatcgttcactgacacaattccaccggctgattcacatgggtttttcgactcctcggtaggcaactgaaacctacagattgggcaagaactgtgtagctccagccatggaagtatgcactgggagtggaacttatgttgacaaggcatctccttcgcttctgtccccatttcgaaatcctcaagacagacagaacagcctaacacttcctggatgttcacagttggcaatgcttctacagcttccttcttggcaggtggtgtaccagaacgattaagatccctttccgccaaatgctgcaagaggatatctaatccaggaccaagaaagtagtcaccaagtgaaacaccagaacttgtattgctcgagtcatcctggttgtcatcaggtccaaatgttccttggagaataatggcctcattgttggagttgatcagtatcaagctttctgtcctttctctcctccgttctctctccctctctctcatcctctccctctccctctcccgctccctcagcctctccctctcccttctctccctttccctgtctctgtcactatccctgccaatgtcatccaagcccctcaagtcatcccggagggtctggagcagccttacaagagatgagcccctcctctgcctcctaaacaagtcttcaagctcatggtctgaatcatcttcatcatcctcatcgtcatcgtcgtcgtcatcatcctccatgatctgccttcggagccgccttgctcgccgcgatgagcctcccatcatcccgagcaccagtggtgccccagagggagatacgatcagacctcaagttggtcgatggctcaaagcctgcagaccccatctcttcctcgaacccgctgtcacagctaggacacttcatatcaggctccacaggttcgatcacttcctcgcagtggtggcaccagtatctatctccctgaccgtgttccatcctgtaactcagctaaagcctttcttttctcactcttgtgttgtatcttgcagtccgaactcgcgcctcgatatttatagcactccaaaaatcatctacagaactagcaggtcaataagatgtcttccttcagcagcacaataaagttatccttggcacccttgtcgcgcagtggttcgatttcagcccatgattctgctgctgcagatgcccgcagcgaaggcgcccctgcggccccgtggcggtcccccgggaaagaggataatctctctctgc

SEQ ID NO: 387154 - DNA, 793 bp, Oryza sativa
gcctcgccgctgtgccggttgtgatgctgctgctggtgcagaacacgagcggggggggacgacatctgatgcgccgcccaccgggatgcgcacgacggcgcgctgccagtctgacggtggtacagggcatggggtaccgtcctggacggcggcggcggtgtcgttgtcgtcgtccttgggaacaggaacgcccggatcttgagcggctggaggcggtcccggctggccgcgtcgtactcctccagcaggttggcgaggtcgtcgtcgccggtgacggagacgagcgcgtccaggtcctccgtcgggagctggcaccgcaggcacaccgcctcccacccgcacatctccctcagcttccgttgcaactcgtggaaagggagggagcggtcgacggagacgacgcggttgtcgccgccgacgtagcgcagcgcgcccgtcggcgtggcgtggtaggatcctcccgccgtagctgcagaggaacttgacgcacgccccctcgacggcggcgtccgctgccttgacgacgcacgcgacgatgatgtcgtcgtcgagggagccgagcgacgacgacgaggacgacgaccaggaggaggttcccaccatggctctcctttccttggacggacgaacggccgacgacggctcagaatcttgctgagaatcttcggcgcgcgcgcggggagtggctaggccttgctgcctttattactaagcgagccgcttcaagcctcatctcggcgacacgagcaccacatttatagcgtgtggagagagcgtcacgggatttgagaga

SEQ ID NO: 387155 - DNA, 1224 bp, Oryza sativa
  unsure (1)..(1224): unsure at all n locations
nnnnnnnnnnnnnnnnnnnnnnnnnnnnnnnnnnnnnnnnnnnnnnnntttgagaaaagaaccaaatacacttatctcgtcttaaaacaggactgtgactattacaaccatagcatgacattcacaaagtaacaaaatacgctgtcgtttttgagaaaagagcaaatacactcatctcgtcttaaaccgggaatgtaaccattacaaccatagcatgacgaacgccatagactgcgattaaatttcaggcttcaggagactcgctcggtctaggtgagcgtgagccaccacggctaccaccgtcaccatttccatccctaggacttcggctaccgttgtccattgggctagggcttccattgttccttgggcttgggctgcgcccgttggcagctgcagggctacggtagccatcagacgggctcctgctgttctccctgccccgggggctgtcaccgtgatctgagccattacgctcagcattatccttgggtggtgggctcacctggtcctgtggactcccttggactacggctaccatcaggggtggggctgcgcttcttttcatttgctgctggggagatggatcgcctgggactcctgctgtaactaagactccttgatctttcaagctctctgcgtgccctgggagatccagacagggatctggacctagaccggctgtaactgcggctccggctccggctccggctatagctccgactgcgaccacgtccacggcgtggcgatggagagcatgaataacttctctcacgcctgagatttcttgggctgttttgacagtttctttctatgtgacctctctccccacagcggtaacatttgttcttccagtcaccagccttgcagtctcttgcccagtgaccatcaatcccacagttaaaacaccgacctgttccaggaggaggtcctctccccatatattcacgtgaaccaccaggaccacgtggaacccctttagcaaactcaacaagaatgcggcttccatcaacatccctgccatcaaggttgtaccttgcttcctcagcatcacggggatcactgaactcaataaatgcgtagtcgcgcttcaactccacttcacgtattcttccatatctgctgaaatggtattctaggtcacgagaacgagtgcgggaagacagtctaccaacatacaagcgcgtgcttccataacgatcggacgcgtgggcggacgcgtgg

SEQ ID NO: 387156 - DNA, 843 bp, Oryza sativa
  unsure (1)..(843): unsure at all n locations
aaagagaactgtcgtcaacgttgttcagcgaccaaagcaacaaaagttgcaatctcagggtgataccagaccgcaaaaacaatgcaggctaatagaaagttcatcgatccattacacaccaatagcaatatagcatagccccaagggcaccaaatcctttcaggtgttaagactccttgatctcgtcttaaaccggaaatataactattacaaccatagcatgaccatccacaagatgaacgccagagactgggattaaatttcaagcttcaggggactcgcttgctctgggcgagcgtgagccgccacggttaccaccatcaccatttccatccctagggctcgggctgccgttgtcccttgggcttcggctattgttgtccattggactagggcttccattgttccttgggcttgggctgcgcccattggcagccacagggctacggtagccgtcagatgggctcctgctgttctccctgccccaggggctgtcaccattgcgctcatcattatccttgggtggtgggcttacccgatcctgtggactccttggactccgcctaccattcgggctggggttgcgctcctttccatttgctgctggggagatggatcgcctgggacttctgctgtagctaagactccttgatctcctatcatcacgatctctgcgtcccctgggagatccagatagggatctggacctagatcggctgtaactcctgctccggctccggctatagctacgactacgaccatgaccacgtccacggcgtggcgatggggagcgcgaataacttctctctcgcctgagatttcttggactgttttggcngtttc

SEQ ID NO: 387157 - DNA, 496 bp, Oryza sativa
  unsure (1)..(496): unsure at all n locations
atttgttttccagtcaccagcctgcagttctcttgcgcagtgaccatcaatcccacagttaaaacagcgacctgttcctggaggaggtcctctcnccatatattcacgtgaaccaccagcagcaccacgtggaactcctttagcaaactcaacaagaatgcggcttccatcaacatccctgccatctaggttataccgcgctttcatcagcatcacgggggatcactgaattcaaataaaccgcgtagtcgcgcttccaactccacttcacgtattcttccatatctgccgaaaagatattctaggtcacgagaacgagtgcgcgaagacagtctaccaacatacaagcgtgtgcttccataatgatcatcatagcgaggcatctccagagatagaggatgcggcggaagcagcggtacgccggcgccggcgccgctgctcgctggatggagatcgccgcaggcggcgggcgggtgaactcgcgaggagaaaggag

SEQ ID NO: 387158 - DNA, 691 bp, Oryza sativa
tttaaaagaaagtcacgtgaatatcaaatcattccattcatttcatttcactccatcaataaaccaaccaatctccaagtccactttgttttttttcctctttaaagaaaaacaaaagaaaaatacattcctccatttccgcgtgaagcgtctggatcgagagtctagaggctaactctagacgacggcgtagaggatgatctccgcggtgtcggcggcggcccggggcatcctcttcgcggcgaagcccgcgcagccgccgccgccgccgtcggccgaaccggcggcggcggaggaagacggcgacgaggaggaggacggcggcgggtggtagtacatcctcgccgtctgcgggcagtgggagtggaaccgcgcggcgatgcgcacccccatgtcgagcagctccacgtacttccccatcgatctatattccccttcttcctctcggatctccttccctgccaaataaaatcaacgaatccctccctggcctgctcctcctacgaatcagcagctgtggatgcgagcggtgggtggcgctattgccttgctgtggttgcttcgtggaaggaggtgtcccacgagctgggagctgccatgggaggcggaggcggaagaagaagcgatttcttcgggggcgtgggcggacgcgtgggcggacgcgtgggcggacgcgtgggcggacgcgtgg

SEQ ID NO: 387159 - DNA, 526 bp, Oryza sativa
gccgccggaaacaatcaagcaagttcagttaacgtggcgagctcatcctgtgtcctttcggtcgaaatctaactacaggttcttttaacaagttaactccaggttatgatgctgtagaccttctccatcatcagctaacagctctaaacaccctgcctatggtgtcgccatcctcaatgaagaatatgataaaccttccaaaagcagactggtattagtgccaaatattgcaaaataattttatcttgtttcacttttgtttctctttgcctcacatgctttcaaggcttgaacatgtgcttggcaggccttccagctgcggttggactccacgaggcaatcctggagggagaggtagagggcggcccactcgctgagctgcttcacgttctcgtcctcctcgtcggcgtccatcacgtggagtgggtgcggcggcgcaggcgcagccggaggcggcggcgcgggcgcggtccggccgttgctcgaggaggagcccatggttttcgccctctttccggacgcgtgg

SEQ ID NO: 387160 - DNA, 1170 bp, Oryza sativa
ccacgcgtccgtctccaactggggatcaacatagtggactcatcagtgtcaggactgggaggctgcccatatgcaaagggcgccaccggcaatgtcgcgacggaggacgttgtgtacatgctccatggactggggatagagaccaatgttgacctcaacaagctcatggatgctggagattacatctccaagcatctgggaaggcagtcaggctccaagaccaccactgctctccgcaagctaaccacttaagtccctgatgatcataatagggattcagaaaagaagaccgaagatacatcggttggcgtcagtttaatgtttttacacaaatcatatgtgattgtaacttgtaaaccgtctcaatttagtcccaatatgggtgaaagtaaacaggaaccatatatgtatacacacctttgtgtttaatttcttggattgaataatcaatgcccttcatacaaaaatcgttcttggatttgagtatatgtttcctagcataagtatcactctcgggtctaattaggtcttgggtccttttgccctcaaagttgagactcgaaagaatcatgaaacccatctctggtagctccccgctactccattctggagaataaccattaatcgtaacagcggcaggacatggtgcaccagtgggttgcggatgcaaagcttcagaatttccttcggatgcaatcagtaatgaaacgctcatcctattacacggtgattccagtttgcgagaataacccaccttccctggtgctcgcgccctttatacatgtgcggccttgtttttgacatttactaagacgatttaaccttgagagcttcacttaatccatctccatggctaatccagtggcatcttcgaagtctttgagaatatccatgcattgcttcaaaaatgcctttgcttgctcgcttttttccgactcacaaagttcagcaagttcgcctgagaacttgggcccttttctgtcaaccaatggaaagtctctatacaatttgctcaactcaaggagacactcggaagcagcggtgtgaacctgagcaatcttaactaagcgtatgacatccacaacttttggtgctgttgaatgaaataactcctcaaccaagtaagttgtttcctcaggccaagtgttattaccatctgcggacgcgtgg

SEQ ID NO: 387161 - DNA, 632 bp, Oryza sativa
  unsure (1)..(632): unsure at all n locations
tttttttnnttaaagagacaagcnnnntacggttctaattagtacctgaagaacgcacaaacaacattgcaacactgttattcagccgaattaaccgaataattcccccaagatttcagcaattgaaaagacaacagttcatgacagcttattcaacaaacagatcccacgcaacagtctgagcactccaaaatactccctgtccaattaaaacagtatggagaacaaaccgaacggagagtccttctcccggtcgcagtctcgaggcatccaccggaggcagcactcacagaaacttcctgtacggccggccggcgtcctcgtcctgcatatggaattcgcggacgatgcccttgtagacgaggatggggacggcgagtccgaagaggccgacgacggcgaggctgcggcgggtccagcggaagttgaactcgaggttctcgcggcctgcgttccactcctcgatccacttgttcttgtgcacctccatgccgccccccatcttctccgctccctctcctcgatccgccgccgccgccgcctcctctctccggctgcgagaatgcgctggtgggctcgtgaaaaggcggcaaagacccgacgccgatctggtttggggctcgtgccgaatt

SEQ ID NO: 387162 - DNA, 539 bp, Oryza sativa
ttaagatagtgtttggattggcttaaatgcgggggggagtagttcttgatataacggtggttacataggtatacctcagaacaaaacttggagcagagcacagcagctaaaagcttacaagcagaagtgcagaactgagtgtcaccatgtttctcagattggaatcgccagggtgtgccgtgtggtaaaggcatttatttcttaaaacaaaactagcatgattctggctggttacaacttacaagaacttcctcggtggtcttccagcatcctcatcttgcatgtggaattcacggacgatgcccttgtagacgaggatggggacggcgaggccgaagaggccgacgacggcgaggctgcggcgcgtccagcggaagttgaactcgaggttctcgcggccggcgttccactcctcgatccaccggttcttgtgcacctccatgcccccacccatcttctcctcttctccctcccctgcttgccgccggtgggtgcagagcccgaagctgcggcggatttgcttgtgcccggacgcgtgg

SEQ ID NO: 387163 - DNA, 698 bp, Oryza sativa
  unsure (1)..(698): unsure at all n locations
nnnnnnnnnnnnnnnnnnnnnnnnnnnnnnaccacaacaattggaatggttttcaaattttaatgacgcaagcaattcctcagtgcgattattaaaaccttctgtggtgcagccatacagaacagtaaaatcaagaacggaaatacagaacggcctctctaagaccttctggatctgagcttttaaccaaacagaaagcatatgaccaaagcacggtagttcaaggataaaattttcaaagacgtcatttggatggaaacgggtttcttattgcgaccacacttcctcacgaacggcatctattccggatcgaatcgggggatcaggaggaggaggggggtgggttggagtgacggtggaggacgtcgtcgtaggggtcgcggcggccgggggcgtggctgatctggggatcccaggagagctgggagttgaagcggtcgaaggtccagaagccgtaggggcggagcgggaggctccacgccgccttggtgcgctcgcaccgctccttcatccggtacacgtgctccccatgcgccgcgtcccgcttccccgggtcctccatcatccgcaggatcaggttctccgcgaactccatcacgaaacccatccctacttcctcttcccctcctcctgatctcctctcttcttcttcctcggtcgcggtgggtggtggctgacggctgctgccggacgcgtgg

SEQ ID NO: 387164 - DNA, 1389 bp, Oryza sativa
  unsure (1)..(1389): unsure at all n locations
nnnnnnnnnnnnnnnnnnnnnnnnnnnnnnnnnnnttgcagagagaaatggaattttataacaacatatgtggcatatcaagattggttctgaacttaatgttatacatagggaaccctgcatttcttgtacttgccatatatatacagggagtcctgcatttgagctctatcaaatagtactagctaacaaattgggtgatatttataccgaagaaagatacttctgcaacgttatttgagggggtcagaaagttatgacagccgatacagcaactgttcttcgtgtgataattgattacaacatttgcccccaacatactacgtaaatctcagcacatgccgtagtatgcgctcctaaaagcgtagcattcttcactactgtacagacatcgcttgtgcactggttctattaaccttcaccaagccatcagctaccgtgaccaaacctgatgaaaatttacgcggcctgcaaaacttcctggcgcttgatctcaaacaccttctgtaacgcatcctcaacaaccttgtccggagttgaggcgccagaagtaactccgattgtgatagggccttctggtaaccagttctctttctcgacaagctcgccatgatttaacttgtagctgatcttgtttccaggtccaatcctttgttcactgtcaatccagtaagacggaattccactgagttctccaatttcttgcaaatgagaggtgttactggagttccatcctccaacaaccagaataagatcaactttctccttcactagctggtacattgcatcttgtctttcctgtgtggcatcacagatagtgttgaaggcaatgaagtggtcattgacattctcaactccaaacctacgcatcattgtcttctcaacaagcttcccaatttcttcagtttctcctttaagcattgttgtttgattggcaatgccaactttcactaagtcaacatcaggatcaaatcctggagaaacagcatttttgaatttctcaaggaactcctcttttgtggagctagaaccatcaagttggccaccaagtatataatcacatacatagctagcctctgctatgttctcggataacaataatgtatgtccctgcaaagaaagcagtggcaacagtttcttcatgggagtattttccatgaataatagaagtgtagtcacccttcttgtgcttttcaaccatgttccacacctttgaaacccaagggcacgttgtatcgactatctgcaccttcttctcattcagcgtgtacatctcctccacggccgctccaaatgcaggcaatacgacaacatccccttgctcgacaacatcgaaatccttaatacctgcatccacaggaatgttttggacgcccatgtcccggacgc

SEQ ID NO: 387165 - DNA, 1288 bp, Oryza sativa
  unsure (1)..(1288): unsure at all n locations
nnnnnnnnnnnnnnnnnnnnnnnnnnnnnggggccaaaacaacgaacttaggagaagattaatagcaagtaaatagtaggccaaaccatgcaaacttacataaggtttaagtgcagtcataacacaatatacactagtttgataaacaaactttattcagcagcaagtaaataaggtaacacaaagcgaatatctgatcctcagtagcgcgccaggctagacaagttcggatcatagagcatcgccatcgagaactaggccaaaccttcaaaacaatgtacattgttggcctcacaatgcttgcagtgaccaccagttcgagcactggtaaatccagcaacagtccacgagaaagattcagcgaggtttggcttagctcggagcggcagcaggtggccatgaagacacatctgttgcgcagtactgccagcatatggaatcccactaggtcatcagtatcagagtcctctagaacggttctggacttagttatgacagtgggaactgcatgctgggttttgaagcaaagccaccgttattagcagcagcaggtaaatcatcaacaatgcgcatagttggacgcgagtcaccagatggaaaggcagcagatagagtagtactgtatgtgaactgatccatgggataatgccaaaattggttgtttggcaaaggatatgcataggataatcttgtgtctggagcaaagatatcatccatatttacataattttcactgttaggaactccaaagtatgtgggctgttgttcagtaacaccagcattggacggagaaaatccatcaccatttggcacacccaattcagcaagccctgcaatttcattgtacagatcatttgtgctaacctcaaaagcatgagcttcagcctcagacattggtgggagaccagagtgctccccaacagggttgccatgatgaggagaatcagttaaaaacctagaaagttcctccaatacaagcccctcaattacaggactgtctgcattattgaccacattagaacagttgtccacagaaactacctcatcaccaatagattcaacagagtgctgggaaggcagttccatgagagcactttcaccagtaacagtaatattttgatatgttgatccattcccagcacatacatgaggtaaatgctgcacaggtagttcctcaatagctctggcagcaacagaaggctgaacacgtgtatcatcagtagaatttactacctctgaagagggcagcaatggaaacacagaagtttcaacatttgcggacgcgtgg

SEQ ID NO: 387166 - DNA, 1006 bp, Oryza sativa
tttttttttttttttttttgtgacacatcagacaaagtatatcgatttaatccgtgtttatagcgaaaaaaataaaaataaaaggaagacaagaaaaaaaattaagaagcgagggaggggaaaggaggaaagaagaaaacaccacaaattaagaagctccaaagtttgaggacgcacgcttcgcgggtgacgtacaggtgtaggggaggtaatgcggcggcggcgcgacggccgccggcgagggcgaggctgaggctaccatggattcgatcacagcttgacgacctccgggatgtcgacggggtagcggtggatgcagtcgtcccacggcccgtcggcgggcgtcttgactgtgcggaggcacttccagacggcgctgttgcacttgaatccgctgccgaagccgatctgccagacgcggtcgccgcggcgcatgcgccccttggcctcgatgtaggcgagctcgtaccagagcgagctgctcgacgtgttgccgaaccggtgcagcgtcatgcgggacgcctccacgtgctgcgcggacaggtccaggttcttctgcagctcgtcgatcacggcgcgtcccccggcgtggatgcagaagtgctcgaacgccagcttgaagtccgggatgtacggcttccacttcttgttgatgagcttgcggccgacgaggcggaagaagaagagcagctgctccgacatgggcagcaccagcgggccgatggtggtgatgttcgacttgagcgcgtcgccggcgatggccatcagctccttggacagcgagatccccgagtgcccctgctcgtcctcctcctcgtacacgcaccggtacgcgcggtcgtcggcgcccttgtgcgtgcggaccacgtgcatcagcctgtacttggccctcctcgcctccctcctcctgttcgccaccaggatcgcccccgcgcccatccggaacaggcagttgggcagcatcatgtcccgccgggttccccagtagaagcggacgcctgcccgc

SEQ ID NO: 387167 - DNA, 601 bp, Oryza sativa
agatggtgttattgctgcgtgttgttgtgggtggcgaagccgtcgacgagctccaccgggtagcggtcaatgcaatcctcccaggggctctccggcgacggattgacgttgcggagagcgtgccagacggcgctgttgcacttgaacccgctgccgaacgcgatctgccagatgcggtggccgcggcggacccggcccttggcctccatgtaggcgagctcgtaccagatggagctgctcgacgtgttgccgaagcggtggagcgtcatgcgagaggcctcgacgtggaccggctgcagctggaggttcttctccagctcgtcgatcacggcgcggccaccggcgtggatgcagaagtgctcgaacgcgagcttgaagtccgggatgtagggcttgatcttggcgttgaagagcttcttggcaacgagcgtggcgaagaagaggagctgctcgctgaagggcaggacgagcgggccgagcgtggtgatgttggtcttgagcgcgccgccggcgatggccatgaggtccttggacagcgacacgccggtcttcccctcgtcgtcctgctcctggtacacgcagttaaaggccggacgcgtgg

SEQ ID NO: 387168 - DNA, 988 bp, Oryza sativa
ttagctaagcaaaaggaaacttccaattgaacatgagaagtacacagcacatcgatcccctcatcataggttggcaggatcaaaacgcccttgccactaacatcaatcccatgtgacaaaaaagaagggaaaaaaagaaaagaaatagaagaagaaaagaaaaggaaaacaaaattcgacctttcctctggaccactatggcagtatctagtggagtaaatgacaatcggaagcaatggctaaagagacaacaaagtgtagtgtacataatacaacaataggaaggcctaccgatgacctcgtcagcaaagctctgctgctactctgtaaaacttacctgatgatccatgaagtacagaccagtgtgatcacagagtagagagcagagttggcagcagcaaagtctggagattcttccaatgcaatcatgtcctataaaagcaagtgccattatgtcattctcactaaccaatcttttgaggatttttggtttgatccatgatgataaaccgttgtgtttggtgcaccaatggagaagaaggatggatggatggatggatggtgttattgctgcgtgttgttgtgggtggcaaagccgtcgacgagctccaccgggtagcggtcaatgcaatcctcccaggggctctccggcgacggcttgacgttgcggagagcgtgccagacggcgctgttgcacttgaacccgctgccgaacgcgatctgccagatgcggtggcctcggcggacccggcccttggcctccatgtagacgagctcgtaccatatggagctgctcgacgtgttgccgaaccggtggagcgtcatgcgacaggcctcgacgtggaccggctgcagctgaaggttcttctccaactggtcgctctgtggccggccaccggcgtggaggcagaagtgctcgaacgctatgcttaaaggcacgggtcgcgtgggccggcccggccggtccggtccggcacgccagcagccc

SEQ ID NO: 387169 - DNA, 646 bp, Oryza sativa
gaaaaaaaaccaaaaaaaaaagtactcttcattaaagccaagaccgattacataatctgatcagcacggacggttaactcactaggtagattagatgtatcctccaggtttccatttctgccatgcactttgaatcccggatttcatcttgggtaaaattcacatcaagcaagaggccaaataggcaccactttctttacaatttacatggttcaacaattctaatatatcaaaattcagagtaaaaataagttcacatgtgttatgtcgacagatggtccagtacataataacaagttgaacaaaatgataggcaaaaagggaagactatgaactatggtatatatgcgctaaccaatctctcgtgtgcttgctcttcccaagtttctttggagcaaatgcaaagcaagctgaaaaaaagggctcatcgatcactctcaggaagagatcttcaaagttctctgccattgcataacctttcaaggccattggaactgcagaagcacgtgtagatgctacataccatgagatggatcaggaaaggaactaattctctacacaaaataacagtgtgccggttttgcatttgtatgctgtccagaagaaaaagtctcatctgtaaaagaggtaaaattttctgtgtgta

SEQ ID NO: 387170 - DNA, 1184 bp, Oryza sativa
  unsure (1)..(1184): unsure at all n locations
nnnnnnnnnnnnnnnnnnnnnnnnnnnnnnnnnnnnnnntttttttttttttttttatctgaagctttcattgagctttatttatcagaacacgagagatagacctcaaccacaacgtggtatcatcagattacataagtatcagtattcagtactatgacgtagaaagatagcaatgctctgaatgtttgcagaagagttttacggacgcctgaaagtaaaacctagcgcgtcgtctcaggagtggttcttgagtacttcagcatcagacatacagggcagagtccacaactggaaatgccgaaatggtaaaatggaagccatctcaatggtatctttgcctcagaaatggttggaccagtctgcggcgctgccgacccgagggatcccggagtccttcttggcctcgctgtcgaccttgtagttggagccgcacatctggccctggctgtcgacccgcggcacaggcttcagctcgttcagcgggtgctcgaagctctgcagccctccagaggtggtgtagaagcagcctttggggaatggcgcaaacgagttcccgcaggatgccttgagaaggtcaacattgtcagagaacacaaggtggttctcggagtcaacgccccagaagaaaggaatgctaccatcagcatctgcagcaacgaaggtggattttgacagagtgtcatacaggatgaacgtgaacttcccgctgagatctctcacgacctgactagctgggagagggcccctgtccctgagggtcctgtaggcctcaatcaggatggtaacctcagttgctgtcttgctcagaccatagtgttgcttcagactggcaatgttctcaatgtgtccttggaacaggcagaatatgtcattcacagcaccaaacaacctggggacgagggggctctggttggccgccgagtaggcgagggcgccggcggggcccaggctgacggtgaccgcgtcggcgtgcgctccggcgaagcccttcatcagcgcgcccgcgccgccggccgccacggcgccgccggccaccggcgggctccggaggccctccgggcacttggccaccgtcggatcaaacaccgccaacatcctcgccgccgccgccgcgatgtgacctctcctctctttccgtgtgcgtggtgcgcttttcttcgccgatgtctgcggacgcgtgg

SEQ ID NO: 387171 - DNA, 475 bp, Oryza sativa
tcgagcggccgcccgggcaggtactcttcaacttgtaattaatacatatttatatcatttcattgacagatcgcaatgaagctactatgatcatcgatcacctgagcagcaatagaacgaaagaattcaatatttggccgaaagccaaatcgattacctaatattacgaagtttagcgaattaatcaaagaacaccctatctaattcaggattaaggccatatccttcgcacgtgacgtcacggacaccaccacgcggcagccatgcgtgtaccgcgccgggcgcgcgccatggctgcactccaagctcgccacggcgccgtccatggccggagctagcgatcgatcagcttacgaacagctgcgggaaggccatgtgcgggtgcggcgacagcggcgagagcggcggcaggctgcagatccccttcagctcgtcccagatgtctccggctgccgccgccgccgacgacgacgac

SEQ ID NO: 387172 - DNA, 600 bp, Oryza sativa
tttttttttttttttttttcaaacgcaaacagatggctatgtgtttccaatgatgctacatgaaaaactggcagtttttagtttttacagcgtccaaagatgaacccgtcagctaaagcagctcacatatacatcacagccgcttgtaggaagtataattctttactcagccatgaacaacacagttacaatcacacacacacacacacacacacgtacgaagatggcaaaaagctcatggcttcatcagaaattcagaaattcagaagtaggggaagcgcgccctcatcaccgccggcgacgagccggactcctggcagagcgcgtcgagcttccacgcgggcagggacacgacggcggcctcatggcggctcaggctctccttgccggcgccgctcgccagggacggcgagcccgggctgatgggctccttgttcgccgccttcaccgcatcaacggcggcggcggcgccgccgcctgccgccggcacgacggttatctccggtcgccggctcttgccttccatctcgctgcttcctgtgcttttgctgcaacctggaggaggaggcttcaaatgcttctattcttccgctcgcctgg

SEQ ID NO: 387173 - DNA, 508 bp, Oryza sativa
  unsure (1)..(508): unsure at all n locations
atccaacanccagtcggcaaaatgagagcttaattattcttttcccatccacgacaattcagaacgaaaagtgtgctgctacagtacagagtacagaattactcaaccagatcgaaatacacttcgagtctgcagcttcagtttgcgaaaccccaatcaacgaacacctttccaaacaaatatatagctaaaacgaacatggcaaagaaatacagcccaattgaattaactacgaaaactgcacataaacaatccatccgttggttggttccaagtacaaattatttgtggtcttttggatgaacagagtccagactaccgcctgaaacaaaacctccgccactctataaacaggtgcgattctggagctccagcatcacaacttattatttccaccacgattgaatcactgtatgaccgaagatgatcagaagatgatgtcttcgtccctctctccaccggcaaccaacatgttggtggcagcacccacagagatacccctcttgag

SEQ ID NO: 387174 - DNA, 573 bp, Oryza sativa
gaaccatggccattataatttggataagcttgacattgtgatccgttcatcttgcatcgatgtataaaaacgacaaggaaatcatgtataaatcgctctagtaactaagtactccattcaaaaccaaaacaggaagattttaaatctgtgataacctctcgattgacaaaacgtgaatacatcatccaaacacattggtctatgatctaaaacccctgcaaagagcaagcaaactacttttattcaactgtagttcctcatttttcccccttcggtagtatgcctatggaaatgaaaaaggtctaacgctcatttatcttacacaactttcgaaagagccatgacgttgaagttcattgagtcagggttggacgcaattctggctttgatgacttttgcagcatcctgtaacaaagtatctggtgatgaagggccatgacatattggttgcgattttcgtccatcaagctcataaagttcaccatcaacacaagagaaacatacaaagtgctcgttcacctcaacattagcatcagtgtcgccagccgaagcagcaacggaatgagcatcctc

SEQ ID NO: 387175 - DNA, 842 bp, Oryza sativa
  unsure (1)..(842): unsure at all n locations
atcagcatcatacccacatattacacaataatgccccatgtaatctgaatcctcactgaactgttgcatatcttgtagatcattgctccatgaggaattcaattttgttttgtccactagtgcgatagcaatgcagtgcccagataacagtagaaaagctatatcatacgcactgatggatctgcattgaatactaattccagcttcaagggctctgccaaagagctcatccactcgatcaatgtcttcttgcaattgctccctataaaaggtttcagcagaatattgcggatttgctcctagagtcacagtgaagaaggaaaaacaaactgaaaacctgtttaacagatatgccaagtcaactgtccataggctcgtggtgcggcagagcttctcgagatcggcaatgccgtcgcagcaatccatcccgagtgtcctgagcaccatgagcacgcaagcgagcccgcagtcccacgtgaaggcctgctgcacatgcggaacatcgacgtagtacgagcggcgggctagagggacacggccgtcaggggccggcggcgagtcgtccgncccctngccgccgcccctttcccccgcgaccttgaacagcctctcggagaagaaccccaggggccacatggcaccatcaaccgaccccctcgcccgccgcgcgcggcgccaggcgactgacctcgaaccgcaagagccagccgagccaagcagtgctctgctcggtagcgcgggtgggaaggagaaaggagggaaagcggaggaggaggttgggattctcgcgggttcgcgacgagacgacggtgggagggagggagggaaatcggacgcgtggg

SEQ ID NO: 387176 - DNA, 813 bp, Oryza sativa
  unsure (1)..(813): unsure at all n locations
nnnnnnnnnnnnnnnnnnnnnnnnnnnnnnnnacattgcattaagaatcattcaaagaaaggcaggcgagcacccgagatggtttggaatttacagaagaggattcagggagtaggatacacatggccacagatgcaaggatatatgtacatatgatacatctctgtccggctataacggtatgacttttgctcgctacagaagctgctcttgcttacaagagtagttcctgcgcagcattgttgctgctgcctgctgcgtcctttgcagcttcagtgtgatgagccatgagctaacaaacctaactgggtacttcactagctcacagttcctatagctgtaagaatgatcttgaactacatacatgacttaacagatgacaatcataactacagtggcatgtacaacgtatatacacatggaaccagggagttgaggttttcacaaggagcccaccaggagtttacgtgagagcttcattccaatttttccagttaaagaaaccaaaataatatcctcatcagttccaaaggacttgcgggcctgatctaagctcttcattgacaccctttcacgctgtctcgaactggcagggtcccttatctcaaattcgcaagcatcagcatcatacccacatattacaacataatgccccatgtaatctgaatcctcactgaactgttgcatatcttgtagatcattgctccatgaggaactgcattccaaaaatcaagttactgacacactattattgcccatttcaaatgatatgcagccacccacgcgtccgcccacgcgtccgcggacgcgtgg

SEQ ID NO: 387177 - DNA, 431 bp, Oryza sativa
  unsure (1)..(431): unsure at all n locations
gttgtaccacanaatgtggccgggtgcaaatattaaactaataatcaccttatgaccgttaaatcacaaaggatttgagatattcaaaatgagaccaagtacagcaaagtaacattgtccacccccattgcatttaccattggacaacttgcttatgaggcgatgtctgaatgccgaagacaaatgtaagactgtcttaaaggagtaaaagtattgacagaaatacagaacaaagtatacttcatctcacttgctatgaccaaaaaaatcccttacttcaattttgttttgtccactagtgcgatagcaatgcagtgcccagataacagtagaaaagctatatcatacgcactgatggatctgcattgaatactaattccagcttcaaggctctgccaaagagctcatccactcgatcaatgtcttcttgc

SEQ ID NO: 387178 - DNA, 936 bp, Oryza sativa
  unsure (1)..(936): unsure at all n locations
nnnnnnnnnnnnnnnnnnnnnnnnnnnnnnnnnnnnnnnnacacgaacaaagatccaatttcaacaatttaagttttccaacataaagtaataaatatattggaggagcaccaagttctaccacagatactgattagtcaagggtgccctagggtaaagggaaccaaccacatgtatacagacaaataattcaagcggtagtcatttaaactcccttccactgccaatatctccagtttgttcttatcaagcaaatggcatttgattaaggctaaagcatgacgggttattacatcacgagaggcattgggttttatgcaccgctggcatacaggcgagtccactcctttgctgtttcaacagcttctgcttcattggctttccagtgctttgcaatgttatcagagagaggatcatcagggtttggtgcacttaggagtgcctggatactcaaaagaactgtccgaatctgaagggctgggctccatttgtccttgagaatgtcaaggcatatcctaccaagcttgtcaatgttggggtggtatattttggtcaggaacctaacctttggagcagccataggatattcctcaggtaaaaagagttcaagcttaaaaactccaccttcatagggggactgtgccgggccaaggatcatgacgttgaagtagcgcatgttctcctccgacggagacgcgctgattcccggcgctggctcgctgaggagtcgctgcgtctccttgatgattcgccgggggaggttgctgttggccatcggatctggtcggggcggggcgcgggggcttcctcctccggggagctgcggcgccggggatgctttgagtttcgtgcgggggaggggatcgggagggaggaagaggaggaggaggaggaggagccgtcagccgagggtgggggaaacgggcggacgcgtgg

SEQ ID NO: 387179 - DNA, 433 bp, Oryza sativa
aatcacaaagggtataaattactcatcagctaggcatatgtaacatgatgttcttgttcatcctctttttttcttttccaaaacaacagatcaaatgaatgttgctaaaggaagaagaaggcgtaaaaagaatttcaaaaggaaaaataagttaagcaagagaaggcaccagatagatacaccaacctatctatctaccaccaccaccaccaccaccttgtgggcttgagctttcatcagttcatcaagctctcatgctggcggcaacctgtcgagcgcctcctgcaatgtcttcttgaacctgtccatgtccatcttgatgttctgcttgtccaggtacgccgtcttgagcgcgtcccagccttgcttgtgcacggcgtagggatcagtgagcacctggtgattgcgcgggtactgatcgatcagcgagctc

SEQ ID NO: 387180 - DNA, 436 bp, Oryza sativa
acttctatgccttcagcaattggacacaaatatggtggacacacttttacccttacacaacccgtttgttccctgcacactctacagtagaagtacataaccagatgcgctttggtagtgggacttgtgttggtcccccttgccctaccccttctcttacctgagggcttcggtttggagggaattgaagagaattggaagggattgagcgagaataattccacaccataatagatatagaataaatcctctccaatccctcttttatggggattaaccgaataaggcctaaggcagaggcggcgagtgccctgtcttgctgtctattccatctcgagcggctctccgctaccagggccacaaccgatcaccgggtcctaaacatggccatgccttcaaactcaatgaactttcttttcccctttcccccaacctt

SEQ ID NO: 387181 - DNA, 356 bp, Oryza sativa
  unsure (1)..(356): unsure at all n locations
nnnnnnnnnnnnnnnnnnnnnnnnnnnnnnnnnnnnnnnnnnnnngaaacaaaatttatttttacttctatgccttcggcaattggacacaaatttgggggacacacttttacccttacacaacccgtttgttccctgccccctctacagtagaagtccataatttacagcggggtgtcacatcggttttaaaccggatgccctttggcagcacccacttgtgttggttccccttgccctaccccttctcttccctaaggccttatttggtttggagggaattaaagaggattgaaagagattgagggagaataatttcaccccacgcgtccccccacccgtccccggacccctgg

SEQ ID NO: 387182 - DNA, 496 bp, Oryza sativa
tttatagagtgcgtggacataacataagagaacaatctaggcagtgttgtaatataacttgctgggttttctctctttctttttaagtatggcaattggcaagaacaataataattcagccaacataatggcagaatgaaagcaatgtacactggaaatcgccatgagttattgcattggaagaacgtgttcttgcagtccataaaattaaggagcgctacagctacttgacattctttttctactactgccagactacattaagcttcacaatgtgtaataacctgatgaagggaacccaaagttgtgcattgtaagctaacatatcatgccaagctatgttcgaccgtagaacaatggtaactgtgtgacctggcagacgtacctcaagctgttgagatctccttgaacttcccatcgtctccacttgcactgccattaccattttgaataagcttctcctctgaaggtagatttttcatgatttttctagttg

SEQ ID NO: 387183 - DNA, 284 bp, Oryza sativa
ggtgaagatgatccgttaaaaggggatactctgccatataccctacttgactacacatttctggacttgactctatatacttctgacccatgtatggaacaatttctttttttttttttcaacttctgagaaaccttgaaatgattcctggaacttatactggttgccttgaactaaggaaacacatactgaattcatgctcgcaccactagggtgtaactgtcgattacaaccccctaacagcttccaaggttagaaagttctcaagattctcggacgcgtgg

SEQ ID NO: 387184 - DNA, 523 bp, Oryza sativa
tttccatgtaaggccgtgtttatttctattgcaaaacgataatcttcagataactaatttaacctcaaaatcatccggaatttttcaataacatcatttggatgcgcaatagttcctcagcaacagcaaccagatctagaggtagagtatcttgttacagctctgatctatcgatcaaagtaaagaagcttgttcctcaccataggtagcccgggatcttgatgcggaggaagagcatggccatagcgtacccgatgacgatggcggcgccgccggagccaccgaaggagacgcgaaggctccggggcctgttgcggtcgacggcgaggtcgaggaggatgatcccgatgccgccgatgacgaacatgatgccggaggagagcccctcgatgatgtactggccgttgacgcggccggggaggaagacgacggggcggacggcgccggtggcggggtcctggacgctgccgatgccggggggctcgacgatgacgtcgtagacgaggccggagcggacgcgtgg

SEQ ID NO: 387185 - DNA, 1423 bp, Oryza sativa
tgtttttgacctttttttttttttttgaatctcatgatagtggacgtgtggaactgatgatatcaattacaagaaagccaagaatgtgttggctcttttagaggagcagtaaatgaagtaacaaaaaaattactctataatgttcctctgcagttccacttccacaaccaacaccccccacacacaaacatcaaactatgttctctccctttgccctgtatgtcacctacgcaattacgaagaatatcacgggctccaaaggtttcaggtggtgttaaaggtgcaactgtagtttcatctgcggttttacttgtacaactgaattggccatcagaatagccaatgcgaatcggaattagctgatgaaatgcaatgacatgtatctgcaatacacacctcaataaagcttcgtgaactcggctgtctggttaggttcaccaagtctgaatgcatccctttcaatcaggatctgcaaggagctcattgtcttaaccaaagatccccagatcaagggagcgcagcaaaatgcataggcgaacactgccagggcccttacaacaccgtttaaataccatgggaatgccatcacgaagagagcaccgatgatccccaaccatgttgtgaggaccgcaagggggtggaggaggaatacattgatcacgattgaagaaaaggagaaagcaccaagcaaatatagtggccaacctagtagcggatgcaccgtccgtgggatcaggaagaagggtatggtgtaagctgcaagtatggaccatgctgccactactctgagtgttgtgagcaaaactatagtacttttctccattcttctgttgtagcacatctttgacaaactaggccgcgcaagtcgggtgactgcaatgactccaatgtaaaatagggcctggattaatacaaccggtagctccgatgaataccccaagttctcccggcgttgttcatgccaagaaagtcccagaggtaaaactggccaagaccaccaataccatggcttaaaccatggagcgctaggaaatgtaatcacgctgttcggcccacatggaatgctccagcggagtttcaaataatagtaagatgcgtcggacgcgtgggtcatttgatagcctaacggaagacgatatgttccttcaagtttggtaccattaactggtggatggaacattggtcggtcaagcaagtctgggaaatagctagcaaggaagccctgatctgcaccatctgggttatcacgcccaacagctagctcatgtagcatgttcttaaaaacgtccattgagggctgaagcacaaagagccctgtatggaagatacaagggttaatgaagacagcacagaactggccacactgaaataattcatcagtgttctggaggaaaatgttgtcagagtctagccggacgcgtgg

SEQ ID NO: 387186 - DNA, 485 bp, Oryza sativa
ggcaaatttaaccggtgggggtaatatgatgcgcagataacgatacaaattaaaaataactcacggaaactattttaaatatgaatgctcactctggagagctaaattaatcacggcagggtgcatgcatgcagtaaactcaaattgtcacaacaaaaagtcaccgagtctaatcacgatcacaacgacaaactgtagaatgtaatgaggctacgaaaggactcctcgatcagaagtgaaagaaggcgagcagaggagctgccacggcggcggcgacgacgagcacggcggtggtcgatgccatcggagacctcgctgcggcggcgcccttcgccggtgccgctgccgcaccgccgctgccggacgatgtccccggggccacggacggcgactgcaccggtgcgaggcacttgctgaaggcggaggcgtcggcgcctcatgcggcggggaggtgcaaggcgccggtgatgtttatcgggaggggg

SEQ ID NO: 387187 - DNA, 531 bp, Oryza sativa
gtctccctccatccatgtaattaagttggccttcttgcattttagagctctctcgctctgaaccattctattctttatgtatggttttttttcccgtaatcatggatgtttaaaccatctttgtgtctggtttttgatgtatccacatggttcacttcaaaaaagaacttagcacaaacaaaaggagggagagttattcacagctcaggaatggaacacacacacaaactctgcatcctacaaaacaaaatcggcatttccatcaagtatggaaatagtggttcttggtttggttctttactttccctttttcgttttctttgtgtggtatgcaagctagaaggtgttattgtgtcagcacaccaatctgctgcagagctgacttcatgtcatctcgtactgtaaccctcaatgccaatgatatttgagctgtccagggcgacgacatcttgtaacggatatctcctgacagtatggattctgttcgcggggatgttgaactcgcccttcaggatgacggtcctgtggaga

SEQ ID NO: 387188 - DNA, 313 bp, Oryza sativa
agaacttgcctgctgtctgtttgaatgggtattctactcttttggctccagcaaatgaagtgctgattccacaagaacttctatccagcaagactgtttggactccagatcgtgagcttgggcagtatgaagacctagtagcccgagtaacaaacttccacaatgaggataagggcttcatggttttagatggtgatgtttttgatgttccaatcaggaaggatattgttcatagagtagtaaggtggcaactcgctaaaagacagcagggaacacactcaactaaaactatcagtgaagttagccgcacagg

SEQ ID NO: 387189 - DNA, 899 bp, Oryza sativa
  unsure (1)..(899): unsure at all n locations
ccagagaaagagaaaaagagccccattaatatcttggccagcaggagctgaagtacatattcaacggatatcctatgcatttaccctataagaatgtacattatttgcagctagaagttgcagaccgtaaaactgtaagtactatacacacttgaaagaactacctaggcctactgcaacgcaaggagcgatgaaatataaatccctaatgagacggccccaactgttgcaactgcttgagttaactccaagaataaatttggcctttgagcaggcagctccttccagtttgtcctccccaagtcagctatgactatactaatgttgtcttgcgaccgacgatccagagctatctgaccaannncctcacaggcaacctggacatccccatgttgccggagttgatccctaactaatgctactggttcagagcttttaatgtaatcccaaagaccatctgttgctagcaaacaatatcccacatctggtccaagttcgaccagggatacgtcaggtgaagagactattaattctcctttaaaatttattcgtgagataaacttttcagtccatctcccttctttaactccttttaccaacatctcattcttccgtgtcttaaatctaatgtctccaaaagcacgagacacagaaatttctccacatatgcgtccatcaacaatccatccacctgctgctctgatccgcttcacctcttcaagagacgctttcttgttcccgtacggtcggtggaagttggtcacagcttgaggcctcccaccgcgtgatacgaccaagcaggagtcgccaatgtgcgagacaacaaggacatcgttcctgaggaacatggccgtggccgtggcgccggactcatcttccttgtccatccggacgcgtgg

SEQ ID NO: 387190 - DNA, 682 bp, Oryza sativa
  unsure (1)..(682): unsure at all n locations
taatttaccacgcggagctatatgtcattaacacatagatgacaaatagttaaatgtccctggcgcttcacccatagctttttttttatactttctcatcgtaaaatccttttggattattgaagcaatttctacaaacgaacgaccttcaatttagatatatgatgatcacgaatgatgtatcatcatgcatgtagtaggccaagacgatcaattctaacttcagctgatgcataaacactactgtcattttcattcacccactaaagaatatacaagatggttaatttgttataggccgtcctcttaacatgcaatgtaatttggctttgcaaacgccacagatactggaagggtaaatgatgcacaaagcatccattttccaggagcaacgagccgcactctatgcatttcaacatcggacacgttctcacccagcgtcaaatttatcctctcatggaagtcatattcaggatcttctgctttggagaatccatacacgngtatatttggnattacacaagaaggnacagccaaatggtggttccatgnggattcctctgaacacatctggggaaacagtgaaatcataaaataattaattggtcctgtgattagcctaactgtcaaaattcccatncaaaaaacatcgggggcatatgggccattaggaatgggcggg

SEQ ID NO: 387191 - DNA, 580 bp, Oryza sativa
ttgatgaattataggggaggtagatatattaataaaagtttagggaaatataaatttcccaatacatcgccttaactacaacttagagacatacataaaaccatccttttggaaggtaaaggtagcaaacttcaggatacaatcgtgcagtagaaatagacgaaatcgacaggagctgctgcgttgctgcgacgatttcatccacagggctctcctaacgtgcactgacaaaccggcgatccttctgttgcctccacagacacggacacatcgcgtcatccctgcagaccagagtcgcatttgtggctggcgctcaacccgaacggcaaaatcaacatggttacaactgcaatcaatagtaacagaagaaacccccacaaacaacatcccattttcacgctagcactaggatggaggcgattcattgtatgtaatattatcaggatcaaacatgaggtggttgggaaggagaccttggggtgcttcatgaatcccccagggagatcaacacctaggcattgaattaagctcctgccttgttggatctgccgtgcccaatggccgccgctcggacgcgtgg

SEQ ID NO: 387192 - DNA, 853 bp, Oryza sativa
gctaaaaaataccgtacgcaaattaaaagtatgaaaatgaactatgatacttcaacattcaattttacaatcatgtaaatttgtgtctgatacacgatacatatgtatatacaatatgagcaaagagaagattgaaattctaaatttgtaggtgcgtgcatttttatatacactgaaatctaataacttatttgttaatctaggtcatcagaagtttgcatcaagcctcttaacctccaatgctatttcattacgccttgtgaatggaagtgtgaaagggggattatactgagcaatttctaccactgaatcatctttcacccgaaattgagagtccttttggagagtttcccgcaatctggattccctctggcttatgtcatcatctgtaaccagacctgaaaaggctgcaactgctacgattttggcgggcacctccttgatggtcacagaagggtcttttggcagtggcaggtctggaccatattttgatggcatcacaaaggacatcttccacttgttttcattagctgacttctttgttataactggtgtggtcatgtccatcttttcaccatcgggttcacccttccgagtaaaaacaggggttgtcatttccatttgctcagaagtcgtgttcttaccaaataagtaagacgccagcacgttgaatgactgggatgatccattgaaatcgaatccgcttcttccaggcattgtcgtctcagcgacatagtaggactccactcctctgatctcgtactccgcctacgcgcttgaggacgcggaaggggacggtctcgagatcgggcacagacatgagggcctcctcgagggtgcggcggacgcgtgg

SEQ ID NO: 387193 - DNA, 353 bp, Oryza sativa
aacgggaaaccatccattttttttattggcgacaaatttataagaaatgctctaaaaacatattttggggggatatagccggggctttgttttcacatatcctcacccaacgataattggagtacttttacaaaaaaacccgccggggggggggggaagagattattacatttgggttaaaagcagaggcccttgagatgggccataacccaactgggaaataaaaatttttagcgttttttattttggtttattatcaacctagcccaaaacaaaggtgtatactattattataggcagccggacccttgggcggacccctggggggacccgtgggcggaccctggggtctc

SEQ ID NO: 387194 - DNA, 602 bp, Oryza sativa
tacgaatttacattggaccacagaccacggttcaatacattgatgaaattgatagttgtggcagcactttctctacaagttaaaaacaaaaacaaaaagagaaaaaaaaagggggagtgtttttctggttctctattttctctttacaggtgttgcacgtaccctctctcagatcaaatgtagtcaggtagcagacactagaaaccagattagtagcacctctgtatatatatagtacattttaaggaaaaactagcaccaaggtctgatccggagtaggatctcctgtgctcatcaagagtcaacacagctcatcatctgcttggagtttttgaagtgctttcttcgcataaatagttattgcagcggtagaaactgcagcaactgagaagccaaggccgttgtaaattatctgatctaccgacaagaatgaaccttgggtagtagctacggctaggctttggagaagtttcccactgtatattgcaaggaaggtttcatgtaccgttccagccattgaaccagcaatatatggcccatacttgacatttgtagccacagaggcatagttaaaaactagcggacgcgtggcggacgcgtgg

SEQ ID NO: 387195 - DNA, 546 bp, Oryza sativa
  unsure (1)..(546): unsure at all n locations
nnnnnnnnnnnnnnnnnnnnnnnaactaaaattagcatcactttactcaactgaactgaagatgcgattcgcgatacaaacagtacagaatacagagcttattttgcattctgcaacacattctcagtccagataagttctatcacatctcaacgactaatgcgaaactaacaaaatttgccagacgaaaaatgtggactaaaagtacattggtgtcacgagtgtaccagcacgcaagacaaacgcttcgaccattcggggatatatacatgtacacgcgctggttatagccgtcgcactgatagtcaaggaacgagttagcctattgcacatgaaaatctttgcacattgttcatacacatgtgatggtccaagtgattgcttgtttgaaatctgcttgaactgtatccagaagtggcactgaaaaagagacaccactggctgattgctcggtagcacactaattaacactnttggcctctgaccatcaaaattgctaaggggaaaccaccattttgcccttctcaaaggaacatatgatactat

SEQ ID NO: 387196 - DNA, 954 bp, Oryza sativa
  unsure (1)..(954): unsure at all n locations
nnnnnnnnnnnnnnnnnnnnnnnnnnnaactttccagtctcatagtcataggctattctgcataactgcattataaagcacaaaaggttatcactctccaagtttccttttgtttactcagatattcagtgcaacacaacgcctgttgcaattccgtctcagattgttacatgcatcaaaacagggagcatcaatataaggatgataccatgtcccaaaattcaaaaatgatttccaaaattcagctaaacctcacagaggcacgagcattacaggcgacggagtacttattaccgaagtaacaaattggcatgagcatagcagctggcaaaatcccgaacaaaaaagacaacttgttatagtcattctcgtatctaaaccgcgtacagtggttttgtggtgaaacttggaatcggttaaaagcaatcatttatcgtccttgacctcattggattcctggttctggcttgcatcttcagtcggtgaattaagaccctcttcgttgtcaacagaagcatgaagaaatcgacgcgaacgtgcttgctgttgagtaggctgcaattttggtcggagtgcttcaagcggccctttaggtttttgagggtgtcctccttgcttccccaaagcccaatcagcagaatcaaagtaagctcgctcatgatccttggctataagcgctggctttctgggaactattccaccatactttttctttattgctgcttcctcttcctgaggtgaaggcatcacctcttttttcattctggttggcaatttctactttctcatcggaaccatctacttcgggcctcacttgacctgttgtatcatcagatggcttccccgacatactgtatatgtttcaacaagctgggttcgagacgaggtggggaggagcgcgtggaggtggagtggagnaggaggagagggaatggancgaanaggcaaaatgat

SEQ ID NO: 387197 - DNA, 799 bp, Oryza sativa
gaaaatcaaccaaagatgaggataaacaatatttaatgcactcggaatgaaaagactaatcaattaattaagcacgtacaaacacggcgctcaataattgccagtagcgttttaatttgcaggtagatctctcttctctacgccttgacgaagacggtgtactcgacgatggtctcgccggagttggcgccggagtcgacggtgcgggcctcgacgtagcccctcgccatgcggaacttgccggagccgccgacgatgctcatctccctcaccgccgagaagcacctcgttccggccgacgatggcgagggtgctccccttgtggtcgccggcggtgaacacgaagttcatgttcatgaggaggccgaacgtcttctggtcggcgaacgtgtagctcccctgggcgcgccccacctccgacgacgacgacgccgcgtcggtcgtcagcgggtcgtcgatggccaccacggcgccgaagaaggtggaggagccgttcgtcgacgccgcctgcgccaccctgatcgccgtcggcttcgtcccgcccaccacgtcgtggaagtacaccttgaacttggtcatccccgccgcgccgtcgtccgccgcccgcgccaccgccgccgccgcgcacagaagcacggcaagaacgaggaaagccggtgacgccgccatggccggagctgagcaagatgaggaggagggaggaggtagctagagctagtgagagatcgagtacttatgaagcaagaaatggagattggagagtggttggtgtaggagatgatgaaattcagtgagatag

SEQ ID NO: 387198 - DNA, 665 bp, Oryza sativa
tactaatcaatacacggaggagtttctttgagacaaagcaacaaattgaaggtgtgatatatacattctaacaacaaaacaacaagaatttggaactactaatgaacaatcgacatagatctacttcgattttgcagtaaatcgagggctaactcatcttcttgaactccggtgttcgccgccaatgccgtcaccagttgatcaccgagatgctctggactggaagagctcgagccgacccttggcatccgggagcagcgcgtcgacgcgcaggtcctgcaccatgtgtggctgcttggacgcccagaggagcacggcgagaactccggcctgcgcgagctcctcgttctccgggacgtgcagcgcaatgtagcagagcagtatgagcgcctcgatctgcacctggtcacccaggtagacgagctggacgaggtgccgcgcgccgccgccgtcgacgatggccttgcagtggctcacgtgcaggtggttctcggtgcacgcgaacttggtgagcgcgaccacggcctccttggtgaccggcagctcgcgctcgtcgagcagctccaccagcgggcggaccacgcgggtctcgctcgccgtgaacgtgcgcgacaggcagccgagggaggtgatgcacgggcgcagcaggtcgtccggacgcgtgg

SEQ ID NO: 387199 - DNA, 439 bp, Oryza sativa
ccgcgaacgcacaagggaggtgcccgtcaatatattagagaatattgctttaattattgatctcgttacaacttaatatctgaagagatcatctcaaatctctatttacagtatatatcaattgcttgatttaggtagttagtcacttgtgcttctggatcatttccctaacctcatccatcacaagccatgctttatggcctcctatcacttccgctgcccattctccatccttccataactggatagtgggcattttagttatattccctcttttcaccacagtctgtggaactttgttgacatcgacaaagtagaacctgactcctggaaattctcctgctatcttctccagtctgggcttcagatatatgcatttccgacaccaactagccatccagtcgatgatgatgggctgcttgttctcgcggacgcgtgg

SEQ ID NO: 387200 - DNA, 315 bp, Oryza sativa
  unsure (1)..(315): unsure at all n locations
nnnnnnnnnnnnnnnnnnnnnnnnnnnnnncgggggatgaaagtgcaaagatgaattattattgataaaaactgatcataaaacaagttagcagagaggaatgaattaattcacacaaatgatgtgacggttacatgttggtcaaggatttattctggataaaccatacagccttgaaaattaaattccctctatatatttgacaccgtagcaaaaattgtcaaatatgccgcataccactattgggcactcttcctgccggtttaagggcttctcactggattgaaatatgatagcatggcttccgacgcgtgg

SEQ ID NO: 387201 - DNA, 877 bp, Oryza sativa
gttgtttgttcaaacggttgaattgaaggatgaccagggttcagtggttctcatgtattcttggtagacatcatcccaagttaaaacacaaaaaaaaagagaatccggacgacttacaattaaacgagaaatcgtactgacatcatcccaagttaaaacacaaaaaaagagaatccggacgacttacaattaaacgagaaatcgtactgaaaatcatgtgccgaaacagcgtaacattttctttgcctcaaggcgaacaatatacactgggaatcccacataactatctgcatacatctgaaggacaggaatagcacaaaatccacctgtaagtgtgattaatctactcttccttgaggcgtttctcagtctcctccaatgccttaatatccttgttgtacttgcaaatacggaaaatgcaccagtaaaggaggcatgctgaaacacaaagaatgacattcctctgggccttgaagatggatttctcaaagcggatacgctcgtcagcggtgcaaatctcggaggtgcacatcaacctgtgctcgttcttccagtagatatcgaggagctggaaggccgcgaaggggagtatcccggcgaatggctggaggagcatcgaggtgagcccgacgatctgcttccgcacggcgcggggcgccgggagcgtgagcatcacggccaccgccgcctccgccgccaccacgcacgccaggatcatccactgcagcgccatcgtcccgtcgctttcgcggtccctcccaccctctctcgaaccctctagaaccttctcgacgacgcggctgggggaagaagaagaagaggaagaagcagcctcggtctctccgatctcgtggacgcgtttctagatgggtgcgaa

SEQ ID NO: 387202 - DNA, 718 bp, Oryza sativa
gccctcagacttgatcctttaaagcgacagcctttgttttttttttttaactacaacatttttggagttctctagaatatttttagtccaaacaagaatttacatgtacaaaatactacatgtacgactatattaatcacataaatcgactgaacaaatttacaccgacacgtatcaacctcatctaatgaacacatagcaacttgccctcaaaaaaaacacacacacacatacaacttgagtaccagtgagcttacttcaggagcttggattcgatctcctccaatgtaagtcctttagtctctggaacttttaggatgacaaacacaagggagagcaacgatatggctccaaatagaaggaaaatattggctggtccaaggaattcctgcaagggtgaaaaggcaaatgtcaccagtgcatttgagccgaaatttgtaagtactgcaaggctgatcccacgtcctcttgttcggagtgggaagatctcagaaaccattagccaacttattggaccaaacgatacctggtaagaaccgacatacagaagtaaagcaccaacagcgacaaaagggaagctgttcagaatcttgtagtaagctgctaataagaacagtgaaacagctattccaccaatgcctcctataagtagtggacgcccccccgcgtccgcgaacgcgtggcggacgcgtgggcggacgcgtgggcggacgcgtgg

SEQ ID NO: 387203 - DNA, 523 bp, Oryza sativa
taaactaggaagcagagctcccccaatttcattaagaaaaatgagagctacaaaagtctttacatgctacttaaagcagtctaataataaaattttgtactcaacacataacatacttgcccacaatctacagccgaaaagaattaatggtccctctagatcgatatactgtatggtaaatcatttgcttcatcatccttcttgtaaaagatgtggaaaaccagaagaggatgtatatatatatatattcctatgcatgctttcactcatcatcaagacctggtatgtacaataagttgacgtcgaacataactgggctgcttggagccactcttggccttccaggagctgaagtaaggcccttcggaaatgctagcgggccaggtatgtataatcgccgtagtcctccaaccttcattgacaatatcccttcatcaagtccctttatcacctgtcctgaaccaacacggaatatgtagggctgccccttttccagagaactgtcaaatatctgtccattcgg

SEQ ID NO: 387204 - DNA, 810 bp, Oryza sativa
  unsure (1)..(810): unsure at all n locations
nnnnnnnnnnnnnnnnnnnnaaactaggaagcagagctcccccaatttcattaagaaaaatgagagctacaaaagtctttacatgctacttaaagcagtctaataataaaattttgtactcaacacataacatacttgcccacaatctacagccgaaaagaattaatggtccctctagatcgatatactgtatggtaaatcatttgcttcatcatccttcttgtaaaagatgtggaaaaccagaagaggatgtatatatatatatattcctatgcatgctttcactcatcatcaagacctggtatgtacaataagttggacgtcggaacataactggggctgcttggagccactcttgggccttccaggagctgaagtaaggcccttcggaaatgctagctgttcagatcaagaaaaacacgaaaaatcaaattatcaccctcctttcaaatctctgtggctaagaggggaaaaatgatgccatagcaatggctgcaattgtctggccccaaatttaccacatctttcattttctcttgcataatatttgttgacattggggagtttaggctacttaccgggccaggtagtataatcgccgtagtcctccaaccttccatgacaatatcccttcatcaagtccctttatcacctaatgtttaccaccacaaatgggatgaaagaaaattgaattgtttttaaaggcatttaggttagaaggcgcataaatgngttttccagagggtagtttgggtaccggatagtgnaccaaacattttcctggcaaaattacatatgggggaatccagg

SEQ ID NO: 387205 - DNA, 461 bp, Oryza sativa
gtacccttcccaagggaccagtggtatttggtcctgaactaatattcaaaaccttggtccgtaccctttaacatttaagttttaaatattaattcaaattgttctgggctggtataccgatagccagtcgatggcttaggatcggtaagtaccagtaaccagccgagattttgattcattgtacaaacacgatcaaatatataaactgtatatgactgtaaattgtatatttacagtcatctacagttcatatatttgatcagtttgtaattttattactcacatttcagtggtaatatttcagaacacaggctaccaagtaccaacaggaatatgtagggaaaaaaaataaatacctgtcctgaaccaacacggaatatgtagggctgccccttttccagagaactgtcaaatatctgtccattcggtaccatggcaacataatttgcagcaacctaaat

SEQ ID NO: 387206 - DNA, 868 bp, Oryza sativa
tttttttttttttttaactgggtagtttgcttttagttttatgaatgaatacactacaaacagctaattacattgaccaacctaatgaggtttttgactgagcagctaaatcatcacagcaaataggcagtacgcagagcgtcacaaaagtaaacccaacgctaagctattaccatatagatacaactgcctttcaaaatattctggacaaccaacgagtaccttgtcgacaacctaccacctacatgctctgaaaatgctgctgatcgccgatatcatcatattccgcaaaagttgcgtgagccccatctccaacagatgcatcatcctctgtgacggcaaacccaggtccaatcacatcgacgctacaagatgagcttagcctgtcgcctggatggacaccaagatgtttcctcacattcatttcaggcacgtcagtaaggactgcagggagaatgttcaccagctggggattacttgcagatggtgttgaggctataagcctcattagtgtttccctagcgcttctctcaaccaaagattctgtttctggaatcaggggcttcaagctagggagcagggtaacagtcgcagacatagaaggcccgcaactcaccaggtaagcctggccagaggaacacacatcaatgaccgggacatgcacaatggggtcagacatcaatggtgtgaatgttggaacttgtgaaccatgcaaggatacaagtggtgaagtaggaagcggcaggtgaagtaaaggatcacgcagtatcgatggaagattaagtgacgggagatcagttgtatccatctttgcagaaactgttgaagtcggcggctgatcatttgatagcagagaacggacgcgtgg

SEQ ID NO: 387207 - DNA, 948 bp, Oryza sativa
  unsure (1)..(948): unsure at all n locations
nnnnnnnnnnnnnnnnnnnnnnnnnnnnnnnnnnnnnnnnnnnnnnnnntttttttttttttttttgggttcactgtacgcagtttcaggtacaaggtgaaaaatagcaccggagtcgctgtttcaggtacaagttttgagttcaggttggcatcaagccgcaagattttattctggagcacaacatctcggtgccccagcagatcggggcagaacaacagtcaaaccaaaaattcgagggaccccccctctagttcacatttgaattgttagaatctgcataggttgcctagttcgcgtgagcaaacttgatgcccttctcaatcgaagacttgagctcacccttcaggttctccagaccctccttctcaaactcggaaagctggcccagcccaagtacttcctccactccgttcttgccaagccttacctttgaggcgaagaatggcagctctgttactgttgattgcacaaaagagcactctacaacatcaggaactccattaagccccttcaagcacgcatctgcaaataccgcaccagcatatgccatagacaatgttgcagaaccctttccagcctttgcttcaacaacttccgtcccaccatcttgtgtcctcttggtcagagccttaatgtcctcatgcgacaatgcattacttgcaggggttgcctgcgagaacagtggcaggatagtaataccagcatggccaccaaccacagggacattcacttcagtaactggcacattagcctttccagcatagaaagttttagcgcgcacaacatcaagcgtgggcacaccaaacaggttcttctcatcgtaagtaccagccttcttgaacacctccgctgcgatggggacagtcgagttgacagggctgctgatcatattgacaagagcctaaaaagcatacaatcaaaagattaacaattgcggacgcgtgg

SEQ ID NO: 387208 - DNA, 722 bp, Oryza sativa
gcgagaacagtggcaggatagtaataccagcatggccaccaaccacagggacattcacttcagtaactggcacattagcctttccagcatagaaagttttagcgcgcacaacatcaagcgtggtcacaccaaacagtttcttctcatcgtaagtaccagccttcttgaacacctccgctgcgatggggacagtcgagttgacagggttgctgatcatattgacaagagcgttggggcagtacttggagatggcagtgcagaggcccttaacaatgccggcgttgatgttgaagaggtcgtccctggtcatgccgggcttcctcggcacaccggccgggatgatcacgatgtccgaacccctccaacgcctccccgagctggtcatcccccatgaaccccttcacctgggccggggcgttgatgtgggagacgtcggcggcgacgccgggggtgccggcgatatcgtagagggagagggaggagacgagcgggttcagcttcatgaggagggagagcggctgcccgatgccgccggccgcgccgaggatggcgaccttccgctccggctggccggaggcggaggagtaagcgcggcggcggcggaggacctgcgaggcggatctcatcagcgacggcctcattgctgctctcctctgcggcgctcgagatctgactcggtggaggaggcgaagggcggagagagagaggaaaatgcaaagcgg

SEQ ID NO: 387209 - DNA, 798 bp, Oryza sativa
aagtagtcaagtgcgtagatatcaggtttaatttattgcaacggagatcaacaaccacagtacatgcgccctgctaggctgctacctgctagcgacttgactaactgcttctgtattatgtgcatatatatagcttgcagcgcagtttgcctatcggcacgatgacctctagcttcccggtacaaaaaccacacactttgtactgcctcatagcttagactacggttactcggggaggtacatatatatattagtagaagctaattaccataaactgatacttaattaagtgagtacctacttgcgtgcgaccaaataagtagcatatatatgcagtggcaactctattaagacagtactacagcatgtcagcatgacttcgtagctgctaattaatcttcaggtaccatgcacactagctactacattagctagctcttctttcacccgacgacgacgactcaggcggcaggcgcgcagtcatagtcgtcgtcatcgtcgtcgccgtctgtctcggccatcctaccccgcgcactgcagcacggtgcgccggcgtaaaccgcaaaggaggcaataatgccgccgtcttggtggacgagggggctggcctccgacaccggcgccatggaaattaagcaggaggggtatgctagctttagctcgctcaacactactgtggctgatggggctagcactctggaggctctaccgctctagctagtgcgctgtactctataccagctagctagctctgacgggtgggcggacgcgtgggcggacgcgtgggcggacgcgtgg

SEQ ID NO: 387210 - DNA, 673 bp, Oryza sativa
  unsure (1)..(673): unsure at all n locations
nnnnnnnnnnnnnnnnnnnnnnnnnnnnnnnnnnnnnnnnnnnnnnnnggcaaatttccgattttctctattcagctgtaatgagccatgacaataagaacatgactgtctacaaatgaggagaatataactcatcagtaaacacctaactgtgagtaatgactaattatataagaatcctatgaaagaaatgttccacaaacgaaagaagaatagaaaggtagtaaaaaacactatgatagtgttttcttcatcccctacagctgaacatcatgcactcccgataagctcattgatcagcatgttcatgttcatgttcatcgggactaatcgtgctttcgatgtttatcccaatttcacccctcaagaacttggagtaccagtgagcagagagcttcgggctgccttggcaaattggggtcctcaaaatcaacataatgcagggccgaatggcgaatggtatcctgctaacagctcaaacacatcaagaaatgaccacacaaagtaacccttcacattggctccattccttagtgcagctagagtgcttcccatgtagctactcaagtagtccactctatctgtgtcattgagtgaatcgtcgtccttaccgaaatgcccgaaacctaaaatatggtaaatagatgaacaaaaaaaaatagatcggtaaaga

SEQ ID NO: 387211 - DNA, 963 bp, Oryza sativa
cccttttttttttttttttttaggacaatccacacccagtaatccatattaataccacaatataagagtttgggagagggtgtttcatacgttttacaggctctgagacctcatacgggtaaatctccgacaacactccatctgcagctagaatcatgcaggcaaggctaaacgatgatgatgatgatgatggtggggatacgttttacaggaaacatggatatctttcttattaacaatagtatcgcaagggagcatcactgataggatgaatttgcgtcttgacttgagattcgcaggtgatcgatcatcagggccagggccttaatgagcccgctcccggaggacctcaaggtctacctcagttgggtcggttgcctggatctcgtagtggaatccatcaagttcttgcttgatgcgatccttggaggtggagtacagcatcttagcacggatccgggatgttgatggagaccaggcgatgaagaaaatcttgctcttttgcacattctccccagtaacaaagtcaaaatcatagagggcatatctgcagtcattttctgggagagatgccaggaaatcatcataactctcagttgttgccccggtcttctccacaacaacttgcttttgcttttcctcgattttgaagataacatagcgaaatgctttcttcatctgaagctcaaggaatgtgtccctgatgtcaggagcaacccccataccggaggatgcattggagtgggaacgcatgaacgccatggggatcggagccggaggaggaggaggagcgccgcgcctctgcttcgatcgcacgcagactccggagaagagaggaggactagactacttgaggaggaggcagatgattcggttgctgtgcgcgagttttatttttttttcttcctttttttttctctctttttttccttccccgccttcgcgagttgggcggcgcccacg

SEQ ID NO: 387212 - DNA, 419 bp, Oryza sativa
ggtgggggctgcctttttttttttttgctgacagataactccaggtaatagaattatggaaacattgctgtccagtacaatcaattactcccatgacaaagatcaagagaagtacattgattagttttttttctctcttactaaaggaaactaaacaacttaaatagatgagatgacagcagtgagagccaaagacgctttctcctcctccatcagtcgatcgcctatgggattacttggatctctgcctcatctttcggcgcttcctcttgagccgcctcatcctcttcttcttccacttggccctcaacgcggcggcgcgccgctcacctctgtccttcctctccctccctgacggcgagctccaaggtctggagaagaagcggctcggtacggacgcgtgggtcgacccggtcatt

SEQ ID NO: 387213 - DNA, 566 bp, Oryza sativa
  unsure (1)..(566): unsure at all n locations
ccaaatataaattatttatttaattttatttnttttttttaggagaaaccaaactcaaagttttattaattagaggtatgtattaaggaccagaaatttcctttgggaaggaaacaaaaaggggctgggatttacatgttcatatacactccatacaagatcttggatcatctgccctaccaaagtaccaaccttaagtgcacagttttgttttcactaacttaaaatccgaaaacctggcacttatagaacacctctggatacccatccatcgtccgattcttaaccctaaatcctgaacccgaaaccataaaagcgtcacacccctacataaaaaatgcttctgctatagctgcagattgatcatctcagctcatgagtgattcataactttgctaatcttgaagcataaaaaagagaggaggtgtcttgagccttcaagaaacacggagatttttgttccttgtggcacacagcttgggtgcagggagctttgagattcttgcagcggcagggggagggcgcgcgaaactttcacgaggcgtgcatctggtcgaggaggatga

SEQ ID NO: 387214 - DNA, 625 bp, Oryza sativa
gacggtggacaggctcttgtcgtcaataacttcatttacggtcgttgtttcaccttcatgttcttcaattgcaggtggagcaaggaatgtgaatggaggctggtaaatgccaggacaaaagctagcatacaaaccttgcccagtttcattttacaaggaagaattataatgtttacagctgccacacaaaagctgactatccttaccaacatacaggcgcgtggcaaagtttcaacacaaattgtagaccctcggaaaactccgtccagctctttgcaccgtgtatgatcgcccggacaaaagtcttcacatgtagtgtggccaccggagaacacatctggcaacgcacccatgacatcgaaggcctcctgcaagtcctcagatgagggtcatgtcttcgagccatgagagcacgtctttggagaatcctagcatctccttcatgttccccagcttttctttcatcataatctcccaagcttcgaggttaccaccacttgatccgtccttctcaccgaccttttgcgtgccagacgatttgcctttcttgaaaaattgctgcagctgctcaatcaaaccagtgtacaccagcatcggctggacaatggcaaagaggcctcttgcc

SEQ ID NO: 387215 - DNA, 746 bp, Oryza sativa
  unsure (1)..(746): unsure at all n locations
naacatatccagatttgtagtattataaaatgtttaatccaatactatattttnacatttnggaagtgagggagtaaatcatttctttcatgtccctggccgacctgatcagaatcgatcagangcatgcatcacangagagatgtcagtcaccttctcactcaaacaagatttcttcaagctttgtaacctgatcagattacatcataggagtaccctacataaatattgaatcatgagagagagagagagataggcaatgagtacccagtttcagatcagaactgaaattccaaatgacagaaattagtcactgtttcaggaagtctgcgtatattccaagggttgctgccccttttgcatgttcagcagcagtttgtcatttgacaatatgctttgctgattcgatgcattgccctctccagtaacaggagaggaaactgaacatacaaatatctagcttagctagctagctacactcgtatgggcaatggatgccaattgcatatgcctctctgcagcatctgcaccgaaaagcagaactgttcttctcatcctgtacatctccctgatcatccagcctgcagctacgtacgtgtttgtcactgaacaagtattgatcgctgcatcatctgaggaagctccatttctgaattctgatttgttctccgtgtgtcatgtgccatctgacgatgaggcgacctgccctcccttccagacaattggagcgatcgccggacgcgtgg

SEQ ID NO: 387216 - DNA, 519 bp, Oryza sativa
  unsure (1)..(519): unsure at all n locations
nnnnnnnnnnnnnnnnnnnnnnnnnnggttcctcgtatgcgtaccttcttataactccgtaactgaaatcgaacaccataaagaaaactggctgcagtagtagaccagtagttcttcacagcatctcaagtatctaccctttatcatggacatccagcttttataattactaataatcagttataatcacaaaggtcattcgcggtaaattacccatcccgaacactaatcgtacaagcacgtattattatttcctctgatcgatcgtggctggcggcgcacgcgcgatgctagaactcctcgacgatgatgccgcccctgacgacctcgtaggcgtcacggctgcgcgacttcctgatgccggcggtgaagtgcaccttggcggcgtcggccctgacggcggtgaccctggcccagacgagcaccttggtcttgagcccctncaccttcgccagcctncccttctccagcgtcccgcacaccgtggcgtcgaaccgcagcacggagccgtccctgtag

SEQ ID NO: 387217 - DNA, 1160 bp, Oryza sativa
  unsure (1)..(1160): unsure at all n locations
nngacttaacaaccagacatatgaacagcatttaactaacaaattaaactagaaataacattaagtttccataggaggtttactggctggacggacatacatgtataaaccagttccaagttccagccattttgcaactaatgcaaaacctatatgagaaagacctatagaattaccgggttcacaggagacgcttccaccatggaagcagagggatgaccatggtgaactttaaaagcttaaggtgctctttctttaaacgctacaagtttattcttcagtactctcagtagtaccaattcgagccgtcattcttctgctggccctgcattgcgccggggtattcgacggcacctgacatgttgaaaccagagccgaacctgaactccgatgcgccattgatgtcgcccatctggttaccgaatggagtatcgtcgcggatgaagaactgctgctgtgccggggtggtctgctgcggttgctgcatcatgccattgacatcttcgaacacacctccgttgctgccgccgatgccacttccctgtccaaaaaagccttcttcaatctgtatccttgggttgactgcattaggcctctccatgatcgtggcattgtcgttgctaaggttcttgttggccacgaagttgttgtcgtacatgttcatcagctctgtaattgacctctggccatccatgggcaggccgaaatccagattgttcagagcctggttcggcgtgttgtaggttgccgggaagatggccggtggcgatggcttgttctccgtgctctgctggagtggatcattgtacttgcaagtgtattggtggctgttgcgcgcgttccggtcaaggaacccgtatccatagtcgctatgcgggcactggacattgtggcaggtgtagacacggttgttcagcatcagctcaggctccgcgccagacgcgctcctcttctggatgaactcgacatcggtggcctcctccttcatggacgccggcatgaggaacttgtcgttcagcatagccgcgccgaggttgaacgcggtcgggtcggcgacaacaacagccttctggttgccggcctcgtcgcccttgcaagtcgtcgacgacgtcgacgtcgtactcacttgagctggcgctgaacgcggacgcgtgggtcga

SEQ ID NO: 387218 - DNA, 402 bp, Oryza sativa
  unsure (1)..(402): unsure at all n locations
nnnnnnnnnnnnnnnnnnnnnnntatagataatatcttattgggagtatattaatcgatgtttcaactcacatacatcttgtttctaaaattgtccatttcaatcaaagtaaaaaaataagtttgctatacatttattattgaaacgctcagttaggaaaaaaccaaactagacataaatgagtaaaacattacgacaagttttttcttttaatggtatgcaaacttaaatgtaagctagatttccagcacctcggtgcaataatccagagagtgccatgatgtaaaaataacttggccagcactatctcttaggatcattccaattcctcaaactccgatgcgccgtcattcttctgctggccctgcattgccgccggggtattcgacggcacctgacatg

SEQ ID NO: 387219 - DNA, 568 bp, Oryza sativa
aaacagccaaatccggacagtagttttctccacaagttatcgtagtgtgactgtatgaagtatcagactatcagtggcagaaacataattatcgttttgataattagcgattcctttagggagagaacaaaaatacagggcgccatacaattctactactcagtgcaatacaattcattgcatcttcttcctgacttcctgtagaacagaaactaccagcatttttttagctattaccatacatctcagttttttatcgatgtaaaacttctcctgaatcagtaatgggctgcaataattatctcccatataacccaacaacaaacatgtccaatcgaagctacaaattggaatgagctaaaatattaaactcattccttgtggtctctgaccttctttctcttccatttgagaaagatttgtaaagagagaccagaaaagaccatcacaacacttccccattgcttcaaggagagtgggttaccactgatgacggaggagatgacaatgctcatgaacttgcgggtggtggtgatggtagtgttagtaagagacgcaaatcggctgc

SEQ ID NO: 387220 - DNA, 1036 bp, Oryza sativa
tttttttttttttttttggtattgtaagtgttactgtatttgtatacaaacttgaacttggaatagtttgactttgaccaaagtcaaaacgacttataatatgtaatggaaatagtgcatagttaaaagttgctatattttaggatgaatgtagtactaagttacatgtaaattccacgctcatttcacccgaggatctgatgatctttgctaacagctgcagtgcaaatacgttgaagactccaagaccattgcgacaaggcagatttttcagattctgtcccatcaggggaaaaaaagttcagaggacatgaaaaaattgtaccataaattaaggatggtttgaacaatactttgaacttcgaagtaacacgatgaacatgaaggaaacagcatccttttttgactgaactcttaaaaggaccactgaaccgctgttttgaggaggcgctacacaagctaactcttcgttgtgtggaacatcaaagacgaccttagagctcactattgctagcaccaccggttgtctttccattgacggcgataagctccgtgtcaaagattagtgttgctccacctggaatcttcggtggggagcctctctccccataacccatctttgcaggtatctttagcttcctcttttcaccgacacacatacctagtaacccttggtcccaaccttttatcacttggccgtttccaagagtaaattcaaaggggtcacctctgtcatagctagaatcaaacactgatccatcagtgagtgacccacgataatgcactttgattttgtctcctttgtgagcttgcagggtgcatgactctggcttgtacttcacaccgatctgaagctccgtgacatctccggacttcttggccgaagcggtcaggatgagggccgccgcgacaacgacggcggcggcgacggcgaagcggacgagccgccgctgctgtgacgcttccccattcgcttctccagtagccgcgtgggtccggccagtaagtgccgggcccgtgccggcaggcgtaccag

SEQ ID NO: 387221 - DNA, 660 bp, Oryza sativa
tttttttttttttttgagttgattcgatataaacggtgcttctgcatttgcctttgcattgtacaacatgtaacagcttttatgtttgtacaaaccaatgttcctagacagtatggagaggtacaacaacgagttacagtcaaggtgtggctacccgttaattcataaaaagcaatggtacagggcagctgacataaattaaggtgtgtatcatgcccaaatcaacttcgcgctttactgaagcgaaagaacaacggggcaccagaagcacatccatctcactgttgacgaaatcagattcaccaaatcaggtggaacattgcgcttttatgggaaccagcgagaggaaacatgcatctagcaagaaaaactagggctacttgaacagtcagtcttcaaataaagtggagagcaccaggccttgcacaaaggttgctctgtcagtggcttgtttccgcttttgttccctttcctcactcgtgagcgatgagtcgatccttgattcccatggctgagcaggagtatccttatgaattgatgtatcatcacgaaataggaactggtgcttttgatcgttcctctgaatccaatgttgagaagcccaggccaaacgaagaaagcagaggatcagcagaaattagtttgtggcagctcgtgcca

SEQ ID NO: 387222 - DNA, 515 bp, Oryza sativa
ataagaaccgtcagagtgagtgaccactgcaactttaacaaaactcaaacgttaaggtttcactttggctgctgacaagacagggataacttctgttatgggatttgatggtgtttggccaaaatatgaagggtgatctcagctcactaattgaatgtaatgtaatgaaatagaatcttgtttattgtgaccactatcgctttcacgatgactcgtcgctagtaacaactccacctaatagtgatgtgacgctcgtttactcggagccttctttttggtgaagctggacgccaacagcactttgccgtccagaacgtctggagggctttcaattcgtaagctgaggcttctcgcgggctgatgctaatcaacccaatcaaaaatgtggcccaagcagggccaccaaaatagccgaggccgatcttgtccccattaggtcttcaggtcatcagacattgccgacggtatacagtgtgttgtcagaatgtcctgtgtcgcagccttcgcagtttttg

SEQ ID NO: 387223 - DNA, 857 bp, Oryza sativa
  unsure (1)..(857): unsure at all n locations
ntttttttttgcaaaaggaatgtcaaacttgacatcaaattgtaggaccaacggccctctgaggagcatcgtgacaatagggagtatcgtgataatccaccctctgggaagtgacttttcatggatgccgctctctcaagtggtacttcatgaatatcgctgtgcacaagatgtaaaaagatgatcagtaatgcaacattattgcattaatgcaatgagaccatcgaataatggaatcgatacaccgatttatcagtacacccattctcacacaataatttagagacaattccggagttctggaaacatggtaatttcgcttccaccagacaaaacgcaggacacgataagagctatacacaacgggctctcagattataggcctccaaagaggctataagggtcatccgtgctgtgcaccgcagcaaggactgcagcaaagcacatcttgatgcaaaatatgttgacggcatccgcttctgccacctccaccagaccaccagccggatgacatcctcatcagcttattagctgtccatccaccttcctccctgcttcctctcgcgcccctaactctggccatgatgtaaggtttacctagccaatgttacctacacatacagagtaacagagagcagcaactagattgctggttttcccgacatcaactcagttgcgaatatgctaagcccgagttggtgtgcagggtatgcctcaagatactgtccggccatagcatatcgaagcaatgtaaagattcttggcccatttctcccttcacatggttgcttggaaaagcagatgttctaagagtttcttgtgtctcggccatcaattttctcttgggnatactcaag

SEQ ID NO: 387224 - DNA, 749 bp, Oryza sativa
tttgtggtgcaaactagagtaaccttgcattctaatcgttcaaaaaacgcttctcatcccgtggaaattgtattctgagagaacaaaatcattgtaaaatgaaaactatgatcacatgcagtagtatcacaaaagttgcatgccaacaactacaaatgctacaaaagaatggaaatttacacatttctaatgtctcaataatacctacaactactcagccaggccttcaacgaagatcgatggcaacgctggatcgataatcaggtccttgccttctgtttatctaggtataacattaagaatccttccaggcacataaattctcttcctgatgcccttcccagtcaaatatttggagagtttctcgtcggaggctgctatttggaatgcatcatcctcagagcactctttgtcgacaagaattgtaccccctggtcttcccaattggatttgcactggaagcacgagctttgattctttcaagtactcactttttccctctggaaattgctcgtgggccaatgatcctgagttcccaaggcgaaaccaaagctcctcagccatgtgtggtgcaaaaggcgaaagcaacagaataaaggattcaataactgactttggttgggtgtcccacttgtatgcagcattcacaaattccatcattgcagaaattgcagtgttaaatcttgttccttggatcagctccgagttcttcacaaatgcattgcaagagtcacagaggaaattcaaga

SEQ ID NO: 387225 - DNA, 1393 bp, Oryza sativa
  unsure (1)..(1393): unsure at all n locations
nnnnnnnnnnnnnnnnnnnnnnagatcgaaaagcacggcatgatgatgatattgaaaaaagaaaaggcagggctagctgtttttaacaagagcagccaggccctcctcctgtaaataagacagtaaattacccccaatgggactgacaatagtagcactgcacttgagagtacatataagaagtgcagctcaatttgttcttcttttgctctctgccatactaattaacagcagcggattaggcagggtgatggtgattagattagctaattaatttgagacatgtagtaatatccctttgggacggcttagctaaaggtagtactccactttgctagtaagtcatgaaggcctcatcggtggccatgcctcctgagtgactggctagctggtgaagtaaagagggcggcgtgagctagtagcggccgttggcggcggcggcggcggcgccggaggaggggttgttcttggcggagtcgacgacgacatcggtcatggcgacatggtcggcctccttgcgcttgcgcgcctcgatgatctgctgcgtcgacttgtagtagatggcgtacaggatcagctgcgccaccgcgaacatcactcccagcccgttggggatcgtgatgtagaggtcgaagcggatgagggcgtaggcagtccagcagatgccgttgaccagtgacgccagggacaagaaaaggggcatgtactccacgctcttagtctggatcaccattttcatgacggagaggggggcggcgtacatgccggtgccgaagaggacgcagaggataccgacgatcatggagcgtcgctcgtgggtgtgggcgaggttgaggacgagggcggcgacggcggcgacgaaggcgacctcggcggcgaggaggaggagaacgcggcgccggacggcgccgagggagaaggcgaggaagagggcgatgtaggtgagctcgatggccatgccggtgccgttgatggtgatgaccagcatgctgtgcgggtgcaccgcggggaggccgtacagcacccacatcatgcagttgagcagcgtcgccacgtacggcaccgccgagtactgctccaccgaccccttcttccagatccgtatgaacgtcggcactggggagaggaagagcacgagggcggttccattgcctacgacgccgatggccgtgcggatggtgtccggcgagaccatggcggctggtcggcggcggcctccctcgcgaaaacgaaccgcgcgcggtggcctgcgtcgctcgcttgtcgccgaagtcgggagagacgacggcgcggcggagcgagtagagacgcggggcgggctctggatgcaactgcaagtgtagtagtatatgcaaccacagtagtggagtcgagacgcgatgagcgaacgagg

SEQ ID NO: 387226 - DNA, 519 bp, Oryza sativa
gggcaacaggaacagtaagatcttactcaggtttgacaagctgagctatgtgcacatgtggtgtatcatagggacttcacaagaaaaaatgtggaaactccaccaaataggtgcagcatgaaaaccatctacagtttggatgtaaatgattacagcttgtgaaaagtagatggtctgtttgctctcaaactgaccacggagggaaaaagattcaagcactaggaacaacatattgacgaacaaaaaggaagtaaaatctacaggtggccatcagtaaggtgattcatgggtgccagagaaacagactacaagagcaccttttccttcttctcaagtattggagggtcaacctcgattcccatattagcagcagtgcccgctataattcttatggccgagtcaatgcttttggagttaaaatctggcaacttctcttgagctattgtacgtacttgatctgctgttacttttccaaccttctctcgctgcggttcttttgaacctttctcgatacctgct

SEQ ID NO: 387227 - DNA, 375 bp, Oryza sativa
  unsure (1)..(375): unsure at all n locations
nngaggcagcggataaatgcaggtgacgattgaatcaattcagcatttcgaccaaatacagatacaaggtaaccgaacaggtaaaaatacacattttaacatgacctgttcatttcagacatgttccttggaactctctaatagcacacgtacaagtcaccaagagttagaaccaaatgtcgtgaacaattctttgaacacggtaactaattacataagaaatgcatctgttccccgcttacacaactcacagaaagcacatccatccataacggctcttcacgcggcaacaaccttgatgctgatgaatgtgcctgtgtgaccatcccaatcttattaatcctctgggtggtcaagtcctgnaatttacagtgg

SEQ ID NO: 387228 - DNA, 1928 bp, Oryza sativa
  unsure (1)..(1928): unsure at all n locations
nnnnnatgaaaataatttttttttgcctgcagaaatggttttttattagttcaacttgcatataatacaagatcatgctaggtacaacatcattatctacgtatacatatactattacattattgaagtaatatattgttataaataaaccatgacataaagtcacaatcaccaatcttcatattatcaccgttagaaggtacgctttggtgcttcatattatcaccttaattatcttaacttctaacacacaagaaccattttcttcttgttggactatacacttatcaatatgttgcaattgttgtgcgcgactcagggtcgcctgtaataacgcgtggggtttcatgcatcttgttcattacatgccggaccatatttcttagcttccaatccaacatatgtcgtcttgattgaatgcatcttgttggctatttgtttcatgttcatgcgatcacttggtaatttgcgcgtacaagaaagcgcaagttgtagcagagatatcaagcactggtggacagcattttccagtgtcatatttgtttgattggagtccatggacttttctgcgagtcgagcatcaatcacttgaaatatctggtgtggaaagttactctcgacaaagctgataatgtcgagtccgtctttgaacataggatcagtcggtctttttcctgttataagctccaggatcactatcccgaaactataaacatccccagaagtagatggatgaccacctcccgcgtactctggaggaatataccctatggtacccttaacaccgactgtactattcgaacctgttgatgtcgaccaagagtcgatataaaatcttgcaatgccaaaatctcccaaaagagcattcatgtcatcagctaaaagtatattgctgggtttcaaatcacaatggatagttgttcttccgcattcatggtgtaaatagtccagtgcatcggctatgttaacacatatgctaattgtttgtcttaaacccaaacgtccgggagctttcccaccctctttgtcatgtatccaagtgtccaagttgccattaggcatgtactcgtaaactaaagctttgaaaacgttgcccgtactgtccacggtcgagcatgcagttatgattggaagaagatttctatgttgaatgcttctgagagcttcacattccgatatgaagcttctttcggcacctcgcatctcaaggtcaaaaaccttcacggctacttccaacttacattccttcaacttacctctgtacaccgtaccatagcttcctttgccaataaggttagcctccgagaagtttcttgtggcttgagctagatcattatatgagactttaaggaaattctcaccaaaagattgcgaggatatatatttttctcttggcttcatcttctcaagaagtaagaagtagaccactaatatgagtgacatgaagccaaatatagggatcaatactctaatcaaatagtactgtgtttccctcccctgggaaacaacttggcatgggggcatacggagacccatcactccctccacatagccctatgttcccctggaccgaaacaacagtaggatttgcaaatattccagtcattggtatttttccttggagacgattgtatgaaaggtccagtttgctcatgactggtagatcatttagtgtagtcggaattgtgcccgacaagctgttatgggaaagattgagtacgcccaggctctttaggtcgccaaaagttactgggatattgccagtaaggaagttattgcccatttggatgtttgtcaggtctttacactggctcaaagtgccagggatctccccagtaagcttgttttctgataaacttagatttattagttgtttaaggtaactaagctctggaggtatgacaccttcgagattattatgacttaga

SEQ ID NO: 387229 - DNA, 620 bp, Oryza sativa
cagctgtaagtgtacacttgatttattgtttagttccatgtaccatgttctttttcctgttctccggaacacttggccacgctgatacatgagatgcaccactatctcttcctgcatgctatcgctttcagcgtgtttcttgtttcaaagaacaattcgtgtataaattggtcgcctttttcactgtcgtaataatgaaaaaaaaatagagaagaagttacaggttgtcgtgctcgatgacctgcgccgccctccactcctcgccggggttgacgaccaccggcaccagcatggacgccgtcccggtgcacaggaagtagtccttgccgaacttcctgtacatctcccccgggctgcacaggtacatgtcctcgtaccccatcctcaccaccctgaaccccagcccgctattctgatcaatggtggtgaatttggagggcgccgtgctgtagatgcgcttcttcctctcctccggcggggccgcgtacaccctgctcaccttcttcttgaggattgggtaaagggtggtcctccacggtccaaaccccctgccggggctccttgccggcggcgccgccgaaccatccgccgtcctcccgctttatggcctccgccggggt

SEQ ID NO: 387230 - DNA, 1450 bp, Oryza sativa
aaggaaacagtggcattatgtcagttgttgccgcaagcgggaacggcagaaaccatagttattagtcctggagatcttcagtaagaaaaatgagactaggatcagctcgcgaaccgctgcgccaagctggcacatgttaacaaagcggacagtggttcaaatcaggtagggaaacgaccgaggttaacgataaatcctagcatgaacggaactccggcattagaaggggctactgtaacatcttcacagcgatgatcagccagaaagatcagcattgcattatgtacatggtgtacagcagccacatataacttgttaccttctatacaaagccttgatatcctggcggatagcattagcctccaaaagttcatcttcagagtcatcaatatcaacttgattcagtttgaagtcttcagtagtgcagagctcactccattcaaaccatagctttgggataacttctttcttgaatgcagtttcatggaacttcacctctggagaatcagcagcaacaagcctgtacacaaacactttcttctgctgtccgggcctgaatgcacgtccaattgcttgacgggtgacagatgggttcaaatgaacatctagaatgatgcctcgagatgcaccaccaagggagattccctctccccgggcctggatggaaccaaacaaaacttttgcatcgccagagttgttaaactatccgatccatcgccacttctctgtggttggccctagtatcaccagatatcatgaaaatctccttccctacatgcccagcccagcctcttaaccaacaccctttccaaaaatttcatgggaagtatatattgactgaaggcaagcaacttctctcctgcagagttagcaagagaccagaatgttaaagaaaaacttggctttcaccccatctttaatgatgatagactcaatcaagctgtcaacagtggcatctgtcaagttgctcgccctatctgcagcatcaccctctgaaatttctgacaggcagggatgaatgtacaatgcagtcccccactgcacttcttttgaacttctcataggcttctatcttgtgaacaatttctttctgcttggtactgagtttcaaaaacacactaaaatctactaggccaggtagttcatctaagatatcacccttgtaatagtgaagcacatcttttgttaattctctaagacttctaataacatgggcttttctagtgaagttgtcatcgttcagcagggtgtcttccactgactcagtgaatgcactgtcatgaaccccttttaaactcctgatacctgatattgctacctgactcattatacgtctagcaataggacgggatgattccatcttgagaaacttagggcgcacaaggtccaagatgttaaacacttccgaaacgtggttctggaaaagtgtaccagacaggaccactttgcg

SEQ ID NO: 387231 - DNA, 941 bp, Oryza sativa
tttttgataataccaaacgggcaaaacttgcatatcaggaatagaagagcactttgttaaaaaccgagacgcttaataaatcatatcaattgtccaccttgcgcatgcacattatttgtcaatcaggtgctacagcaacatgaagccagctgctttggcctcaaggtcctaagagtgctgaaatttttcagagcttcacatgttttcaaactggagtatgtacaaaatgcctgaggcacggggctgcttatgatggtgctgattcagctccgtcatgaagagcacagcagacaactggtttgtgatgcgacgtgtaaaccctgattgcctctccggttgacatcgtccacaatctcgccgtagtgtcagaggaagcagttatcaaataagcaccatctactggggaatacgcagtcccaaaacccaacgctggggacctactaaagttttttccaatttgaagccatcaacattccaaatcttcacagtgtggtcagatgaggctgttgcaaggtacctgtgggggccacggaccccgggggaaaacaggcacttcagaatgtaaccatcatgtgcttgcaatttatggaggggttcaaagcaggtaattgtctgagtacccttaagcaagcgccagacgtaacatgtcccacggttatttgcagcaaccaccatactcccatcccacatgactgtcagggatcttacagcagtatcaacctctggcaccagctcacagctgcacgagttagcagccaaatcccacacacgtatgtttccgttctgatcaccagatattagctctttctgatttgggtgcagaaccacagtgttcacagcagcacgactttcatattctcgttgacaagtggcagtgcgcaaatcccagattctcacagtaccatcctcagaacctgaatacatccagttgccatcacaat

SEQ ID NO: 387232 - DNA, 980 bp, Oryza sativa
  unsure (1)..(980): unsure at all n locations
nnnnnnnnnnnnnnnnnnnnnnnnnnnnttaccgtagtctcaagacgtctagaatttattatttcctcagaagatacatgttctagttacagttaactttaggggctgatcaatcaacccccagtatatatatacactgaagagagacatacacatttcacagccatattcaggactcccttgctagaccaaaaaacaaaccttagatctgctctcagaattcagactaatgaactcccatgcagattgcgaagttgtaatgataggccgaacccttccaaaaccatctacaggatctgtgtacgatgattctaagtctgaaccatctagatctgcatcctatcctgtgggccggatcccatctgatgatctgaatcatatctctgcatgcgccatgcgtctgtgaatcgacgatgatgaaatcatgaaacttgcaaaagtttgcttcacacatgcagctgatctatcatatcatatcatatcgatctatactttcctctgctaatcatgctgttatagtataccatctatataactatacgcatatctatacatgtatatcatttcgatctatactgaattgctgatgacgtcgattcatacgtcgtcggaccagtcctgcagctcgccctcggagaagagagcctcgacgatgttgtcgatgagcgagtcgacgaaggcgctgcaacccagcgtgaacatctggccgatcctggtgcgcgcgctggacacccacgcgaacgggccggcgccggcgaccacggcgaggcacaccccggccgcctcctcgttctcctgcatgtccagcttcttgaacagcgagttccccgtcgtcaactccaccgccaccgccgtcgcgaacgcaacctgcatgcaaggttgacagagggaagaaacggttagtcatggacgggctaaggtggttgcgagcgngtttgtttaccatggggaggcggccggagatggttttgaagtcctgg

SEQ ID NO: 387233 - DNA, 1357 bp, Oryza sativa
tttagatccaatgtgccaaaaacttatatatggtagtaaaggagctgaatacatgaatcacgtgtgcaacatatttagctagtgctatttatagttcctccaatagttgaaaactcaaattaaactcaagaggacattatgaaacatggaaaccttatgagatggaaagcacacactcaaaattgcaagtactattcactaaaaaaagatatggatatactatttaatgcaaaggccatctatgaaactttggaagaacgatgcatcacaggtattgtttacaacagttgagctgtagtagaccacagatatagatcttcagtatatacttgccatctgtaccttctttttttctttgatctatgcacatggacaactaatccgatggcatgatcttcatggtaacggcctgcccacgtggatgccgcatccggacctgaaacgctggcaaagcacacaatatcctaaatgatccatcatcagcacctttcattactgctgcagtctaacctaatgaaatattgttgttagatggttctcccagtcattcaagtaggcacctcccaagaagcttatgggagctttcctgccataaaatcctgaaggccatgaacacatctattactgaagaactcagctccatctaccaaagcaagcatcacaccaagcttaccatttgcttttagagtccatgacatggattagcgatcaactctgtactggttgactggttcacattgagatgtcagaataccatcaccatccatgtttgctcactcatctgtcaatagcaagaggcctgcaacctttgtgaaatatcaaccaataccaaaacggtacaacattaccaccggtttttttgatcagcaattcagcaccataacaccaggcataatcgagcctttctcatgtgcatctttaattaaccatttatgttctgatcaaggagcatgagcaacttggtgatcaagaagcatgagcagcttactgcccaccaactttcttagccaagtgcattaccgagacaggaaaagaatactcttttttcttgtatgcagggagccaggggcatgcagatgcaggtggaagcatcgccagatttgtgtgttgtggtggcaggatgatagtgttgtcggtgcatggagaaacactgaagcatgtcttcctcaagccagagttctgcaccatcaggctgaccttctcgctaccaactgtcgcctctcacctaattttcagctagcttgctgacctgcgaatgaatctgctcccaatccctacacatcccccatggaaatagagagcatgccaccctgctggaagcaagcattcaacaaatcaagcttttgcggacgcgtgg

SEQ ID NO: 387234 - DNA, 768 bp, Oryza sativa
  unsure (1)..(768): unsure at all n locations
nnnnnnnnnnnnnnngagaataaacaatttctttttaatatttgttataatgatcaagtacaactttgaggggaccaagataactacaagattggtgaagaaaacatagtacacctaggataacaaaaaaaggaaaaaaaaaaggggaagcaatgatccatccctccttatcttttcaccattctcatcctaacaaaagaatgaattgaattgacaaaagaatctgaagctttaatctcttctcttttaaaccacaattgtaaaaaaattgtgagttagtagtcactgcagatctcagttcatggatcatcttcttcctccatcaccatcatgtacaaagttgccaaagaaataccccatacctttggttaaattcacaaggagagagaaccctggcttgaaagaataattggtgagtagatattacaacaaatcggtcaatatttcttgtacctttttatatatatctttttttctaatatcttccttaacctcctttgaatggactgactgactttatacaaaagctggaatggtttcctaagagaccattagctgagatcaggttattaggtgagcaggagagcctcagccagcgggggcgtcttaggctggagcttggcttgctgctgagaccaataggcctgagccgccaggaccctgtcgagcagctcctgtggcaccggctcgccacgccgctgctggggcgagatgctcgccgtgtgcacgagcgcccacgcgtccgcccacgcgtccgcggacgcgtgg

SEQ ID NO: 387235 - DNA, 648 bp, Oryza sativa
aggtcaagaattttgcacagcactgtaatatatttacttcgatgaatcagagacccgtcgtacacattttgggccagaaacacggcagatgtcagttaatactagatggcgtatatacagttgacattggagggcagaagaataacgtgtacggtacacacaaatctgcctctggtggttttttattggcaagacttttggagggggaaaggtgccatggtttggttcactttttagcctcttccgccaatcaccttgatataaacacgtttttttagcgggcgaatcccaccaacgcttcgaagcagttttgagcctctttcattcaccaattcaactggggcaaaaatcatttgaagaaggcggaatcctttcagcttggtttataggtaggaatagttgcaatgctggttataacattcattccttccaatacagttccaaagacaatgttctgtccatcaagctctgggcagggccctggtccagtggtaaccaagaattcaacattgtgataattaggattgaggctggatggaaataatttgtattcgttttgttccaaggcacattgatgaggggtgccaggctctttcttgcttttagttaaaatgccttttaaggtcaataaagtctttagaatttcct

SEQ ID NO: 387236 - DNA, 1343 bp, Oryza sativa
ttttttttttttttttattagaatttggcaatttgatgggaggcaaggccaactggttgagtaagtaaatgacctctgcccagtgtccagtaacagtctgtctgactgacgtgaactttagtatttacagcgtttatcaagactagatagcagacaccgtgatcaattaagcttaggtgaatatgtgacggaggagatctccagaatacgagaacgacttctccgtttcatccaggcaatggtccttctcctcccgggtccagctagaggcgacttcgttaagcttgttgcggacattctgcagcagctgggacagattgccctcccatttgtagaactccagctccttcttgttcagaatattctcagagaccttcttcccaatcattcggcctccagccgtatgagcaaaatacacattatagaaatggcagataaaagcttgggagtccttttcagccagctcttccagataggaagcatatgtagtgccgggagcagatggttctggaattgtgtgaccctgttccttgaaccattccagatccttcttcagttgttctgatctctccaacccagtattcctgaactcagcataccaggggacggcggcgcggtcgacgatggtctcgagcgtctcgaagacgagcttgctgtcgacgaggaagcggaggtagccgtccacggagggctcccacctggccaccggccgcgcctgcggctccttctccccttccttggcctggtccttggtgtgcagccgcatggccaccgccctcatctcctccacgaacggcttcccttcctcgccgctcgcgcgggcgccatctccgccgcagtcgccgccgccaccaccatcctcctgctactgctagcgctcccccacaacctccgcgccaccaccgccaccgcccgcgaaggcgaaggcgccccggcgtgcacggacacgccgccgccgccgctcttccttccgtgcaagaagggcaacgacgtcgccgcgagtgcgttgggggccgtgagcgacgctgccgcgggcgccatgagtcccgcccacctctctccctcttatagcggcgctaggggtctccgttccgtgcgggggaggaggaagcgtgaaggtgctcgacgatggcgacgggccgcgcgcggaggcggttggcgttggagtgcggcgttggtgttgcttctgcggagtgaggagtgcggcgtcggcggcggcggtggaggaggaggaggagtggggaattttctacggattaaatcggagaaaatcgattaaaaaaataatcgagctcgcgcttggtggtgggagtggattggcggacgcgtgggcggacgcgtgg

SEQ ID NO: 387237 - DNA, 545 bp, Oryza sativa
cagacaagtcggtcctctgtgagtttcttttatacgtcttcataatataatacagatattatctctcaagacaagtagtttgtctcacaattaagtactacatatgtcctgaaaatacaataaatacacaaccatggagtcatctaactcgaattacagatcacatagttatttcctcgtgcatcaacatattcatacaaacaaggaatgcatatgacttatcttggttcaggctctgttactgtcacatcatttagtgacatggccgtcgagtgcttggccgtggagtcggttacagggtatggttgggaatacatgcttgaaccaatattaatattgcccaacatttctgtgaaaaatgcaggtctcgatgcagctttagctgaaactgtagtgccgtcaagcatgatattgatcattcgcacagttggcctatccataagggtcctcttgggcacatacaagtccaacatgaatgcacctcaaaatctcatctagagaggaagaatcactcctcaaatatgggtcaaccatctccgtgatag

SEQ ID NO: 387238 - DNA, 747 bp, Oryza sativa
tgcagttcgcgcagaccgccgccttcttggagattcttcatgggcttgtaggtttggtgaggtctccagtctctgcaactcttccacaaattggatcgaggttgtttcttacctggggcatcctgtggagctttccagagacacattcacatatccttgttacttccttggtcataagctggtccatcactgagatcattagatattccttctttggcatgaaggaggcattcggatttgctccttcctggctcttatggctgaggtatagcacctttatggtattgtatcctactggtatcagcagtgaggtcggtttaatctacattgccttgccttacatgaaggcatcagagaaatactgccttaggatgcccaacaaatggaacttctcctttgatttcttctatgcatccatcctttctctcgccatctacgtgcccggatcgcctcacatgttcacctacatgcttgcccaacggaagaaggcattggcaaaggctaaggctgcataatggtgatgctcaagagctttcttgaatttgtcacgtgtggcttaaggatctgcctaaatagctcacatttgctactcttttagtacaagtctgtaggatgagggcaatgttgggaagcaactactatcttacactgcccatcatttgttgtaactgtagtcttctaccaagaattctagattttacctggttaaattattgaatgattgatccaaaatttaccagctaaaaa

SEQ ID NO: 387239 - DNA, 285 bp, Oryza sativa
  unsure (1)..(285): unsure at all n locations
angctcaagagctttcttgaatttttcatgtgtggcttaaggatctgcctaaatagctcatatttgctactcttttagtacaagtctgtagatgaggaaatgttggaaagaactactatcttaatcccagcatttgttgtaactgtagtaactgcccatcatttgttgtaactgtagtcttctaccaagaattgtatgatattttacctggttcaatcattcaatgatttaaccaggtattgtatcctactggtatcagcagtgaggtcggnttaatctacattg

SEQ ID NO: 387240 - DNA, 835 bp, Oryza sativa
aaccaggagattgcttgccttctaaaataaatttccacaaaaaaaaagagaaccaagatacatcttgccaaaaacaaaacgtaaccgtatatcccagcccaccaatggaaactcacggtaggatctagacaagaacaaaaccatatacattctacagtctaaatgtaaactgccctacaaactgtgatacggagatgcaccccgccaccagtggggggctctccaacaaatgctaagcccccagcaaaaaaaatatattagtggcccaaacagcatgacaagctagtgccctcaaattggagaaacttcccagtgtcacgcttgcacaatccaagccaccgaccgatgggccactaggaaaatgacttccggtgaagagactatccaagaaggctctatcaccggtttcaactctcgcaagtataaaattttgcgagcctaaaattttcctgcctaaatggcagactaaggctccaaaattgattgcctgtggtcgcgccaaatcacaagatggcccaccacttccacaacccggtgaaatggcaataatatcaaagaactttatgactaatcattgtgcatttgctttctccaacttctctttctcaatctcaactcttctttcctcagcatgttgagctatgccactagcaagggcctgataacgaaaatcaagagtttgcatgaggctctggaacctgataggatcagatgcttgcaagccttggacagtttcaacaaacaaaatgaacgggtcaacctcatctattggtgattgcagctcctcatcatcactgaaatcgtcatcagagcggacgcgtgggcggacgcgtgg

SEQ ID NO: 387241 - DNA, 671 bp, Oryza sativa
  unsure (1)..(671): unsure at all n locations
acctgggtgcaggattcggcnngagctcgtgccgaattcggcaccacgtaacagtctcgagtgtttttggtaatcacattttgcaaacattgtgtttcatattttgaacagcaaaattcgctgggcatcagcttaggaaatacagagacggatgaacagaacatagaggtgtacagaagaacagcgaccgacatcactgctggttagacgttcttgagcttcttcatcttggatggtggccatctacctttcttcctcagccgcctcttctggacaagcctcctgcgccgctgcctcagcttcttggccagcttcatcttcgccctctgctccatgatcatcttctgcttagtttcgagcggcattgtctcaatcgaaaccgtgggttttggctcctctggttgatctgtgccagcttcttctgcgccagcctctgccgaggcatggacagaaactagcctcttcttggtgaaagaagcattcagagggctctgcgaggagagattcttgcactggagccttggggcggggatggtggaggcgacattggcggaggcggggagagctctggcgcgaggcggggaggcggaggagcaggcgagcaaggagacggtcggggagaggagcagcgccatggccacgggcagtgtgggattcggccggacgcgtgg

SEQ ID NO: 387242 - DNA, 804 bp, Oryza sativa
  unsure (1)..(804): unsure at all n locations
tttntttttttttntttgtgtgatgtacagaggtttgtaaatactacatatatggaagaaaagttgtgcagaggtttgtagatacatatcgaagaaaaggattcatgtcggctctataaacaggcttgacttaatcatcgaaacactgttaacattgacataaacggttatagaaaggtgggaatttgggtggatcatctgcagcccagctctaatcttgagtctgcgctgatggaagtgttggtgcatagcttctgaaggtcaatgtagccgattatcgtgtcctcaaacacgacgtcctgcattttagcgtcatcgaaggttgatcctgacaagacggtgttcctgaagattgccccttggagatcggccttctcaaaattgacacggtctattactgcatttgtgaaatccgttcctttgaagcttgcccccacagcataagctttggacatcacaacttcagacatgtcggccccatcaaactttgaatcggacatcaaggctgcagctagagattttcctttcagattagttttctcgtttgtgtaatcgcaaaaccggagatcgagtggcttgtcatacaccccatttgcctgaccaattgtgttcccgacaaaagcacgctcgcatctgtttggctctgtggacagtggaggcaacctctggctggcggcaatcacggggctggacgaggacgcgacggctcaggccgcgaggacgccgcacgcaagcccgcccaccgccttgcgctcaccggcaaacagcaccgccgcctccggcccgccgccaccggacgcgtgg

SEQ ID NO: 387243 - DNA, 1227 bp, Oryza sativa
tttttttttttttttgcaacaacaacagaccatcattcatattcagccacggtttagctttaccgtggaaggagtacacacttacataatccataatgacttggaccaaagctactgatgctactggtcacactgctgattcagctttcagacaagcaagcaaaagcagcactacttaactggctggctagttgcagtagtggtagtgggattaatcacgcaaacctgaagcagctcagttgagctgagcggctttagcccataagcaataaactatagctagtgacttcactcagtgcgtgcgcttccgtttttatttatttagctaatcactattgataagtatcgcttgattttttttatatgtgattaatttagggaagctttttgcgccttgagttcttgatgtcttttgagttcgttcttagatggcgaggacgaggcccggcagcgacttgtgcgcgcggtcggcgcggcggctctgccacaggcacttgggcttggacggcggcggcggcggcgccgaagaggaggcgtggttggagttggaggaagaaatggcggcggtggtcttgggcggcggaggcggagaggcgggtgacggtgaggtcggtgttgaagtactccctgagctgggtgattaccccatcggggccgacggtccaggcgtgcacccagtagagctggcgggtgtcgtcggtgccctcggcgatgacggtggagccgaaggcgtcgacggagcgaggggagaagaggaaccttgactcgccgtggtcggcgccggtgaggaggcgcatcatgtgctggtgcgccggcggcccatggaaccaccactcgaggtccggcgcgagcagctcctgcgccctgcgcgcgtccccggagttgagcgcctcgtacagccgcagcaccaggaacttggcgtcctgctcctccggctgatcccttgcgccgtccagctctgccagctccgacaccgacgccgacgcctcgcgcgccgccgccgccgttccctgcctgtggttagccagctcctggcgcgagccccgcttaggctccgatcggcctccgctcctcccggtgtttgacacgaagtcgaggaagcgagctctagatcacgagatcgattggcgctcaggagagagagagagagagagagagagagagagagagaggaagagaagagatcgagggagagagagagagagagagagagagagagtaaaagac

SEQ ID NO: 387244 - DNA, 835 bp, Oryza sativa
cgcgccctcctttttttttttttaggctcaaaaaacaacgccttcattgctatgaattaagcaaaaggtccagccagataaatagaaatatgtacctccaaagttaaaaaagttagaaccctaaaattgttctttgacaaaaaaagaaaagaaagaaaaaggatatacaacaatgatactctggtacacaagttgcgctgtacagatctgagcttcccaagggtaaagcttattgccacctgactaacccaaacatgtcacaaaatggaggggaggccccgctttgagcgtaagatgcacaaataacaacagatgcaaagatcctttaggccagaggcagctgagaccaatggcttgtatttcactgaacttccgcaaatatgactcgagacaaaaacaacacgtcgtgacgctgttcttgttttgacttagtgcacaatcaggtagtttttatttgctcatatttttcacctatgctcccacctttctgcttctggaattcaatgtaacgtaaagtgcttgcaaagaaggcctctgtcgatggatcagctacagtgttctcactttgcttctctgtcctaatcaattcaatcaaatcctggattacagtgttcgtgatctctggaattcctttctcgaagaagtacaaatacttgttcaaaatttcgataaatagcgcgacagatccgctacttccccttgttacattagccatctgttgagcggcatttgcaattcttaaggcacgctttaaacaaaggaggaccctttcaccatccattattccgtcttggtcgtcacccacgcgtccgcccacgcgtccgcggacgcgtgg

SEQ ID NO: 387245 - DNA, 499 bp, Oryza sativa
gaaaataagctgaagccgctgttgttagcatttctgaaggtgatattaatttcatggtatatttgatcatcgatcgatacattttctatagatttgtgtccaccatggccacctccttgggcctgagcacctcgccgccttcgccgccgcctctgccgccgacgtcgacgacgcgggacacctcggcgttgtagacgtagaggcggcagacgaggaagaagaagacgaggttgacgcagttgaggacggcgaagaaggcgtagtagtggtcgagccgcgacgcgttgaggttgttctggatccacccgccgccgccgccatggcggcgcgtgacgtgcgccaccgtcgacagcagcaggctgctgaggaagttgccgacgccgaggctggtcatggcgtacgacgtgcccaggctcttcatcccctcgggcgcctggtcgtagaagaactcgatcttgccacctccaggacgcgtcggcgacgcccatgagcacgaact

SEQ ID NO: 387246 - DNA, 869 bp, Oryza sativa
  unsure (1)..(869): unsure at all n locations
ttttcgcaaagaaaactcaatattataaatctagctgcattaacaacattgatttcgcaaggtaaacaatatagcatggcaaaaaaagtctcacatggtaccactttaagcatgacaaaagtttacttcttgagcaagagcagaacaagaacagatcaagcttccattctctgcactgcaccaggaaccatctaggtagaaaaactacttcagcagcctcacataacaaccaccccaatgccaaacctgcttaagctgaggggatctcgacctcgccgtcggagatctcctgctgcaggtccttggggtccttgccgtccacggtgcagccgacgctgacgcaggtgccgaggatctccttgacggtgccggccatctccttggccatggacctgggcctcatgacccttgcgatctcgatgacgtcgtcgaggctgatgttgccgctgtgcttgatgttcttcaccttcttgcggtccctctcgggctccttgagcgccttgatgacgagcgccgcggcggaggggacgacggagaccttggcctgccggttctggacggtgagcttcacggtgacgcggaggcccttccagtccttggcggtctccttggcgatgtcctctccgatcttcttcggggagagaccgagcggcccgatcttgggggcgagcgacgacgccgcgccgacctcaccgccggtcacgcggacgaacacatccaccacctgggtcgggtcgagcttcggcggcatggctgtggtcgagggcgggtggtggaggcggcaacggcaacggtggtggcggcggcggcggcggcgcgtccgcccactggctggggtttgggaaggtagggtttcgagttntgnttgc

SEQ ID NO: 387247 - DNA, 791 bp, Oryza sativa
ttttgattaaattatgcaagtacttgaaactccattccagaggaccaaatggtaccaagttgcaatagtaacattgaggtctcaacaagatcactactaaagcatgacaaaaataggtcgaatcacatcgtctcgtaaggtacataagcagcattttggaacaaatgatcacttcagtagcacgagatggtaatgtcctcaaatatcaagccttttaagccgaagggatctcgacctcgccatcggagatctcctgctgcagatccttggggtccttgccgtcgacggtgcacccaacgctgacgcaggtcccaaggatctccttgacggtcccggccatctccttggccatggacctgttcctcatgatcctggcgatctcgatgacgtcgtcgaggctgatgtcacccctgtgcttgatgttcttgaccttcttcctgtcccgctcgggctccttgagggccttgatgacgagcgccgcggcggaggggacgacggacaccttcgcctgacggttctggacggtgagcttgacggtgacgcggaggcccttccagtccttggccgtctccttggcgatgtcctcaccgatcttcttgggggagagaccgagagggccgatcttgggggcaagggacgacgccgcgcccacctcgcctccggtcacgcggacgaacacatccaccacctgcgtcgggtcgagcttcggcggcatggcgagccctcggttgcaggtggcggcggcggcggctgggagtgggttcgcggggaggcgctacgggtgggggggg

SEQ ID NO: 387248 - DNA, 1194 bp, Oryza sativa
tttgtttttaaaggaaatctggtttatattaagcgacagtcacacagggacacaaaagggatcgagtcatatacataaaaagctatatacattatagactcgtatacaattacactgccacggtaatatctgaacaagaaaacatagccaggtagaccctggctccctggatctcaatgctgtcgtcgaaggattggccggttgaattgttgtacagggtgaaaaagacccacagatccgtgccaagctgcgtaaccgcaacggtgactgcgacctttttacgtggactcgtccctgcagtgtggaatatcacacgatcttttcccccgtaaagcagctcaatgtccctacatgttggctaaggccaacaagctgatgtgcacgagatccaaaagtctagcaatctaacctaagtggccagaatctgaagattcacaaagcaacacacgatgtcgaagcttttttctatcggagaacgaataggcttcgaccacactcggactcgggacggacgtgttctgttcagtgctgagcgctcagctcagtggacctcttgcgctcatggcggctagtgtcgacgtcatcgtcgtcgtctgtgtccttgccgaagagcttcacggtgtcctccaggctcttgcccttggtctccggcaggaagaagtacatgaacacccaccctgcggcggcgatggacgcgtacaggtagaagctcccggcgatggtgatggcgttggagagcgagaggaaggacatggtggtggcaccgctcatcagccggttcagccccgtcccgatggccgccgcctgcgcacgcagccgcaccgggtagatctccgacgtgtacacccacgcgacggggcccagccccgaggcgaacgacgccacgaacgacagcatcgcggcgatgcttatggcgcctagcgccttcgcctcgccctccggccgccggtccatcatgagcagggacgtggccagggtgaagaggaagatggccatgccgccgccgctggcgaggaggagcggcctccgtccgacgcggtcgaggaggagcgtcgcgatcgggatgaagaaggtcttgcaaacgcccaccgccatggacgcccccagcgagttctgtcttcgacttaatgccggcgcgctcgaacacccgcgggctgtacatccacgacgcagtcgacgccggtggcttgctgg

SEQ ID NO: 387249 - DNA, 587 bp, Oryza sativa
tgcgggcgccctgtcctttttttttttttttttttttggaataaaacccactgctgaatttcataccgctatcatctatattcttgttttctgatctccaacataggatcatccaggggaaatttagtacacaataatcgccagctaattatcataaaaactacccctttccagctgagtgaatcttgttcttgtaccatcacgtacatgtcttgctgacttgtagaaccctatagctccaatagccaaccttcatttttccatttccgatgtcttcccgacgtcctactcaagagccggtgccacctcggttgggttaccttcaaacacatcagagcctgatgattctgactcttccgggaactcctgtgtttggaccgattccttgtaggaaggagtttctctgaagtctgtcgctccttcgttatacgttgccacagcgaacccacctgccaaccaggccgaagaagaacgcccaacgcccacatgtactgcacgaaagaagcccagggcgtcccactggggcccctcccagaagtcgggcttctccgggtccggcagctcgggcatcggcgtcgtcaacacct

SEQ ID NO: 387250 - DNA, 1469 bp, Oryza sativa
catggaatagtagacttgtgaaaatggaggtgagcttgccaactaagaacatgcagagattttccacagattattctttactccgaaagactgaaacagtcggaatttacataatccagttcttagttccatataatatatacatctaattacatagacagtatcagtcatctggaatgcattctgggattcaacagtgcttcgtctttatttacaccattgagacgagccacgctttcaggcccagtttttccgcttagacctcagcagcatcagtttgtccctccacgttgcagcatctttgtatctctcttcaacagctgcaatgagcatgttccggatcaatccaaactcttgagcctcgacacatggctgcccatcaggtctgtcaagttctgtaaacaacaacccgtcagacatgccggctgctatcggccattcttgctggctcgactgatcttatgccatcactgtatgcaaggcttctatggacttgtataggaaccttgcagcgaacagcaatgtttatggcatctgaaggtcttagatcaaaggtgatactttctgtatggtcacctaccttcgtcagaaacagttcagcacagtatgcttcttgaattcttttatttatccgaaccagttttacctcataacccatcttatcaatcatctccttcacaacttgatatatggttggtcttgcaatgtggacattccgaatagcagccatcagaagtacgcttggcatttccaaaacaatgattggaagtaaagtttcacttccatcttcaatcctcaaaacaatagcaggttgtggtgcgctttctggaatatttctcccttgagaattattgtgcacacatctcaagtttttcccatctcgcatcttgattacatatccctctgccccacttctcacctcaactgcttctagcacagtagaattaacataatcttcatcactctcactaaagtttccagccatatatccattaccatcggacgacgagctgaagctaccgcaaacagtagcaaagttcttttgtgccggctgatagattggggaaatgagtctagtgatattcctgtatttacacacacaacccaggaatgcggtcccaagctgcccagacttggtcagtgagttgctgatcatcgtgacaggtagcttagcttgcatcactgcacgacacaggattggtccctccatcgccatcaatcttggattcgattccaatcgagggcggagtcaggtcgtctcgccccctctccaaaccagctcgcccgcctggaggtgcgcgcggcgcggcgcggcgcgatcgaggaggcaacgcgaacgccggcacgggggaagaagaggaggaggaggctgccgtcgacggcggcgcgcgcggcgcgagtaaggtgtgggtatatgatcttctcgacttctcccgggctccggctgtgcggatcggtgggggatgaac

SEQ ID NO: 387251 - DNA, 607 bp, Oryza sativa
  unsure (1)..(607): unsure at all n locations
ttatgagagatacagacttcaaatttgtgaaagttgacgcgattccttcttcaggttttagaacctgcaacatcgcgaaccatgtcagtacgacgtgctgaatttttctatacgtataatgtatacagtttacataacgcagtaacacaatttcctgatcttacacttctaaccgtctgattcctagttccaatcgatcaacatcgtaaggcaacagacaacactagtgattcaatcgatcaacagctcatcagaccttgtacagcatgccgatctcaactcgctgttgcagaggcatcccaagaaccggcagagccgaccggctgatcccatgcaagaactcatagaatccgagcatgagctttatcataccagccggcgtactcgccgacgtagaaccttatcttggcccggacctggacaaggcgggccaacctcgccggctccagttgcgccatctcttcctccggtgaccggcggccatcagtgtccatctggatgtgccattgcaggcagctcgtgacctgcgcggcgaggtcgtcgccgccctcgaggctgaggttgtcggcgtanccgtactgaacggtgcagccgtacaccccgtttg

SEQ ID NO: 387252 - DNA, 350 bp, Oryza sativa
atcgatccagggcagctattttctgcaactttgaacttgccaaatttcaatacaaaaacggatgagatggaagaccagtactgaaacaagcttgaaatcaggtttacattcgataattaaccactactagcatctagcaaggaaatgaccaacgacgacaacgacggttcatcatcctcctgttctcaggcagttgggctgatctgatcatcatatcgagatgtcggtcagtcacttcttcctggacttgcgctcggcccgccgtcgcgcgcggcgctgccggccgccggcgtcgtcgagctccgagtacttctcgtcgagttcctcgaaagatttcttcggacgcgtgg

SEQ ID NO: 387253 - DNA, 772 bp, Oryza sativa
tacgtggcactaccaccgaaaaagagattggtgtcggttttcccaaccggcaccgtgaaggcggcactaatgtgaaaattaaataggtgccagttcctgtgttggtttcgaaacgacatctaatgatcccaaaaaaataatgccgactcggctcgaatcaagctgatccgagcacatcaaggacatcattcatcaagaacacatcaacatcacattcatctagaacatcattaatcaagagcacatcaacatcatattcatcaagaagacatcaagaacgaacacatcaagaaccgtctccaccgccgccgccatcgccggatgaagagcgctgccgagggaagccaccgtcgcccgatgtagaggaggaggggcgagactcctctctcgccgccacccctccagttgctaggcgccaccgcatcccctccggccagatctggcagaggggacgacgccgccagagttgtcgggccgccgccgcatcccctcccgctggatggagcggacgggatggcggcgccgccacctcccttcctgccagatctggcataggggagggtgccgctgcaaaacccaagccgtcggaccacctccaccgcccctcccgctggatggagcggaggggagggcgttgccgccgcctcccctcccactgctgcggcctccctttctgtcgccggtccgcctccaccaagccaccaccgttgtgtggtggagagagatggagcgagagagagagagagctgagagaggtgacgcggacgcgtgg

SEQ ID NO: 387254 - DNA, 1133 bp, Oryza sativa
aggcaaactaaaggaggaattctctcccaattaccacctttaccaggtattcaaaaggagggaacctccaccaggtattcaaaaggagggagttccttcctcaattccgcattcccaccaaaattctcatatctcccaaccaaataaaacaactccccaacgattaatagcatcatccctctaaacttctaatccctccaaaaacctccaaccaaacaggccgtaaatggcatcctgggaagcatcaagagaaaaccaaaatacgtctgttccaacaaatatatatacagataccccatccaaaccggaagctcttgggctacttttcttaaaacaccagacacacatacagcgcatggaagcttcgtgtgatatcatgcactaccaaagacaaagcaacaggaagcgtgtttggaattacacagatgatccaggacctttaccctggcgcacatggtaaacaaattgtacttcatggtaggtcaatgcacagggtcactctgattctgaagttccagttctattaacccaacttgaccgccttgaatgtgtgccagctcgtcctttcatgagatcagctggaaggtcgtccctgctcagatctggggatgcatgcggtagtctaccctctttctcaatccaaaaagcccccgagacctgcttccaagtccctgatatcagctgctgtcctcggttcatcccaaggctcaggcttcctgcccctttcaagatccccaacaggtttgcccatgttggggctcataaaacctcttgatgctacccgggtttgctgtagcccttgctcaactgtgacccttgcccggaaattgttctttgaaggaggaatacggctgcagaatatctctagaaagttgttcagaacgcctctgttatacgggttagcccgtctatcgtagcgatacctgaagttctcataagttgtctggttggtgctcatcaaatagcaatggaagacagaaagaccaccaacaaaccatacacaaaggaagcagtagatgatcaaaacgattgaggctggtgtctttagcattgccttccaaactgacaaactctcagcatttctaatcttgattatgtacacccaacagaaagcaaatacgtcggacgcgtgg

SEQ ID NO: 387255 - DNA, 802 bp, Oryza sativa
ttttgtatattttcttagtacaagataccccatccaaaccggaagctcttgggcttacttttcttaaaacaccagacacacatacagcgcatggaagctttgtgtgacatcatgcactaccaaagacaaagcaacaggaagcgcgtttggaattacacagatgatccaggacctttaccctggcgcacatggtaaacaaattgtacttcatgggagtgcaatgcacaggggcactctgaatagcttcccaagcagcaattatttgcgcattcatactggccactgattctgaaggtccagttttattaacccaacttgaccgccttgaatgggtgccagcttggccttccatgagatcagctggaaggtcgtccctgctccagatctggggatgcatgccttaagtctaccttctttttcatccaaaaagcccccgagacctgcttccaagtccctaatatcagctgctgtcctcggttcatcccaaggcaccggcttcctgcccatttcaagatccccaacaggtttgcccatgttggggctcataaaacctcttgatgctacacgggtttgctgtagcccttgctcaactgtgacccttgcccgcaaattgttctttgaaggaggaatacggctgcagaatacctcacctcctccacctccacctccctctccacttgcgggttgggctccgccatcgccggaatcgaggccgcgagggtttcgagaagctgctcgggaatcgggggagacgaagacgagacgagacgagacacgattttccttttttttttcttatatt

SEQ ID NO: 387256 - DNA, 811 bp, Oryza sativa
acgtggatggtaatttttttactatacatattacacattcaatcttcaaaatatctcctcagataaaaggttacataggtaatatcaatcaatagattatctttttactgatgattgttacatcagcaacactgactacaaacgaaaaattacacatccatactctcatggataatcacaatgaataattattgtttagctatagcacagccaaatcaacgccggcggcatcaccacttgccggtgcagaatctcgtgtgaagcttgcagcgggttcagtcagaggaacgtctaagatgtaactgggatacaacttcactagattgctatgtgctttgcagtagtagaatttcatttacgatctagacactcaccagtagtgcctgccgatatccgtgctggatctgatatgtggcgtcctctcccaccacaggcgacgctgtggctcccagcatatggatggcccgctgaatatgttgcagcatatggatggcttccgccacccctccttcaccggctatgaagaagtgattggattcaatttcagatccccaactgccttgaaaaaaggttgtgggacgaaagaaagccgacgacatcacttaatcctccttctcttccgggggacggaggatggcgtccctaccgacgaccaccaggccaccaccggaaatcgccgaggctaacataaatattcggatttttcctgtcgtcacatccttttcaccagcgatttttcgtcccgcgttatccgatttcttcccaccgcacacaagtatcacgcacaaaaaataccccaccggacgcgtgg

SEQ ID NO: 387257 - DNA, 914 bp, Oryza sativa
aatataaaaaaacgtactgcattgacgttgttaatcatttcccatcgcaggacaagacatgataaacttataaagaaatttacaactgcacttaacactgatgatgtggtgaaaggtaaatcttaacagtacaacccctctacaaaggaagtagagtagaaaggaacagggaagactgcaaatccatctccatgtagtcgtatttttaagatggaactacaaccagccttattaacaccaaaggaaaaacagagactaaaatctagctgactgaagtcacaagacctatacgcctataggcaacatcacaagtcgcaacggaagctctcagctggtcagctcatggatcaactgaagagctcagatggattccctcaggaccaggttgatgccgaacgaagccgtgcagatgatcaacccaaagatcgccaagaagttcagccccccaatcttgaggcggttgtccgggatgccggtggcgtagcccttgaagtagaagaacctcgcgacggcgtagaacaccccgagccccgcggcgacgagcgggtgctgcagcccgccgaccagcagcgtgacgaagaacagcggcatcatctccagcgagttctggtgcccccgctgcacgcagttgaagagcttggcgtccttgttctccgactcgaccgcgtacatggtggggtagaacaccttgtactttctgcgggccttgccgacctggaagctcatccagaagttgaggaacgcgtaggcgaccagcgccagcaccacgtacccgtattccttggtcagctcgatcgacaccgccatggccgtcaaattgttgcgatttcttcttcttctcgagagggaatggagattggagaggaggaggggattgtttgtttatggattataatgggttttcggacgcgtgg

SEQ ID NO: 387258 - DNA, 724 bp, Oryza sativa
  unsure (1)..(724): unsure at all n locations
ttttttttttttttttttgagaactgaaaagcgatcttattaacttaatctcagacgttcttagtttcagcagtatgataacctggagtgaacactgaactgaccttggttcttacatcagggctgcacgcgcactgaatctagaaaagcctctggagtagtactaattaattaactaacgatatatagccaatgactactggtgcaaaccttatacattataggagtgtgtaattaattaactgtgtgtgtgtgtgatgagttctatagctagcatttctcgtcggcgtcggcgacggcggtgtgctgctgctgctgctcccgcgaggtggcggcggcggtggcggcccacttggcgcagacgaggtaggcggcgaggttgaggacgctgagggacggccaggagcccggtagaagtagtccgaggcggctgcggtcgatgggtgtcgccgaagccacggtggtggcgcccttgaacgagcgacacgagcaacgctgctggaagaagaagccgaaccgagaangtccgtcaggaagagccccgtgctcatcgtcttcatccccttgggcgacctcgtgatgaagaagtccagtggccccgtgtagatgaacggctcgccggngcccaaccaagcaggaactgggcggtnacagggaaaaggctgaatgggcgtggaattccggtggtggcggcaaaggganggcaaggnggtttttttgaagt

SEQ ID NO: 387259 - DNA, 562 bp, Oryza sativa
tatgattgggagaagataacatgatgcaaattattactgaaggctaatgatcagcactattatggactgttcaagttttcaaccatctgcacatgcacgcagaattatctccagggtttttatggaagttatgtttgactatctacatataccatgttccatgtacatgccatctttcagatctgtagcagctgtctgcactttgtggtgttctaagggatcatgcttcagactttcagtacagagctttgtagattcctcagcttcggcttgagcttgtgttatttatatacaccttgtatgcaaactatgtaagattgacagaacattgtcagatatgcgcgcgtgtagctgtgtatccgtggaagggcattgatttagtgtcatgaatggatagatctcctgatgggactctgcaaaattcatcagttatcggcttcgatgtggctggtctccaagacatagtccctcatgagctttgtgttggcctcatcaaccatcttgaaagataaccttttcagattatcccactcgaaatcatgcttgacataagcagatcgga

SEQ ID NO: 387260 - DNA, 1076 bp, Oryza sativa
ggatgtcttaagagccttgagatggataggcatatatctatttaattcatcatcttggtcaacaggttcagcccagtccagtcctagcaaccataagctaattatgtactacgaaataaaaaagagagagaaagatattaacttctctgcagttaggcaaagcagactaatccatccactcatccaccacttctgctgcataacgggcgcctcctacaggcgcagtagttgttgcaccagagctcttcttcaccttctcggcgaggaacttggccgtgtcggcgcccttcacgttgaactccatcaggagctcctcgaacagcgtcttgaggttgtcgttgaacgtggggcgtctactgacggaatccaccttgtccggccgcggcttcagagcggcggcggcggcgctggcgctggcactgctggtggatgctcccgcgtcgccgtactccggttccttctcttcggggaccaccgatccgaccgtgtggccttccatgtagtacctgcatgctgccaggatggtgtgcccgcgctccctgaagtggctggtaacaaggtctgcgaagtgctctggaggccgccgaagtgagtagagcatcgtcctgcatgagtgcagaaatgtgttgtcgttatactccatagcaatccgctctccagatacactattggcgtaggatgcatatcctggctcattgaagtagggcttctcattcaaaatgagagcttgaatggagacgagcacttgtagcatggtcgactgagatggattccacgtctcacaaccactacctgcccaggtaccaagaagactaaggcatacttttcccctattgtataagtttgggttaatccgtagtccgccagagtggtagtatactgatggaggattagcagggtaagagttactaaattgaatatcaaagaagaagagcccatcgtggtacggtgttcccttaggtccgataatagcagccctaagaaggtccattctatcttcagcaacacggacataaatagatgctggtagatctttctccaaaagtttccagtcatgctgaatcccggacgcgtgg

SEQ ID NO: 387261 - DNA, 1109 bp, Oryza sativa
aagatgctctactgcatgaaatatatatttacagtgcattatctttactgaattcagtatcagcagcaagtgacgtaaaaccatcacatgctctagggaatgataactgcaactacataaaaaatcatgccactttacaagcataccaaaataagaacgttgccgatggaattaattaacagattcagcctcttcgttgccacttcacagcctgagaactttgagcctctccaaaacaaatgcaacagctcgtgggatccaatgaattgaagaatagcagattggactacaccataacagcgattaatataaatgcattccgcggtaactatttacaggctaaaggttgtcttttagccacttggcagcaccattagcaatggatcctgcaaaatcttgaagtttcttcaaccaaggcaaccctccccttcatcaggttgatccgaattttcttgggcaacagtagtttcattctcttggcgtatggattttggcttcacaggtgcaccagcaaaaccaccattgctcaaagaagccagttcctcaagtagctccttttctcgtccgcttatacgtttgggtatagtgaccttaatagtgaatagatgatcaccacgaccagatggctttttctatgatggaacaccttgctttgctagaaccacttcatcaccaggttgggtacctggaggtattctaagttcactatttccatcgacagttctgacctttttaacagtgcccagaatagcttcaatgtggcttactgaaacagttgaatacaagttgataccatcccttttaatatctgctggctcctctatatcaaggcaaacagaaagatctccaggaggtcctccttttggtcccgcatcaccttcaccacgtacacgaagagtactacctttgctaacacctggagggatttttactttgatctcctttctaacacgaacacgcccctctccagcacatttcttgcaatactctgtaatgacttcaccctctcctgcacaggtggggctaattgaaacctgggagaacagaccaaatggtgtctgctcagttctcattacttgccctcgaccaccacatgtgcggacgcgtgg

SEQ ID NO: 387262 - DNA, 954 bp, Oryza sativa
aacaaaaacctatatgaatttcttttgcctattccaacattattggtacagtagtacaaatcgtagtaatgcaatgcgcatacatggcaactttacaatcggtttggtggaaaaacctagcaacttatataaacacacaaaaactactcaatgttcaccaccacacctagggcaacgcgggtatacaagatggcagggtggtggaaatgacggagcaaaacgaaccttacacactatggcgatgaaggggccttacaagggcccaaaaaatctagtgctttcccggagaagaatctgagctgaggggactactccgccagccctctcttcattgaccttcatccacacgtcgtcttggcagcagcaagatgcttgtggtgatgttagatcctcacattaaacaactggcatgttcaacaaagatgctattggtttcaactttttatagcaacccagctagcattgcaccagggtcattgtatgtggcaggtactgccgccggaggcaactgtggctgcaccggaacgggaggtgaggctgtttgtacccttgggatatcaattaatggttccttgatgtactctttcaactcgaatgtcaaatactgatctcctgatgccactgtgagccggagttgcgttctatcttgtggatcagtttcgattctgaccagacaaagcatggcacgggttgtttcagaaaagaatgtagtgcatgcaaccagattgttcgggttattatcaagtccaggagcaaccgccaagtgaaggctcatgaaaagactagctatctcaggaagaggtaatggtttcacacctttaaccacttcttgaacttttagattttgaacattcaatgctttccactgagggaaaaactcttcaggggaaagagttataggttgcaaaaatttattcaatacaacagggagccggagtttgaccggacgcgtgg

SEQ ID NO: 387263 - DNA, 949 bp, Oryza sativa
  unsure (1)..(949): unsure at all n locations
tatatgttaaccagcattattcaatgctagggtacttgcaatagatttgtgccacctgatacatgtatgggaatgcaaaagattgcagaactaccaatatgtgaaaattgctctgaatatacaggcaaaaacaagcattaaaccacttatgaagcaatttacatctgtgaagcaatcgccacagccaactgttaacaccctttctaaaccaacaccccttcaagtgctttagcctcctactaataaatatggccctaatgtgggttcttccttaacagatggataataactcacagaggacaccagttactgaaaattttcactgtcctcatctttaggtgtccccattatgatactgaggttgcatataacccatcccttgggtgtaagccccaaccatcccttgcgcacttgagctactagcgccactgtgcggaccaattgtatccttctttactgaaccatcaccagcctttgaggacagcttactatcaccctccatctctctgtacttgtgtaaatagatcttcaacggatcaacgtactcctcaaagccaagcgtacccatcgcaaagaggagatcttccccgttgatggtcttgcgcttctccttctgacatttgtcgctcgcctcgctggtgacgaaggagatgaactccgagacgcactcctgcagggtctccttggcgtccttggcgatcttgccgttcgccgggacggccttcttcatgatgcggctgatgttggcgatgggcaggaacctgtcctgctccctcaccccgccgctcctcggcgggctcccgctctcgtcgtgccccgcgtccgccatccccgcgccgccctccaaaaacccttacgaaaaaaaaaaaacgcgcgcgcgcgggggtggagggagtcncggagaggagaggagagagagtgncgtacgcgtgggcgtacgcccgcgtgg

SEQ ID NO: 387264 - DNA, 996 bp, Oryza sativa
aggacctggaagactgcatttttcccgtgataaaatttacaacatagacagcattgtgcatcatgaagaaaattataccccaaccacagccgtccacaatcttccaaaacaaaaccactgcttatctggttttaccagaaagtacagcaactctgcaactattgtagctaactgtactcacagcaccccaagtattacataggcattgttaaaaatttagattacatttgggcacttgcatggaagaaatcttacattgctcatatggattgccgatcatctctatgctgttccattgctagactttggaggtagaaagggctcccaccatccatactcatacttggggtatggagctgtccatttctcaggcttgtcaaatttcaagtcgaccgggttagaagccaatgcctcctcaagcgtttctgcttcaaattgttctgctaagaccctgtctagcctcaacttcataaaagtgatccagttgccgtcggtggagacgagcgcgacggcggggcgcttgaggcgcttggtgatgttggggaacctgtcgaggaacttgggctccaccaccagccagaagtcctgctccttctcccgctccccgtagagccgcagcttctccttcagctgctcctggaagtgctcctcctcgtccagcatgaacttggcgcccgccaccaggaagtggtacttcttcggcttcgcctcctgatcgggaggctcgggggagccctgctggtcggagtcgacggccacggcgcggagcgacaggcgccgccgcctcggctggcacgagacggcgggcgggagcgcgaacccggcgccgacgcggggcagcgcggcgcgggacggcgcgagggtcgcgaaggggcggagggacagcgtcgcgcgagccaccattgccccactcgcctcggctgccgaactcggggacggagccgaactgaagtgctgaagctggtcgtgtcagctcgcggacgcgtggtcgaccgg

SEQ ID NO: 387265 - DNA, 1235 bp, Oryza sativa
  unsure (1)..(1235): unsure at all n locations
gaggtagacgaactcaactgttacaaaggaaaaaaaaagagattcttttacaaaaggaaatagaatggaaaaattaagagatctttttacacaaggaaattataagagttttacatacatactactagtataatggttatatatacaggatgcaacaccaacgttgctacaaccaaaataccagtacatcggtgaggaaatactgtatactaactccaggatttgtacacatagcacaacacaaactaacaagaaggtgaaaagcacatttaaccatgatgaaatggttaatcctatatggaaatctgacgctactgagcaacccaacctggttcgagctactgcagggaccatgacctgacctctaccttggccatccatgggtttgctcctcttctccctctcctatgtatccccatactaatgttgcagcatccaaattggatcgattcgcatgatgcttgagagtttcctgtttccgtctttgtcatgcagaagtagttcgttcagctgacagaagctttgcagagcatttgctgttgctaccagactaggggagatcatgaatgtgcatcactggagactgccggcaggtgcatcagctcaagccggcactcctgacctcggatgtaatggcccagcatcatgcaccagacccacgcgtccgcccataatagacgggcaagacggtcgcgagaaatagatatcaggggttganatggaagggacacgtcctcaccgagctcagtgaattcatcgtctcctccatcccaaatttacaagctccacccgccatgttctctgaggtcggagagcgattcgtatgcattttgggggagagagttgctagcagaccatgtaccacggagtaaacagcttcttccacaccagggcaggaagactccgagagttcaacaaccttctcaggtgacagcgatctcaagtaatacagcagctcgtttttctcttctccagcaaattgctgcatttgttgggaagaatttttcttcttaagttcatgtagctccttttccatggaatccaagcgagattgcataccgagaatgagtttttttgcttcaatacttaagctacctagtccatccatatttccacataatttttcatctgccatttctgattcgattgtcaagcctacatcttctggtaagctgagaaacatagaaggccttccaacactgtgaatttcttcacagctatctcttttcttgcat

SEQ ID NO: 387266 - DNA, 865 bp, Oryza sativa
tttgtttttttactcgtaactgataggtgctgatcatttctataatgataacatatataggcacattggcaccatcaatcacttacacttgccttccagcgattaatggaaaacgttcacaagtgctaaaaagctcccactaattccaactaaacattggcaaatcctagaaagcactgataagtactccttttcctagtttccatcaaataaatgagatgaaatttccaagaatgctcacaagaacaagcttctcacctatctatggaatgcctatacagttcttcaggagtcaattttgtagaatcaaaccgctcgagacaataatgcacatacggaagcacatcgagcgggcaacaaactatgcatacacagaaattctaatgaaaacaaaagataatacataaggtattcccaaacaaatatactgaaacgaagatcgaattaatccggatatgttccttgtgatatgtagcatgggcctacaaatgtttcaaatgccaaagaccagaatgcttcaatcaattacgatggtttccctttccctttccaattagcaaaaatgagagcaattttcttggatgctatgtctctgaacgcctccttgcgagctgagggttagcagacagcaaaacattagccaacagaagttgacaatattgcgatttctaccacctacaagggcatgcaccacacaccttgaacatgctaagactggcaccatgacgaggggggccttatggacccatgaacttcatgttcttgaggaccagcacggtatttgggaacaataatatctaggcctgatcctgattcatcacagtgtgcttttaaagtagcatcttccggaatccgagtacggagt

SEQ ID NO: 387267 - DNA, 483 bp, Oryza sativa
  unsure (1)..(483): unsure at all n locations
gtgaccaaacccagngcaaaagaaaggatatcctanaccatgagaaagttncatttgtgccaaagcctgaaccagagtataccaaaaatgcaaaggtcntatttcaatagtggccgagttgaacatatgtatatctaaataaggtaaaaaatttagccaccctttaaacctacctcccaaacttgttaaatctgctgttaggtcagaaaggctgaaattccagagctgtcctaaagatctgatggagtcccttgacgagccatctggtcctaactgcagttgtcctgtgttctcaacatcggatacaaatgttgaatctagagctgatgtatccatggttatccctggtatctcagatggagtgaaaggagcatggttgcttgatgctgccgatgagggactcacagccatttcagatgacatagcactgcaggtagcgccaacatgagcagtttcaggtgcaccgttgtccacaaccatgct

SEQ ID NO: 387268 - DNA, 733 bp, Oryza sativa
ttggtttttttatttttttggtttggacatcctctcaaagtcttgggaggaaaacaaatttttccggctaggggaaccatggaaaatgggcaggtccacatgaacagttcacttttttagcaattacagagagagttcatgaggtttaacatctgtaaacttttgatccttgtagccagctgcttaatctgccctactgtttattggaaagaattaggattgaccccctacaaaattcttcagcagcgacaacagtacatgccgattgccgcaccaccatgcgcatcttacagttagaattctgtcacaatttctctgcaaggttacactacatgagatgggcacggccggccaggcctttagtctgaaactctcttctggtacttctcttcgtctgattgtgaaggcccgttgatggcatcagcaaagtactcaactatgtcattctggtctggggaatcaagtaaaatgtcggagtctgaggccaggaaaggagtacctgcgtagttctcaagtgcttccaagtctcccaaacttgttaaatctgctgttaggtcagaaaggctgaaattccagagctgtcctaaagatctgatggagtcccttgacgagccatctggtcctaactgcagttgtcctgtgttctcaacatcggatacaaatgttgaatctagagctgatgtatccatggttatccctggtatctcagatggagtgaaaggagcatggttgc

SEQ ID NO: 387269 - DNA, 571 bp, Oryza sativa
  unsure (1)..(571): unsure at all n locations
nnnnnnnnnnnnnnnnnnnnnnnnnnnnnnnntagatagcacaagcaattaggattggatgttctgatcctggtacattaaatcaacaaagaatttaaacatcggtacaagaagcagtgaggtcaacttgcacgttttcagtgtacaggcagatgaagcaaggaatgagggtgggtaagttgaattccaatgatgtacttgtcaaccaaagaatctcagctcaagtcttcacaattgagggttcccaaaatgtcgaactctggtgtcatcaatttagaagtaatttgtccagaaagtcattgtgaccctagcttcataaactcaagttttgttgcaacggaagcagcactgtcaacttcttgtacatctactgaagtttgatcctttttgctatcgctcccaccattactatcatgctgaatagagggtgcagcacccacataacctctttatataacgccgtaccctggaaacattggaggatatgcaccataaactggacgccttgtcatcatgcctggaggaatattagcaggggctcccatgtttgaatatgcattcgcatagggat

SEQ ID NO: 387270 - DNA, 989 bp, Oryza sativa
gggcctggagtgaagactaaagacgttaaatatcgattcagttttaacagttgtagcactgagaaaaagaaggaaaaaaaatcgggagccaaagaaattaatctagtggcggatagtctattggttgttctccatcatgatgaataaactctcagacatagatgctgactcggactcccaaggatctgatttaaccagttccttccaacagttttcgacaaaaggggtgaatgaaaaaagcatcacaattcgctggatcgcggaaggctataggtgatggttaagcgatcttcccgtaaacaatccagcttggctcaagcggtcaggtcgacgccactcgatttaaacgtggcttcaccggtgccttagaagggctcaccctgacaggcagcgtaccccaaattcttcccactgcaattcagagccatgatggcacactcggcatggacaaactcaacaaaagcaatccttgtagaatgtacattatcccctagaagtctcaaacgagagacctcaccacaaagttcttcaaagaaattctttacatctaattgagtaaccttcttatctatgtttgtacaataaacagttcttatgaccatttccttctcatcctccgtcctaggaaggaactttggattcacaggcaatatagctgtctttgaaggtaagactctaacagggtagaaaccaagcattgtgccaccaaggttaagtgcagttcttgcgccctcttcatcagcaaactcaatgaatgcaaaccttagaactgagtgtggatcaccacagattctgcagtcaacgacttgcccacagttagcaaatatatcagcaagtctctcctccgtcacagtatggtcaatatcagaaacataaacagttcgccgaatgctgtcttccctgtctgcatgccttgctctctcgttcatcctcctccttccttgactgaggtatccattcctcctccgacgctgctggtaggcgtcgaa

SEQ ID NO: 387271 - DNA, 1015 bp, Oryza sativa
  unsure (1)..(1015): unsure at all n locations
caatctncggtnagattnngaggagaaattntaaangggattnttcncngaatttngggccctaaangggtaanaaaanaagaggtgggtttaaacccagaaaattttaaanngggatttttnaaanngaaattattaancgnttaaacaaatttgnccnatttnccccnatttnnagggtggngcaaaattgttttgggaaaangacgaatcggtggcagggcctttttttgggtnaanaaccccccaagntnggngaaaaggggggatgtngctgccagggcgatttaaagttgggaaacggcaggtttttcccagtcaggaagttgtaaaacgacggccagtgaatngtaatangactcantatngggcgaattgggtaccgggccccccctcgagttttttttttttttttttttaagatgggaaaacgttttaccaaagcttcttaatcagcgttttgatggcatcacatgcaactttcacagctgcaactgtcatgtatgtcactcttaacaagatcggcccaacagagtcatccatgtcgaagaacgacatatcaaataaatattaatgcaatttaccaggagataaaactaaagcttcaacatgaggccttctgtctatgtttcatttactgaactgtaacaaccaaaattacccaacaagatgatacaacaacattttacacagctgccttagttgcccacaatgccttctgctgctgctggtcctctgttctgccaatatttgagagcatagtaaacggaagagacgacaagggctcccaggacgatgtaggtgattattgtagttgcgccaatttgagtggggctcttcttctgcttgctttgtgccagcagtgcctttggcttgaccttggccatggtgcacttcttaatccgtagctcgcgcttcaccggagttgctcgccggcgactgggggaggcggaggcggaggcgggatctcgagcgcggaggaggaggaggagctggagtttgtccggacgcgtgg

SEQ ID NO: 387272 - DNA, 777 bp, Oryza sativa
ttgttgcgtgggctcttttttttttttttttatataagatatactttcacaacaaacaacagcaggtctcttttgccaatcgacaacaaaattcacgtccgtacatcgtgttggagcatttccttctacaacatcctataataaaaacaatagtatattatgtattcacctgtagtccatttctacacaatgtggacttcacttttgttctatacacctgggactaggctatattgctatgtaccgtactctggatatggagaaaagctaacagacagccccatgtttatttcccctcatcacggactcttcccgtgcaatcgtattgcaattatatggctctattaccacacattcacaaaagatggaccattgcgacgagtcttctggcgaaactgcttcttcttgatgcaccatgcctccgtgaaagtgctcacgttgctaatcatttttgcaccaaaccaggcagaatcggtgccaaatgggggaggaataacccttatcccttctgaaatatgtgctggaagaagttcacggagctccttttccagtctctctgataaaccaggtaagcatgaagatccaccggataaaactactgtcttgtaccagttgtcatcaccgaacacttctgaattgtagcagtgatccatacacagagatactgctttatgcaagcccatagcacgcactcctccaatctggggctggaaaaggatttctgcagtcttgaacctttcttcagacagagtaaaccatccttcaccggacgcgtgg

SEQ ID NO: 387273 - DNA, 992 bp, Oryza sativa
  unsure (1)..(992): unsure at all n locations
nnnnnnnnnntttttttttttttttttaatagtaggacacttagctccacggagattactaacagacggaccatactgagaatactgttattgtttcacaacgtaagcttaaacgtgcaatgagcaaatacccttatatatacgactttgcaactggcatagcacatatctacagattttagagagctaatcgaaccagctttgtcgataagataatatagctaagtgacactaaatatgaaaccctgcccagtcaaagcctcagacctttgtgccatcaacatcagaagcaaaaacctggccataatcgcccttgtcatcctcatccagatagtcagaccttgcattgagagctagcatctggcaaacaagccagaagagagcagcatcaagggccaggaaagcggctcctccaaagaggccagtcttcgcagtagggcactgggtatccaggtcatggtggatgttgttgcttcggtgaagaccctcggtgaccgttgcccagagcaacattgcaaacgccagagctgagacaagctcagcaataacgaagaacgcagataagctggcgcttcgaaataatgctccgcgaggaacagacttgctcttgtatggatagaagatagcggcatgccctacgatggtggttaacacaagtgacaccacggagaggcttcccattgcaatagttgggtcacttgggaacttgcagatgacaacatcctttcctttgataggagttccataaggaggcttcttgttttctgcgatgacaccaagtaagaaggagagaaggccaaagaaagagacagtgagagcaatccgttgagccgaagtgagagccatcgcaccaacaacggcagcagcaaggcgaggcgggcggaggagcaggaaaccctaggaggaggaggggatcgagcagatgggaaatcgcgtgctccactggaatcccttcttctctccgcgagctcggcgaaaggcaggtacgcggg

SEQ ID NO: 387274 - DNA, 772 bp, Oryza sativa
  unsure (1)..(772): unsure at all n locations
nnnnnnnnnnnnnnnnnnnnnnnnnnnnnnnnnnnnnnnnnnctgggattcagacaacagctgagcattatgtgcttaataaaagaaaggatgccgttcaccatacaatagcacccagtgtggcagtatatataatgcagatagcattgataaaacgatcaaaacatagtaataatagtttttgcctcaaaacaataccgggataaacaagtatcaataagtgttgatttatgactcatctaaacctcatcaaagctggaaaaggatatcaggcattgaaaatctgaccaaactgtaacatggaaacaccagttcctctccatgattaactagccactagcaagatttgaagtctgaggcacctaacataggcacgctgccttctgcaggtagtgttggaagacgacccacctcacctaggagcttggggcggggcattagatttggcaagacccacccagacaaccatgccaaccccaagaaccacccacccgaagacatcataccagaagtcgctatccttcttcttcttccttgattgccttgtattcgaggttgaggatgcagcttgtgaagcctgagatgccatttgcctatgaatctccatgtgcagttctggcgccttgggatgacaaatccaatgacttcctgtaaagatcattcgcaggttccacatcaacagccttctggaaacactgggggtgcctttttcaaagaattcattgggcttganagtgtctgaagtggaagaatccatgagaagtctgtggca

SEQ ID NO: 387275 - DNA, 1201 bp, Oryza sativa
  unsure (1)..(1201): unsure at all n locations
nnnnnnnnnnnnnnnnnnnnnnnnnnnnnnnnnnnnnagcaacagaaagttcaagcctaattgcacttttttagctaaaagattgcgacatcaaccacagcttttatacaaaaccaggaggattaaacgtacgccacaacacaaagtaaaagagctaagtagaacatcatcatccacgaaaatgtcgtcacatgcatacatctaaaacaccatttttctgctgccataagcgccccactcttacttattcagttcaggacttcaggcgaaggctacctctcaccttcaggcgcggtgacctcacctactgggtcttcgccgactcgctcttcgacggctgggcctccggcgataactcgccgaaaaccttggcgatgcgctcggtggggatggcggggaggtactgtgctccggtgtaacccttgtcggccgcggcggcgatcaccttgttgtacttctcggcccagtaggcggcggtgggcacggcgatctgcgccacctgcgggaacagcggcaggttgttgagcgagcgccaggtggagacggcgaggtgctccgccgccggctcgtagcgcacgtagaggtccttggccgccggctggatcctgccgtacacgcccttggccacgggctcgaccttggcgtacgcgacgcgcgcggcgccggtgacgcccgactgctgcacctccgcggtgagctccctcgccacgtccggcacgccgcgggccaccgcgcaagccttggcggaggcggccttcagcgtcggcgggaggtgtcggtccagctcttgcaccgtgtcatccacttgcggtcgacgaaggcgaggacgtcgagggggacgccatggaagcggccgtagacggggccgacgacgcccttgacggcggactcgacggcgtcgacgccggggcggagcgggccggcgtggtccttggcaagcgcgtagagccccgcgaggcagatcgtcgcctgcgctgccgccacctgcacgaactccaagtacctcagcttcggcctcctcacctcctccacctccacctccctctccacttgcgggttggctccgccatcgccggaatcgaggccgcgagggtttcgagaagctgctcgggaatcgggggagacgaagacgagacgagacgagacacgattttccttttttttttcttttctttctttcttactttccccggacgcgcgc

SEQ ID NO: 387276 - DNA, 1724 bp, Oryza sativa
tcgttaattcagagcagaagtagtatgaagcttcgtgacacatgcatgccaaaacatggctccgtttggagaaggcttagcaattagcatgtttgaggatgtgcaagaggaggttcatccaggacagtctataaagtgcacaccatggaacctgacaacttgaagctcaccgaatttcttggtttcactcatcatgcataagccaccaaagtagccaacacaatcgaaaataccaaaaccgagagtgtcaatggttgttttgtcagaggacttgcattaggcaaccatggatatgcatccggaggtggcatgacacaattgtcaccattgaagtacacgcggtgtgggaaggcccatcccttgtcaaaggtgaaagtccttggaatccttacgcagaagaagttctgactgtgcatttccaagtggaccagcttgcatgagcaaatcgttatagaacttaactccccagaacatcgcagtatcatttatcttgcttccatatggagtaagtggcttgtagttgaagctaaacagctgggtgatattattgaagttaggatgttgagcgaccaaattccactgtgtgtaattcatgcggtagttgaagttcgtaatcgtgatcttcactctccaatattccttatagttgagtttcacatgccagtggattctgatcgggcacatgtgagaagtacattggacaagaggctgaccggtccatttgccagggccatcaatggcagattgtaaataaggtgaattctcatttacacagcttccaggacttgtcccattgttttggcagccacaagagcatgttgggcagttcacaattgtgtcattataaaatgatgagagagatacacagcagcaaggagcggacgcgtgggcggatcttctgagcaagaaattgggagtatgtgcaggtcacattccatgtcattagagcttgggtgcctctgcgcccatccccggtcaaaaccttagtaggcctgacaatcatagcacgcccgcacgtgtacccaggacctggggccttaagagtgaagttcttaggcaacttaactgtcttgttggtagtcccagccagacctacactgatctggaaggaagaagcagcatttgatgggtcctggttaaatgtatttataactccagctttgcagcaattagcgatttgcatgttgtatggggtgcccggaagcagatcaacaactgtgggatccttcttgcagcagtggggcgtgccacccttgaactttaagcaatcgccctgctcagtggtctgtgctccaaccatcgaccaaatgacctccttctttgcccatgtccaccccagctgccacccaggtgcctggatgtgccggaattgttgatagttgaacatcgtgcccccagcaacatagccatcaggagtccacgacataacgtcccattttatcgtgatgtttccatttggatccagcgcatcataagcctctgtggtggccggcgcggagaagagcagcgccgccgcgagcagcacggcgcagcagcagcacggcgccacggatctggagctcccggctccccccaccgccatatccccgcccgatcgagctcgcgctccccgctccggaatgcgagcgcccgcccgcccggcgtccccctcctccgccccaccggaagacgaggagcggcaggcaaattgagctggtccgcccgccgcgtgcgtcagctcgtca

SEQ ID NO: 387277 - DNA, 770 bp, Oryza sativa
cagaagcaagaaaaagaaattaaatgatctcactcaacagcatcctttctgttcacaaaatcttacaaaacgttattatggaacctatacatgtactacaagaaaggaagtcatatagttcaattaaatttctgggttgctataaaatacaaaaggtgcaactgtaattacctaatttgcagtatctaagttcaccaaagtgctgtgcccagtatataccaaacaagaaatacattttgcccctttaacttacaaaacacacatgtatcagctttcctcagcgtgacaacatcttttctatgtaaccaggtaagtgaatgaacaactgatatgttgtattgtacaccgtggaacctgacaacttgaatctcactttttttttgtttcacccatcatgcataagccaggaaagtagccaacacaatccaaaatgccaagagcgggagcgtcaatggttgttttgttagagggcttgcattaggcaaccatggatatgcatccggaggtggcatgacacaattatcaccattgaagtacacgcggtgtgggaaggcccatcccttgtcaaaggtgaagtccttggaatccttccgcagaagtagttctgactgcgcatttccaagtgggccagcttgcatgagcaaatcgttgtagaacttaactgcccagaacatcgcaggatcatctaaaatagaaggaataaacttcattagataaagagagagagagagagagataaaggaacgtattacaagtgcacttcaattttc

SEQ ID NO: 387278 - DNA, 1282 bp, Oryza sativa
catgattcagagcagcagctctttccacaagccattacatggttccctttgaagaaggtagagatcttggcacaagccaaaaacattgagcgtgtttgaggacctggaactggaaccaagatcatctatgaaggaaagtagccaacacaatccaaaatgccaagagcgggagcgtcaatggttgttttgttagagggcttgcattaggcacccatggatatgcatctggaggtggcttgacccaatggtccccattgaagtacacccggtgggggaaggcccatcccttgtcaaaggtgaaagccatagaatccttccgcagaagtagttctgactgcgcatttccaagtgggccagcttgcatgagcaaatcgttgtagacctttcctccccagaacattgcggtatcatctaaaatagaaggaacaaattctgtcagagaggttgaaggagggaggggcatgtcccgggggcattctattcctctgaaagttaagtaaaacaatttacttacttattctgcctccatatggagtaagtggtttgtagttgaagctaaacagctgggtgatattgttgaagttaggatgctgaatgaccaagttccattgtgtgtaattcatgcggtagttgaagtttgtgatcgtgacttttactctccagtattccttgtagttgagcttcacatgccagtggattctgatcgggcacatgtgggaagtgcattggacaagaggctggccggtccatttgccagggccatcgatggcagattgtaaataaggtgaattctcactgtggaaatgcatggaacttgttagcaattttgcagaaaagttgggcctcaacaagaagcgaagtaagagtttttggttttattaactcactttacacagcttccaggacttgtcccattgttttggcagccacaagagcatgttgggcagttcacaattgtgtcattataaaatgatgagagagatacacagcaggaaggagtcttctgagcaagaaattgggagtatgtgcaggtcacattccatgtcactgcaaacagattttatttttgttaagaaccaaaaaccaaaaatgaactttatggtataagattttgccaaatttaacttctatatggagccactatgatgcatgtctgcatttgacgaatattatttgctagagaataatattaactgaattagctgtattctattaggccaacatgccaagtaatataacctattatcaactattattcacagctggactcatcaaaaaacaa

SEQ ID NO: 387279 - DNA, 464 bp, Oryza sativa
ttgttgttagtgcagtaaatgaatccataagatctaaagaatgttttatagtagctcgatcgcagcaagatacaagtccgattcacacagcaacgttaggcttacagctccaactccaagttggaggattaaaatttgaaaaattgaaagaacgaagcattcgccttgggattactctctcttaatggattttacaggttgggtttaggctaataataatattccctcttcatcttggattagtagagtacttaattagcagcgcatctagtagtgctggctttttttccatcgtctagtgcgcgccaaaaaaagttgaagcacaccacatcagagcgcatcacggccgtccgatctttttggcgggaacggaggaatggatcaccacgatctcgggccgtccgccgtcgccgtggcggtggcggtggcggccatcatcatgcgggcgaagtcctggaacccga

SEQ ID NO: 387280 - DNA, 1134 bp, Oryza sativa
cagcttaaggagatcgatgcatggacaggaagaaggatcttaaagatatatatcagctacaaatataatgagaatacaaataatgatattacacgtcgtccctctctgcttgagagggtaaaagggtctgaatgaagcatcatatactgcacccgacttatgtacgatcttgtagcatacatatatatactacacccgactaccgtacatggtgcgtttcatttttgttcaaagaatcattaccccaaagttggggaaatttagaaggctaaaacatttgttaggcccaaaattttttagggttgaatctcaagagtgttgcccgcggcaacgctgatttctctgtatgtacaatgggccgtcaagagctttggaatcgaacctttatttggtcatgtcaaagctccatttttcatgtggaactgtttgcaacgatccattgtagctattggaagaggtggcgatctcctgactttgccccatatccatctgaacaacactttggagatcatcttgccagaaagcaccaacctgagaagccgcatcgctaaccccattgaggaaaggatggtgcgagcccattggccggcaaaatgccgggtccaatgggtgcatagaaccctggttgtccatgccgttcgtcaggccacaaccgagagggttcccttgctgaggctggttaatgtagggcagcggcgcacctgaggtctctagtggaaaatgtgagctctgtaacgggctgcatgactggtgcatatctttagcaaggaggttaggcaaattgttgaagtccagctggggattcacagtggccaacttcatggacaaaaactcgacttgccgttgcaacgactgcacatagtttatgatttcatcgagcatgacagcctttccaaccaccttgttacaacccggcacgagatcctgcagcagcttcatcctctggcttatcttctctcttctcaccctctcggcgaggctgtggctgtccgtcgcctcgcgcgccgggcgcggacatggatgtagtccttgggcggctcggggggcttcgacgagctgtccttcccttgcttcttgccgccgccattctcgctgttgctctgcgcggccttccccttgccggaattctcctcg

SEQ ID NO: 387281 - DNA, 800 bp, Oryza sativa
aaataagcaccaaatttttaaggtgctgagaaacactcttgggccggacaatcaatattatggcaatacagttcagttaaataggtcataacacgagatatgacaattgatatttgttgtagaaggcgtcaactaattaattacatcacattttcatggcaggtacaagctcagaacttgtctatggggataccatctctgactacctcatatgcgtcacggctgcgggtcttcttcacaccagcagtgaaatgaaccttcgatccctcagtcttgatggcagtcaccttggtccaaacaagcactttcgtcttcaagccttcgatatcagagagctttcccttctccaggtagccagtcacacaggtaaagaatcgcagaacagacgaatccttgtacccgacatcacaagctgaaggaatgtacacggttagcttctttgtctcctcattgaactcatagttagtagcatcccttgggaagaggcccgccggcatgtcatattccttgagaaggtctggcaatgctttctgcatcttccctttgatcttgttcaccatccatttagctcctgttccaatgcttgtagagattgagctgatgtcgtcgccgatggagtcgatctccttgcttgccctcttgctgaaccagtagctccccaccttgttcagcacctggtccatctcccccctctctccaatccaaatccaaatccccaatccgcctccacgaatccaaccgacactggggggagattggaatgacgaagaagaagcagccgctcgcgatctagaaaaagt

SEQ ID NO: 387282 - DNA, 540 bp, Oryza sativa
gatacaaattcatctgcaaaagcagctgaagatctatatcctgatatgcgtttgtgcaatctgatgcacacaagtgtctatgtatgatatataaatttcctggaaacaaagaaactctttacatattttatcaagctgaactattttctgggtggtttctaagatttttctcttgcccttgcttgatggtacgcaaaaattgatccacgagaaaggaaggtcaatcatggattactcaagagaaaggtttctgatgttgcgctgctgatctgcaattcctttggctaatcgtgacggcagaggaagcaagtcagctggtgttccagtggaggatgtgctcgtcaatttcggattgaaccaccttcttagagtaagcccgttgatcctcatttttccatgagactcctcgccatgatatttgattcctaatctcctcagcagggaaccaactgcttgaccgactcttccagcaagtttaagtgtcttctccctttcatcaaggccgacttgtttctttcgcacgcgtgggcggacgcgtgg

SEQ ID NO: 387283 - DNA, 1147 bp, Oryza sativa
  unsure (1)..(1147): unsure at all n locations
nnnnnnnnnnnnnnnnnnnnnnnnnnnnnnnnnnnnnnnnnnnnnnnnnnnnnnnnnnnggnacacgaacaatcatcaaattaagtaagatcacaggacatcattaatcatgttccctacagtacaaatttatgccaaactcttcgcggctaaaagggtcacagtccgttcaatccgtctatttagccataaatttctcaccagcaacatgtttaaatacgacagctactcttgtctgcgaatacaactgtagatggagtaggaattataattacggccaagagaagattttcaagtctaaaatcatgaacatctttcaggtagtcatctacttctcgtgatgctactgtaaggttcacaagattaatccccgcttgataaaacagacaaaaaaataggataggtgacacacgagtataacgctctcggtgaaaaaccggagcagagtagtagtagtaatacagcagccgtgattttatttagaagactaagtatatcaattaagagggtagttaaccttaaaccccgcaagaaacccgcgtcaccctcacttggccttgccgttgacggcggtctccttgccgttggccgctgctgcggcggcggggaccttgcccttgccatcgtcctccttggcgaaggcgtcgacggggtaggtcctcccgaggccggtgggggtcttgaaggtgatcttggaggcgtcgtccttgtcgatgaacatgtcggagagggagacccagatgaggagctccttggtcttggccccggtgacgcgcttcatccggcggtcctcgacgaaggcggtgacctcggcggcgaacgagacctgcctgctgatctgcttgaaggtgtgggtgatggccttcttctggcgcagccacacgaaccccgtggcgcggttgtagccgacctcctccatctccgccagcggcagcaggcccagcggcatgtggatctccgcgaggagctccaccgccttctcccgcacagcgccgccccgtggtacacctccgccccctccctgtgcgcctctatcgcctgcgaccccatcgaacacgaactccaactcttggattcgacactcacaattcacaaatgcacaatgcggtggtgggatactgggaatctttgggttgcgttgttagtg

SEQ ID NO: 387284 - DNA, 506 bp, Oryza sativa
gcaccaagtccaaaggactacggaatatgtacaccattattaagatatgcaactgaatatggcataaaagatatacaataggtttctgggcaacatgaagctttcatttcacacccacgtaatagcatgatacgcgactagaggccgaaatccatatgttcataggctcgaacatatgggttctttgcaatcaggtaagaacactagtacgcattgtcagcccgtccgtggtagtttctcctcctcagctgtgactctggcgcaggctgctgaaggaaaatctttgtaggatcgttcggatcaacatacgcatgacgcatcatatcatcaacaggagtctgaacagcttgtagcgggtccacacgtggcgccatacttgcggcagactgggcctcaaactgattgtagcgtcgcacagatgcaaccaggtttaggaagagaggaacaaaggtaccacagccaccctccttgaacaagaacttgaaagtgtgggtcgagtacagggc

SEQ ID NO: 387285 - DNA, 467 bp, Oryza sativa
  unsure (1)..(467): unsure at all n locations
cagagaagatattggaggagaattcttgttgtccacttgaggatacgctcgtntcacgcaagtggttgtgcaatcgtagttgctcctcatgggagagttgtgggagcaggtcctccagtgccggtcccgtccacggctgccatccaaatgcccaatcttgtgccgatcccatcattgaattggcaatacggccccagttaagtgaaggtgctcagagagctcaacggagagagtcgacgaaagagaggggcgtggcagagagagccggcggaaccaaacggcttgacggagagagcgaaccagtggaagagagcgatggcgactggcgaaagagagggaggatgaccaacggaagagaggatgctgacggaggactggccttcccgccggcgaggacggcgcgacgagcctggcgacgagcagcgccctccactcgcgagtcggcgaaaccctagctttccactggt

SEQ ID NO: 387286 - DNA, 674 bp, Oryza sativa
tcatcgaattcaaaacttaaccttttaacagggtaatcacttgaatcaaaacttagctgccttcgcgaaggaagttctggtgccttggtcaccttcttctttggtgcacaagctaactcctctggtcccggagcaaaaggatcaaagatgctttcgcgcggtgtctgacagccatacgaaggatcttcatctgcaacactctttgagctagatgattcaatcgcttccttctctggtcgtgtaatcacctcagcaacaccactcttgttattttcatgatcacataccatgccaagggatcttgtgtccttattttcaaagggagattgcacagaagcttcttcatttacacacttgtccaacttttttacaacagggaagtcacagtttgaaactagcgaattatcaataacattcttatccaccccttgatccatttgggagtaatgtggagtcaacctctgctatgacttgcaaaatgaaaaccagagagctcaacggaaagagtcgacgaaagagaggggcatagcagagagacggagagagcgaaccagtggaagagagcgatggcggctagcgaaagagagggaggatgcagtgctgacggacgaccggccctcccgccactcgcgagtcggcggaaccctagctttccactggtttggaacaaatga

SEQ ID NO: 387287 - DNA, 227 bp, Oryza sativa
cccctctgaaaagaacaaagatttcgctgcaactttagggttggcctgtttgtattacaccgaagtgcaacagtagtgacatgtttctcgaagcaccaaaatttactttacaggtaaagaggcggaaagaacggcaatcccaccagctcactttaatgaacttaaatgtccaaagagtaactataacctcggagaagaaaccccacgctttcttgccggacgcgtgg

SEQ ID NO: 387288 - DNA, 471 bp, Oryza sativa
acatagcacgtaacatggaaattcaaccagatttgccaaaaataacagcagaacattggatcatgcgtgtccctataaaactgggctcaaaagggggaaatttcagtttataaggaacaatgtaattttatcacttttactgcccagaggcagggcctacaagaacaccctgcgcagatccttccttcatgctgccttcttcctgggggtcactatctgctttccggattctgatcttgtacttgagctcaaactccgtgatttccttcttcttcttctccagggcctcgttcatgcgagcaacatcttcctcgaggccctccttgttgcgttgcactgcaggcaagacctccttgatagtccgttcaaccagcactcccccaatcattctgtagcagcgcctcgaggggtcaagtggctcgattgcaccgatcacgagggagtgctccggacgcgtgggcggacgcgtgg

SEQ ID NO: 387289 - DNA, 517 bp, Oryza sativa
  unsure (1)..(517): unsure at all n locations
nnnnnnnnnnnnnnnnnnnnnnnnnnnnnnnnnnnnnnnnnnncngctttaacatgatcagattcatcaacgcagaaagaatatatttcagagatcaaattacaacgcagtgaattgaattcacccaagtcctagccgtggacatgataaatacaccaccaccattgatgtttctgtttgctacagaccttccagcaaatatattaaaaatgaaactaagacaactccacagcggttttgagcctatccctgcattgcaatttcatctcagttcttcttgcacgtaggcaggatgtcctgactacgcctaaagccaaatggaacacccccatgtttcttcccaacatgtggtcttggatgcctggtgaacccgaaagattgcttgcttgtagagcttttcagtccaggtgcacgccttggcactccctaccagctgcatcaatgtgcaggatcaccatcgacttcaccatcatgctgagaaccaaccgatgcctttgttgatagcgtgacgtcgtca

SEQ ID NO: 387290 - DNA, 613 bp, Oryza sativa
  unsure (1)..(613): unsure at all n locations
tntnttttttttttttttttaacgaagtatcaccccaatttattcaagtaataggtacaccttaatgaatccaggattttacttcatattacacagagaacatattaactgaataaatataggaagcaaaacagttgcactttagatttctgcacaatatattacagcaataactgaaactcggagcacctctatgtctaataatattctattggctatggctcatatcccattttagcatctcttgtgtcaaaattttcaattggacaagtacaatttagattggaatgccgaatggcagaataagtaaatcagtgcaaccatcaattagatactaataactggcagctgtctgcaagttgctctcttccgtttcagcttcagaaggttctgaggtaatgctctgctctgtctctgcatcagatgattctgaagcagtttcttcctcctgtgactgcactgtgctaggagaaccagctgttgggttctgttccgccatactgagcctcagtggccttccttccagttccactccatccaatgcctccaatgcagcctgtgcatcctctgcagtcctgcccacgcgtccgcggacgcgtgggcggacgcgtgg

SEQ ID NO: 387291 - DNA, 944 bp, Oryza sativa
gaaaattaacaaagcgaccacagcttatgtatttcgcatagtgtgtagtacacaaggatcagcatcataatctcagtaactagaagaaaatatacaccaactgttctttttactaggagaatatacatcgattgttctattcatgcagggctacttatatacacaaatgattaactcaaaacctgcaaggaatattcgtaaagtacattattgagtggatctgtcatactcaacatgagtttcaagtttgctgccatgaatcgatcgttcatttcgccgtgtcgctggtgtttgtgtcgtccgttggccacgctacagtttccattaacctctgacgcattatctccagattctcattcgaaatcttctcgtacatttttgcatggtcacatttcttgatccatttgctgtacaagtggagtcgtgtgatcatcactctctctgccaaatcttgcctctcctttgcgagtgcgatgaggaaatgtttgccctcctttggatcgttatccccgacgtagttatacagccgagtataagcaggtggattcatttcatacaactggtggagcaccgtgcttgtggccttgtaagtgaagtaattcatgatttccgtgtgaacgtcttcgaacccctcctcgttctgcgcggcgaactcgtccacgatcatgaggccgtgacggccgggcctcctccccatccgccgcgccgcccgcgccaccgtgtgccgccgcctcaccccgacgaggacgccgcgggaccacggcaatggcgccgcgcggcacgcggaggagtataagtacgaggagggaaggcagacgaccgcggcggccatccgcgcgacggcagccatcggcggcgccgcgaaggagagctagagatgtttttttccctcccgacggctcgacgccggctgcgacgatgcgagccgcggcgcggacgcgtgg

SEQ ID NO: 387292 - DNA, 473 bp, Oryza sativa
tgaacaaaaaagatgatttgtcgatctatatacatgtgcaattaagctgcaaaaccatgcaccgggggtcataattaattaataaactgatgatcgatcgagctctctgatcatgatcatttcatagaaagagtagtagtgtaattctttgtgaatgaattaactactaagtacatagcagtgatttaatgaggtaagagtacgtaatcagaagttgaggacgctggcgtagtagggcgaccaggtctccatccatgggctccgcagctgcgtcaggaatggctcctgcatccactccagcccgctctgcggcctcgccacctccagctgcggcaggctcagcgtcgccgggcggaccagctcatgcgccgccgccgacgcctcatccacccccaccacctctttcttcatggcgtccgaggaggaggagatggagatggaggaggagtcctgctgcaggggcgagccggtgt

SEQ ID NO: 387293 - DNA, 617 bp, Oryza sativa
tttcaaattcgttcactatattagtgatgattcatgtgaactgttcaaattctgatatgctattcatgtgctcggtaacaaaattcaagcagcacctcaaaggactgagggttttgcgactttctagatatgatgaaataactaacaacaaagattacacactctaccaaacaatctaaaatagatcattttaccatcgttcccttggtctgccatcaggaaaaacaggaacatgtgccttgccattggcagaattagcagttttcttcatagtcaccttgacttctttaagacttgagccatcatcgtcttcgaagtctggtggcgagtcatcattctcgccgacccagccatctccccagtggtagtctgtgtcagatttgccaccagaaatctcactaattaagtcttccatatccgacaatccctcgtcttcatcatcttctacatcgcttccttcactcagcatttgcgcagctccattggttctatcagcctcctcactagttgccggcacaccccttctagggaagcgtgggactgcaacaagagccctcatcttctccttaagcggacgcgtgggcggacgcgtgggcggacgcgtggcggacgcgtgg

SEQ ID NO: 387294 - DNA, 732 bp, Oryza sativa
  unsure (1)..(732): unsure at all n locations
nnnnnnnnnnnnnnnnnnnnntttttttttttttttgaggaaaaacctcagaagaggtcagggagagcctgttttcattaaagaagaagagacttgacccaggttttgaggggaaaccgggcccaaaaaccttacataagcacggtttaaaggggaaaccgggcaaaacccacaaggagaacaaagaaaaaacttgcgacggcacaactggaggagaacatagctcatcaaagccaaaaactccgacttcctatgaacagaccacagacaacgtagagcagggtcttcaagacgaagcctccaaggaggaaacagagcgtcgaaacgcaagcaacgtccgtccgaaaatcggaacagggttttcacccgaagaaaacgggtagagcaaagaacgatgccttcaacaaggaaaacggcgcccacaggcgtcgccatcgttgcctctatcctaagaacgagcaggacaaaacgccccggctcgctctccctgccaactacgacacccctggcttccacaacgctaccaaggaaagcgggagagggttatcgttgccgagcttgtcacctacaagcagctccgactccccccaacacacctacccaaagacacgccaggaagcccaacagcacagccaccccaacgaagctaccaaaaagaaggggcaagggggttatcgttggccaacttgccacaacccgggccaagcagttcgaattcancccaaacacctt

SEQ ID NO: 387295 - DNA, 1956 bp, Oryza sativa
agcctcttggccttggcccagatagaagccaacatgttttaacgggttatacggtttgcttctgttgcaacagttcccaagattaacttgcatacagcattgcattacactgatactactacattctactgcaagagtaatttcatctcatctcaccaggataattacagtacaagattatttggaacgacagtagtattaaccaactcgttctcgctacaacaatccaatacaattgaatacagaggttccagctgtttaaatacgacatggcgaaaacaacagttgaatgcatgtccagtcccagcagctgtttgtccggaatgctaagatgtaacacggcaaaacgaacaacaaatgaattcttcaaaaatgggcgctacactgctactacaacatgggcatcgtcaatcgtcattgtcatcttctaacatgggcatgtttcttccaggatttgggttgataggtcctctgtttcatgtttctctgtgagatgtagttggcctcctcctggaaggggtttggtccaccgtagtcttcctttgaatttctgattttcttggtctttccacggtcatactcctcgtcccattcatctaacacatatccaatgctcttgctttctgaatgttttgactctcttgcctcagcatttgacacagcaacatcatcccagcatggaacagtaacttcagccaagtcccttgtcagaacagtaaaatgccggggaactcccaattttgcatgaacattgttccttgaatgttcctgatttgcagaagagcctggacccagcttcggaagctcagcactagcagcggtttcactaataacatttctcttatccatgttaagttcaccactaccagtatcggctccaataacgtcttgctggttttgcttctggttattatttttagggctgtcactatcataggcacgtttccgccctctgggagtacattgcacagtttcagacgccgttgttgttgatgttgatgcctgctgctcgcttgtgttgttacctgaacaagtggcattggccatgtcctcacaaactacagaccgtcttctagttctattgcatttctttttcttttgtacctttagtgaacctagcataacttgtctgggcccaagccacatgttcatgactggatatctcacaagtttctttgacttcaaatccacccttttaggtgtgttgctattgcacgaatcagctgcagctaccttcatggaaacttcagagctagtctgttttctggcgttgactcgttcaagtcctgatactatattgttctcgcttataggaagttctttcaccgttttgtcatcttgcttgatggatttttgcaagccacacaccttctcactggaaattggatccctgctactaggtacaacaccatttgaaacaatagcatccttagttgggaaagtttgtgcagcaagccctgcccctgtgtcctttccatgggaagctggcatagaaaatggattttgatgctgggatgtttgtttatttcgctcagacaatatcgcattgccattgcccagggaagaggtatcggttaagccatcaacctttggttgcaattcctgcgacggaaccatggccactgcttggttcacaatcacatgtgtaagagatgcagatcgatctgatgaagatacctctctgtgaccagttgaagtaatttgcttagattgagcagataaggtagctaccatcaatttgaggtgcagaagcgttctgtgtggaagccaggccattgttttcagaggctttaggagcttcagttttgccatctttcttcaaataatgctctcttgaagtcttgattgagttcccattgcttatgccgtgcaacctcttatcgccataaggagacgaggaaccattcaattttgcttcaattacgccgctctggatcatatcaccggacgcgtagg

SEQ ID NO: 387296 - DNA, 768 bp, Oryza sativa
  unsure (1)..(768): unsure at all n locations
nnnnnnnnnnnnnnnnnnnnnnnnnnnnnnnaatgaactgagatcccttcaatttgactaactaatatttttttttcttataaaagagtttacaacagtacaaccacgaagatcagcactaccattactgattttgttaacatagagtgatttatcatgtgtgccagacaaacaacagatacattcatacatagcataacttacagcacatgatacagactacggagaacggttaatcttaaaataaaaacaaaaaaacaaggaggcaaagcttattttgcctgggattcatctaaatgcagttgtgtgcagaaggagatcatgcctgtgcccttgttggtggatttgcatggaaagctgattgtctattttgacctcctaccagatttaatgaaagagaagtagacactgtctcttgattggactctcctatgctgagcttcgacatgccaacaagctcatcaacgttgattgggctctttgaatgaactggaacaggcttgacaatctcatgtgtttcttgcacaggaccatcttcatctttctgattttgccagaaaggaaccgagaattgcaaaaagggcgagaaataagctggaacaatcactggataggtcgactgcaaattatctggcatgatagcagaagcggaagagctctctgcaacggcagaagtatctgactccatagaatctacctcctcctcctccctcggtggaggtagtgctggttgatttaatacttgggtctctggttccggacgcgtgg

SEQ ID NO: 387297 - DNA, 839 bp, Oryza sativa
  unsure (1)..(839): unsure at all n locations
nnnnnnnnnnnnnnnactaattgcaacttcgattgacatctgaaccataacagatcataagcacaaaaaatacatatatattgaccagtaaactgatcacccggggtcacaaccaacacttacacatgtaataatacatactggccaatggttttttcccagaactaattaaactttgcaagcataaacaaagacaaaacagacagtttccaaagttcagagagttcagactgctcacagtaaaccaaccaacaaaaacatgtagacgacgtgtagcacactgtcaatcgatcgatcgatcgatcggctgcagtgtcccaatgtgattaagcacactggtagtcggatgggcagatcttgccgcagttgttgaggatgaggctgaggtcgatggggatgttgaggttgaggccgagcacgttggccttgatggcggtgcagaggcagacggcggcgtcgaggtcgacgaggccgtcgagcagcgagcagcagggctcgtacggcgccaccgcgccgatcttggccttcacgaggccgagcacgttggcgcacacgtgcagcttcagcgcgtcgcgcgggcacgacccggcgccgccgccgggcgtcggcggcctcggcgccggcggcttcggcttcggcgtcggcggctccgggcagtaggtgcaggcgctcgccacggccaccaccaggaggctcaccgctagaacgagcgctgccttcgccgccattgctgcaattgatcaagcaaaagctagtgaagaagatgagagtactaggtagctagtagatcagctcgagccgacgcgtgggcggacgcgtgggtcgaccgggaattcggc

SEQ ID NO: 387298 - DNA, 760 bp, Oryza sativa
aaacaaagaaatatattaattttgtttttattttgagttccaatctctgaccattgcatatatgcgacaaaaaaatacatttccattttattgacgaaactataaccaattcatgagaaccaaaaaaaaatacaatgatcatagcgctaccaacggatcacgaaccatagaatcaaaagaaaaaaaaagcaagaaattaacaacacatcaagatattgggggtaaaaacaacatgaagatacggtactcccagccatggagtgatcaagtgcaacactagctctctagatctcgatctagtgcacgcactggtagtcggatgggcagatcttgccgcagttgttgaggatgaggctgaggtcgatggggaggttgagcttgatgcccagcacgttggccttgatggcggtgcagaggcagacggcggcgtcgaggtcgacgaggccgtcgagcagcgagcagcagggctcgtacggcgacacggcgccgaccttggccttgacgaggcccagcacgttggcgcacacgtgcagcttcagcgcgtcgcgcgggcacgacgacccgccgccgtagtgaggcgtcggcggcttcggcctcggcgccggtggcttcggcgaagggcagtccgggcaggccacggccatggccaccaccaggaggctcaccgccagcacaagcgccgccttcgccgccattgctgcaactaatcgagctagtgtagctagctagtagctcgagcttgctgctgccggacgcgtgg

SEQ ID NO: 387299 - DNA, 621 bp, Oryza sativa
ggatgaaaagtagagcttcattttattggcgaatcattcatgggaatcaaacaacacatggaaccaagagatagatcaagaactaaagtactccaaacaacatcaagatacagtagtactctcaagctcgcagccatggtcatggagaaacaagtgcaacaaccagctctagtgcacgcacttgaagtcggatgggcagatcttgccgcagttgttgaggatgaggctgaggtcgacggggaggtcgagcttgatgccgagcacgttggccttgacggcggtgcagaggcagacggcggcgtcgaggtcgacgaggccgtcgagcagcgagcagcagggctcgtacggcgccaccgcgccgaccttggccttgacgagccccagcacgttggcgcacacccgcagcttcaacgcgtcgcgcgggcacgacccggtgctcggcctcggcctcggtgccggcgggcagtcggtgccgcaggcgctcgccgccacggccacggcgaggaggctcaccgccagaacaagcgccgccttcgccgccattgctatcgatcgagcttaatttgctaggctgcttcttgtagcttgtagctggttagctcgagcttgccggacgcgtgg

SEQ ID NO: 387300 - DNA, 459 bp, Oryza sativa
  unsure (1)..(459): unsure at all n locations
nnnnnnnnnnnnnnnnnnnnnnncnaagcaaacngcaatgaaattatatgcttatttacaacagtcattgcatgtttgaatgtgtattttctgcttcagggggggatatgcattgtcacatataaatgagagaacatagtggacacttacataaataggctacaaatttcgcaaacaaacacaggtggtacttgggagctattaaaagtaccatgtatacgcttttctttgtttgggaagctagctgtctgtgcctcaaatttacagggaattatccgtctatataacacagattgcttaggagtccaaattctttgaggatggattgaacgccacctggtcagcacaatccaagttatctccagctttcgtcactaccaacaccccatcaggtcgagaaaatgttgggagtggggatacaaatgacggtccanccttaacgatggagcccttgaccca

SEQ ID NO: 387301 - DNA, 696 bp, Oryza sativa
  unsure (1)..(696): unsure at all n locations
gcttggatcctctagaacgaccgcccttttttttttttttttttaggcgcaaaaaatacatatatattgaccagtaaactgatcacccggggtcacaaccaacacttacacatgtaataatacatactggccaatggttttttcccagaactaattaaactttgcaagcataaacaaagacaaaacagacagtttccaaagttcagagagttcagactgctcacagtaaaccaaccaacaaaaacatgtagacgacgtgtagcacactgtcaatcgatcgatcgatcgatcggctgcagtgtcccaatgtgattaagcacactggtagtcggatgggcagatcttgccgcagttgttgaggatgaggctgaggtcgacggggaggtcgagcttgaggccgagcacgttgcccttgatcgccgccccagagccagacgccggcgttgaggttgaagagcccgttgagcagcgaccagcagggctcgtaaggcgccaccgcgccgacnttgcccttgatgagccccagcacgttggcgcacacccccagattcaacgccccgcccgggcaagacccggtgctcggcctcgccctcggtgccggcgggcagtaggtgtagaaggagtttcccccccccccccccccgaggagcctnacccccagaanaagcgcngccggaagcgtgggtgcaagagtgg

SEQ ID NO: 387302 - DNA, 258 bp, Oryza sativa
  unsure (1)..(258): unsure at all n locations
gccgagcagttgggcaccgttcagttaagcgatcgatcgggcaggccaaggngccaccgccgggcgtcggcggcctcggcgccggcggcttcggcttcggcgtcggcggctccgggcagtccgggcaggcgcctcgccacggccaccaccaggaggctcaccgccagaacgagcgccccttcgccgccattgctgcaactaatcgagctagtgtagctagctagtagctcgagctntgcntgctngncntatcgctcn

SEQ ID NO: 387303 - DNA, 361 bp, Oryza sativa
cagtgatggatttagtagtacatcttcaagattaacatatgtaacagccttgtgccatcttgttacagaaagcgattatggatgtgcttccaactatgatctagccttctcatcttccctccaaaattgtacttacacgatagaaattagaacctagtgttggatggcaatcatcacctttacacaatatcagatatcaccaccttcgcaccagtgatgtgagcaactcaaaaagctcaaaaggacttccccgcctgtagacatcatcttgctggctctgtccagtggaaaatagtagagtcaaccagggcacgccatccagtcacccatacccaagtacttcccatggccggacgcgtgg

SEQ ID NO: 387304 - DNA, 565 bp, Oryza sativa
gaatcttttttgaaaagagattatctctgataatctgatttatagactcggcactttatgatgtgtttcaaaatttaaggatgttaggcaccgctcagcagcaagcggacctaaggcgcaacatgctacaacttttgcgttgcctcagtagaatagaataaaacaaaggagcaaatctgcaacagatttccagtgcaatccaacagcaagcagatggcgttccgttcatgttacgttctcattctgcagtcttctgctgccctcacttgttcaaagtagggatgcgccatagcttcacgagcggtcagcctgtcatggtggtcgaagcgaataagtttatcaagaaaatcaatagcctctggagagacaagatgcctattttctggatttataaacttagaccaaggtttcctggtatgcctcccaatcagagcctcaagctggggatcaagtgcaatcctgtatttattcaggtaagcattaagctggtctgtacctagaaccttggctattttgacaagctggtcatggttatcgtggccatagaaagatggttccttgcgaa

SEQ ID NO: 387305 - DNA, 1002 bp, Oryza sativa
ttcattgtcagggcaaattaattcactatttttcttgttagagaagtatccataagaaaatttggtatgaatatccccttgcaaaaacagataagataatctatgcaacgttgtccatgtacactactataaccattaaccaacttttggtatcatcaagacttttaggtgaatagaactgcttggcaaacattaatccaccaaatgcataggtgttgctgaaaatagcaccaacaaatatattctcatcagaataatatatgtgctatttttcacctaagacacaaacctatgcctgttccacaaagatcacccaccatcatgttaggccataccactactggagggatccttaaacggagatcatgtgtggccgttcggtatagtatgcacttgtagattggagggaactactgatcccatctctcccgctccatcctggttctcattgttgatccctgcactgttgtccatccaccctcatcaacccccttgtttccttgatatccctagcctgctggaatacaccaacagaatatgtgccgtttatggagttgcaggaatctggaggcaatggaagcagaactcccgccgtagtgtctagaagcggctcagggtccagaaccaactgtacagatctgggaaggatttgttcacctcctcatcttccagcaagctagctatataagatggaaattcactgatgtatagtggttttgagattgccactatggctagtgggatcttatgaattgaataagtggtggcaaatgctggtacaagtgcaaaaactatcttgcctgagatataaacagccatgtaaaagacattacacattgaccttaaatatgaaacatgagtactgaaggttgacaaaacacacctcagtcagaagtgacttcgatgtcataatatgaggtccgtcgcccacctagctcgtgtttgtaatagcccctaagcaaagtcttgagatcgcgtggatagaaaataaccacattgaac

SEQ ID NO: 387306 - DNA, 395 bp, Oryza sativa
  unsure (1)..(395): unsure at all n locations
cagaactcccgccgtagtgtctagaagcggctcagggtcagaacccaactgtacagatctggnaaggattttgttcacctcctcatcttccagcaagctagctatataagatggaaattcactgatgtatagtggttttgagattgccactatggctagtgggatcttatgaattgaataagtggtggcaaatgctggtacaagtgcaaaaactatcttgcctcagtcagaagtgacttcgatgtcataatatgaggtccgtcgcccacctagctcgtgtttgtaatagcccctaagcaaagtcttgagatcgcgtggatagaaaataaccacattgaactccagtaagcattagatgatctgatcccaactcagctgtgcacaacttctcgctc

SEQ ID NO: 387307 - DNA, 487 bp, Oryza sativa
aaaaaatagggccgtccaaattgtttaaaaccggcggctttcagtagcagtttactggggtcccttaaaactaggccgaatgaccttttcaccaggttttttgtcagataaaaactgcttagttttttcagctgtcaagttttgaaagtggggttggccaatcttccggggtttgaaatgtttttttgccagttttttttgtttccgaagttttttttgttctttttgagaagtcatgttttgttcatgattggccggatcatgattccctttggacaatggttttttcctaaattcacttgccttgcttgttaagtaaaccatgaacctgtttttattcacattcttaattttgcccgttaatacatcaccttcatgtaactgcagagtttctagatcaaagccctcatcagaatagttatcagccataactatggctttcagaccagaatcgaaggtgcaaatgattcggttatcttctcgtgcc

SEQ ID NO: 387308 - DNA, 754 bp, Oryza sativa
tggttttttttattttttgggttttttaagaaacaatgagactccatgaaacgttgcaaatcataagagtaacatcatcgatcaacttatcttagggctacaggtgactcaagacaacaagattgccatccaactcaaacagtgttgttgattggtgagaaaatcttgcatgagaataatgacaagcaggatgaaaagctcagaggcgtgctagtcatccgaaaagaaaaattctgtgaggacaacaacaaacatgggagatcatgaacttggtttgtcggctttttctccttatttgtgaagatcattcatttgaagtaaaaccctgagaggctactcagatacggggcatgcactctcaaaatcttgctgctccttacgacagaagtcaaattcgttggtgtagtaatacatgcagccggcataggcgtccatctccttggggcacttctggtgaagttctttcaacaggtcgaagacgcagcgcttgacctggcggcccttctcgaggcacttctgcgggttggggtccttcttcttgcagttgaggaaggccacgttctccggcctgcaccgcacggcgatgtgcttcgacgccgccatcagcaccgacgaggtcgggatcggatcccccgatgcgtccaccggcgcgctgctcgccgacatccctgcgtgcggcgcggcgggcctcgagggcttctcgccttggagatctgaggaagtcggagatggagatggagaggactgtggagga

SEQ ID NO: 387309 - DNA, 813 bp, Oryza sativa
gcaaagaccagccagagtaacacgggggggcaatttaacatcgctggaaagaacatggcgaccattcattttaacattgccaggattatggaaattctgtaacatttcaatgtaagcaccgtgctcccaaaaacatatcccttccccaacattttccaacgaatacaaccagttttgcatcacaactcgcccttctccaaaaactaatgaacaccacccctatagccttcccatggtaaacacaactctgtacatcgtcgatgcattcggatcagcttcaaaataaattcagcaatgcttatgaatctctgaaattttctctatcctctagatggcaaacgatcgaatggccaccctcccactcctatgccaaaatcttattgacaggatcagggatcagaactataccgaagctccaaaaaacctaaacaaaaggattactggcttttctatttctagtattctcatgtgaccgtttatttatgacggggcatgacaaaactaactgatcagtgcaactgctgaattaccactttacgcctttatcccccacagctcaaaacgaatttggtatcaatttctaatcttcacaacaccacaaggaaaagcctatctgaaggaacaattactttgcagcttcaaagaagagcacctgaggttgcaagtgacctttcttacacattacgagcacatcatcccaattaccaacaaccttcacagtctggtcatcgtacatgacccactgcccatcctcaaaagcaaagcaatgatagtgttgcccgcggtaacagaccactgacaccggacgcgtgg

SEQ ID NO: 387310 - DNA, 844 bp, Oryza sativa
  unsure (1)..(844): unsure at all n locations
nnnnnnnnnnnnnnacataacacaanatagatttaagatccttacgcatggaggaaaattatctcctatacaaagccgttatatgaaggttcaatacgttacataaatgacaactcagaagtatgcatgtacagcttcagtcaagaccaatttccaacaaaagaaaaaacgatctttccctattctgctcctgttgaaagaaacacttcggcaaagagtgaaacggttgctaattcctgatgaatctggacaacctcaccaagatatgtacacatacatgcacactcatacatcaaaacctggcattgcaaactgcgatgcaaaattctcaacctggttacggagttctatgatatctttattgttctgtaggcctctcaggaattccttctgcatttttccatgttctttcataagattactagctatttgggtggctctgatgaggaaatctgcgatcacctcaaagtcatcttccaagcaacctctagtagtcattgcaggtgttccaatccgaacacccccaggagatattgagccattatccccatatatcggcatcttatttatggagatgtggcatgcctcacagaccttctcaaagttctttccagtcaagcctaaatttctgaggtcccaaagtaccaagtggttatcggtgccaccagtaaccaatctgcattttcctctgagtaaggctgatgccaaagcttgggcattttccgtaacttggatagatgtatgctttgtattcaggtgttgctacttgcttcagagttatcgccaaggctgcaatatgattattatggggtcctccttgccggacgcgtgggcggacgcgtgg

SEQ ID NO: 387311 - DNA, 765 bp, Oryza sativa
  unsure (1)..(765): unsure at all n locations
cttcccccaagtgagacagtaaatgtacagaaagtttgggagttggctgatttcgttgaattgttcgggaccgaagcaaatttgggattaattttgctcaaaaggactgcactacgtacacttcaaataattttcctccctactctacatgttacaagcgtcttttgccgacgcaaatatctgaatttttttctgaatcgtcttgctcacgtccggccgccgccgatgatcgttggttgatcagccatgggcgccggccgaaaatgttgctcgtcgatctatccctcgagtaatcgtgtaaaaattctaggttatatacagcgaatcatcaattcctccctagccgatcaatcgatcgatcgaactccgccatggatggacaccgcgtcgatcgtgttcttgctggcgccaccaagaacagagaggcagagacaggagaggatggcaatggccatgcccgcaagttgcaagaagaagcgatcgaatccgccgcgtcgatcagtagcaatcgtcaatccttggtcggcgagagctccaggatgcggccggagagggcggtgaccagcgccgccttgaagcttgggtcacgcgtcagtccatcggccatctgctcggccaggttccgcctgatcatctccgaagccgccgcggcctgctgctcgccgttgacgaacgaccggttcgtgctgacggtgcggaacacgggggtcttgccgganccgtcgtgtttgggcggcgattgancggggcggcggctggcgtggt

SEQ ID NO: 387312 - DNA, 524 bp, Oryza sativa
taatcgtgtaaaaattctaggttatatacagcgaatcatcaattcctccctagccgatcaatcgatcgatcgaactccgccatggatggacaccgcgtcgatcgtgttcttgctggcgccaccaagaacagagaggcagagacaggagaggatggcaatggccatgcccgcagttgcaagaagaagcgatcgaatccgccgcgtcgatcagtagcaatcgtcaatccttggtcggcgagagctcgaggatgcggccggagaaggcggtgacgagcgccgccttgaagcttgggtcacgcgtcagcgtcatcgccatctgctcggccaggttccgcctgatcatctccgaagccgccgcgggctgctgctccccgttgaaaaacaacggttcgtgctgacggtgcggaccccgggcccgggggggccccccccgggcatggggtggttcccgggccttgcggaacctcctttcttccccccaattacggggggggggggcttgttttccccccctcctcccaatt

SEQ ID NO: 387313 - DNA, 1191 bp, Oryza sativa
aagctaagctagtagtacactactggagtacatgagaaattctcgatcatcatcagtcacagagcctcacaagggctcacatctcacaaaggaaatgttgctgacaggaattaagttaacacacacacactgcacgcagagctaaccaagtcatcaatcaccacaggtgttgttggtgttcaactctctccccccacctctaaccaaacgaccggcgcagcaaagccgtggccgtagcgacggctgagctgcgccgaagccgttttcctaacagcaacacaacataatgttcttttttttttcttttcttgaacaggctaagaggcggcgaaggccgaattctgcagacgccttggttctcttgcactgtacacctcaaccttcgccacggaaaaagcacaaggtatccctcagcagcagatgttacccagtcaagagttttcacctcctctgcctttttgactcagccttaggctcatactttgttgaacctgcatatgcatgtgaaggtctctttgcaccgttttccttgacacaatctgagcacacaaagtgatctagtttttgggcctgctcaaatcgtcatgcccatccatgatggatgaaaccagtccttgcagtcatcgcactgcaccatgagatcatccgggttgtatggcatctcacacttgcagtatacggcaacgcggtcgggggtgaaggcgccggtggcggccttgtactcgaagcggcagaagaagtcctcggggccgacgttgtcgagcttggtgtagttcttgaaggagtggacgacgcacttgccctcgatggtgttggcgctctgcatgtcgaagtggtcggagaggaagagctccttggcgccatggaactgcctcctcccgcccttggactcctcgggccggtagtaccaccgcacccgcacccgcacgctcccgcgcccgtccagctccatcttctccacccgcgccacgtacggctggttgtccgagtccaccggccgcatcagcacgcagtcccccactcggacgaccttgttggtgccggagatggtgtaggagtcgacgtcccgcttgccctgcttggtcttggccatggcgaggggggcgaggttttgggaggtggaggagggagggggggagagaaaccctagaggcgacggccatgagatgggtgggcagctgggagaagcac

SEQ ID NO: 387314 - DNA, 761 bp, Oryza sativa
agtgcatctctcacccgggatggctcgtgtcacacaattacttcttccgcttttttggctcaaccttagaatcagaatttgatgatgctggatatgaatttgaaggtctcttcgtgccattttctttgacacaatctgcgcacaggaaatgatctaattttttggcctgctcaatggtcattcccatacaagatggatggaaccagtccttgcatccctcgcactgcaccattagatcatccgggttatacggcatctcgcacttgcagtacacggcgacgcggtcgggggtgaaggcgccggtggcggccttgtactcgaagcggcagaagaagtcctcggggccgacgttgtcgagcttggtgtagttcttgaaggagtggtcgacgtcacttgccctcgactggtgtgggcgctctgggtgtcgaagtggtcgtataggaacagctccttggcgccatggatctgcctcctcccgcccttggtctcctccgtccggtagtaccccagcaccagcatccgcacgctccccctcccgtccgtctgcagcctctccaccctccccacgtacggcgccttctccgtgtccgacgcccgcatcagcacgcaatcccccactcggacgatcttggtggtgcccttgatggtgtaggattcgacgtccttcttgccctgcttggtcttggccatgcaggggattgggaggcacccctagaggagtagtaggtgggggcagaggtgtggccacagctccccccgtt

SEQ ID NO: 387315 - DNA, 576 bp, Oryza sativa
actctctgtccccaagagactcaaatcttaagaatgatagacaagcatgtgtgtatacattcatccttacttcttccgtcttaaaaaaaaataaaaaaagataacctaggtggtggtttgacacgagcaacatagcctagatatgtcattgttcatgttgcacaggagaagcatatgttttgcccagtatggaacgattacaccttccaatttccaagagggcatctttgaataatctggtccagtagcgcacaagacacagagaaacgaactcactaatcaaggctacacggatttcaccaatatggccatcggagagcatctaaagctaaagctatacacacaccaaaatgatctttgcgaacatcagcgagtctcttcatctctggctatcttttctttgaatttatttacctggcggggtttcgatgcgggccttgatgatcttctcaccggatctgccttgtggaccttgctactggtgctaactttgcttggttcaacagtcttaccatcatgttcactatatgtactacctggttttgcttgccaccaccatttttgcttgtctttctg

SEQ ID NO: 387316 - DNA, 1222 bp, Oryza sativa
tacagtgttaccaataatttcagctgattttcacgtgtatcagtataaacgtcatgccaatcaacaacatgccaacattaatggccacctcagtttgctcattacatcaactggaaatatattttaaaaaatgtgataccattgctactgtttcagtgcaaaaggaagcgttgcgtttctaagattgttacacgtatggggaacaccagggctacaaaatttgtgacaattaactgtattgaagcttgctatgtgaatccgagaaaaagaatggacatactgtagttgacgtacccaatatgccagcgaaaggcccagcagatctcctatctcagggtaggtagccttcaaggtgatggcttctgactttcagctgtaaaatctgcacaaaatctgcttgcccactttgctatgatgatgttacaacaatcatatggcagtagagccgccagaaggtatacatctctaatcatgtgaagaatgtgacaacatctcttctgtatcccctaactatcaacatgcgtgggacgttctctacaagcagatccatgtactccatgtagaaatacgcagggtgatttaatggtggtggagggaggcttacgaggaccacagctgccattctggagtacttaagtattgtcgagttcagcttgaacattgtatagaggaatttctcaatcttctgttcattcacaactacttgctttccgtcctccattagtggatgtccttctctttgtgcagtttccttcatctcagagaggtatgtgctgatccttcgctgtgcacttgtgtaagcctcttgagaatcgtcctgtggagcaccactgctactgctctccatatgaggttcccatgacttcatagtcacgacgatgcacctcagcatgcattcgaagatcatacaagaactttttgacgtcagccttcagctcctcagcatcagtatcctcctctgctatgcagaacacttggattttgcagctttcaaaggtctcttttgtgaccaggagctgacacagaaggagcatcaatcctccatctctcgcaatccagtagaggccaatagtcccgtactgcccctggtactcattaggccactcatcaaggcccttcacaatgacaacggctttgttagcaataatgcaatcatttattatgctaacaaatgttgacggtatctgtatcagattctcgcgacgccaaatctcagggtacc

SEQ ID NO: 387317 - DNA, 401 bp, Oryza sativa
aaccaacacccatcccattatccattatctctgcggggttttgattgatgtgcgaccaaccatgtgtattattctcaaagtttaaccactctcaccaccactcattattccatccaatcttccatccatccatccaaggcaagctcagcaaatcaatcaaaaaaaacaaataaaaagagaaaacaaaatggtgtatatgaagaagtctagcaaccggcgaggcgggcgcacaccctgcgctggatgggggtccggcacgatgggcactccttcatcccttgcttgtcatggaggtcattgcatttcgcgcagaccacctggtgcgcgcaagggaggaagacgaccgacatcttctcgctcaggcacatgacgcactcccggtcacgctgtatgtcgtcaaa

SEQ ID NO: 387318 - DNA, 1029 bp, Oryza sativa
aatataaaacgtacgtatgagatctatttctttttttaaatacaagtgtgtaatggttcacgcgtgtttgcgtcaaagttacattgtacaggcatttgaatcatcactgggcagggctggctcaaagtcatataaaccttttctattcatgcaggcagaaatttctgactcattttctacaccttctacacattttatcgccgtaaaatgtttactattgcatggtacaatcaatacacatctcctatcatatacatgaaaaacttcttcagtttttacatgtctatgactcctcgatgggcatcttgatgcccttgatctcgcgtgccagagaccgcaactcttcgacctcgtcgccggtgaggctccagccgagcgcgccggcgaactcctgcgcctggccggcgttcttggctccggggattggcaccacattgccttggcatgtcagccagttcagtgaaacctgggttgggttcttcccatagctttcttccaatctccttgatcctgttcatgagtggttgaagcttggtgaggaactcaggggtatatgggtttgctcgaggaccggtaggaggtttttctggagtgtattttcctgacagaacaccttgggctattggggaataagcaatcagggtgatgccaagctcatcacaagctgccttcacaccattcaactcaggagtcctgtatattagcctgtagttcacttggtttgcagcaagtggaactcctcttttcttcatccgcgcatatgcatcccgaaggcgtttctcattgtagtttgagactccaacagcctttacaaggccttgctcataggcatctgcaagtccatcaagatacccttcatttccccatagccctggccaatgaagttggtagagctcaactgaagataacccaagacggtcaagcgatttcttcagtgcggaaagaacacttcctcggccaaatctccatggaagtgcagcaaactttgttgcgacggcaacatcaatctgttctttctcggacgcgtgg

SEQ ID NO: 387319 - DNA, 737 bp, Oryza sativa
agaaatactcatgaaacaacgggatctaataaaggattaaatgttgcacagccacataaagacgaaatggcactgtatctgcaaaattcttggggcattaatcccagtattattaattaagaaaaaaaacttggaaatgcagatttaaccttattaaaaaaataaaaaataattggttacttttgtacgtgctggaggtgaagcaacccaagctccgagctgcatgggaaagatttttcttggccaacctttttccaacagaatatttgaaagcacgattagtactaactttcatttacaatagcagtctcctaatgtcaccaaaattctgtgacaactctgtgaaaaacttgcctcctacttgaccatcaaatacacgatggtcagcggacaatgtcaagctcatttttgtaaccactgtagccttctcggttccatcactgtccaccacaggctcgataatcttattaccacgcccaacagcaagaattccagactgaggaggattgatgattgcacagaagtggtcgactgggtacattcccaaatttgagatgctgaaagtccctccctgaaattcattaggagcaagcttcccagcacgtgccttttcagccaactgcttaacctctgaggatattgctgatatagtcttttgatctgcatttcttataataggagtcatcagaccggacgcgtgggcggacgcgtgggcggacgcgtgggcggacgcgtgg

SEQ ID NO: 387320 - DNA, 611 bp, Oryza sativa
ttgacgagtgctgaatcagtaacatgtatgatcttcatttatttacatactcaattattagtcactgcaaacataatcacatagtgtccacctaattgattgtgtagatccacataattacacctgtccgtcgaaaggtcgacagcgaacgaatgaacgattaacgcgtagctgatcattccagtcttgattttccacgttgccttgtatttattgcctacaatcagctagcagctgatcgttccggcacagtggccatcggaagccagctagacgaaagcttttgtcccggtcccaattcacgattttcacatggagctggaggcagcgggagctctgccgtgcttctcggcatcgacaaattcggtgatcctctccaggagcatgtcgaagtcgtcctgcgtcttgatgaggctcagccgcgtgtaccgagtgccggcctcgttaacagtgccggtaagcgagttgatccccgccgccagcagcgtctcgtagcagtcgtcgtcttccacccactcgcatttcacccaagcgtaggctggcgatggttctttgatccggttgaagtaagtgcagtactgcggtggcatcttctgcagcgagatccgggt

SEQ ID NO: 387321 - DNA, 380 bp, Oryza sativa
attgctatctctaaaaattcccaattcaactcattcgttcatacacttgattggaaattttgaatgccattgtaccaacctttcgtaactccattcattaaattggttactacagctgttaataatcactgtactaaactgaacttgtgaatttgcgatctactaacatcaatgaggcatcgagatggatgtgtatatcattttcctttgttccttttcaccagcaagatttgacaaaagctcatcacatcacctggcgctcggctgcatctgcgacgattggcagccgcggcgtcttccctagcaggcacgcgcccccgccgtagactaggcagacgagcaggaagaggaacacggtgctccggacgctctggaagagc

SEQ ID NO: 387322 - DNA, 464 bp, Oryza sativa
gacttaaatgctcctttcctaatcattggctgcatcaatgactacaaggaagattcaaatgtacgaaccgtttgcaactcatagcaggcatttcgattgaaggggaataaaatctatactaatgatagatgtacaaatagacatcaagttcaagcctctgaaacaatgtcattaaactcaaacaaaagccctcctgccgaactttctgatagaaaaccatttacctccagaataatttaggtgaagacttcataaaacttctcaaccacgagcaatcctgagtcaattgattcaagtgggtccttccgaagccgatgcctcaagcagttggggataacagtggcaatgtcctctacagggacagggtccctgcctcttgagtgctgccaacgccttggcagccctggtagtcacaatgtcccctcttaatccatcaacattcaactctgcacacactttagaaa

SEQ ID NO: 387323 - DNA, 827 bp, Oryza sativa
atgtagatgaaccatcctagtagctggttaccaagccaagcatgtcattggatacaaaaaaatgttggcaactgtatagaaatttacaagactctgaaatctgaatctagaaaagcatcaactcatttgggcatacaaaaagtgcagttcagaaaatgtgcaggactcccatgctaccatgatcactccgaacttccttccttgaacaccttgacccaattctcagcactgtcaattatttcaccagtcttgaccaggtaccgaaccttcgttccatcctcaaggaatttgtgtccaaccctactcgccacattcttttcctttgagtagagcatcacatttgagctgtgaatggggccttcaatcatgacgatttcacccggttcatcttctgttcctttcttgtgcttggacttcaagttcaagtccttcactattacagtgctgttgtgcttaaaaagccgcgtaacttctccaaactttacctttctcacggcctgcaatgacttgtactgtatcgccaatcctaacatgcatcttgtgcaggacaggaagactgtttggtttacacttcttcctctcccatcgcttaagcctcatttgaattgggcatgtcttgatcataaatttaaccccagccggcgcggcggcgaaggtggagagcgggtggccccagaagctgctggtgctcgccgcccccggcgcagagatggagagggacgccatcgcgccctgcaacgccgccaccccggccatcttcgtctcctcccctcctcttcctccctcgctcgctcaaaccgcagagaagcagcagaggataacgaacg

SEQ ID NO: 387324 - DNA, 581 bp, Oryza sativa
tcagtatccaactagctcaatttatttgttccaacagcatcacatgtactgtatatgcacaaggatcacacagctagcaccagttaagctcgtcccagcgccacacgaaaatgtaaccaaggacggtcgcgatcgtcacttctagctactccaaccaatatacatagtacatactgcaaatctgcaatctgcaaagcgctgcaacaccacacgcgacagatactccatcatcaggtgccctccgccccggacatcttgctcagcctgctgggctgcttggagtccttgccgccggccaccgcctgctgcctctgcctcgccgcgccgcggcaccggctcgtcgtcgtcggcccgtacagcgcccgctgcgccaccgcgccggcgtacaggtccacccctcgacttaccgccgccgccgccgccgatgccgtcggagccctggctgatgatcttcttcgtcgtctggtggtggtggccaccgtgatgatcagcagctgacgcctccatgtcgtcctgatgcgaaaacactaattgcgagtggtgcaagtgagatctaaccggacgcgtgggtcgacccggga

SEQ ID NO: 387325 - DNA, 2534 bp, Oryza sativa
  unsure (1)..(2534): unsure at all n locations
nntcagagaacgagcagcagctgtaaaacaaaataatttactttagtcccccaacttatacaaatttacagcaccaaaagtttcagaaagctgcgtgccaggccatgcggaactgcaggttatggcaaccgcagaagctgaaacagcaacagtaacatcaagttaactacaaagaaccgtaaaatagtatcatcaccatgttcatctagacatagtagaaaacattcacactctcgaaatgctctctatctttcagttttgtgttgctatacgtcttcttgttttgcattttttttagtattccatttctgttcagcagagtggcagtggcgcgccattccattccttgaggcattcgagcagcgggtcgatgtgcttgcgctcgttgatggcgacgagcaccttgttcagctcctcgccgggcgaccgcgtcttctcgccggtgaggtactcggtgccgacctcctcgcgcacgaaccggtagagcgggtacgagcggcactccttgatccggttggggacgagcggggtgccgttctcgacggcggcgcgggcggcctccacctccttgggcagcgcggcgcggagctgctcctcgaacttggcgaccttggcgaacacgaggtctcgggctcggcgtcgccgctggtgagggcgtgctcgacgagcacggcgcggagcttctgcatgagcgggtagttggcgctgcacgggtcgtcggcatagctgaacacggcctcgcggtcgatggcggtgaggaggttcttctcgctgaagcgcgcgctggagaggtcgccggtggggttcatggtgagcaccttcttggccacctgggtgacgcagttcttgacggagctcttgatgttctcctcgaggtggcgaaggtcgacggcctggcacagggcgacgatgtaggtggaggtcatgagcttgaggatgtccaccgcctccagggtcttcctggccgagacgagacccagcgagttcacgtcctggttgtgctgctccgcgctctggacatggttggtgatggggttggcgaggtactggagctcagagcagtaggaggccatggcgatctcggtgcccttgaacccgtagtccaagctcgggttgcggctgccggccaggttggaggtcagcccgttgttgtagaactcgttcacgagctcggagaactgcgcgaacatgagcttgccgatgttggcgatggcgagacgggcgttgtccatggacacaccgatgggggtgccctggaagttgccgccgtggagcgccttgccgcggtggacgtcgatcaccgggttgtcgttcacggagttgacctcgcgctcgatggacttggtggcggcgcggatgacctcgatctgcgggccgagccactgcggcgacgtgcggagcgcgtacctgtcctgcttcggcttcagcagcgggtccatctcgttcaccttcttggcgtggctcatgaacgagctcccggcgaggatgtgctccatgatggcggcggcctcgatcgacccagggtggtgcttcagcttgtgggtcaggtggtcggtgtactccggcttgccgttcatcacctcgcagaacaccgccgagagcacctcggacaggacggcgaggatgttggcgtcgaacatcacggtggccgcgagcgccgaccccacggacgtgccattgacgatggcgagaccttccttggggttcagcgtgaagaagccaccctcgatgccggcgagcttgaacgcctcggcggcgtccaccttcctgccgtcgggcgagatggcctgcgcgttggggcggccggtgatgaggccggcaatgtaggacaggggaaccaggtcaccggacgcggtgatggtgccacggagcggcaggcacggcgtgacgccggtgttgagcagcttggtgatggcctcgaggatctcgaaccggatgccggagtagccctggaggagggtgttgatgcgcacgagcatggccgcccgcaccgtctccgacggcagcgtgtggccatcggagccagtgccgaagattccggcgttgagatgcctgaggagctcgacttggagggcggggccgtccttggtgcggcggtgggaggtgccgccgaagccggtggtgacgccgtagatgtcgccgccgtgggcgatgcagttgaggatccactcgctgctggccttgacgcgggggcgggcctcctcgtcgagctcgacggcgacgccggcggcgtccttggcctgggcgacggcggccacctggccgacgcggagggtggcgccctggatcttgaccagcggctcgcggaactgcgccaccatgcgcttcacctcgtcgaggtggctgccggccatctcggccgccgccgcgccccagttgagcgggtcctccttgttgatcggcccgttgcccgccattgctacggtggtggtggtgggcacgaggagaagagaggattcgatactgaagaagagccggaggagaaggtagcgccgcgcatgcgtatgccggagcaccaccagccggagcagcag

SEQ ID NO: 387326 - DNA, 772 bp, Oryza sativa
  unsure (1)..(772): unsure at all n locations
nnnnnnnnnnnnnnnnnngtgcacgcgcgcaagcgcgggtactctattgcgggcgccctttttttttttttttataggatcaaaacatttctattaccacaactttttaaggatggaattgagtagcaatactttcaccccaaaatacagtttagcgacaatatcttagaaaagccgcttgctttgccgccatggctggcaagctgagcagagcagctaacacaaagaacacgagatcactataaaccaaacggcaacgaacgaagaaaatacagggtcttttttgtctgaagatacacgaagcggttcgttttcttttatttttagtctcctctcctcctcgatgatgggtgtatggcaatggcaatggcgatgggatcttggcttagttgatgggaaggggctcgccgttccactccttgaggcagtcgagcatggggtcgatgagcttgccctggctgatgccgaggaacaccttgttgcactcctcgccgggggacttgagcttctcgccggtgaggaatacgcagccgagctcctcgcggacgaagcggtagagcgggaacgaccggctctcgacgatccggttggcgacgggggcggtgccgttggcgacggcgacgcgggcggcctcgatctcccggggcagcgcagagcggagctcctcctcgaacttggtgatcttggagaacacggaggcctcgggctcggggtcgccactggtgagagcctacaaaacaaatgctcgcgacgcggagacttctgcatgagg

SEQ ID NO: 387327 - DNA, 850 bp, Oryza sativa
  unsure (1)..(850): unsure at all n locations
ggtcttccctgagaagattagaccaagcgagttcacgtccctggtttgttgcttccgcgctctgnacatggttggtcaccgggttgcccnaagaactggagctcggaagcaagtaccgaagccatggcgatnctccgcgccccttgaaccccatagtccaaagctggggtttgcctccaccggacaggttggaaggaagcccgttgttgtagaagtcgttcacgagctcagagaactgcgcgaacatgaagcttgccgatggcagcgagggcgaggcgggtgttgtccactaggacacgccgatgggcgtgccctggaagttgccaccgtgaagcgccttgccacgggagacatcgatcagcgggttgtcgttgacggagttgatctcgcgctcgatcgacttggtggcgaagcggatgacctcgatctgtgggccgagccactgcggcgacgtccggagcgcgtacctgtcctgcttcggcttcatcaacgggtcgagctcgccgagcttcttcgccagcttcatgtacgagctgccttccaagatgtgctccatgatggcggcagcctcgatctgtccagggtggtgcttcagcttgtgtgtcaggtggtcggtgtactccggcttgccggtcatgacctcacagaacacggcggacaggacctcggcgaggatggcaaggacgttggcctcaaagagcacggtcgatgcaaggccagagccgacggcagtgccgttcaccatggcaagaccttccttaggctgcaactcgaagaagccgtgctcaatgccggcaatcttgaatgcctcggcggcggtcaccttgcggccatccggggcgacggccac

SEQ ID NO: 387328 - DNA, 716 bp, Oryza sativa
ggaagcggaagacgcccaatacgcaaaccgcttctccccgcgcgttggccgattcattaatgcagctggcacgacaggtttcccgactggaaagcgggcagtgagcgcaacgcaattaatgtgagttagctcactcattaggcaccccaggctttacactttatgcttccggctcgtatgttgtgtggaattgtgagcggataacaatttcacacaggaaacagctatgaccatgattacgccaagcgcgcaattaaccctcactaaagggaacaaaagctggagctccaccgcggtggcggccgcgggcggactcgtcgagctccaccctggcgtcgccggcgccggcggccacggcggccacctgcgcgatcgtccaggctggcgccctcgatcttcaccagcggctggcggaagtcctccaccatccgcttcacctcgtcgaggtggctccccgccagctcgtccgccgccttcccccagttcagtgggtcggcccgcggcggcgccgacaccgacgacatgcacagcccgtcgccgttcagggaacgaacaagcccggtttcgcactccattacagatgtgtacagtcacacagactcacagatgcagtagtagcacacgaatagaagtacaagaacactagaacagtactactagatatgcgtgttttttttcttttaagtagaagaagagctcgagttggaagctgatgc

SEQ ID NO: 387329 - DNA, 790 bp, Oryza sativa
  unsure (1)..(790): unsure at all n locations
atgctgcaactnacaaacacttacacaaagacncgagacactataaaccaaacggaaacgacgaaaaaaatacagggtcttttttgctgaagatacacgaancggtccgtttcttttattttagtctcctctcctcctcgatgatggttgtatggcaatggcaatggcgatgggatcttggcttagttgatgggaaggggctcgccgttccactccttgaggcagtcgagcatggggtcgatgagcttgccctggctgatgccgaggaacaccttgttgcactcctcgccgggggacttgagcttctcgccggtgaggaatacgcagccgagctcctcgcggacgaagcggtagagcgggaacgaccggctctcgacgatccggttggcgacgggggcggtgccgttggcgacggcgacgcgggcggcctcgatctcccggggcagcgcagagcggagctcctcctcgaacttggtgatcttggagaacacggaggcctcgggctcggcgtcgccgctggtgagggcgtgctcgacgagcacggcgcggagcttctgcatgagcgggtagttggcgctgcacgggtcgtcggcatagctgaacacggcctcgcggtcgatggcggtgaggaggttcttctcgctgaagcgcgcgctggagaggtcgccggtggggttcatggtgagcaccttcttggccacctgggtgacgcagttcttgacggagctcttgatgttctcctcgaggtggcgaaggtcgcgcgtgggcggacgcgtgggcggacgcgtgg

SEQ ID NO: 387330 - DNA, 1107 bp, Oryza sativa
  unsure (1)..(1107): unsure at all n locations
gaaatgcttctctnatcttttcaagtttttgttggttggctaatacnttctttcttggttttngcaatttttttttagtaattccaatttctgttcaagcaagattggcaattggccgcgnccaattccaattcctttgaaggcaattcgagcagcggntcgatgtgctttgcgctcgttgatggcgacgagcaccttgttcagctcccttcgccgggcgaccgcgtcttctcgccggtgaggtactcggtgccgacctcctcgcgcacgaaccggtacagcgggtacgagcggcactccgtgaatccggttgggcgtcgagcggggtgccgttctccacggcggcgcgggcggcctccacctccttgggcagcgcggcgcggacgtgctgctcgaactcggccaccttggcgaagatggaggtctccaggacgcgctcggcgtcgccgttggcgagcgcgtgctcgatgagcaccgcgcggagcttctgcatcaacgggtagttggcgctgcaggggtcgtcggcgtaggcgaacacggcctcgcggtcgatcgcggtgagcaggtccttctcgcagaagcgagcgatgtggaggccgcccatgtggttcatgctcagggatttcttggccacctgcatcacgcagttcttcaccgcggtcttcatgttctcctcgaggtggcgcaggtcgatggcttggcacagggcgatcaagaacgtggaggacatgagcttcaggatgtcgatggcctcggcggtcttcctggaggagatgagaccaagcgagttcacgtcctggttgtgctgctccgcgctctggacatggttggtcaccgggttgcccaagaactggagctcggagcagtacgacgccatggcgatctccgcgcccttgaacccatagtccaagctggggttgcgtccaccggacaggttggaaggaagcccgttgttgtagaagtcgttcacgagctcagagaactgcgcgaacatgagcttgccgatggcagcgagggcgaggcgggtgttgtccatggacacgccgatgggcgtgccctggaacccacgcgtccgcccacgcgtccgcggacgcgtgcgtcgaccgg

SEQ ID NO: 387331 - DNA, 706 bp, Oryza sativa
taggacagtgggcccaagtcaccggagccgctgatggtgcccctgagccctaggcacggcgtaccgttggctttgaacagcttggtgatggcctcgaggatcgtaatcgtcatgccggagtaaccctggaggagggtgttgatgcggcgtagcatcgccgcgcgctgtctgcatccgccggcagaacgtgcccgtcggttccggtacaaaaggcgccggcattgagggatgtgatgagctccctctgtagcgcaccccccgtccttggtgcggcggtggcaggtgccccccgaagccggtggtgacgccgtagatgtcgcccccgtgggccgatgcagttgaggatccactcgctgctggccttgacgcgggggcgggcctcctcgtccagctcgaccacccacgccggaggcgtccttggccgcggagacggcggccacctggcccgacgcggaggctggacccctcgatcttcaccacggcctcccgtgactgcgccaccatgcgcttcacctcgtccaggtggctccccgtcatctccagcgccgccttgccccacgacagcgggtcgctcgcgacgaaccccgtggcgtcggcggtctggctcgccatctctccgagcggtggtggcgaacaacgacgaggaggaggaggaggagctgggtggtggtggaagaagagctgagactatagagaggctgctgtg

SEQ ID NO: 387332 - DNA, 934 bp, Oryza sativa
aaaaagtataaaaaattagattttattatttcaacacaggtaatcaagatagcgctatattagtatatttcacttgcaaaatacaacaacggaatcagaaagctgccagccaaggccatgaacgctgcaggcgccacggcattgcagcagcaatctcacacgattacaacacggataaatacagcaagctcaaaaaggaaaaaaaaaacacggacggagaaacaacgtaatctgctgatgagcgtacgagaagccttcaggatcctgaattcctccctttcttatttcggtgcacgtatcgtctcttcctggatcttgtcgcgttcgcgggtggactggttcgatcagcagatgggcaggggctcgccgttccactccttgaggcactcgagcatcgggtcgatgagcttgcgctcgctgatggccaggaacaccttgttgcactcctcgccgggggacttgagcttctctccggtgaggtacacgcagccgagctcctcgcggacgaagcggtacagcgggaacgacctgctctccttgatcctgttggtgatcggcgcggtgccggtctcgaacgccacgcgcgccgctccatctccatgggcagcgcctcgcggagctcctcctcgaacgcggtgatcttggagaacacggaggagccgtcgtccttctcggcggggccgttggcgagggcgtgctcgacgagcacggcgcggatcttggtcatcagcgggtagttggcgctgcacgggtcgtcggcgtagctgtacacggcctcgcggtcgatggcggtgagcagggccttctcgctgaagcgcgcgctgtggaggccgccggcggggcccgtggtgagcaccttcttggccaccgtcgtcacgcagttcttgcccacgcgtccgaccacgcgtccgcccacgcgtccgcggacgcgtgg

SEQ ID NO: 387333 - DNA, 414 bp, Oryza sativa
  unsure (1)..(414): unsure at all n locations
attcccngctgccggtgccgctcccccagatccggccggccatgccgtggatctgggcaccgcctccgtcgctccgagcggtgtccccagccgccaacttcccacgccgccgtttcaaccaccgccgccacctttattccctgccaccggtattgctcccccagatccggccggccacggcgcggatctggtcaccgccaccaccactctaagcggcgtccccagccgttgggcgcaaaggggaggtgagacaaggccccgccgccaccgtccttgcgagcgcacggctttgccagcgcccgctcaggcggcggcgaggtgagggaggaggcgttgaagaggaagggggcggcggcagcgtcgtctctcgagtcgcccggggaggacgacgcgatgggagaggagaggaggaag

SEQ ID NO: 387334 - DNA, 660 bp, Oryza sativa
cttcccactcccaataacctcacagcctttagcgccactctccatacaaacctgagcacaccctagcacgcccttctaacaggaagccccactagcaatctgtaacagagcgatgtacagccgcagaggcgccaagtccgtggccgttcaccgcctcgcgcggttgcgtcggccgccggtcgcggtaggggcaggctctcgccgacgcgcacggcgtcctcgaggaagaacaccgtcggcgacgacggcggacgacgaggacacgccgttctcgtcggcgttctgtacggcggcgacgcggttcaatgcatccggggaaggggcgtcgctccgaggcagggccctgtagtcgtcgtagttgaagttcatcggcggcggtggaccgtcgccgccgccgttggccttgccgccggcgctagcaacgccgtgctcatggtggaggagctcgacgatggcgtccggcatgggagcgccgggcatggcggcacgccagaacgcctccgccgccgccgccggcgacgtccgagcagcaaaggcagtcatctgccggccaggttgaaccaccatgagagccatggcgatggcgatggcgacgagggacgccatgggaggagctggaaggagaagatggaggccgttcgccttgaggactttgcagct

SEQ ID NO: 387335 - DNA, 364 bp, Oryza sativa
  unsure (1)..(364): unsure at all n locations
cgccgccgttgtgccgcnagacaccgccgcnaccaccgctgccgttgcctcgccagctgccaccacagcagccatccggccaccgccacagctcgccagccgccttacagcagccgctgcctcagcagccgcnactacagtcaccatagcagccgccgcctcgccaccaaccgccgccgttactgccgccgtcggcagccgcagtcaccaccaaccgccgtttccaactcccgcgccgccacgtcgtccatcaccgccacctttattccccgctgccggtgccgctcccccagatccggccggccatggcgtggatctgggcaccgcctccgtcgctccgagcggtgtccccagccgccaactc

SEQ ID NO: 387336 - DNA, 345 bp, Oryza sativa
ttgggtttttttttttaggagcaaaacatttctattaccacaactttttaaggatggaatcgagtagcaattctttcaccccaaaatacagtttagcgacaatatcttagaaaagccgcttgctttgcccccatggctgggcaagcttgagcagtgcagctaacacaaagaacacgagatcactattaaccaaacggcaacgaacgaagaaaatacagggtcttttttgtctgaagatccacgatgcggttcgctatattttattgttagaacgctctactgctcaaggaaggaaaatggcaacaggaggccaggaacggatcttggcttacttgacgggaaggg

SEQ ID NO: 387337 - DNA, 1018 bp, Oryza sativa
cttcatctgccccatactcaagagggttatgcaagagccgtgcatcgcgtcggacggctactcgtacgagcgccacgccattgagatgtgggtgtgcgacaaggatgtgtctccggtcaccaatgttcggatgccaaacaagacacttgtgcccaaccgctctctgctcaccgccatcactgcctggaagtcccagggtggccgcaaacccacaaataaatttgttactacttctccgaatcatttgtgataccatcatgtaagatcagctcaattttgtcttcatatataggagtacttgttacttgaactcctagtttggtgaatgtatacatgatgaggaatacatatacttgcacagggaatgaaacgcgtatcctgcactgtacacctgtatctttttacaatcatcatcagagccaagaaagaggctgcaacatgatactagtactagtagctagttgagcacaaacgcttccccaccgatggtgttggtgatggcacgccaagtcgcagcaatccaagcctttccattgtcctttcccttcaagtagggcacgatgtacttcatcatgtcagtcttggaaatacccaggtgcccccctggcacggacacgaatttcactctcccctcatcatccagcgtcttgagaccaatccagtcctccatgtacagctttgtcttctgagggggcaggacaggatcgaaacctccatctggatagtaaccaaaccatgctgtttcccgaggtatcaagacagcgtcatcctgaaacatgattaataccaaattctctaagctgctaaacctttccttgtaggtggcatttctttcacctggtaactcattgttaagctttggaagaaatctacaaccctttaaataatctgaaatatcagttgggattttcatgtaaccactaggtgcaagatgtgcctggacatagtctgagtagatctccattttaatcagggaatcagcaagaatgcaaaaaataccagaaccacaaagtgaaac

SEQ ID NO: 387338 - DNA, 882 bp, Oryza sativa
aaatcaatcaacactatatatgattttattgttatcgattgttccaatcgaatttccactgtgttacatgacttggagtcttggaccaaagaaaagaaaatttcctgatcagttggtatcgctggaaaacaacctagtgggcgcacgacgcccgttcctcgccatcgttgaagaaggcagactgcatgcgagcgactaggggaacgccgtcggaggcatcttcttgtcagccaagaagtggctgaagaggctgagcgcctgcctcggcgcgtgcaggggaacctcgtgcccggcgccgcggatcgtcacgaacgtcaggccctcgtagaggatcgtccatcctccaacctgctgatggtcgtaccacggcgtccactcctgcaccgtcttcagcccaagcttgttcagggtgagcctcgtcgacgtcacggggatcctcccatcggtgtcaccgctgaaaacccagaccctgatgccgccggcgacgagcttacggatgatggggagagtcgagaagggagcatctctccacttgccgatcacgtcgctgcagtgcgtccagttgtagccgatattggtcacgttggcgtgcagcgcctcctgcacgtcagcccggttgaagtacacctcggcgtgatccgacgtgcacggatcgtaccccgccggcctcatgtaccacccatggtatttggagaagatttttggggcggcgccgtggacggcgacctggcgctggccgaacgccgccgacgacgagacctcggtgcagacgggggtgtagaggctgtacatgtcgatgaggcggtacacggcgaagtactcggtgagcgcgctgtcgcacgcgtcggtcacgttctcccggacgcgtgggcggacgcgtgg

SEQ ID NO: 387339 - DNA, 823 bp, Oryza sativa
ggtgctatggggaaaatccaaccacacaaaaaataatcaagaaataatacaacttatccaggcttgcgtagaactccatgaacatatatataatcaatgataataagagcgtaccctgaatgcagtatgcagacagatagtagccatagcctatatagcaagatggtggattagtttcgtcacctgtgctaagcttcagttttagcttacaagcagtttgtcgcccagctgtttgcggtagacctgaatgagacccgcgctgtcaatcgtctgcagcttctccttcagtatcttcctgtagcgatcgtctttgtcgtccaagcttctcatcagttcgatctgtctctggaatgcttcgaattcatcggagctcaaggagccatcgctgtttgcgtcgagaagatgcatgagctccttagcatctttgcccccagcaccaaggtcttccatcacctctgtgagctcctcaatactgatccttccatcaccgtttttatcaagctggcagaaagcacggttcgtgcagttgctgtctccttgatcactagctgggaggtcacgaagacgcatagctgctaactctgctgcagccaacatgatagccttcagccttttagcctctccaggatctgtaagtccacctttgtagagagagtgagatgcctctccaccaacagcaaatttatgcatctccttggttcgtatctgtatctccatcagtggcctcatcttcccaggttcacttacatcgatggccacatgcaagctctggtaaccattttcttttggccgtgtgacataattttttgtccttcctggaact

SEQ ID NO: 387340 - DNA, 554 bp, Oryza sativa
agtgctgctcaacaagcagcagaagctttccatgaattgatgagcaacacaacatgggggtgccaagaaataactgacatggaaatcaataagcatccgacatatgttttgagtaaaaataatccagatagtagcattcggcgaactaccaaaaacccaagggaacaagaccagccacagaaggccacatgaagtgcatagtttgatgttttcattactacaaattcatagtatcaaatttaatggagcttcattgcaccacagctaagattcggatgtaatcggacatcaaggacagcaaatagccgtacatgagaagtccgtgtcactgctcacatcagcatatcacttctattcagatttcgcatcaggagaccgtgaacgagatgggctcctgcttgggctccgtttcttggggcttgatgcttcaccatttgcaggagacgcatttggagatttggatcttgctggtgatcttgatggagagcgcccttttgatgctgaccgtgaacgggaagaaacagaccttgatcgagatcgagatcgggatgctg

SEQ ID NO: 387341 - DNA, 658 bp, Oryza sativa
  unsure (1)..(658): unsure at all n locations
acatgagaagtccgtgtcactgctcacatcagnatancacttctatncanatttcgcatnnggagaccgtgancgaganggncncctgcttgggcnccgtttctnggggcttgatgcttcaccatttgcaggagaagcntttggagattnggatcttgcnggtgatctgcaaaaaaagaagtcgagaagcaaccatattcaatatccaaaatgcgggtctaacagcttattccaaaaaccttgatgctttgtccagcattgcaccgaccaaatgaaagtgaaaatagcccaatgaaaacaagagattaagagcacataattaagtccaaaaatatgtagtattgaatgcaaataatgcatgcaagacgcaaccaccatatatagcatgccaaaggtagggagagaactcattcctcaagcattgaacgccaagcacattcctagtcattgtaccatcattatccaaatatcgtcaatccttaatgctcctatgtccagaattccaaacaatgcgctatgcccaatctctgatggcaatcagttacagtgcattaggtcaaataattggatcattttagctttccatagaagctctcaataaatgggcatacctcatacaaccaagagcaaattgagcggacgcgtggcggacgcgtgg

SEQ ID NO: 387342 - DNA, 673 bp, Oryza sativa
gctgaagaaaaataacagaaacggtattcaattcaaagctgagatatgatctatacatcattcttatcttgatttataaaggaactggattaacataagtcttcactactgatacatcaactgctgtcagcatcttcttcaggcagtatcaatctaaggtcctcattgtccctgtagacttgtaccaaagcggcagccttgtatgcaaagaaacccatcattcctggaacaagctcaaaatttaaaatgctattttgaaagtgatctgacaaggttgacaatccaaaaaatatagcgggtatcacaagccttggagacgaaagagctactgaaataccacccaacaccttctctattgtattcttcaaatcctcgcttcttatgccgattcttttcactttcttcttcataaaaatttctggaacatctttctttgacaaattatctgtgtgccgatagagaagttgaagatacaagcaactgaaagcaactccaaaagcataactgacagcagcctccagagaaaagactaggagacagtataaactgcacgcagctccaattcctgtggtcaggagcaatagttcacccttcactccttcatatcttagaaggttgagttcctgcctgctttcccgctcatcctgccgatcctgtcatcgcggacgcgtgg

SEQ ID NO: 387343 - DNA, 991 bp, Oryza sativa
aaataacaagtggcctagcccatataggcccaacaatcaaacataattacaccccatataggcccaacaatcaacataatagcaacccatatagcacaaaggtttcagcccaattagcatccaacacaacccgacaaacatccaatacaacacaaaatttacaacacagcaaatcagcaaatcaactggttggccactcgtgggaagtgtttgaactgtggcagggataggaagtgcttgaactgcggcagggacagggacaagaagtgcttgaactgcggcagggccggcctcagcttgctcaggaccccctcaagtaatgaagtttcagcaataaatcgcatatatgaatcagggaggatagatatacatagaatcatgctgctgctgctgcttgccttccgcctgctgcatcgcgcctgctgcctgctgcctcgccacttgccacgcgcatgtccctgccgcgtaaccgtgctgccggacaccagcgcttttctctgaagcatactttgttggtcttcatctccatgctcagttacttgagcaacctactaacctcgtcagcatgcagagatccagagtttagatgagccaagaaatctagacaggctgctgcaagagaggacatggtgaagcagcagcagtaatcagccgccgccggtgccggtgacgccgaggtctggcttgccgtcgtcctcgctgcttgtatgaggccagctccaagaacccccgctgcttgctcctgtaaagcagcctgttgatgaggcgacggcggctctcgtcggaggagaggtcgatggtggtggtggaggcgctgttctgctgggtggtggtgctggtggtggtggtgaaaccgaagaggacgcggtggggggggagggagtcttgacgaatccggtggcagtgcgcgaagagcaggaggagaggcgctggtcggggtcgaaccaccacggcacctggtcgagcgtcacggccggctccggacgcgtgg

SEQ ID NO: 387344 - DNA, 844 bp, Oryza sativa
  unsure (1)..(844): unsure at all n locations
nnnnnnnnnnnnnnnactattcaatcaagcgttgcatcatttaggtcagatccaaccaagatgattattaacgcatatgtaaaccggaatacagatctgatcgctccataggagcggaatacaggaggtaagaaaaggaaacagaaacaattacaagttcgaacacccaccaggattcagctagatggtactacttattaccgcacgagaatcaactgagaagcggctcgcgtcaccccctggctcctaatatacgttgccattaaatataatggtgatgctgccgccactagtatgtacaagagtgccatgaagggcttcttttttgttgttgtttctgaatctaagctagaatcacccgcgtccatggaaggggccgcacggatgccaactattgcctcaataactctcctcgaaataatcgcagcctcaaattatgtgataaggctgctttggatgcgcttgaggcttggacaaaccacacgcagtctgctaaagtccagcacatttatctttggacaagagtgcacattgagaatctccaatgcactgcagcgcgatattgcagattctagttcctcatcttgcaacatggtgcatgccagaagttggagatttgtcagtcttgggcaatcaagcttcagaacctccagggagctacaattgctcaggttcaaagtataaagattggagcatgtcaaatccacttcctttaaatttgtggacagattaagattgattttagacaggcgtagataggttgtcattgaagggatgatgactttcttaatatttggacaaccagtacaattcagaacttcaagcagacgatcagacaataaac

SEQ ID NO: 387345 - DNA, 742 bp, Oryza sativa
atccacgaaaatgaatatatccattctatttatgggttcactgggctatttcctctacagctatatgtcttggtgtctcagatcatctaatatctttcttttggttaatgcaatatctacacaactgagcacgcaaaaatttgctgtacatatgcagtactcataagcggcaacaacagcagcagagtatagaaatatctgcactgatgcaggaatctgaaaaaatggctgaaggaattgaagaaccatcaatataatgggaagaatgcgcaactctgcaagggtcacgctggcgaatatttttacgagatcagtccgttgctagtgcttggagctcacgcagatggtctggtataagtgtccccaggtgagggttctgtgggttctctgcatatgcaacatgatatgttgcaacacaagcctgtggccacgcaattatcattcggcacatgtaatacccgatgagaaatgaataaatggctactggcagagcaagctccttatgttctttacccatggctagtgcccatgagccagcaactagtgaggccaatgcacctcctgtgacagcagaaaggaagcagaatgaaccagtgaggtctgaatcaaccagctttgatatcccacggagaacgaaaagagaccacacatcccgcgaagccacacagaatgccttgccacgcactcctacgtgtacaaaaccccaccggttgacccgtcggacgcgtgggcggacgcgtgg

SEQ ID NO: 387346 - DNA, 1313 bp, Oryza sativa
  unsure (1)..(1313): unsure at all n locations
nnnnnnnnnntttttttttttccaaaataaaccaatcactccactgaccttgaccgaataaaattgtagctcagttcgcaccacagattttttttttctagactaaatagtttgcaccacataaaccgtcacgacactactcataacaccaaatagtttgcagcatttcatttcatttcagataaccaactcaaacgacaccaatatttctcagctcagcatccgttgtctcattcttcacttggcggggtgcttggccttcgagtgagattgcagagccatttcactgttgaacgtcttgctgcatgacttgcaagaaattgacccaccaccggattttggggacttctcctttgacttgtcattcacgggggtcttgctagcctgctttgccggatgtggagttgctacatggacacccttcttgtcacctgtcttctggcctgacggtgtagcaatctttgctttcttatcagacgaaggtgtcttcaacacaatttcagctactttcctctttccagtctctggcttcttgggagtatcttcctcgtcactctcatcctcatcatcttcgctggaatcatcctcagaagaatcatcatcatcatcctcaggagaaagatcttcgtcctcagaatcatcctcatcactgtcatcatcatcatcatcgtcattcactgcagcctttgattttgaagctgaagaatctgtcttgccttgttttttctgctcattttccttcccttcaaccttttgccatttgccctgggagctggaatgatcttttcttcctcctcttcatcttcaacttcttcagaatcaaaatccatttcatcttcctcagccggctgggaaactttgtagccagaaaagaacacactagcagtctttgaagtgtgtgacagctcaaactctttgtcaaagaccaaatcaaactggatttgagggaacttgtcagctgagagggttccaatgactagcttttgatcatcagttttaacatacattactgcattgtcagatcctttctttgattccccaagagcagcctgagaaaggtgcaaaaagcgttcatcttcaggctcacatttgacagtctgtccaggcttgacttcaagaccccagaactccatcggaatcggcggcggcggcggcggcggcggaagaaccctagaaaagaaaagggaggtgggaggcggagctaggggtttaacggctgaggaccccgtgggcngccncnnngggggggccngnccnannnnnnnnnnnnnnnnnnnnnnnnnnnnnnnnnnnnnnnnnnnnnnnnnnnnnnn

SEQ ID NO: 387347 - DNA, 925 bp, Oryza sativa
  unsure (1)..(925): unsure at all n locations
cgatggataanatgtaatgatgttcaaccaangagagaggcaacttagtacaggacaattanatccgaattccttaatcctcagctgttgcacaaaatttgatgactgggaaagtagcaaaagtttcaagtagcttagtctccaaaacatctagaagcctaaagaaaataacttagaacactcggtacacctttcccatggtgctcttcaggtacaagcacctaacgttctgccaattcttcttcaaaagggaaacaaggaagttcacgctcatctgcacattttggaagatctgcttctcctccatagcacagttgccaacagcaacacccatgcagagaaccttcttcagctggaatttcactgtagccttagtctcattaaccttggactcaagtgattcctgatgcgtcaccagagttgggaatttgcctgctttgttaagaccaggaccaagaagtcgaggaatctgcttgatgatagcctcagaagcaaggaaagcatgatatttctttgcaagcttcttaactagcttcttgtttttgttcattttcttgagggcttccacatccatatagtctaggcccattttctctgcctcttcgacgtgctgagcatcaccaagcatgcaaaccttcaacttaggccgagggatgtggggcagcttaacagaaccactgaaacgcttatccttttgagggtcatagttcttcagtccaatctgcagctcaatggtttccacaaatttgcgctgcttctcacgagagtcattagcaatttgagagatcgcttctctcagagcatcactctgcaacttactcatggcgccgccggtggtgcgagcacagatccgcgacgaggtacgagggaggcggcgcggcggcggcggaagcggagggcgaagtggcggcggccggacgcgtgg

SEQ ID NO: 387348 - DNA, 561 bp, Oryza sativa
ttgtaaatatgaaagagaggttaaaacataaattaataaaataatagtgtatagtaagaatttagaaaataagatacaagaaaaataaaatattatattaagaaataatataagagtaacaggtgtataataaaacatcataaaaaacttcttgagagcttccaacttccatatagtctaggcccattttctctgcctcttcaacatgctgggcatcaccaagcatgcacaccttcatcttagggcgggggatgtgaggcaacttaacagatccactgaaacgcttatccttttgagggtcatagttcttcagtccaatctgcagttcaatggtttccacgaacttgcgctgcttctcgcgggattcactagtaatttgtgagattgcctccctaagagcatcactctgcaacttactcatggcgccggcggtgcgagcacactgttccgcaacgaggaagctggcggcggcgcggcggcggcggaagcggagggcgaagtggcggcggctgtgagctagggttgaggagagttcgaccggacgcgtgggcggacgcgtgg

SEQ ID NO: 387349 - DNA, 807 bp, Oryza sativa
ttgtttttaacagtgccaggggtcacaatcttgccattcttgaaagaattatgattcacaggctggttctcagacaataatgtggtgcaggaaaaaataattcgcacagcaggttaccgaccacttggagtaccacagaaagatttcaacggttgaagtcaagttaatcgataacatcaaaaatgatttctgaacttgttgcacaaaaaaatgatagttgagaaaacaataaaagttccaagcagggaagtctctagaaattcgaggagcatgaagaaaaccatttagaacacccggatcacttttcccatagtgctcttcaggtacaagcatctcacgttctgccaattcttcttcaaaagagagacaaggaagttcacgctcatttgcacattttggaaaatttgcttctcctccatagcacagttgcctacagcaacaccccatgcaaagaacctttttcagttggaactttcactgtagccttagtctcgttaaccttgggactcaagtggattcctggtggagtcaccaacgttggggaatttgcctgccttggttaagaccaggtccaagaagtcgaggaatctgcttaatgatggcctcagatgcaaggaaagcgtcatattctttgcaagcttcttaaccagcttcttgtttttgttcatcttcttgagagcttccacatccatatagtctaggcccattttctctgcctcttcaacatgctgggcatcaccaagcatgcacaccttcatcttagggcggggcatctcaggccacttaacagatcccggacgcagtggg

SEQ ID NO: 387350 - DNA, 600 bp, Oryza sativa
  unsure (1)..(600): unsure at all n locations
nnnnnnnnnnnnnnnnnnnnnnnnnnnnnnnnnnnnnnnnnnnnnnnnnnnnnaaaacacgacaatacgtaacagcaccaacattttaataatgtcaaatgggtaagcctcttatacatgagtactagccaagtaccacaggcacaaaaatgttacaatttcaccgccgaatccgaataaagaccccaaaacatcatgtctgtacataataaatgttccctttttcacatgagactgcaatagctgccctgtacatgaaattaaacgaaaacaaacaactgagaaaatacatccaaccactagctatctgaacttgacaccggtacactcacactgtcgcacacacatttacaacaacgacgacgacgacgacgatcaatggagatgaccgagaagagattcaaccgaagagcaacttcttgggcggctctcccttggcgcggtactttgctgcggcctcctcggccttcaccacctcctcccctcgccgcgcctccgtcgccgctcgcttctcctccgccgccctgtgcaccttcgccacgccgttcatcaacttctccacctgctccgccttcttcctctccaggtactcttggtact

SEQ ID NO: 387351 - DNA, 714 bp, Oryza sativa
  unsure (1)..(714): unsure at all n locations
aataagttcccaaactaagtttctttcgttatgagaggctgagagcaataagatacttctagtagtgacataatacagagttatacgctttggtgcctgaaattgccccaatcctggagcacaaattgttcaagatgacacaaagtggaaatgtgtctcgttcctcaaaattgctcaaatacaaaatacaaacacaaaccaanagaagaatataaaccattcacactactctgcagttgaatcggaagtactcatgaatccacctaagaagccagcaccattgcagctaccgcacaagatttcccgctttcctctgcaaaagccagcataatgctccagctttaaatcggccgttgaagtgatcgacagaattcaccccatctcccttgcactggttgcacactattgcaccgtttccttcgcagtcctggcagacaaggctgcttcccttcggaggactcttttcggtctgatcattttctgtggccttggtcttgacggactggaacctggagaagcgagagacgggccggagaaaggaggcagcgagcggggaaggggcgggtttgaggaggagcggaggggaggcggcggtcgccgtgaggctcgaggtggccgccatttgggagcagcgagcgagagagcgagcgagcgagagcgaggagaggagagatggacggccaaaagggaacggacgcgtgggcggacgcgtgg

SEQ ID NO: 387352 - DNA, 606 bp, Oryza sativa
  unsure (1)..(606): unsure at all n locations
cactatagcaagnagctatngactgtcgcatggcacgctgtgacgtgaagctttggatcttctctagaagctggccccgcccttttttnnttttttttttnnggtatagaattcaatggaactgcgacaggggctggaactaatcatagtcctatagttccatactaacggatggaccctctgcacttctcttcactatacagaggatttctactgcttaacaactctcagttacccaatcctccaaaatggatatgggatcatcagcttatagcagcatgagtccactcgaatgcgatctttccttcaagcagctcgcctaagccgactatgtctaaatgacaggtttcctcttttggtgtatcaacagctatcaaggacccaaaacaaaccgctacaagggttcaaagggtagggagtaaaaaagaaaaagaagatgtcaacctatcaagtatcatatcaaccagtaagagctcagttttccttccatttgttgacatacttgaggaataacatcgaagggttattccctttggttgggcctgtacacgagaggatcgccgcagtgcagcctcttgagagcatttttgggtagtcttcgttttt

SEQ ID NO: 387353 - DNA, 643 bp, Oryza sativa
  unsure (1)..(643): unsure at all n locations
atgattatttncaagaaaaggttggtgagcaattcagatacgcatagttcagatagaaagactacaaaatgtcttacgtaaccacttccgtaataatggtgaacactgaataatacaacggtaatttaaatacatctggcaaggaaaaggcacattctgctagtaactgaatggtattgttgttgcacaggtacgaggtggtttgatagtatcccacgctaatccttccttagctcaatgaactcacggtgagagccggcgctgttgaatgacaacaatctccagtttatctccagtgtatatgtctcgttctgtggctgatgcaaaaacgtccttaaccagatcgacagcatctgattgagataatggtgtcactgcatcccgagctggaagtagtaatgggctaggagattttagctgattgtccagaacaggcatcatcaaagctgcacctgtcccctgagcactataacctgtcctttcataagacccaacagcatcatatgtgaagacacatcctttaccttcgctgtcaagtccacccaacacattgaaggcatagtatgggaagaaccttttgtagtagagcgtgttggacagtaattgcgccatcgcagggcagctcattttctcggacgcgtgg

SEQ ID NO: 387354 - DNA, 451 bp, Oryza sativa
ccgccctttttttttttttttaatgaattcgtcaaagttattttgatatttgtggagcgatttatttcatatccatcatgtttgatttcctccatcgagctaagcatatatataccgatggagaggatacagcaattatcaggtgatgttatgacatgtacagtacaggtgcagcttaatttaccatcagagagtggaggtgaatgggttcactcacttgacaagccctatgctgaggatgccgaaggaggtgtgcggccaatccttgtccttggccttgatcagcatcgccctgccccatgacacccaagcctcccatggcatcctcttgtcccagctgctcccccactccagcaacagcttcacccctgcctctatctgctcctctgcctcctcatacatctccatgttcagaagcacctgagcaagaaccaggtgaggctcttctaca

SEQ ID NO: 387355 - DNA, 711 bp, Oryza sativa
ggagcaacaatttgagcaatctcttatttatcttctgtcagaaacttcgcgtacatctgacttgtttgatggggaaagcagcaatgcaagtgaaatacactgaatacactttgcccatcatcctgaactactgttgtccccaaaattgcgagaaaaaaaatcatggctggatactctcgctatgtaagatatgatgttacagtatcagaatcatcattcgtaggcgaggagagactgaagaacctctgtgctcagcgcagatctagactaaaatcctgcaaaggcagcagaaatgaaggagcttcacaggcacttcttgacgtctgaaaacaagggattttccttgtttgctgcttcgacgtcctcaggtgatgcaacggcaaccacgacaccgttgtcgttaattgtttcgacagcatcagcaaactccttggaatccttcaagctggttgatagtatctcttcacgtctttgctggcgttcctccaccgtgatgcccagcaagtatcgcattagactgctgtaccctttagcatctggcagctcgtaggaatcaacgtcacctatggtaccaataatagcttttgtgagacaatcaccgtccatttctagctctcttaggaacttggccgtctcatcatcaacttctagtgttctccatcaatttggatcacggtatgacaagtattagtactgtcttgaataggtgtc

SEQ ID NO: 387356 - DNA, 1677 bp, Oryza sativa
  unsure (1)..(1677): unsure at all n locations
nnnnnnnnnnnnnnnnnnnnnnnnnnnnnnnnnnnnnnnnnnnnnnnnnnnnnnnnnnnnnnnnnnnnnnnnnnnnnnnnnnnnnnnnnnnnnnnnnnnnnnnnnnnnnnnnnnnnnnnnnnnnnnnnnnnnnnnnnnnnnnnnnnnnnnnnnnnnnnnnnnnnnnnnnnnnnnnnnnnnnnnnnnnnnnnnnnnnnnnnnnnnnnnnnnnnnnnnnnnnnnnnnnnnnnnacacaacacaacggtggattttcagcatttcaaaaataattctgaacatagccattttgagaggaaaaaacagagacacaaacttaattggaactaaagactagataatgggaactaatgaagaaacttattcgcaattctcagctggaatatcaaagttctccacgtgatgcagaggcaaacaagatcagatagatgaactctcatgatgaggatgcaatcaggtgcttagatcttgtcaagcgcctgaacaacgtcatttcttcaaatcctcaaaatcctccactccaatgctgaacctgatcaagttgtccttgattccatagatttctctctgctcctttgaatcccagtaagacatgatggcaggctgatcaataatgctctcacagcccccaaatgatggggcatgatagggtatcttaacagaatcaataaatctcctagtagcatcaaagtctccagcaacctcaaaactaatgacaccaccaaagccggtcatctgactcttggcaatgtgatgttctgggtgacttggcagaccaggatagtagacacgtgcaatctttggatgttcctctaaaaattgggccatccgcattgcagtattattctgacattgtacacggagatgcagtgtcttcatgcctcgaagaatcaagtaggcagcattcggatttagaacaccaccaactacatggtgatagatgcggactttggaaactagctcatctctgccactgatgcagcctccaataacatcattgtgcccagcaatgtactttgttgctgaatggataactaagtcagcacctagagttagtgccttctgattgattggggatgcaaaggtactatcaatacaaagcaatgctcccttgctatggcacatttttgagacaagatcaatgtcgatgcatctcagaaatggattagtaggagtctcggtgaagaatagggatacattattattatccagtgcattttggagagcatccatgtcagcaggtctaataacggtcatcgtaattcccctcttaggtagttcagtctccatgtaaattctcgtcttgcggtaacaatcagtggtggtcacaacgtgcccacctgctggaacaagcgcgctgagcatagccacacttgcatacatcccggatgccacaaagacagtggactcggctttctccagtgcactcatcttcttctccaatgcctcagtggtcgggttaccatacctcccatactcgaagctagcatgcctcccctccttgaagtcaatgagctcctgcgagttgttgaaccagtaggccgaggtgttcactactggcgtggtgatcgcgtctgtggcgatccttctgcccagcctctcgcccgcgtggacggcgaggctggcgtctgaaccgagcagggcctgctcggccaatgcggcggcggacggctgaacga

SEQ ID NO: 387357 - DNA, 626 bp, Oryza sativa
cagaggacaactatggcttgcaaatattattattgtcaaggagacaaaattgttttaagccgtaattcatcataactaagcatatgggtacttgggtacatctcatcttgataaacgtactaaactcgactagctagttaatgaacttgaattcaatcccgtggcgcgcccacgtatgtgcgcctgctgtgaatagatggctcgccggtgaccttcgcggccgatctccggccacccctcctggccgtggacgccgttgttggagaaccacttgctgagccccctcatgaacccgctcgccggcgccggcgccggcgccgccggttggctcccgctcgaaggccaacgtcggcgtggcgaaggtgctcgccgagctggtcgctcaagcttgcttcttgacgccgtggtggtgcccgtcgccggcgtagggcacttggtgcatcagctccctgtcgtcctcggcgatcgtgtcgaggctcttcgccacctgcttcctccgcggcatcaccgacaccagctgcggcggcgccacctccgtcatgatcctcgccgccgcctgcgccttcgcccacgcgtcaaacaagaagtccgcccacgcgtccgcccacgcgtccgcggacgcgtgg

SEQ ID NO: 387358 - DNA, 399 bp, Oryza sativa
tgggtagatctcatctcttatttatcttttattcatttatttatgcatcatcacaaagacaagatgcatgttggcataccaacacagagacatgttcaagctatgcatacataccaacacgtatatgaacacaaagagacatgttcaagctatgcgtataccaacacgtacatgaacacagagacatgttcaagctagcagtgaatacgtacgatgagcctctctgcttgttatacagagaagtagtgctcttcttaggtgtgcatttcaggtgtgcacccggggcctgggtccccggtgaaggagtcacggcagaccaagagagggcgccacgaccacgagtccaccatctcgcactgcccgcacgcggcggggcacgactccacctcttgggagcct

SEQ ID NO: 387359 - DNA, 400 bp, Oryza sativa
ttgaaatagaatcgggacaagcactcaaatattcagcaatgtaatacaatcagtgcaagtactaagcataaactgatctgtacaaatgttgataccagatatttgttttagttgcacacatacatattcaaacagccacaaccaatctatggaatacacacgaaagtaatgtttgctccttcacataggtagatttttttcgaacatcataagtaccagttcttgaataatatctgggagtccattggataggtaagaccaaaataacatgaactacatccaaaaatcattgttccagatcttgatgtttggatggatttctgtagcaatgaatcatggctggcaattggacgcacttgatctagatgatggctaaatagacagtggggcatgttggggc

SEQ ID NO: 387360 - DNA, 402 bp, Oryza sativa
caggaagaattcaagactaataaaaatctcagttcgacgacatgattgggtatgtgccattgaaaagagtacttgcctccatgcacttattgctacccccatgttcttcaattctcgtacatcaccatgacagatttgattcaccgatgtgttaccctaccataccatgcacatgcatacacctccttccttctcatagccgatcgaaactcaacattacagacaaagaagcggaaaaatgaaaaagagaacgatttttttaacacgagaattgaatgcacgacgacgcgcgcgcgcgagaaatctagttccacatccaccagcagctgatctgctggccgtcctcctcgtcgtcgtccgcgtgttggtggtggtggtggtggccgtggtcggcgaagagga

SEQ ID NO: 387361 - DNA, 454 bp, Oryza sativa
tttttttttttttttttaaagaaacagcaaattgtatttgttcgcattcaagacagggtaccttttttagctaggagagaccaacatgcagaacaaaatgtcaatatgcaggattaaatgtctgtggagaccaacgggaactgaagcaatatgaaataatagccaacataactagcacatgactgtaaagacattttggcatttaagccatgatcttggcagacctcatgtaaagactgtcgacgaccttcccaacatttgaaatagtttcaagtgtagcagggaagattgcctcggtcttgggatcctcaaagataatgaggcagccagcaccttgatccagagttcctgcaaacttcttgtcaaggatcatctgcgacagcttcttctcaacatgatcaactggcaactcaatccggacgcgtgggtcgagaagtaattcgggtccggccgc

SEQ ID NO: 387362 - DNA, 424 bp, Oryza sativa
ttttgttttaaagatatttacattcattgattaacaaggcacacaacatcatacatatgtacatccttatgtagcattgggaagtctgaaatggacatgaaaggatacaacagaacaatgagcaaacttgctaacactacagtagtagtgcagagacatgcatattttattcttgcactccaagttaatttgctcctagctagtagtaactacttctcttgtacttcacatgtaccgatctaatcaggcgtgcgcgctgctaattaaccattcccaaaacactgcgtggttcgctggacacgtcgaagccggcgaggaggctgtccatcacgtcgtcggagcagcactccagcagtatgagctcatcgcctcgctcgccggacgccaccgtcgacgacgtcgtgcaagcggaggctctgtccgg

SEQ ID NO: 387363 - DNA, 596 bp, Oryza sativa
tttttttttttttttttttggactcagaaattcagattgccaatcttattagacatttgtgcccgagcagctaagcaattttattgcacaacatcaccatccatgaggaagagaaacacgatcgagccaagcgatcgaccactaccacacctgatcgaaatggttgaagaagaagaaaaaaaataaaacccaactcgatcgaccgaccgatcactctttctcagctgccagcattttgacgatgaggcatcaactcatgcatcctaataatgatcctttcccttgtttcattcatcaggaggcgagcgtggtggggaggcagctgtcgtgcacgcagctgagcacgtcgcggtaatccctctccacggtgaaggagtcatacaccttcccatcgctgctcttcttgtactcgaacagcagcgacgagtggccgaacgcggtgagcttgacgaacccgaagtcccggtccctgaaaacgctcctcttggggatcgccgaggtgtagtccgagaggtggctcccgccgccgccggcgacgacgaagatggtgccgttcatggtgccggagtagcggcgcctctcgcccggacgcgtgg

SEQ ID NO: 387364 - DNA, 914 bp, Oryza sativa
  unsure (1)..(914): unsure at all n locations
tttttttttttttttgatgagaagatgcatgattccaaggtgaagtccatttacaacgattttaactcacatttgtgctatatatgttacaagtcacaagattaattacaggcttaatttacagcagccaggaccctccagcacaagacgatgcatcgtctggattctgaatgaccagccaacaacacctcaaggtccaccttgtaactcacataccgataccgtggtgttattgttggattctcaatttgccatatgcacacttttaattttacactccaaactagctgcattcattcatattcgtggtgattaattgatccaaatatacacgaacagctctgtgtatggagaattaactcgtcgttgagctgctagaagcagaatttctttttacgaaacttgatcatatcttgcttgtcaatgtacgcaagcagctcgtcctgccgcatcagggcttcatagagagccttctttgtagagattaactcggcttctaatgcatccacacggcggacggctgcattcagcaattcctccttttcaaatggcatctcggatggcttcgtttcgagcgcctgcaccttctcctccaactcgcctagtcgtcttaccatagatgagaggacatccttttcagtataagacggagcaggagacggtggccggaattcttccttgtactctgcttcttgaggatactccacataggagtgatcatggtcagtggattggcttgagaatcttttagccatcctgcttgggaccgagcgaaccatagcaaaaaggctcacgatcaagacagtcagccatgtgatnacttgtgtccagaggccatcaaatgtgataggcaaacttctcgagggtgatgaactagctctaggactgccccatccatcatccacaaccttgtc

SEQ ID NO: 387365 - DNA, 866 bp, Oryza sativa
  unsure (1)..(866): unsure at all n locations
tgggaacttacaagcttaaagcatggctttcctgctcagaaaaaaaacgaggatcgctcggaatccgaagagtgatcgcatttgtgtctaagtaacattcaaggagactcactgtctgccttgctctttttggattccattacattacagaacaaggcttattctatgggaccttctgtgctagtttcagtttcaatactttacaacaccaccagtccaccacacctgagcagcagcactcatggaggaatttattccaagaaactaatacggttcctctttctcaagtttgacaggaactatcaactgttggtgtagacactaatagttactggctagtctgtcttgaatctgtgtacaaacttctccaggccctctttgcagtcctccaccaccctcttcgacttatccccaatggttgaaccaaacacgtagacattgtcctgtgcttcggatgacaacttctttgccttcaaagctgcagcagcccctagatctgtaaatcgctgcgttgcttcttctgctccctgctttagaattgagatgaaagacctcacatgctgtattactctctccagggaatggcaagaccggacttttatctcagcagacattgacttcagcttctccagcaaagacccagctcggttaattgcttcgtcaacttgatgttctttgccagcattggcccatgtgactccagctgatgcatcatcttcaagccctccttcaacaacaaccttgattccatgacgctcccattggttccgggcttcctcaagggccctggcatgctccctggccttctttgcttcatcctcntnccaagcccgggccattgataaagccttcctctcaacttcaag

SEQ ID NO: 387366 - DNA, 944 bp, Oryza sativa
ttttttttttttttttttaacctgaaattttaaaacaactttcatatataaagttttcgtacaaaacgcactattttacagttatgcccattatcctcgcaccattttccaggttttcatctcccaagtttgccatgctctcccgaataaacaacgaaagcagtgtccggcctgtagtggcatatgctcaagtaatccaacaggagtatgttcaccggtcgaagcagataacgttggttacattgaggacagcatgaattgatgcagaaacagagttcaaaactggtttaaataatccaccgaatgaaaagcacagaaacaaaatagtccaatgcagacggtaacatctaggagagcagagtgttgtcggtttgaggccgcatgaagattacagcctcctaccccttctaccaccctttctgcgtgtgctatcagtcggcactggagtaacatcctcaatacgaccaatcttcatgccagatcgagcaagtgctctaagtgcggactgagcaccaggaccaggggtttttgtcttgttaccaccagtagcacggagcttgatatgcaaagcagttattccaagctccttgcatctttgagcaacatcctgtgaagcaagcatagcagcataaggggaagattcgtcgcgatcagctttaaccttcatgccaccagtgatgcggacgagcgtctccctcccggacagatcggtgacatggatgaaggtgtcgttgaaggaggcgaagatgtgggcgacgccgaagacgtactcgccctcgcgcacggtcgggccgagggtgacgttctcctccttgggctcccgtgtcttcttcctcccggacatggcggcggcggtggcgacggcgacgggggcaggggagagtggagaagcggcgtccgcccacgcggcggcgatcggacgcgtgggtcgacctgaattccgg

SEQ ID NO: 387367 - DNA, 744 bp, Oryza sativa
caacagcaaccaaaatttagataatcggctttatagggggaggtcattcatcttctaaagaacataacatagctcaaaatttataaatccacatccgatgctaagatcataatagagtacagaacaagttgcaaggacaaggatagatagctttgctttccccccataacaggcactacacggaattacagcctccttcctcttctgccaccctttctgcgggtactgtcagttgggactggagtaacatcctcaatgcgtccaatcttcatgccagaacgtgcaagagctctaagcgcagattgagcaccaggaccaggagtttttgtcttgtttccaccagtagcacggagcttaatgtgcagagcagtaattccaagctccttgcatctctgtgcaacatcctgggatgcaagcatggcagcataaggggatgactcatcacggtcagctttcaccttcatgccaccggtgatgcggacgagcgtctccctgccggacagatccgtcacgtggatgaaggtgtcgttgaacgacgcgaagatgtgcgcgacgccgaagacgtactcgccctcgcggaccgtggggccgagcgtcacgttctcctccttgggctctcgcgtcttcttcctcccggacatggctgcgtcgtctgtgctcgcggcggcggcggcggggaggaggaggagaagcaggatagggttcggagcggacgcgtgggcggacgcgtgggcggacgcgtgg

SEQ ID NO: 387368 - DNA, 880 bp, Oryza sativa
acagaaatcacagtacatatatagatgtacgtacacacatacactggtttggaataaggcgcgcggccgcggcggcgaaattgtgggtgagcaacgtatatacgtgtacgtacgtacatccttgctcatcttattgtaccgtatatatacgtacgtagtagccagtatttatttagtggtacgtacgtacgcatggattattaataatttgggggtgattaataattaatcagttgcagtagtagccctgctgctgcggcatcctggcgtagccgtactgctgctccttggcgccgtagctggcctgcttctgctcgcggtgctcgtggtaggcgtagccgccggcgcccaccgccgccaccgccgccacgccctgctcgatcctgtgcctctgcgcgttcgccgggtccttcttcgcctggtgcccctcatagagagcgaaggcgccgctggcgagggcgccgatctcgccgaacgcgctcgcgctgcttgtgctcgcgctcctcccgcttgtagtactcctgctgctggccgccgccgtagccgtagccgccatggccgctctgctgcctcatcaggtactcctgcgagtgcatggagttgttcctcctcccacggtcgatctcgccgccctcgctgtagtagtcgtcggtgtgggactccaccctcatgccaccatgcccgtgcccgtgcccgtgaccgtggccgtgcccgtggccgtgctgcctgccggtggtctcgtagcactcgtccacggtgctggagtagtactccgtcattgttggtcggtttctctcctgcagctagctacttctccgatcaggtggtggtgcaagggaagttctttgcctgcccgaattgcacgagctcgtgccgaatt

SEQ ID NO: 387369 - DNA, 520 bp, Oryza sativa
tctgctcgcggtgctcgtggtaggagtagccgccggcgccacccgccgccaccgccgccacgccctgctcgatcctagtgcctctgcgcgttcgccgggtccttcttcgcctggtgcccctcatagagagcgaaggcgccgctggcgagggcgccgatctcgccgacgcgctcgcgctgcttgtgctcgcgctcctcccgcttgtagtactcctgctgctggccgccgccgtggccgtagccgccatggccgctctgctgcctcatcaggtactcctgcgagtgcatggagttgttcctcctcccacggtcgatctcgccgccctcgcagtagtagtcgtcggtgtgggactccaccctcatgccgccatggccgtggccgtggccgtgaccgtgctgcctgccggtggtctcgtagcactcgtccacggtgttcgagtagtactccgccattgttggtcggtttctctcctgcagctagctacttctctgatcaggtggtggtccaagcgaagttccga

SEQ ID NO: 387370 - DNA, 509 bp, Oryza sativa
  unsure (1)..(509): unsure at all n locations
tttttttttttttttttgttcaagtgatggcgatattatatcattaacgctgaatatacagcttgagatatacacagactgattcgtagcaattatatatagtatatcactggtgagtgaggaccagctagcagtactgtttttaattacactggcacgcttggatcttcttctttgattaatatagttaagaaagtacagtcactgacatcaacatattttccaactccaacatcatcatgcatattactggtgaagaacgccccttcgatcgatcgtcatgccagttcatcagtgactgcagcttcttcgtctttgcgagatgcatcttcttgtccgagcagatgcctcctgatgtcgtctnctcctccctgcaccggcttgtcctgcangtngnntgtctggctcttctttctctcgcttttgccccacagcacgaagtacagcccgatcacaatcagaactgctccgatgatccctcctgagtatagctgatctccgagaatgat

SEQ ID NO: 387371 - DNA, 602 bp, Oryza sativa
gaggtaataccagtgcaccgttacagcatgtgaagaagctgatgaacgaccgtatatcagtaaacatgaacatagtccggtgaattacttgtcttcggtttactcggggaggggaattatactatccattagatttcacatctctattcctggaaattctaggcccggttcagaattggcatactatcctggccataacgaaccctgcaagcttaacaaaaacaaactgtacagggcagctcaagctcccagttgagaagagatgaacacatttggaaccaaattttccaaatgtttaaatagaaacaagaaacaaatgtaatgtacatttatacgaaaaacagcaggtgaggtgatcatctttctgaaaccaaaaaatgatatccatacaagtcattcagtgttcttgagcagtttccgttttcccaaggtgctcatattggtcacaatttgctccagcgtccttcagggcagtaatcaaccgtggcataatttttgctaatgcgagtttgaaacccaccgagcatggctgttctctgcttctctcggtggtgcaggaatcatatgtgagcgtcccaaccccattaccttcggacgcgtgg

SEQ ID NO: 387372 - DNA, 427 bp, Oryza sativa
cgtagaaatatatttatctgctattgtcattgagtaagcagtacacaagatgtacaaaacgggcggatggggtggacatggacacatgtacgtgcagatacatatatcacaaggaacttgttgaaaagtttccttctcttttttaaactagagtggtagctagctaatcaacctcttcacccgatctgataataatcggtgaagacttaactaactaagcccctgtccaagcactgcatatatcacacatgcatgtcgatcactacgtacaaaagctaatactgaatattcctatatgtatcgatcaacaaggccctgcagatcagatcagatcagagatcgtttcatgctcttccagggctcttaggatcatggcggttgttggcgccggagccagggtagtcgttgacctcgatcggacgcgtgg

SEQ ID NO: 387373 - DNA, 1135 bp, Oryza sativa
  unsure (1)..(1135): unsure at all n locations
nnnnnnnnnnnnnnnnnnnnnnnnnnnnnnnnnnnnnnnnnnnnnnnnnnnnnnnnngacgttaattcgtgtcgctaggatttgcatcacctaaaaacacgactgcagtaaagcagcttgaaatttacatacatagtacctgtatcatgaatataagtaaaacttctctgaatacattctttgttcatgctgcctgggtacattaaccttccctctttagctctgcagctctgctgcatatgtgaactcacaacatacatgctagctttcctatttgtactactatattcttttccatttatcaacggacgacatgcattgctgtgctacttcaccaacatggagctcttaacatccaaagtcataaggaaccaaaccttgcagctctgggccgttgagcctgttgttgttctcaaagcttcgaagagggaaggttgagaagggaccgtcaacaggaatagttccacagaggtcattgttagacaagtcaatgactttcaggttggatagtttggccagctcccttggaattgatccagcaagcttgttattgttcaaccgcatgaatctcagcgagccgagcttggaaagcgacttggggattgttccagtgagcttgttggcatacaaatccaagctgatcaaattcttgagattgcccaattcttttgggatctcaccgttaagattgttcctgtagagctccaggcattgtaggttcacaagacggcctagctcagggccaatcgagccggagatgttggagtttcctaaatccaggcggacgacgcggctggcgtggtcgcaggtcacatggaaccaggtgcaggggttgacgagggtcgggtcccagctctgcagcacgccgttgggatccgacagcctcgtccgcagcgcgtacagcgcgtccccctcgtcgttggacgcccgcgccggcgcggcgagaagcaggaccacggccacggccacggcgccggcggcgagcagggacacgcggggcgccatccggccgcggatagtcgtaggtacaggctctggcagtcgggctgccctctcccgccggctatggctccggtgagaaaacgcgcgcgtgggcccagccggtccagtgtcccggcccgtgccggcgggcgtc

SEQ ID NO: 387374 - DNA, 350 bp, Oryza sativa
  unsure (1)..(350): unsure at all n locations
ccaggcggacgacgcggntgccgtggtcgcagttgacatggaaccaggtgcaggggttgacgagggtcgggtcccagctctgcagcacgccgttgggatccgacagcctcgtccgcagcgcgtacagcgcgtccccctcgtcgttggacgcccgcgccggcgcggcgagaagcaggaccacggccacggccacggcccggcggcgagcagggacacgcggggcgccatccggccgcggatagtcgtaggtagaggctctggcagtcgggctggcctctcccgccggctatggctccggtgtgaaagggcgagaggaggaagaagactagtagaagagggtgaaggcccgc

SEQ ID NO: 387375 - DNA, 467 bp, Oryza sativa
  unsure (1)..(467): unsure at all n locations
taatcataacattcatagcattgctgtatttcatcaagataacaggaaaatggtgtcttggttcagtttgccaagtgatacaagatacagcttaaataatgacaatggatacaatggttagggcttcgcagcactcccgaattaggagctgctggtggaccgaacacaacaacaaacttcaatttcctgtgtacacgagagccacagacctgaatcggtgttgctctcgtcgaccaccggtatcacccagggtagctccaatcccatcgatggcagctcagcaaaaacgaatgagcgcgcatcgaggaaaatgaatggatggatatctagtgtaaacctatactaatgtacatggctatagtgtgttcgtctcaagttaattgtcgacaagtactcgtagtatacttgtgcgtgcagagtagcatgtataaaagggactctngctgtttactcgacgacatgggact

SEQ ID NO: 387376 - DNA, 649 bp, Oryza sativa
  unsure (1)..(649): unsure at all n locations
gggggggattaaaaacattggggaacaaactacaagagtacatgtttgacacaaatacacaattcaaatctaaaacactaaagagtccagtacaggtgcacttagaagggcttgaagaagcataagctattacagttagtttctactactaacagaaaatctagaattgatgccattgacatacaccaaacaacacattaaagaccctaaagctggtcctaaactgaaaaccaacagctgaatgcatatccattgggcattctatctcatgagggtctttacagcgaggtcaaattcttggttcttcaagacataagccatagagggatccacccatcaagctctggctctcttgctactactgctgcagttcgggcacttgtagtgcttgatgtgctcaagccttggcaaggggttatcttgacacacttaccgtggaaccatgtctcacaagcatcgcagcagatccagaactcatcctgtccatagttgtcaccacatgcaccacataatgtgttttcgtgatcttcttcttcctcctcttcctcacctccgctatcatcctncatcttcggaggtggcatctttggacccctagagttgggttccggtggngcgatggcttcgtgccggatttattgctcttgcc

SEQ ID NO: 387377 - DNA, 543 bp, Oryza sativa
gacgcaaaattatggatcaatataataaagggaaagaataaaaaggacagtcagcatcatcgccgtttgagtaactattatttgcttaaaattaaaatatctaagaaaaataagtctagacaatttattattgtgaattccagcggttagggccaaggaccagtagagttacacgtctgcaactttagaagtcgggggcaagccatgcgataggcttgcttactttgagaaaaacttctggctaacagattcatagctcgggacatgaataacgtcaccccatgatgccagtgtaaggggtgatgaaatgatcttcttggcagtagaagaaatgtcattcaaggtgattgcttcaagatctttcaagaaatgctcaatgggtttcctttccccatacgtcaaaatctgcctccctatgtcttcagatgctacgactctggattccaagttcatcaaaactgcagacttggttgcctgtttagctcgatcaagctgttcttgtgtaacttttccaggagttgcaacctcaagaagctctcctgc

SEQ ID NO: 387378 - DNA, 1000 bp, Oryza sativa
ccggcggcgtgtgaatggtacctcacacggtgtccatccatccattcattcattcatggtgttacaaacacgcctgtactaatctgcctacagtgtaggcaacctcttattgaaattgacattcttgcttctgataatgctatacccacgattgtacagtacaggctgctgagcattattgtctttacttacacggatctggtgaatggttcagttacagcctcacaaaatatacacaagcacagcatcataagctactaaaactgatcaaagctactttctgcatggttcttcgctggttgcccctccattgtcatgtgagaagtgggatttcaatccaatccagcactggtagtaatcgagatcccgggatggggaatcgagggcccattggcaaacccttggggatgagtgcagactcgaacatgaatgcaagcgtgccgcttagccttgatggctcattggcatcaggacggctgattgttgcctcgtatgtcttggtgtctgggccatgaggtgtcatgcaactgtgaaggctagcacctccaggaagaaaaccatcagctttggcctcgtatattccatagatcaatcccataaattcactcatgcaattgcgatgatagtatggagggcgaaatgtgttctcagcgaccaaccatctaggcgggaatatcacaaaatcaagcaatgcgacaccaggcttatcagttggtgcagtcagcactgtatttactgatggatcagcatgatcgaatagaacagtgttaaatggacagaatttactcaggtcgtacttgtaagggacataatttccatgccacgctaccacattaaatggagaaaagtcctgagtggcagtgaatagctcaccaccatatttctgcacaattgtgtatcctgggcggtggacttgctcaaaccatgctgttggggaaaggaaatcccttgcagaagacaagccatttgcacctgcacaccaaccggaccggacgcgtgg

SEQ ID NO: 387379 - DNA, 696 bp, Oryza sativa
  unsure (1)..(696): unsure at all n locations
nnnnnnnnnnnnnnnnnnnnnnnnnnaacttaaattactccccagatttcttattgttcagattattgggcagctaatcaagcaaccagagagcaaagctgcaagcacagacacactgacacacagggagaagtaataataagttacacatggaattacggatggaattaagctgtagagcacaagaggatacaataatctaagggttgatttggggggatttttttttttcattcggtgaggcgggcgacgacggggtacttggcctggaacttggtctcccagtcggcgaggacgccgagctccttgtcggagaggccggagaggtcgccggagacgtcggcgtcgtccttggacatcttgccgagcgcgcggctggcctcgcggccggcgaagacggcgtaggcgccgccggggccgtagaagccgcggccggaggtgacgtcgtagaccttgccgcggacggagacgtagatcggcttcgatgggtcgctcccgtcgtacgcccgcagctgcgccgccgtcagctccgccgccatctctctctcctctctctttctctctcctcgcggctgtgtgtggatcagtggaaggttgggtcgacctcgaaaggggggcccggtanccaattcgccctatagtgagtcgtattacgcgcgctcactggccgtcgttttacaangtcgtgactgggaa

SEQ ID NO: 387380 - DNA, 532 bp, Oryza sativa
aatgggagaactgaatttatttatttacttatttattacataaaacacatttcaaaaatatgacttatgccacctactagatgatacattaggggctatgacatttgcatttcatgatgtaaagaaaaagagaagttcatttttgcaacataattgttgtactctattgttttgcccagtttagcttcataattcatatcagttcaattttctgctctgccacccaagattggttcggccccagttgtaatgtttcaatctttgcattttcaacacagacaaaatctttgtaacaagcctccatctgcaagtgaggattccacagcactgcatctgaccaattcgcatttgatatcacaattttgtcacccaatccattgtccagggtgagctcactcggtgcaccaaggtaaatgcaatcgacaaatcctggaaaagtcacctcttccctctcttctttcccctccaaagggtttttgggatcgggatccttatttagggtcttacaacctttgagacctcggacgcgtgg

SEQ ID NO: 387381 - DNA, 1153 bp, Oryza sativa
ttttttttttttttttaacataatattagcaaaagatgcaataataattataactaaggcactatagtagttgggctgtatcagttcagcagtaacatttacaactaggtttgagagagatcatttacatactcagtctgtcataacctacttctcactagcatcagcgctgctatcaattttatcgtccgctgtatcctctggcccagtagacgggagtgcactatcatcagctgctgtaaccttgttttcgtcatcacttacagatgctggctcagcgctgtcaacctcagtaccttgaatagcagtatcggcgggtgttctatcttctgattcagctaatgttggaatctgagtgctcacgacagtattattttcttcagtagcagcacccgacgggctagtcgtttcgttcggctgctctagctttgcctccgatattcctgctgggatttgcacatcagcagatacatcagtagcatcagataatggcgttggtggatgaggtgctgctgtagccacttgatcatcatcacactcaggcgatgtaccgatttcctttgatatagagctttcagaaacaggaacagaagcgtcacacgtaacttcagtaccactctcttgtttgatggcagcagacggggcagtggaatgatcaacttcgtcagaaccatgacgatctattgattcagtcttcagcatggatacatcatcggtacatgcagcagagataacatcatcagtaccttctttatttcccagaacgccatcactatcagctgcttggacagaatcatcatcattcgagtcttctgatggtgaatatcctactagattcacagtttgagaatcatcattggtaagactacactttgcattatcacctccactcaaattggaagttccatccactctgccctggtcctttgttgatgcaaatttagagtcactattctctaatctctcttgttctgctggctgatttgagtcagttaactgcaaaacagcaggcacgctagaaggaccttcaggaataccatcaatctgcattttttcgatctcgagagtggcttgcttaggaccaatcaaatcagcagcagtatcttccttatccgaggcatcataaggtgcctggctgcctgctaaatcagtc

SEQ ID NO: 387382 - DNA, 558 bp, Oryza sativa
gaaaaacattctagttttaagatgaaatagagaagtagagttgcagacataaacatgatctgcttttacatcatcaccctgttaggacttaggagagcatagatttgtaccgcaaatactatcttattgagagctgcatagatggaacaaatgtgctcatgtacactgggtataggattgggcacaaatatatatggatatccttattgcatccttatcctataaggattagtaacaccttgacatgcattccgtgcaacttccaatgcatcccttcaggaaactctgatgatcatgatgatctgtcttgctggcacatgaagagctaccctcccaagtgacttgacagccaaggtacattgcttgctgtcctccatgttttgttcaggagacatcttgatccatcatgcggcctgaacactcatggaaccggttggtacatccagcaaggctccattgctgtttgcatggcctgcaggttgtcttgcaacgaaaaaacatgccccgatgacaatgtagcacaggaggaggagaatccctttaggcaatgagatgttc

SEQ ID NO: 387383 - DNA, 254 bp, Oryza sativa
gggaacatggactgatggacatggttcattacagacagtttagatgcaatttggacatagttcattacagacatagacacattgtttaaatgcaacttgcaaaattaaatcaacaaggtccggtcggtgtacattctatccctaccggagggaggccggagcacggaaaacatccataaaactatttaaaaaggctatgcttatttcaaacgcctgtgaatatgaatggttcgtaggcgtagccggacgcgtgg

SEQ ID NO: 387384 - DNA, 640 bp, Oryza sativa
aacaaggatgtcgatcaaagtatactgtattattgatgtgtttcaagaagtggatgtacaagcaaagaaaaaagataaaaaaaataaaactagaataaagctactaagaagaattactctgtctttacacttttgagatcgatctcaatttttcgtcgtcatcagcatcgaatccgtcctccgattctcccgtccacaaacccaatcgaaatccatccccaacaaaccgagagatcggaggacgaagcaaaaggaaaccaaaaaactagctaaactaagtaattaatcgaccaaccaaccctgaagaagaagaagaagagcaatctgggagctccgctccaccgccatggcgatgcatccatggagatgacggaaggatcaggcgcggaagcaaccggcgaagcgggggaggtggaggtggatctgggtgtggtggtgggaggaggagtcgaggtcgaggaggtgggaggcggcggcgccgtggaggtcctggacgatgaggtgctcgacgtggacgaagcggtcgacgcggcaggggatggcgatggcgccccgctgcgcgaagccgtactcgcgctcggcctcctcgagcagcgccccgaagagcgggtgcttgaggtgggcgagcgcggacgcgtgg

SEQ ID NO: 387385 - DNA, 545 bp, Oryza sativa
tgaagaaaacgagcatttgatttgaaaggcagcagtacaactccacgttgtaaagttacaatgcaagccgatggtatttgtaagttacaacacattccacaactattactacaattgcaaatttacaatcagcatgtaagtcatcccagagattttaaaaaataaataacaaatggataaaaacataaaagacagcataagttacaagctcaaagatgctgatgacgatgtaatcaacatgtacaacactcgtttgtagagcaatctgatgtctatggttgtacaacagagatgtgttaggagacccaaatcttgtgcaacgcgtgcagctggcccagagaggttgatttgagcgacagacgatacatctcttttagtttggcggtgtctcctctgctgttgctggcgttggcctggccgacagaagctgccggtcgagcagctgccaacatgctcttcagcaggcgctgcagctggctccagaatttcggttttatgtccagatccaagcccacgcgtccgcccacgcgtccgcggacgcgtgg

SEQ ID NO: 387386 - DNA, 860 bp, Oryza sativa
  unsure (1)..(860): unsure at all n locations
cccacgcgtccgcttttttttttttttttaaacaaacataataacgtttttattcaagatgaacaagatgtgttcacagtatgtaaatatgtacatagcatatataattaatttactgtttatctttacaacatacatataaacgtggtgcgtcgcttaggatgacttcagcaaggcccggttcttctcatattcaaggtattcagtgggggatataggcttaggacccccaaaccaatcaatcaaaaatatgtttttgatttccaatttgaagatttggaaatgatgattctttggccaaccctccatttcaggatgtttagtaaaaagtgcttctttggccaaatcggcttcagatgattgagggtcaatcaacttcaactttcacagtatgtgtaagtgttgcacaagttgggttttcaggatcaatcttnccacatgtcccaagagggaactcgctaagggtaaaggaggtcctttcatcctccaatgcatctctcgcagtgggatctagcgttgtcagatagaagtaggggattccatggctctcacctggcactccatcactatatgaaactacattgccaaaaggagctccacttagatcacttgatattgtgctgaggacgccccacgtgttctgggcggcgagccacctcgcggtggcggcggcctcggtgggggcgggcttgccgccggcggcggcgacgatggggcgggcggcgagggccggcagcggagggcggaaggcgaggaggagcgcggcgccgacggcgacgacgaggaggagccgcgggaagcatcaccggttttctaagtttggttcggacgcgtgggcggacgcgtgggcggacgcgtgg

SEQ ID NO: 387387 - DNA, 1370 bp, Oryza sativa
gagaaaattacagcatgtaataaccgagataaccatgagatacccgcacggtttcgtaaaccatgatcacaagccaggtttttcactcggtctagagggagaaataacagcccattagactggcaacaatgccagcgcgaccacacacacacacacacataaaaaaaaaaaaagaagacagagagcacaaagaaacgaacaccctacagcaccaagaggcagcgcaatgaaccacacatcagcaggttaaaatgtcttccatggttatacgcagattatgatatagaggtgtctcctttgagtcgaaaatacgacggactccataaggcattaaacagttcctaagggttccagctaagtcatcaaaaagaaaaaagaaagaagcaaccgagggtcacgcaacttcgcccttcagagtgacagcatccacaaaatgcagacgatcggcaccatcgcaatctgacatcctagactcagttctcctcctcctcatcctcttcaccctcatcagcatcagacccctcttcgtcgtcatcctctcctaactcttcagcctcattattgaaatacttcaatggattgggccacaggtcttccttgatgatctcagccacctcatcttgcacaccatcagcaagactcttgtgctctgtatcagtaaaccaggtgaagaaactttcctcaaccaatggtcgcttgctccctttcttcttggcattcccatttgcaatttccattccttctttccaacttaatgctagtagcatttattgtggttgttccgtcatcagcgaaggcatatgtcttcgtgagctctttgtcttcaaagtacgggttctcggagaaggtaagagttatggagtagcctgacttgacatctttagaatcatccacgtcgacagactccaggtacttgaacatcttttgatcctcttcggtcaaaagctcactaagtagaggatgactcagaaacgctgtcagccagaagtcggggattgtttggataacgtcactccttcggagatagacaggtctgcgaatctcactgtatttctgctcgacctccaaaaccttgtcactagcttcctcattgaccttctcgagctcgtcctggatctcctggagcttctcgatggagaggacgagggcgccgtcgatctgctcgttctcctcggcggcgccgccgtcggcgtcggtcttggccttcttccccttgtccgccggcgccgtcatcgcaaggaagcagagagccctcgctcgctcgcgcgctcgctagggttttagccttccttcctttcttccacactgcgaggcgaggcggaggaggaggggagggagaggcgtgcgcgcgtcgaaggccggacgcgtgg

SEQ ID NO: 387388 - DNA, 1010 bp, Oryza sativa
aagaccaaacaaactgcatgcaactgaaatttcgctattgccaatctcctgaaatgtacaatctggaaaacccgtaagacccacattcttattggctgctccaaccatggaaccacctgctatatatgggacaatgtgtcagtacggcgggaagcaccaccccttttgttggatgttttttccccaaaagaacagaatggatattgcaaaagtcagactaatctagcgacttaactaccccaggagaatcccgaactatacaagggggcaggaataaacattagcatcaccaatgccagacacctgcaattccatgtagccaaccaaattaggctactacattctgcttatatgtttggttgtacaagctagtacttgtcatatcttcaactcgcatggtcatctaaccatatgacaaagtaatgaccatcaaagtagcttgatctagatgcctgcgataccatcttgaaattaacaacctcatatgtagataggtttcacgtcattagccccaaaactcaagctacatgaaggacatctcctctgtcggttcccaagggacttctgtatgcactgattgcagaagagatggtagcacttggtaatcacaacctccttctgcctatcatggcagataccacacttcattatccccctatactccttgacctcatgacgaagcttttccaggactgctgattcacgtgccttggctctaagagagctagctttccttgacataacctccaaatcatcctctattctcttcttactaaacctctctttctcaagttctataagcagatcagcgacttccaaacgactgcttccaacattcgcttgtattccatccaatgattgcataagcttttgagcatctctgtgcacatcaaccagctttctttggtaattactcaatgaaacagattgttgccatccatcctcttgaagtttcccaacccgatcagaccacattttaagctgatcttctaaggaaaccggacgcgtgg

SEQ ID NO: 387389 - DNA, 1106 bp, Oryza sativa
ttttttttttttttttttaccacacgctccaaacagaagtataataattgaagatacaccagctaatacaccagctaaggtacaatattgacgtgcattggtattcagaaccggctgccaaacatttgctgtagggaaatgaacgatgaaaatcaaatgtgctcaacagtgtacacacaattagcatctcagccgttcgtaagttttgcaaaatttgaccccccatgcgtgaggggtattacttcttacatctataccgcagagcatactgtgctccgtactttcgtacactcatcagaagcacgaatagcctaatatgaccacaatggcttcatgtcacacccgaacggcttcgtaatttacgatacaagctgaacccgtttgccatcaatattgaattttctgcttccttggagcttcctctttaagaacaatagagcttcacgcctacaagagaagttggagaacatagactctgaatgtgcttcaacagctaccttaagttccttcaatttcatagattgtgctggggcctgacgaagaattgttttgcaaagtttcttgaccttggttttatgtttttgtttaacatccacgcacatttctttcacagtattcacattggcgtctattagttcattatcgttagcagattcttcctcatcaccatcttcttccaactctgataattcattggattgggttgaattttcctcatcgctatcaccaaaagaagttttgttccctttccaacggtgtccggcaactttaattggcagacccttaatgccaagaccctgctttccagatgtggctttgtcctgaacaagattgtataggttttcttggtcttcttccccaaatgtctggcggacatttgaagtaccttttgtagcagaagatttgttcttgcgcgattttgctcctagaaagccgcctgacttgaatccaaatttatgcccccaccagttcacatcatcagcttgcgatactgtatcttgacagatgatgggatcaggttcatcacagcatgttggttcaacttcctggtccactttgcaattgtcatcacttttacgcgtgagcatacgcgtgggtcgtagccc

SEQ ID NO: 387390 - DNA, 755 bp, Oryza sativa
tgctttaaaagaatgtcatattccaaataatatctaaataaaatattacaggctcaattagcaagcgttccaagaggcacgttctttttgtagttactagtaatcatgtacgtgcaacgcacgtttgatataatgtcatacacaatatgcatctatgcgttttaataactgacaaaactaagaatctgttggttttacatcaattccaatagaactggagtacataattttgcaaaatattactcgtactgcatttgggatttgcaggggattggagctctggccaaaaccccacttcagtccatagatttgctaataaaagatccaaaattttggagaaatgagttcatggcagtgaagtgagttagttcatgaacaaaatcactaaactgaatatattttaacgaaacttttgagcatacttcacctcattggagaataaaactctcagcatactcatataaggatatggtgtataggctgagcactcgcatattgtagctacgaagtgcttcaccttgggaaagaggcctgcccttttggtccaaaagatcttcaggctgccaagctggttggctggtttcatatttggacgtcagaacaccatcaccatccatgttgctcaccttctaacttacagatcttcttcgcccctcttctttaaagtggccccaaatttcacttgagtttatgcacattcatatggagttcaaccagcccacttgtgagcaacccacgcgtccgcggacgcgtgg

SEQ ID NO: 387391 - DNA, 459 bp, Oryza sativa
acaaaggtcctcccattcaaacatccactagagggtgtttacaatccctaaatacaacaatcaacaatgaagcaagcaaggtggaataccactgcgatttacaatatatggctggaggcacaaacgccacctaaaaacctatgctttgcttttcatataattatcattcacaaattcacaggttgatatttcgtcagtattgtaggaacactcttgtgttgaaggcaagcaaagacagcatattgaacggtgccttacacattatgttcaatgaacttcgcctcaccttccttcatccgatatgcttgagcttaccccacgcctccgcgcaggggcacattaacaagtttatatatctgactaaaatttgatcgacctgcttccaactgacagaatcgagcatcatgattcatgaatatgatgaatttatgattgattcatgtggctcgtgccgaatcc

SEQ ID NO: 387392 - DNA, 651 bp, Oryza sativa
  unsure (1)..(651): unsure at all n locations
nnnnnnnnnnnnnnnnnnttggtactggtacatcataattcttcgcatatcatttttacagaaacttcagagtacatgactgaaatttgtacagggtagcttgtacatatgtgcaagcttttcagaggctgctaaaacctcagtttattaccagcctactagttactattcactagtcaggcattctaattaaggtcctaattggcagcacggcagcacccagactgttgctactgggtgccttttgatctttctggcagcagtttcttacaaagaaacggggcatctgttcttacttcttatcattcttgttctttgccttcccgtttgctgagatagagtcgatgtcgatgagcattttcacgacttctctcatggttggccgttcagaaggcagttgaacagtgcaaaggatggcaatgttcaagacctttgtcatgtcctctgatgcatggctgctaacctttggatcaagaacagctgcaggattctggttggccaaatgggatgaaacccaggagacaatgtncagttcaccggtcaaactgttggtctgaagggctgcgtccagtaagcagcttaacagcacaatgccaaagctgtaaacatcantcttctctgtcaccttgagagaataagcaagctcagggg

SEQ ID NO: 387393 - DNA, 762 bp, Oryza sativa
gaccaaaatcaacacctttcaacaagcatggatcttactgaaatgttaattacatagtagagcaccacacatactcttaacaatatgactaaaatgcttccaatttccaatagtcgagaggacagaggaaaagcagacaacttcttcaatggagatcccaaacaaaaagatgggaaaaagaacgggaaaaaagggactttttttttccaaatggcaccacatcaagggaggaaccaaataatatcccttttcttatgaatgacacaaatattctttggtttagattatgttctttccttcttttttccttctcctctcttcttgttgggcgtttcttggtccgagagaccgttcttgcgtcactgcgccgcgacggtgcgggaggacgaggactgcacggccgccgccggcgcggcggcggcggtgggagaggacgacgggtggccgtgcgagctgctgcggtggagccggcacttgaaggagccggcgtgcgtcgccggcgcgcagacgcacttggggccggacccgtgtccgccgccgccggacgacgccgaggcggcggacgaccagctcctccgcatcttcggcgacgccgccgcgccggtcggcgtcgtgccgctgctgtggtggccgtggccgtggaacctgccttcctccccagcagtgtccacgtagttggacgccattactccctgctttctgtagttctagaacttgcaagaatggaatcagaactgcagagaggtggaggcggccgcgtgg

SEQ ID NO: 387394 - DNA, 461 bp, Oryza sativa
cgggtggccgtgcgagctgcttcggtggagccggcacttgaaggatccggcgtgcgtcgccggcgcgcatacgcacttggggccggacccgtgtccgccgccgccggaccgccccgaggcggcggacgtaccagctcctccgcatcctttcggcgacgccgccgcgccggtcgccgtcgtgccgctgctgtggtggccgtggccgtggaacctgccttcctccccagcagtgtccacgtagttggacgccattactccctgctttctgtagttatcagatcaaacaaatctaaccctgacctaaaattacaaccagcctttgattcccttctccataccaagttatcaacaactcaactagacttgtgcaagaaaaaaaaacaggaacaaagagaagattgtgtatacctagaacttgcaagaatggaatcagaactgcagaaaggtgcccacgcgtccaa

SEQ ID NO: 387395 - DNA, 730 bp, Oryza sativa
  unsure (1)..(730): unsure at all n locations
ggtggttaaaaatgcggattccattgaagtttttgatcaaatccatccaaattcgttcgaatgcaggaacagaaggaacatatgccatggggaggcaggctaaggtacaatctctcaaccaggctgtagtagtaattattcatagcagcagcatcagcagcagaggtagtactagcagaagtaatactagaggtggattgttcgtcgtcatcatcgtggcggtggcctttagaactcgacgccgttgaagaccttgcgcacctgctcgagcgtgacgaagagcacgacggtgaaggggccctggcgcgacacggtggggatgaaccccttgtacagcgccatgacgccctccgaccgcaccgtcttgagcgcgcagtcgatggcgccggagtagggcggcggcgcgccgggcgccaccttcatgttcatcaccctcgtcttcaccacgtccacggggttggacgccgcggcggcgacgagccccgcggcgaagctggccacgacgtgcgtgcccagcccgtcggcgccggggccgcggcgcgccaggatggcctccttggcctggtcgtangtggccactgcgacccgtgacgatcatggggcngttcaccgtcagcgaanaaccccgccacaggctgcggangccctcntcgcgcgccatccngccgatggcttcccgacgctgcggtaattccggnnctcngngaaacggaaccgcccgtcggcttng

SEQ ID NO: 387396 - DNA, 1084 bp, Oryza sativa
ttttgtggttgatgacagacaggcttattcttattattctcgaaataaccgtcacacaacaaaaatgagaacgaatttgtccagaaatgcactcaattacaacatcatccttgcagttacagcatacaagatggaaactttactgaactataccacgtttcgctccatccaccgtgttcttcagcaacatcgccaccgtcatggggccaacgccacctgggactggagtcaggtgaccagcaaccttgctcacctctgcgaaatccacatcgccgacgagtctgtaccccgatttcctggttgggtcactgatggagttcgtcccaacgtcgatgacagcagcgcctggtttgatccagtctcctttgatcatcatagcctggccagccgctgcaatgacaatgtctgcttcacggacaatactttcagggtttggggtccgggagtgaacaatggatacggtcgcatccgccttcagaagaagcagggatacaggtagcccgacaatgttgctgcggccaaccacgaccgctcgcttcccattgatggtaactccgctccgtgttaggagctccatgcatccattcggcgtgcatggtaggaacagtgggtctctgcctttcattgcaagcttgccaatattcagaggatggaacccatcaacatctttctctaagctgatctcgttcaatatcttttcctcattaatatgctttggcaatggaagctggacaagtatgccatggacggctgggtcggcgttgaggcggtggacctcggcgacgagcgccgcctcggagatgtcctcggcgaggtcgacgtcgacggagcggatgccgacctcggcgcacgccttgcgcttcatctgcacgtacgtctgcgagtctttcctgctccccacgatcaccaccgacagactgggcacagcgttgtgagcgcagcataggccgagggcgtcgggtcccacctcgcggtggatagtaggcggctggccgcattcatgtttatgatcggtgccattaatggtgagacgcgtacgcgtggcgtcgaacctggaatccgcggaccggtggcgcaggcggaa

SEQ ID NO: 387397 - DNA, 488 bp, Oryza sativa
tggtagaaacagtgggtgtatgccttgcattgcaagcttgccaatatccagaggatggaacccatcaacatctttctctaagctgatctcgttcaatatcttttcctcattaatatgctttggcaatggaagctggacaagtatgccatggacggctgggtcggcgttgagccggtggacctcggcgacgagcgccgcctcggagatgtcctcggcgaggtcgacgtcgacggagcggatgccgacctcggcgcacgccttgcgcttcatctgcacgtacgtctgcgagtccttcctgctccccacgatcaccaccgccagcccgggcacgaggttgtgggcggaggagagggcggcgacgtcggcggcgacctcgcggcggatgtcggcggcgaccgccttcccgtcgatgatctgcgccattgggggtgagacgagattcttttttttttttcttttcgtcgtcgcgaatgttgatgagaggtgag

SEQ ID NO: 387398 - DNA, 990 bp, Oryza sativa
ttttttttttttttttgatttagccgttcattcacagttcacacccaatttcaacattttatgatctttttttgttttttttttttgcatccaaagttctgaagggttactcgattacaatttagacacagctctctcttcacttggagtcatacacacacacacacagcacatttattcctcgagtatttacatcagcaagatgattatccccttcctgttacaagcacttgatagggtttaacataatcatcatcaaaacagggtttatagtatgtacagcccccatgaacagattacagtaagcatctggagcacagataaaaacttgcaagctctttcagtggtgcacacaggctgtatctgccatggcaatctcagtttcctctgaaagactgaagaatatccatgaaacagcaatttggctgtcttctaccagctcaaacttgctgcacaacttttcattcttttctagctcatttttccttcttacttcatcaacaaaagtgcgtctcggtgtcgccctaaaagggtcagtgcggttgctgcgatgtgatgagcagtcaacccagccatgtcgagctgctctgtgagcgaagcgtttcgatgtacctgtctggtagtacaatgggtcgccactttattttgccatcaagcaacccatcgagtgaaataaattgcgagacgtgtgagccaaaaccaccaaccgttccttcttccacggtgattaggaaatcgtgttgctggcacaacattcttatcagatcaatgtcaagtggcttgcaaaatctcgcatagcaacagtgcctggatgccaaagttgaacagaagagatcgggctatcaagcatctctgggccacatcaccataaccaagaaaagctatctctttcccctcagcaagaatccctcctttaccaaatctccaaaggattcccatatgctaaagtgccactagtcccaacgatggcacccttgggcggacgcgtgg

SEQ ID NO: 387399 - DNA, 474 bp, Oryza sativa
  unsure (1)..(474): unsure at all n locations
nnnnnnnnnatgatatcacaggaaaagattgagaacaacataatttaactgcaaactgtacagagctctggcctatatatgcagctttccttatggctaaaccactgagcaccattcttggtggcgcttgtggaacagatgacagaacagaaagaagaaattgggaaggaaacataagactaacatcataacctaactggaggtgaaccaaatccttctcctccagcctataatgcagcctatggtgaagtacaaaagaagcagcattttttttttcacatatcaacctcctttgatcttcttgcttccatgtgaacatcacaaggcccagctgcttctcgcaatcagacatgaaaggggtaagatcaaccactttccttcaaagggcttggctctgaatctgctaacaatccttcagtctcagcaagagcaacaggctcgttctcaggaacagcaacagcagcagcagaagca

SEQ ID NO: 387400 - DNA, 421 bp, Oryza sativa
acagacggcatatattgatggtggggatgatacagactattcgtggagagcaaagggtttccatgaacaagcaaaagattgcggtatcccagctattacaactgccggcatctatcctggagtgagcaatggtcttacttcgcatttctatcaaacatatcagtttactttgatatttttcaagttacactgtccagatatcatcatgtgctctttcacaatttccatcagtactcatggatagtatccattgctctttgaggcagtttacatatgtgtaaaatcaccaacttgattagtgtcatgtattaatatgaagattgaagatatcaaatacataatagagagttagagacatgatctagcagtaaactatgaagacaatgttttgatctagccggacgcgtgggcggacgcgtgg

SEQ ID NO: 387401 - DNA, 655 bp, Oryza sativa
ttcagccaagaactagcaggtgggtaacttctcaagaatgagcgtgctgcaaagtcaggcgaagttcaactggaagactaccctatatgtacacacaggagaaggaaattgtatcgaggcccaacgagatacgtagaacgggaaccttcccacgtgtgcttgaacggtatgcaagatcacagggcattaagggcaaatgggccaaatcaaaatcagagaaatgttccaagaaataattttacgagtcactaattcggtaatcttgcctcctgcgaaaatgtctgagaatgaaactatctgcatacatggggtacttttgtcgtatgagacctttgatgcacttccagaatgaaaaatcaacttgctcaccatccttcctaactatgaaaagacatcttgagttctcaaattctggatgtaaccctaccgtaaggtagtcaataccgcatccaattttcttctcatattgtgggtgataaggaagcaatcgttccaaaattgccttttcatgttcagggctcagtcgatcaccattttcatacttgccggagtgcagaatcatccggacgaagccgacgagcggcacggtgtcctcgaggatgaggtcctcccaatccacccggacgcgtgggcggacgcgtgggcggacgcgtgg

SEQ ID NO: 387402 - DNA, 605 bp, Oryza sativa
tttaatttatattttcgccgtggggaggctcattgactaaatattattgtcatctaatgactaatttaaatgcttgcccgtactgtgacagtacatgagcaagaagtctttgcctttaattgcatagatttccaaacaagacacatggatacatcaaggacaccacaggaatgcagccacaggttgtgaaattctgtcgaccccaaatttggagagaacacgattgaattgctgccttgtgtagtagggcctatttgactgtagaggtagtaatttcgtcgattcgatacttaaatatatggctcgatctcttgaaaggagttcatactggcttttgatttctgatttctccatttgctatactgaaagattcttcctgttggacatcatcacatcatcatttgcactaaaggacataatggatcattcctcctgatcgatcatcctccgaacatcgtcaattactagccaggatttgtgtccaccaatcacctcagcctgtttttgagagtcacatacacagctgtattgaaggcatctttgttactcctgcacgattgacaagcttttgaggaacagcattgacatcgaccggacgcgtgggt

SEQ ID NO: 387403 - DNA, 552 bp, Oryza sativa
  unsure (1)..(552): unsure at all n locations
tatgtcaacaccatggtgttctgttacctcagacaagaaagggcacgattacaacttactactgatgaaattacaagagtgatgataatcatgagtcagggtacaaagtcatctaggcgattcagtgctatatagtccccaagataatgtagagctgcctttgtggaaaacaggaatgcaactcgcttttctgctaggatcgtcgatcaatctacagccatggcatctgaagcaccgccgctaacttcctctatgctcatcttctgctcttcagtggcagctctcagctcatctgctatgctcctctgctcatcatcgatcgagatctgcagttcctcgaccacatgaagaagaagagcaaactgcttcttccttagttccagggtccttatacatgcagtattctcagcctccaaattagcaatctccttctcaagatccgcaatgagcttttctgtttctgatcgtggaggctgcaaagaaatcatttttctgattnttcgcactcctctttgtgctgcctctcaattttgctctgttccagttgcttct

SEQ ID NO: 387404 - DNA, 912 bp, Oryza sativa
gatctcaatttggtagaatctttcatgggtaacttgaagacccatttagctccagggagggggaaaaaccatgggaaaatggacacacaaagcacattcatgttaccgatcacacaaaattgaagcctacaattatatacacctttcgccgcgcatacatgagcccaaattaaaaatagaattaggctgcaagctgcatttgtctacaatctaatgtaagttccttctcaacatctacatttctgagacctgaccatcctctcctgctgaaaagccctttgggtatatgaacgccgaagtcgacacaaagaccaccttttgtgtgtgtgcaatcgatctgcgccatcgagaacttcaagcttgattgtttggtcaggctttgagaccacaaaatcgcctgcatggtaaagtacccaactcccgggctcacccagggagcactgagataatgagtgctgcccatcagaggtggagagctggaagcgaacaggcttcttgtcccaaccatggacatgctcagtgctgcaaactcggcgtccaaatcgcttgtagaacttcccgagatgaatcctgaagtataagctgtaggttccaacagggaagctgaaatcgatctctccaaccacttcaaaccaccagatttgctgaaggtatgccacagaataaaatctcgattcggcagttggaatgtgttgccagtatctcctatcatcaatcccagttatcaccagagatttggaggatagcgccatgcaaaccctgcctttgctcttctccagccagaactcctttgagccgccatcgaagggcacaggcctagccagcctcgcgtagatctccttcttcccagccggccgccaccgccgccgccgcagctgcctcccgtcgtcgccgccgccgccggacgcgtgg

SEQ ID NO: 387405 - DNA, 712 bp, Oryza sativa
  unsure (1)..(712): unsure at all n locations
aattgtaatacgactcactatagggcgaattgggtaccgggccccccctcgagtttttttttttttttttttgttcatagcaatgttgagttgttgacctcatgccagacagacaagattcatcatcatcatcaagatcagagttcatccagagagaagcacacaaacaaatggagttctttttttttgttatatatatcttgatcatatagcagcagcagcagcagtaacaacaacactgatgatttctctcacacccctaaaattttcagacaagagaagaagcagaaacctagatttttttttcttgagctagttataggagcctgcattttggagatcggatagtgagaatgacctaggagatctaaacgacgacgccggattcgagctcctcggcgtcaagctgctcttctgcgcgtgcaggctcagcctcggcggcgggaacgtcggctcgcgccggcggttgccgccgccgctgccgctgcactgctcggcgtcggagtcgtcctcctcgtcctcctcctcgacgacggcgtggtcgggggcgaggagaaggggcaggttggtggtggccccaactgcagaaaccccccccccaacacccgggaagaaccgggggnccttntttaaaggttcccnggtggganttcctccccgcccctncncnccccccggcagtccnttaaaaattgattgccgnttnaattgn

SEQ ID NO: 387406 - DNA, 952 bp, Oryza sativa
gggggggaaatatagggttgaaattatcattctcagagcgataaaactcaaacataaggaaaatatacagattaatgtatagggtggcatctagttgacacagacaattgcatacatgaagagcctacaatacatgtattgtttcatctatgtatgataatatcgatgacttattccttctttatttttatgtgtaagttttatctgggttgtatcatcggttgttttttgttggtagtcgcctgcctgaaagaaaggaattgattaccaccagtgcctgttctggcttgtcttgtggcactgcatgtccagctcctcttactgtggccattgtcaatccttgatactcaacaaatctcccagcaacctgattgtttaggtaccatggttgccactgtgacttaacaggaaggccaagggcttctacgcagtaccgggatccaataactggaaccctgccatccacgtctccactgtagacccatattcgtaggccagccttgataagcttagagtaaataggaagaacagagaagaccgtgatgtcgtaattgtcgaatattgaataactgcagatactccattttctgtccttgatcaatccactcgtattcgcatgaagtgatttctgcacatccatcttgttcatgtaatcttcgatatgtgacgaatagcacggatcataccctgagtacatcctcgtgcctttaagcctcttcttagcattcatatcagctgtactgtaggaggtggaaaagagggatgagtcatcagtgttgcacttaggtgcatacacattgaaaatatcgatcatatcgtactgatcatatatgtatcccattacatggttacactcattgctacggggtgataacctgaagtcgcaaacattgttcgcatgcttatagagttgatctgagatcactgagtgactccaagcgcggacgcgtgg

SEQ ID NO: 387407 - DNA, 669 bp, Oryza sativa
  unsure (1)..(669): unsure at all n locations
aattgtaatacgactcactatagggcgaattgggtaccgggccccccctcgagttttttttttttttttttatagattacttctgcattattgcccagagagagtattggtccatacagtctatgatttactagctaactattcacaaggcaaggatcacgctgcacgcttgagcctttgactaaacatgcacttgaacaggcagatacattccctgaacacgcacatcagaatcgccaccgagatgggtggcctatcacatacagaaacaccacttttattccctctctacatgaacgagtcgaggtatccaaaggagtggaccattctgtagtgcagcaagctggcgtacacacggtcgcacactccgacgaacagtgactcgtcgtctgggctaagcgagatgccggagatctcgccgaagaaatctatctcctgcctcttcttgtagtccgcagcggcgctgtagacgtgcacgaagtcagcgggctccgagaagagcatgaactggccatctgaaggattaacggatgcacggataacgccntgttgcccctaanttctgaaaaggagttgacaggttcnttcttccnnaancggaggtcttntcttggtcccggttgcgaaggttggcataggtgccncctgccaatcctgaaccnggggtcc

SEQ ID NO: 387408 - DNA, 580 bp, Oryza sativa
aaatgaaagagaggggtatgggtagcgactcaattctgcagggaattcggctgtacatgagtattttgattgagttgtattccctccagtagaaacttacaaatgtacatccttagagaaaagataaggaggaagacataaaatagaaaatggcggcgcacgaagaacgtcgctttgaagaatcagtagttacattgtgattgcggtatcattgattttactgtttatgtggtaattgagtcttccttctgttcagaggatgcaacggcaacagcactgccttgctcatccccttgacccttttcttcatcaacaccctcatcatctgggatcatcactgccttcacctgtgcaacaataaccgtaatgtcatccatcttaccacctattagtttccctccaatgaaccttttccacgagggggacatcaaaaccccgactccgagcctccattgagtagggtgaatcaaaggtgacatccactgaatgcttcctttgcaagctctgatagtgcttttgcagcttcatctacccctggagactcggaaatgacagaaacgatctcttgatcgaatatatt

SEQ ID NO: 387409 - DNA, 911 bp, Oryza sativa
  unsure (1)..(911): unsure at all n locations
aaaccttcttggctatacnccttaagatgacagtgaggtcaatataaagaagtatatatgatggataaataatattatggggacaacttatacatgctttcaagattatttcccgaaaaaattgtctgatgtcggaaaacctgacacgatgtaataagaacacatgaggtcaaaaaaagggaaagcagaaatctcccacaactcagacctaccaaactcagtaaatatagctatcagatacggtgtacaactttgcatacatgtccttaggactgaacggccagcctttgaagatgctcacagaagacctggaaactaacatcatccgtgaatatgatgtcagaacctggaggaacatcatgtgctgagttatatgtagccgatggggttcagctttgccaacaagaaccttgcctgtgagccatgttggtcacagacaactagtcttggagcaggaaatcgtcctttaattattatttgagcctcctcgtgaggagcttgcaacaattgtgcaaattgctgatgctcaggttgattctggtaacccatgtttctccactgagcaattgtcataccatggaagatgacaacactgaagtatgcatcaagtagcagtatacgatctgctgctattgatgccacatcgaggaatacaggagatggaggcaaatcaaaagagaatgaaattaatgatggttgaatcatggcaactgagttagtgatactctcacggttgagtaacatccggaaataagctgtctcatctggactgttattgaaaacctgaacaaattgtgaacgccgtagattaaacataaactgaggaaacaaagagaaatttgaatgcaagctaaatgaagatggatcatccttccgataatccccaaatcttgaacaaagccgtatgaggg

SEQ ID NO: 387410 - DNA, 2069 bp, Oryza sativa
gcatgtggggaaaaaaaacctagcaaaaatagcgccatgagcagcccatagtccttctctgcctgctccctgtactctgttttcattttccattcccttcttttctcctgcagccttcctaatgttgttctcttcttcctgctgctttctcggtgcttttgtacagtttctccccttcttaatataaaaccagcaaagctggcatagattaaaaaaaaacatactatgtcaagatatactatcctatattctatgatggatctcatcccatgctaagttactttattctgggacggtttattctgggacggagggagtagttccttacaagaaatgcagtacgaggacagcgactgacagggtccagaacttcacagccaaatatactattacacatgcagaaggagcgagagagaaacaggcaaatgcatgccatctggcccatcatctctaagtaacatctgcgattatattacacgtgaagtagacgagagaaatggcagaagcctgcagggatacaaatagtggctttgccggtggcgagctcagaagtccatgggatcctatcaggctgcctgtcacctaaacaagccagcaagctaggcaccgtcatggagaatttcagggagtggccacgttttccttggcaagtggcgccagctcctcaccctcgatgcctggctggctcccctcaacgcccaacccaagaagaacctcctcccacttctttgcaggtcccttccaagataggtcttgagccatgcagttctgaaccatttcttggaatgccggtgtgttgtactgcttcagagcccgtttgacagttgaagcaaccgctgtgacgtccactggatcaacagtttcgcactcgacattgaacaaacccatgtggaatccggtcacgccctccttaaccgtgtcgacaagtcctccagtagatgagcagatgggaaccactccatatctcatcccttgcaattggatgagaccacatggctcaaacctactaggaacaattataaaatcagccccagcaaacatcatatgcgctaaaggaacattaaattttgctatccctctagcgttgtttggatatttaacttcgagcagtatcagttcctcctccattttcttcttccctgtaccaagaacaattatctggacattcccctccacgaactctggaatggctgcaattagtatgtctgaccctttctgctcttcaagacgaccaacaaaaactattaaaggaatgctcgagtccacaggcaacccaacttcagcttgtagcatttccttattgagtgcccttgcttcagttaccgttgttgcatcgtatttcacgctgatgtactgatctgttgctggattccattcataaacatccatgccattgacaattccagtttcaaggggctttgtgcgaaggatgccatccaattcaacacctttatctgggccagaagcgagttctttgacataatgtggactaaccgtcataaccagatcacattcagtgatccctgccttcatccagttaatctttctacctactacaggtttaaaatgcccatcaataaaatcaaatgaaggcaggaaactgtccggtagattaagaagttcagagtcttctctggcaaatctaccctggtaggcaatattgtgaatgcagaaagcaaccttagcattcacatacattccttttgcctgatagatgctcttgagatagcatggcaggactccagtgtgccagtcatttgcaacgaagacaacattttcaccatatggtcccgagaaatattcagaattgttgagattgagaacccttggagcctccaaagcagcgaggcataaaaggcagaaccgcaactggttgtcccggtagtcatctccagtggtaggaccgtataattttggtccagtcttgccccataccttctcaagaaacataggatgatcaacatgaaacccggtcccctccccttttatagcagtggaagaagcgcactgtttccgtcctgtcaccaatattgcctcgacaaggacatttgtatcccatgcataatcga

SEQ ID NO: 387411 - DNA, 409 bp, Oryza sativa
  unsure (1)..(409): unsure at all n locations
nntttttggcatcacaaatggtacgatgttaaatgatatcgactgctcattcccaacttgcgtgtggtcatcgcaaaccgtttccttttcagtcaaacaaacacatttacgcgccaacatcactcatgcaattatgcatacatctttcatcagggggggacctaactaaactagaccctacctagatatgaattatactctataatagaattgtagtagaaccctatcaggatatatgacgctacatagaattgtaaatttgaactagcctgagctggctgactgatctccagagaacacacttccactggacagtgccgctgatcctgactgggaagggcccaacccgcggttcctctggatctgcctaagcctggaatatgtcccgcggcattgctcggctctgcac

SEQ ID NO: 387412 - DNA, 519 bp, Oryza sativa
gttactctctactacttcataaagtttactcggtatcaggtacaaaacgttccaggcagcaaaatgtattttgtttcttcctttccaaaattgaaaaaaaggggaattgtactcaacaacaaggtcctacagagattgctttacgaaatcatcaggaacggagaagtggagccgtctctgcgatgtttgacgccaccctcaactcctgcgaattcttgccttagtgctcaaatcagccggatccgacgatgatgttgttgatggggatgaagatgagcttgacgaagaagccgacgaagcccatgacgacgaacccgatcgccgtcctcgccgccaccttggtgaactccttgcggtcgggcttgtggcagcgcttgacgaggcggacgctgtccttggcgaactcgcgcagcgggtcgaccaccgagtcgacggcgtccatggcggcggcggcggcggccggagatctcacgggggtttcgccttcgcaaggttggagagatcgggtcggacgcgtgg

SEQ ID NO: 387413 - DNA, 463 bp, Oryza sativa
  unsure (1)..(463): unsure at all n locations
ccnacaaaaagggaacagaatataaaccatcttttagcaacagtttcttgaaacgggtcaatgaactttggacgcctactttagaacacagcacttatcctcaataatcttctgttttcccctttgatgagtactccactatatccccatgctagtctttctttagcatccaacctagccggacccgacgatgatgttgttgatggggatgaagattagcttgacgaagaagccgacgaatcccatgacgacgaacccgatcgccgtccgcaacgccaccttggagaactccttgcggtcgggcttgtggcagcgcttgacgaggcggacgctgtccttggcgaactcgcggaggggatccaccacggagtcgatggcgtccatggcgagatctcgagaggagacgaggcgaggcgcgcgtgggagaagagaggaggtggacgcggtcggggtggggactgct

SEQ ID NO: 387414 - DNA, 434 bp, Oryza sativa
  unsure (1)..(434): unsure at all n locations
caaaacgtgcgaatctatgcagcatgcatccacaacttttaccgccacacaccaggtaaacgtacaagtaaatggggggaacagtacatatgtacagacaaagctcagtaacaaatcccataaaaacaggcatgaatagattttttttatacatcagttgcctctccgttgctggcacgaggatgattcatagttaagacagaaattaaacattcaaagatgccactggtccaaccaaaagaggcttcaaggaggtaactaaacaatcaaactccttctccataatcatgtctgtctctggaaatactgataagtgataatacactatctggctatcagcccttcaatgagtatttccttcctgtaaaagctgagaatttcggttcatctttcttgggatccatccttcggttccttttcaggnaccttttctg

SEQ ID NO: 387415 - DNA, 827 bp, Oryza sativa
ttgacaggcgaaggtatgccatctcaagctcttgaattgatttatgttttacaaagctgaccgtctcagattatgctcccggaggccggaattacatttataacatacacaataagggtagcaggtatataaagcattgcagtaggtagagtgaggacagaaataaatatctccacttgacgtcgaataagcgtagagcaatcaagtgttgaggttctggaacagctcaggcagatgggcgttcgtgagcttggtccggcgtgtgatctcacgctgtttcttcttaggcttagccttgggctgcaccccattgatctgtgctgcagcccgccgtttagctgtgttggtcatgggcttgatgccattcttctggagctccttctcgatatccaccatgtcccgcggtaactccatctcccggaagagctgcttcaggtcatcgtcgaccttgatctttgcctttgggtcgttaggatacacaatgtcctcctgggaatccatgttcgataacagccaaacttcacctgctgccttcagtgcctgcaaatcttccattacagttgggtacgcatccttgacttccaccacagcaagaccctccggatactttcttaccaaaacaagtagttgatcttttcccttcaaatcatgcttggacttgtaagagaaacgtctcccatcataatgtactttaggattgttcctcagactgtcaaagacagacttattcccatggatatcaacataagttgtttcatttatttgctccgcagtaaaagcatgtcttgtcgtgtacagcaattcaatgacaagtttcggacgcgtgg

SEQ ID NO: 387416 - DNA, 589 bp, Oryza sativa
  unsure (1)..(589): unsure at all n locations
nnnnnnnnnaaaagaagcatcatcttctggagaaatatgccatgccaatacgtcgttcagacttaattccagtttgctactacattcataccagccttcctgtgctcattattctttttctaagcacaaaaatgttcaatcagccccgaacaggacaggctaacaatggataataatatgtatgtagtggctacatttcttcaggattcagtttccacgacgatgggaaatttcatttagttaccattgatctgatgaaaagccttgcttccaagaaccaactccttgaagcgaactatgcagcccattgcacgctcgaattcgctgctctccagagcaaagctgaaccgacagtgatccggtattcctgtccatgagctgctgtttatgcacaacccggtggacctgagaatggcttccttgatgttgcagccatctagcttgccatcaaaaccatccaccttgattattttgccgatgtaggcagtcggtttcgccagcatcgatatgccaccatgactgccagcaacatcccagccacagccctcaagtggctttatcaagtggtcagcacgactctttagtggtg

SEQ ID NO: 387417 - DNA, 824 bp, Oryza sativa
ttgttttttttttttttttggtttaagcctgggttaaagaattcagcaactgagcacgcgtccaaacaaatattgattacactttgtatcttcaaatgccatgtctgcattgaatcaacaagggacatatataaaaccaatgtctgaaaagcattaactaacaaagactaacaaaagaagtcagggaaggaactccaagcatggttccgaaattagctactccacaagccatatatatacttctaattgttggagaagaagcagataagtattgttggacagatgaagtgtgcacatgaagaaatccaaacaaaaggttaattttttccaatgcatgatctttggtccagtcgagcttcaactccaaaccttaacttgtagatattgaatgacagcaaatccaatgagggaaccactattgataaataacacggacttcccatgaactaaccaaacatagatcccttttcaactccaacatccaccctttggcgtgtcatctaaagcacagaaacacatacgctaaacaagattagcttttaaaataatttataccaagggtacggaacacaccttatataaaaggataatgtctgatagctggccattaggtaaaattcctcaaagtgccgagacaaagaacagcatagagacagacaatccaaatcaagataaatctatgaaacgaccagaccttatctaataacttactgcccttcctcaatttccaggtactagctttctcacagggagctcattggcaaccaagcatgtaatcaacatgccgacgcaggcgacgaaggacgggtgggtctgggtcggaa

SEQ ID NO: 387418 - DNA, 437 bp, Oryza sativa
ttatataaaaggataatgtctgatagctggccattaggtaaaattcctcaaagtgccgagacaaagaacagcatagagacagacaatccaaatcaagatgaatctatgaagcgaccagaccttatctaataacttactgcccttcctcaatttccaggtactaagctttctcacagggagctcatttccaaccaaccctgtaatcaatatgcgaacaagaaaacacatgcaccgaatctagaaacaatcgatcaaaccacaaaatggtaatcaatatgcgaacaagaaaacacatgcaccgaatctagaaacaatcaatcaaaccacaaaatggtaaaccacaaaccaggcaatttaatttcctcgagaaaatttcctcgtcacatggacaaaaggagaatctgcatgcagaggaaggcacaaatgcggacgcgtgg

SEQ ID NO: 387419 - DNA, 919 bp, Oryza sativa
  unsure (1)..(919): unsure at all n locations
aaagcatggccctctgaccctttagttaagcccaagagagaagctccataaccagaaagacaagtgaatctaccatataggaaaaaggaggtaggccatcaccacaaccaccaccagatgccattgcttctcttcagaagacttggcattacaaaaaaggaagaaagaaagctcaaggcagagagagattagaaagcaacaccggggacccattcacatgacacacactatctagggctaaaaaactggagcagatggtgtattacacttgaatggttaaacacttgctcagggtgttcagttcagttttcagttgtcatgggcagtttgagctccttccagggcctccatagtagaagtatgtgccccagtcggcattgttaccgttttgcacgtcgtagcagttcgattgctcagtgaatgtgcccacccccttgggggctttcaggttgttggtgctgtccaccacctgtatgttcttgaagtagcttgacttgctgaacccttcctccgggaagtgaccgctgcccatctgcgtcgacgtgtgcacgccatcgagctgcgagtttaccacctccccgccccactcgatcatcgacgcgtgtcgccaaggtaggagaataggaaggatggccaatagccaagaacataatccttgccaaactgcatccaccagttcccctcctttggatccttccaaatcattatactgatatcgtattgggagccagagtagcttgagatggggaagatgctggctcccatggcgatctcactgtttatctgcacgaatcctgcacacaatacgttgtagcaccctgttgcctggtatgcatcgctagtccagtaagtgaacagcctcgtgttgttgtcgccgtagatggtcnggggcntatatcncttgnanangtanacgctc

SEQ ID NO: 387420 - DNA, 450 bp, Oryza sativa
aaacaatcgtaactagccttatgtaacttcatatcaaagatgtatcatctcatttatagtgaatgaacatcagtggtttataaactaagaactacgatataaattttcttgaaaatcggcaaaatacaaagtggattctgatcctcgtctcacaattctccacaataatcatacagaactattggaagccggatgtatagcaactctgcgcctagtcaatcttcacagatgagtaaatcaatctcgtgaaccacaagcaggcacagaaaccaattgtgccagtgagcacgaagaaagagaatgaggccagaagcatgtagccgaagtacagaatgcctgacaccagtttagtaatctgcagcttggtgaagaagtagaacccagcatacaggaagagatagatggcagatgatcctgaagtaagataggacctccaccaccacatgtaat

SEQ ID NO: 387421 - DNA, 490 bp, Oryza sativa
gggggcaaagcactcattcattttcaatatcgatcgtttaaattaattgttcgtcacacatacaccatcttgttcagtaatgatggctcacattgtccgtaatccctgcttaactacatattgactccctcattttatactcaacaatacacaccagactcccacactccattttcacagtgactttatttagcgcaccgcaagctgcaccagcacactcctcatgccaaggagaagcaaataagataattgctccaatgctgccttcctcgagcaatcaggggaatggcttagtgcgctcgccgggtgccaagtgccaaatggccttagaagactataatttttgtgcagctcctggtctgttcacagccgggagatgagcagtgggactgagacagtggcggtctgctcccccattgcagggtggcacatctccagcatgtccagctccctgaaccgctcaagaaccctcattcggcactcctcagct

SEQ ID NO: 387422 - DNA, 499 bp, Oryza sativa
  unsure (1)..(499): unsure at all n locations
ttnaaannntttttnttntttaaaaatttttcatgagaaacaagcatagtgtataaatcacacatggcggtttagcggccaatatgctcggaatttctgtctgagcctacttgggccttattgtaaccgagacaaccattattacaaaccacactatataaattcttgagaaaaaacagggaaagaaaaccaacagcaacaaaaaaataaaaaaaaaggcccagcgaaggagatgagtttctcttcaattccgctctactcttctcccttttattcttctccttgccctgcagctgccgctgaaagcatgaccgaatgagtgaagagatccggttcaagattggttcgtagcctcctcctcttcctcctctttggctaaatcattgtccggctagaacaggcgactaattaacctccggtcagtaaccaagagcatgtaattaatcatgcaaccaggatcgaatagttatgcatggcaagcgcaagcgcaacacctctt

SEQ ID NO: 387423 - DNA, 676 bp, Oryza sativa
tgacataataagcataatattaattcaacaacatagaataccattgcgactgcattgttacatgatgacagttggctgctggagattatttagatgtgagaaatacttaggttgttttacgatttcaaccagtaaaacttggtacctcactcttcaacgcatccccatactgaaatgcatacatctatgcgcattttgtttgcacatttaggtaccaaggtttacacacatagaaagcacacacatatatatgcaggccccagaagaaacacgaactcagggttgtttaccgccatacttcctcatgtactccatgtaccctttcatagtcacgtaatagtttgaatcaatattagtaccggaggcaccagctgatgaagtaccagaggcaccagctgttgaatcagtactagctgcctctgtgacgacgcttcctccattacttccatgagcgtttgcagcagctgcaacttgtttttcagtaactccatgagaacttgcatcgtcagaataaacagccaccgacatcatcagcatcgccaccataacgagcaccgccaccgtcgagaccttcatctttgtatggtctgcaaatctgcatgcatgtacagaagggttggatcacaatcaagaaattaattgggaatcaattctaattgtattgagaggacattca

SEQ ID NO: 387424 - DNA, 551 bp, Oryza sativa
tttatgagaagagtttttttttcaaattatatatcctacacaacatgaatacaatattacggtgttggctggttccttaccaataaaaattacagatgggaaatagacatacacatattcattttgataaaaaaaatcaagaagattgtaaccaatgactactccctccgtcgcaatatgttacaatctaggatgagattaaaccaatactagaactacaaatctggaagaggttgctccatattgagatgaagcgtgtgcatcccgtctcgccatataccatcgccggtgccgaagactcacggtcgacgtcaaaatcccgctgccagctacatccatgggggagtcggtagcatcggcatgctccaccgaggatccagccttcacccttagatgctacatttaggcttgctgatgttcttgatcttgacagcactccagatcgacttgcttcccaggctcatctgtacccatcagtagagagcaaagtcagagactagcaaggactatgtactgtatccatcaatcgcgagattcaatcgtacgcgtgg

SEQ ID NO: 387425 - DNA, 676 bp, Oryza sativa
  unsure (1)..(676): unsure at all n locations
gaattgtaatacgactcactatagggcgaattgggtaccgggccccccctcgagtttttttttttttttttttttaaaccaatacacaaattttattgccagttcctccgactgactaaactgacatgagaaggtgttcaggacaattgccacggacatgaatgtacaaatgactggactaaagcaaccacggaccatttatctagacaaaggaaaaaaagccaaagaagttcaaatcggcaaaataaattgccttgtttatgtacacaaccaaactaacagaattcggcagccggagaagcaaattcagagcttatccatgtcggcgttcctgaagctgccaccgaggagtgacaagaggccgccaccgtgcacccttccctccggaacggcacagcctccctctctgcccccatgcacggtaggttcggacgacaatgagggcatcatagagcgaggcaccacacctggggaagtacatcatcgcctgctcccaccgtgccgtcccatccgacccgtgctgatgccgacaaaaatatcttcgtcatgctgccgtggaacaacgtcctatgccctgaaaggctggcggattttcccccccttttcccccttcccccttgtgcttggcccaggtccctcccggcaagcgtctgcggggaatccnactcccatgccg

SEQ ID NO: 387426 - DNA, 645 bp, Oryza sativa
  unsure (1)..(645): unsure at all n locations
attcagagcttatccatgtcggcgttcttgaagctgccaccaaggagtgacaagaggccgccaccgtgcacccttccctccggaacggcacagcctccctctctgcccccatgcgcggtaggttcggacgacgatgagggcatcatagagcgaggcaccagcacctggggaggtatcatcatcgcctggctcctcaccgtgccgtcgcagtccgacgcggtgctgatgcccgacgacgagtactcgttcgtcatgctgctcgtggcagcgacggtcactatgccgctgaaaaggcctggcgggatcatgcccgcgccgttgttcgccgcgtcgcgctcttgctgcttggccgccaaggtcccatgcgcggcgcacaggccgctcctgccgcgggcgaacttctcgcagcccgttccccaagtgcaccgcttgccgccgccgtgggctttgcagaagtccgtgctcccctgggcgctcttgctgcagttgtcgaccttgcacctcttgccaccaccgtgcttcacgcaacagtccgtgcggccacgggcactcttggtgcagccagccaccgaacagcgcttccctcctccgtgcgccacgcagtactcaagtgccaccatggacgctcgtgccgaangcnngcac

SEQ ID NO: 387427 - DNA, 229 bp, Oryza sativa
  unsure (1)..(229): unsure at all n locations
nnnnnnnnnnnnnnnnnnnnnnnnnncagcatgaaccacacaagggcgccgactgagcaccatgtgtccatgtatatatagaacaatcaaatattgacaatccatagtagttacaaccaatatacattcggatgcccatatatttgggaaaagggcccttgtaggtagaaaattgattatgaacagtacttggnncagccagctaattttaggagaacccccaaaggca

SEQ ID NO: 387428 - DNA, 1072 bp, Oryza sativa
agcttaaggtcttaacaaatgcaagcagtatacaagtaaatcgtagtaaattcaaccacaacgatagaggatgatccaacaagtaaagctgatgactgttttttggagttacatgaaatggttcactgaatgtttcttggctgaacatgaaataaaatgacactgctgaaagactagagtgcagtgtgaagcagtaacatgtccaacttcattgtagctcagtcgcgctcacttatggctgttaggtgctgatcgatctcctctgtcgtgagtgctctgaaaacacgatcatctttcctcacaacaccgacctcaatctcggtggccttgaaatcttcctgaagaactgattgcaatgcagaaattgcaatctggacagtttcctcgtaggagaactgtgggtcatccttcattttcttctccagaaaatttattgcttcctgctccttaagaccggcgctagttgccttatgtccaaagaagtgacctgccgggtcacatttgaatagttgagcgtttttctcttcgtcatagccccaagaccatagcaactactccaaggggcctcatgtaggcatgctgcgtgtagacttgtgctttgtctgctatccattttgctaatacgtctacgggcatctcgtagccccatttgaaacggaattcagctgcctcattccttgcttggtagactaaggaccttgcatcagctgtgaggccagtggcgagcagaccgatgtacttggtgatcgggaacaagtgcgtgacgctcgtatggtccagcaacttgtccggcactttcttctgtgtgacgacgcagacggagtccttgccgcggacgccgatcgacgtcacccccgccgacttcaccgccttgaacgcgtactcgacttggtagaggcggccctccggggagaagatggtgatgtggcggtcgtagccggcgcccgtgccgcggctcatcgtcgccggatttctcgccgccgcgggtggggtttcgcgttcgctttgctccgagagaatacggcgaggcttgtgtttgtgcttggttggggaggcaaaacccacgcgtccg

SEQ ID NO: 387429 - DNA, 567 bp, Oryza sativa
  unsure (1)..(567): unsure at all n locations
ccacgcgtccgcggacgcgtgggcgaggagagagagagagagaggaggaggaggaggagagcggcggcggcgatggcggggaaggggttgaacgcgacgggggagttcttccggcggcgggacgactggaggaggcacccgatggtggggaaccagctgcgccacgccacgccggggctcggcatcgccatcgtcgccttcgggatctacctcgtcggcgaggccgcctacaaccgcctctaccgcccctccggcgaccaccaccaccactagatcgcgtcggcggccacgcgcggagacccgcgccgcctccccgaggtgaagtggttggagcaatctttaccaagcaccaatgttgttgatcttttccagtttgagttcataaggtctgccatgaggcccatgaccatcatgtaatttgcaaccagggagacatgaatcatgtacttttatatcaatgttctgggcttataatccagcatttggaaatgggaagtgacacttataattctgaagttatgtgaattaattttcttccctcttttatattnnnnnnnnnnnnnnnnn

SEQ ID NO: 387430 - DNA, 451 bp, Oryza sativa
tttacacatactaaatgagaacttttatatagcgtgagagacatgatgatttacacatatatattcttcacgtagagcacattctgttaaatataaattaacatcgaatcatcactgtattgaacagagtcattgtagtgtcaatagctgagagagcgtcatgggtgagagtggccatagctcggcgtcttcccatggtgtttgggcttggtgtttatggtcactacaggcgtggcgcctacggtcactccaatggagatgctgatgtcgtccttcttatcgcctcccttactcgcctcgccactggcatcagcgagctctctggcggcaaacgccacgtcctgcgagagcaggaggagagacgccgccacgacgaacagcaccaccatggtcttggacgccatgaccaccgtacgtaggcttagcttagcttagctgtgcggacgcgtgg

SEQ ID NO: 387431 - DNA, 349 bp, Oryza sativa
tcctctagagctgccgcacctttttctacctttttttttcttttcttcagtgagtgagaccaattttatttatcgagaaaacaatctatgggtgtattttaaagcatcaccgcttcgctcatctatatggagagactactgactggtaacaaagctacaagctaaaaaccatttcttttctgaaactcaatagcacgagtggaaccaaaagtcgaagtccgatgactgtacacattttctctcacagacatggaaaaacctcagcaagcaaagatggcttcctctcatgcttctcaaagacaggagcagagatttgcgactcatcaagcagatcttggcggacgcgtgg

SEQ ID NO: 387432 - DNA, 940 bp, Oryza sativa
  unsure (1)..(940): unsure at all n locations
aaacgngaattttaacaaaatattaacgnttacaatttgccattcgccattcagggtgcgcaactgttgggaagggcgatcggtgcgggcttnttcgctattacgccagctggcgaaagggggatgtgctgcaaggcgattaagttgggtaacgccagggttttcccagtcacgacgttgtaaaacgacggccagtgaattgtaatacgactcactatagggcgaattgggtaccgggcccccccttgagttttttttaccattttatatggcaaaactgaacacataatattgttcaaattcttggggctacaacaccatctatgtatctaagcatgagtaaaaatatgtctttgattgtacaattgaagttcatctggcgaacaatttggcgaagatgttggtcggttttgggttctccaagcatgcgacatgtgcatatcttcctagcttgtcgacctgcctgggttcccctctagtgtccttcttgcaaactttgcaggtcttatccacccaaccttcctctacgtattccccgtcaacatccacatatgacttgaagaaatccttgtaggtgccaccgatcttcctccgaagtgctccatactgctcctttgtcatccttcctccatcctttgtggcctctctggcttcatacagaagctccgcgtccttctccgaccggacctgcgagaagtcccagcgcctcggtgatgctcccgaacaatgactgcttgctgcccttctcctcatcttcctttgcgtagaccttcactgatctggtggaggcagtgcttggcctgaaggaggacggcatggtttggtggtggtggtgcccaaacgaggcgctctgcgagtgggacagcgtgattgccctcatggccatggctgcagtctgcagatcggtgattgattctcctcaggtagaaactgaactggt

SEQ ID NO: 387433 - DNA, 361 bp, Oryza sativa
aagatatcaagggaagttttgttataacggcagcgatacttcgctcccaataattccggagcatctatcacacacaaaattgataacatcgaatgagggaaagaggatgggagggcaatttcatagttcaggactggtcttggcttcaggaactaggaatctaggggtgtttttttaactctgccttccaacaacacctaatcagaaagatcagccctgcaagtaggcaaaccgatcactccggtcgctgtcctccgtcttggacttcttctttttcttcttcccttcaggggccgtcttaggctcagcgtcctccgagactttacggttcttcttcttcttcttcttgggagtaccgttc

SEQ ID NO: 387434 - DNA, 513 bp, Oryza sativa
  unsure (1)..(513): unsure at all n locations
nnnnnnnnnnnnnnnnnnnnnnnnnnnnnnnnnnnnnnnnnnnnnngaaagttaagccatcatgaactaggaaggataatgtgctagagccaacagttcaacacttgattgaactaactgagccaagggaaagaaatagtttgtcactctaatcacaccaataatttttatacatgagaaaatggccgagttaaattatttaatacaccaccaaattacctcactatatgctcctttagctacaacactgtcctccaactttgatcttctcccgtttaccatatactcacaaatcactgaaagctagtataaaaatacacttgcagagaagaaacctgggatggaaacaatatgcatattattgggactaaaattgcatcttggagttgaatttacccgctgggtgccgcaattactatttcttccatactcttctggaacattatttctgtaggttttaagcacccacgaatgtactcctgcccaagttgtgcgcgctcgttgtcccaaacc

SEQ ID NO: 387435 - DNA, 894 bp, Oryza sativa
  unsure (1)..(894): unsure at all n locations
ataaatttcaaaaatgtttatatattttaaaatacacccttaagaagagggatatatatatagcattggttctgcacttctgcatgctaaagtactccacatgatacagcaggctggctttccatccataaggttacaaatgggcaggattgccgtttctgttataaaccaaaggagttgcaagttagagtaaagcatttatagtcgcatcatgcatacagtttcagtacaagatacaacacacagcgaactggcaatagattgcttttttgtaaatcttagcactccaatgcagcttgagcttgattagttccaggtgttgacagacggtcctgtgactggttgctcatctagggcacggcgcaactcctcagagaagttcatctgatgaggaagtttcatgtgaccatgaccccatgatgatccactagatccagagtacatcaccggcttatcaggggaatcatatgactgatcattgtacaagttcattgctgcagcccaacggtcattgagaagctgggcagcctcactggcacaacatccctccaagggtattaatcttgtttgactgtaatcattctgaggattgctgaaaaaagtctcatgagggataattggtggaaggttctttaatgaaggagcatggctcttctctccatcattattgtacaaataactagccttctcagccctatctccagacttgcgtcgattgttagcacggttcctgtgcacgggaggggtgtatctcttgatgccgtccgggttgccgtccgccatcgcagctcagcgcaggggagggaggaaggatggggggggcctcctcctcctcctgccaccctcttccttcctttctcctcccgacgagagaaagatgcagagaaganagag

SEQ ID NO: 387436 - DNA, 613 bp, Oryza sativa
  unsure (1)..(613): unsure at all n locations
nnnnnnnnnnnnnnnnnnnngatgtnnctgaatcggaacnatnccntctgaataaaggtaaaacataataaacngacttagttcggtggcttgagctcaaggttcnggcaatctgtggcttgcaagccatccncngtgagtctgtncngcagtatnaggtactcaagacataataaaacctgtacaaatttaacagtttcacaggtttctttgtacaatatccacatcttctctacattgatcaacagctaccaaaatccttgccccccttgcttggtgtagcatctggatagcaaagctttaaattcaggattaagatgtctgagagcacaaggttgcaacggaagaacacaccgtctgaattatgcaaatatagagtgtagctttacgtgacggagtctcagaattctagtaatcgttccttgttccgaataatacatgtgctgttatttatcacatatcggtagaaagatcggtgagatgtcagcagtttcaataggagacagggatgctgactgaaggtggaccggatctcatgtcctcaagaatgaggttgaaaagcatctgagcaattgtgccttctttgcctgagccaattatctgatcatcccac

SEQ ID NO: 387437 - DNA, 508 bp, Oryza sativa
  unsure (1)..(508): unsure at all n locations
aacacataaaccaaaatggaggtataccgccttataaataataacagtgnaaagagacaatcatatggatattgtcctgatattcctagtctggcatgttaaaattatttctatgctagccttttcccctactactcatttcgtcaaggctacttggaagtaaattaccccttgagtcttgcagactggacaaggcaatagacatgatgaaagaaatgattccgtatggttgggaagctacaagcccttgtctcgcgcaagccgctgaagatggtaattgatggtcttcgttgcattctttggcctccccttctgagcctgagtacaagcaaccaagagatccttctgcctgacacacttgtcatcattctgcttgttcaaagctaagcagttgaggaaggacaccatctcaatcatgcagggtttagcaccaccaccaaacttctttgggtttatgtacagcgcaccagccttccgacccattctagcacttcacatcatatgtgaa

SEQ ID NO: 387438 - DNA, 947 bp, Oryza sativa
gtggcgatgcactgccattttagacaagttaccaagttgctaaagcaacaaaaatgctatcatttgctggtcactcttacagacttacacttccccagtttcgcagtggtatccacaacagcgaaaggtttcttcacaagggaaaaaacaacacggagcagctcaacagaaggctttacagacaaaaatgcacactccctgttggctctcccaagatttgcaactggctggctggccatgaggtgctccaacatcaactgccaccttcaggttagcggtgtcggcatgaagtgatatgtacagatggagatctcatctctagctttatacagctgctgctactatcagacttggtagaccattcccacctccagtgtggaggcatgaggtatggtagcagcataagatggtccgcggctgtttctcctcaagaactcgtagaagaagtttatcacgattcgctttatgaaactagacccgctcttcgccttcatgtaggagtgtcctaagatgaaggacattccagcctcccttgcatccatgagctcctgcagctcacggcgcacttcgctgtccacctgggcattctttggcagcacgaaccttgctttctttcggtttggtgatatgatctgtgtatctgtctccttatgaggggatgctgaagcatcgacctctccatcctccatccacaatggaataccattactgatggaagacagtttctcacacgacttgtctgtgtcctccaaaacaccgttgtggtgagaatccccactgcggatgaactctgcaatgctgctgactaggtccttttcaaactctatgtcatccttctgcacatcacggtacccatacctcacgatgaccctgtatagcctgtactcttttggaccaatgcgacccactagaaaccgttcttcaggttgaacatgtggcactggaac

SEQ ID NO: 387439 - DNA, 909 bp, Oryza sativa
  unsure (1)..(909): unsure at all n locations
nnnnnnnnnnnnnnnnnnnnnnattacgagcagcgatctcacagtatatttatattagaatcaaaccaggctggagatgtagactgttctgtacaagaggggccgctaccaaatccagctagtaaacagggaggatttccaaaagtacaaccacacataataaataagtacacaccagtagcaattgcatgtttgctaaaatgttaattatggttacatatatttatgtgcatatatttatagagcgatgcattaaccgttccagttaagggcgtgcaagcgatcgcacaatatcgatgcaaaacgaagattggtgccagcaggactgaagaagaatggggattaagcacccacgcaattttcccaacaaccatagctcgaactgaaactgcctccaccagtctgttgagcatactcagcaattactttgcgggcacacgcgtcccacgtcctcgcaatttctcttagtgacatgggctcagctaaaccccgaagcaatatgctgaacttcgacctcgctttggtcgacaggtcatccgagtttctttgttcatctgggaacttgtctaggagaaccggggagcacttagggtagctagcggggacaagcaccctcaatggcaaaattggactcatctgtgctgatgcaaacatggacttcaagctggggctaacagccacagcagtaaatgtgcatttgatgactgtcccttctgtcccttctgatgtagcaccaaaagactcagcatcatcctcgcaaacatggagctctgtatctatgagctgttggtttatctcatgtattgcctccataagagcatggtttatctcggttttttgcccctttacacgtgaggttgcagttgactgcaattcaggggtacctatgctgaatgtttgcctcgtgcc

SEQ ID NO: 387440 - DNA, 500 bp, Oryza sativa
  unsure (1)..(500): unsure at all n locations
gtggggaggtcgagcagcttcacctaggtgcgcttctgcagacagccccaccggcgcttgaggcgctcgaacgcgtcgcgcgccacgccgcgcacggcggcgaccttctcgttgagcatgtgctgcgcccacgtcaggttntggtgggtgtagggcacgagcatccagtccatgagcgggaagctcccgccgccgaccacccactggccctggatcaggccgggaccgccgcggtgcaggtccagcgccgcacttctcgagcacctcctcgtcggagttggaccccggccagccgatgcagacgtcggtgaagacgccgcctcatcatcaccaaacagaaacgagatatcctcccctcctgccatctcaaacagcgaccggaactgcgccgccgtcngtgagctcatctaaaacgagataattaactacctctacagctacgacgacgacgatcgaactcgagatctccgaggtgggcttagcgatgattgatgatggtt

SEQ ID NO: 387441 - DNA, 424 bp, Oryza sativa
acgagaaataatgaacagtaatttaatggaaaagaagaaaacatagaggcgcagtactctgcagttaacaacgtagcacgctcacttcacattatcggcttattgtcaccctgaaacaatctttcactctacaacatctaggtatggactaatgatgaccagctaaaaaaattaatggctgttttgtacaaattaagatccgagatcttggtatgagatgcttgtatactttgtaagaccatgagaaaaccgaaactgaactctcgtcaggcataatcttgcagtagagacacttgttggctgacgataacccaaggccatgaccaaaaaacttcgacaggttccatcaaaggcattaacaaagtcaaagctacgtacttgctgctgcagtggtttgcccatcaggctgagctggtgctgagga

SEQ ID NO: 387442 - DNA, 470 bp, Oryza sativa
  unsure (1)..(470): unsure at all n locations
ttttcatcataactttctttttatcggtttttcttctcaaacaagatcatagaacaagttatggtggtcgcaaagcgctcaacacagcaagaacaaaaattatgcggcccataagacagggtagatctgtgttatacgccattcccccatttccttacaactctctctttcgctgactttccaactctatctttcacaaccacagcggcctgattgccagtgtctagagaaggggatgaccgcctcggagccgaggattgtacgccctgaagaatacactggagctacgaatgacagtgcacgccgaatttgccgcagcacagccagcagtgatttacaatagctgctaccagcacattggaagttgcaatcagggaaaaacgcgggcgataataccgacgatcgtaaagaagagttgttttggcagcatcccagaaacntccanggtggaaccactggaaccaaccaac

SEQ ID NO: 387443 - DNA, 292 bp, Oryza sativa
  unsure (1)..(292): unsure at all n locations
caataagcacaactaattgttgtgttttcatctaaggggntgctgaactgttatacacagtgcatccaccccaacccctatgaacggcatctctgcttttggagattttatcctgtcatagctacacccgttcttcctctcgctagcgcctaaatcttcaaatctaagtccagtacgcgttcgatacacgatctcttttctagtgtttctgcattgacgctatatacgtctatacgatctcgttttttacgatctatacgtctgcattgacgctgaaaatacagcgatgcat

SEQ ID NO: 387444 - DNA, 719 bp, Oryza sativa
  unsure (1)..(719): unsure at all n locations
aaggaatnnaaagcacccaaaaanntnaggggcccnnganncnttaaaattcaaaagcccnaangggttntcccnggggaatntctttttcctcntnagggggaagtcgttnnggangtggaagttctngcggatntcttcaggagtcttcccctngatcangtcagcaacagtnnggcaagtaaggtccagcaacccntggangtngaggtagttcgcggccaggatgaggtcgaagagggtggcttggtcgacctggacgaagtcggcgtcccagttcttgaggtcctcgccggagggcggcggcacggctgcggcgacggacgcggcgtcgtcggcggccttggaggccgcggcggccgcggcgtgcacgtgcttgttgcagtactcgatgaccttggagaggatcttggagttgacgttggggagcgggatgccgttgtcggcgcagtcgtcctcgatcatgtggcggatcgtctgcgactccatcgccaccgcctcctccacctcgaactcctccccgtcggagctcttcagggtgatcatcttcttctctccctcagccgccatcgatcgagccctccgaaatcgctcgcggtctcggtcgtcgccgaggaggtgaatcgcacgaaaccctagctttcgcagcggcggcgatggggattgcggcgagccgaagcgtgggcggacgcgtgggcggacgcgtgggtcgacccggg

SEQ ID NO: 387445 - DNA, 533 bp, Oryza sativa
  unsure (1)..(533): unsure at all n locations
nnnnnnnnnnnnnnnnnnnnnnnnnnnnntcaaagcaacgaaaaaagttccggtcacgatttaagcagtttaacatcggtccttgtacatatagtattatattgcctatagcaagaactataggttatttaccagcaagaagtgcactttgtaagtcgccagcctgtcaaaccatagccaagcccagcttagatctacagcctagatcgagttcctccagcaacaacaatagtttcagctgtaatgaatgatgcatcgtctgatgccaagaaagctgcggctgcagccatgtcttccacagtacccaatctcttaagtgtgctcctgtcaataagctcatttttaatggtgtcattagttgtgaggaaacgagcaaaatttgtagggaacaaaaaccaggggctataccagtttaaccacgaggttatttggccccatctcagcagcaagagcctttgtgagaccaagcagggcagtttttgtaacagcntacatcgacantgctggttctggattatagccagtaattggag

SEQ ID NO: 387446 - DNA, 348 bp, Oryza sativa
accgcctcccgctcccgcgcctcgtcgacggcgatctgctgccaccggcactcctcgctgcagaacccttggtcacctctacatgtacacgagattatcatatatgtacatgagagtgatatattttatattaacctatcttatttttttaaaaaaaaattaataactatttagatgacatgtaaaaatcgaagggatattttctcgaggatgaaaacatttttctcatgttcatgcatggatgcatatgcatgataaatgtcttcctgagggtggttaggtttttggtacctatacatgtacggacgcgtgggcggacgcgtgggcggacgcgtggcggacgcgtgg

SEQ ID NO: 387447 - DNA, 435 bp, Oryza sativa
ttttttttttttttttgcgaaaaggcgtgtgtttgttacaaacacacactgtcatttgatcaaaaatttcaaaattgatacactcgtttaaccattttttttcctcgcaaaagttgctgtacaaactcgaactctgctactcacacatatgtgatatgtacatagatggatacacaattatacacggaatttagtttctgtaatacgcttcagatttctagaaggcaggcggcctggacgtgcccggagaactcgggcggcgccggcgcgcgcgcccacgacgcgggcttgccggcctcctcccgcagcgtgtacaccgtctggtcgccgccgtggcagtcggacccgatgaccacgacgcggccgtcggggatgacggaaacggccgccgcggtgcgcgcgtcctccggcaccggcgccacgggccgccacgcc

SEQ ID NO: 387448 - DNA, 636 bp, Oryza sativa
  unsure (1)..(636): unsure at all n locations
tttttttttttttttacagaagaacattttattgaactgtttaaggacttgtacaaacaaagaatgctaccgcatgcagatacatgtaaaatacaacccaatgtgagcatgaataaagtttaaccggctctacagtgtgcagagagaggcaacttccttagtacagggtgttgtatgtgcagaatgttgcaacgagggaggctatgcagatgacaagaggtggcagcagagtgatgttgagcaggaggtccgggcctagataacccgccgcggtaatcgtcgcgtctgcaactacacgggccagcgtcccggcctctgtcgacaggaggcccgccgttgtaggttcctcgcgcgagcctcgacgacattactcgtgaaagcaacgacaggttcactccttcgaggacccggacgcgtgggtcgacctcgagggggggcccggtacccaattcgccctatagtgngtcgtattacgcgngctcactggccgtcgttttanaacgtcgtgactgggaaaaccctggcgttacccaacttaatcgccttgcagnacatccccctttcgccagntggcgtaatagcgaagagggccgnaccgatcgcccttcccaaaagttgcgganctgaatggcgaat

SEQ ID NO: 387449 - DNA, 614 bp, Oryza sativa
ttggtttttgagaaaaaagggggtggcattgccattgtgcttcaccttaaacacttatatattttcaggtgaccaaaaattatataacactaccatgtagtagaaagctggagcaggagggacaaagattacagcaattcggttcaagtacacgtaggtgattgcagaattgcagtcaagttaaagcgaaacaggaaaatctggaaaaaaaataatcctcttttttctttctttatggacaggctggatcacacggtgtaagactgctggatggtctcaatgtcgaggcctttgagcttcacaaccgattctacatgccccttgagcgtatggagctccctaagcctggcaatctccgccctcctcttcgcctcttcagccatctgattgagctcattgtagccagccttctccgagaacatcttggcatcaggcggctgcagtccatggagggtcctctgagcatgtgcccacttgagctccctctcctccttaccaaagtccttcttccttgtgaaagcgatcctttgctcaatgacaagatcccatgctttcccactcaaagcatatctgatgaggaacttgataatgtagagtgggaagcggacgcgtgg

SEQ ID NO: 387450 - DNA, 473 bp, Oryza sativa
gccccactcttttttatttttttttttcatggatcaaccaacaattaatgaaatgattcttcacaaatcttgctagacatcaagcaagcccaaacatacgaaatagaaagatagaggcagatggcaacaagccaatacaaaacaaaagggtggtgatggatggtttgccgatgtttcccgcataccactacacagttccaatgactacagatattcagcctgacagtaactcattttaccaatttcaactaaggattgccatacgtcaattaattgctagtatgtgtgctggcctcaacttgctcttgaattaacagtttccggacttcagtgccttcatcagccatctcagcagggacctggccataagtattctccttcttggcacatgccccagctttaagcaggagatccacaatacccagatgttcccctttggcagtatgatggaggggagtgtcgccttcagaatc

SEQ ID NO: 387451 - DNA, 1001 bp, Oryza sativa
tttttttttttttttttaattaatacactgtattattttgtaatcagccttgttcttatggtcaaaaacaatacatcatctatgtataataataataataatattattaatgccattttatgaacattgcacaagctgctgcagcagcatcaaccaaccaacaaaccaaactataaacttcctctgctccatttctgcctccattttcatggacagcaacatcatatctctgcatttttttttcaccggttgtgtgactgaaaatagagaaaacgtcggcgttggccttagctgcttttgggcgcatcggcggcggcggcggcgacggcgtcggggatgccggcggcgagcctggctctcaagtccttcctgaggatcttgccggaagggttcttggggatggaatcggtgaagaacaccttgttgatcctcttgtagaacaccacctcttttgcaacgaatttcttgatctcatcctcggtgatttctgagccttctgtccggacaatgaaggcgactggcacttcaccggcaagatcatccttcatcgagacgacggcggcgtccttgatctccgggtgagtgatgagcagcgcctccagctcggccggtggcacctggaaccccttgtacttgatgatctccttgagcctgtccacgatgaagatctcgtcgtcgtcgtcgacgaagccgatgtctccggtgtgcagccacccgtcctcgtcgatggtgttcttggtcgcctcaggatcattcagatagcctttcatgatctgttctccgcggatgcagatctcgccggactggttccggccgagggaggtgccggtgtcggggtcgacgatcttcagctccgcgttgcgcaccactgtaccgcacgacccggacttaaccttgaagggctccttggcaaacgccaggcacattgccagcactggcccagcctcagtcataccgtaaccctgtcccaggacggcattggggatcttggccatgaaaaa

SEQ ID NO: 387452 - DNA, 699 bp, Oryza sativa
tttacttacataagcaaaaaaggatgccatctgaaactctgaatccgtgtaccacatttctttctgcagatctagcactatacttgtacagtacgtgtcactgggtgtgtagtatatatgtataataggtctagaaagctacagtgtgtatgtgtttctgctgttttgtatggacaacttgactgaaagtttctgaaaccaaatgagctgcttggcctttcttcttcaggttagcaaatcaaagtagacatcaaacccctgcaaggatgcactcctcttgagcttctccagcgcccggttctgcagctgcctgatcctctccttggacagcccaaacatgtccccgatgacatgtagcgtcttcggctcgccatcgtggatcccgaaccggtgctcgatgatctccttctccctggggctcaggatccccaggaagtccctcacctgctgcctcatcatcatcctgtccacactcaggtcaggtggctccacatttgggtcttctcccatctcctggaaggtgacaccctcatctgaccagacatgatcctgcatcgaccggggtttccgggttttcgctcggagcttcgcaagcttctcgatggtgatgccggcgcgcctcgctacgttcgcgttggtgggttgctccccttccatgatgcattccatccttgccttgcccacctttctcagaagcgc

SEQ ID NO: 387453 - DNA, 760 bp, Oryza sativa
  unsure (1)..(760): unsure at all n locations
tcttcttcttggctgcagnagattccacgtctccttccccagccttaccatcctctgcggtttaagtatcttccttcaccattgccgcagcaggtggcgcctggggcagaacctccttctccttttctgctggcgttgggccctcaccaagctcagcgagaagcttatccaaatcctcctcttcctgagctgtccttccactcttcttttttttcttcttcgatttcttgccttccgcatcatccacactggttgaggcggccacattacccacatctttcaccgcctcaggctcaggctcaggatcgtcgacaggaggtggctggtcctcaaactctgcgaggatcttgtctacgtcctcatcatcgacggtaaagcctcccttctttttcttcttctgggatttctttcctaaggcatcatctgcatcaggggcaggcacctcttccaccggctcagcctcttcggtgggaggagaagtatcgtcgatctcggcgaggagcttgtcaatgtcctcattgtccacagtaaagccgcccttctttttcttcttcttctgaggctttttggaagctgcagctgcagcagcctcgtcgtcgtctgcctcatcagcagcggcggctgggggcggcggggcaggcttatctaggtcgaggtcgtcgtgttccagagggactgggcgagctcccttggccttcttctttttcttcttcttggctttgctgaagtcgaaatcgaggtcgtcgtcccggacgcgtgg

SEQ ID NO: 387454 - DNA, 1148 bp, Oryza sativa
ggggttggggctactattaaacccattcatttgtattgccccctccaagttgtacaattgaagttccctacaacaccagttcactccaataagttactttgaccctgactgcagttaaaatgcacttattattctagggtgcaatgcgggttattcacgatcagacataattaaggtttgcagatctcgttcgttttggtatgcacaaggagctatcacttgcatgagtacaggagccagctgctgtgcgtgcccagactgtagtgtgtgcccaatgatttgtcatcacacctcttgtcagattctaattttgaagagggattgccttcttgtgaaacaggtttgctaagcaaccccccctcttcatgaactgaagtggggggcaacaggtgtgtgatatcttttctttcccccaaggaattccatttgccaccagcccactcacgtgaatgcctcaaatcatcttcacaaaaatcagcaatctgcttttctccaggaaaataaacttgaaggcgtctgtcatttccctgctgcaatacaatcccctccccccacccactattcccccatgcatcaccaatggaaccagcatcgaaagagcatggatccttgctatgtacatgatatggccgcaccattggtctttcagggatgcgtatacccaactgatcaggtttagcaatccttgttagcaaaacccactcctccagatttcctgtctcatcagcatcctgaagatcttcatatcgcaccttgattttgtctccgcgcctctttaatacaaagcatctaaaccagcagccccttataccgctgtcctgtgataggacttcagcacggctaccaggatatagctgcttttgagttttatgttccaaatcattcttgagactatcagaaccgaatgcagcggaaggaacacactgctgtggatcggtttcactgaatgcatcacgcttcctcttttgtgccccatctgaactagaagcacctttagtgaccttgaaacgtaccttaagagaagaagctgcattgaacattgtcctaagcacttcttgactccaataaccttgcaattgggttacatcaaaaggtttgacgccatcttcatcaatctgtcggcgacaaatataaggccggacgcgtgg

SEQ ID NO: 387455 - DNA, 2061 bp, Oryza sativa
gcacataacattacgcgattttaacacgatccaaactttaaatactggacaagagcatgtttgacgcctcgcattatcgcatatagcggatgaaaaaacgtcaggccagcctgcgcgacaacgtctagttacagataagagcagaactgcaagtcaaatacactcttttctctccatagtagagtttgagcagcgagcgggcaaacataaattattcaattattaaatgatatgatcactcttgatcatctcaacactataggaacaaaacttcgctaccgcgattttactattttagttgtccacaacttcaatgagggttggttcgtagtcagcaggagcctcgaaaccatggaagttcattacggttgcagcaacattggcgagcccaggggtctgaatgtcagaccggaatttcacaccagggtgaagaccgggacctccaatagcaaccgggaccggctgaagagtatgtgaggtaagaatctggataccaccgttcttgtcgagaagtggctggccagatttgtttcttttcaccatatcctcagcatttccatgatcagcggtgacaagataaataccaccgacttgttcaatcgcgtccaaaataatcttaacggcttcgtcagctgccttgcaagcaactaccgtggcttcaatatcaccagtgtgaccaaccatgtcaccattcggcaggttgacacgtacctgatcaaactttccactaagaatggcatccctggctttctctgcaatttcaagtgccttcatgttgggtttaacattgaatgtgattccaatatcactaggaatttcaacgtactcttccttagtttcatcaaagtatccagatcggtttccgttccagaaaaatgtgacatggccaaacttcactgtctcactgcaagcgaaggtgcggacgccattctttaccaagtattcaccagatgttctctctatctctggtggggagacaaggtaatggctcggaagcttcaactcaccatcatactgaagcatcccagcgtaccggatttttggtacacgaacacgatcaaatttgtcaaagtctgcatactctagtgctttggcaagcataaccatacgatccgctcggaaattgaaagtcacaactgcatcaccatctacaacaggcccaacagatttgccactctcatccacgatcacaaatggaggcaaatactgatcactagccttggtctctgctcttagagttttcactgcttcgactgcattttggaatttgtagggtgcttcgccaagcacctgggcatcccacccacgtttgaccacatcccagtcattctcatagcggtccatggtaacatacatccttccaccaccagatgcaatccgtgcatcaatacccttgtcacgaagctgagaaagatcactctctagtgtctctacaaaaccaacactgctgccatccaaaacatcgcgtccatcagtaagaatgtgaacacgaattctttttgctcccctctcactggcacctttcagaagcagctgcacttgatcaagacgggagtgaacgcctccatcactcaacaaaccaataaggtgcagggtacccttgtcaaaacattctttgatgtaattgaacccctctccatcataaattttcccagaggcaagagcaaggtccacaagcttagcaccctgagcaaaaatgcgaccagcaccaagagcattgtgacccacttcgctgttgcccatgtcatcttcgctaggaagaccaacagctgttccatgagccttcactaatctccacctctcgggagcaccattcttgagcgaatccatgacgggcgtctgggcgacatggatgcagttgtacttgtcggcgttggcctcgccccatccgtcaagcacgacgagggctaccgtcttccccttggggagcttggggtggtcgggcagcgtccatgagaaaccggagctcgccatcgcctactagatgctataccttcgctttgccctcgcgcttttgcccaccgagacgaaagcctttcttttctttttcggacgcgtggg

SEQ ID NO: 387456 - DNA, 484 bp, Oryza sativa
  unsure (1)..(484): unsure at all n locations
aagtaaacctaaagcatgcggcattgtttatttcagaacggcaacctatgcttcagtttaagagtacatgagatcactcgcagtatataggagattctaagtcccaaccaaaattaacttctatcctttttttttccttactcttatccaccgatcatcaaactaacagaacgaaaacgaacaaatctccagtctttcagtccacgtctcagcagaccacgcactctgtttctcacctgcaaaattgttcaagtaagcaattctcaagggggggctgcctgctttccttccatcagttgctagcgctcgctgggaggtagtactggtagtagcctagcacggcaagcagggcgacgagcgcggcggccactgcagcagcagggccagcccaggaccagtacgactgggctttcttcctcctcaggatcgccttcggcagcggngccttgctcttggtcacgacgtttctgctgtaccggacact

SEQ ID NO: 387457 - DNA, 966 bp, Oryza sativa
  unsure (1)..(966): unsure at all n locations
nnnnnnnnnnnnnnnnnnnnnnnnnnacaatgttgaaactatatttgcttatcattcaacttctaaactgattgttcactttgtaaagcttgttccaaacacaatcgctgctcaagaacacccaattcccttagaaaaactagctcagaaagccttattcactccacaagctggtcctgttgcacacaggtcaccaaagagttcgcaagaagcagcatgcttatagcttatgaaaacaacatgcttaggtaaatgaccaaaagaatctgatggcttctcatggacaagattaggctagtgagagctctccagcagggatattccttttcaccaatttctcccatgattcgttggtttcttctatgaccttcagagcatattccttgcttgtgggtttgttgcccagaccaaatctgtttgcaggcttaccgtctggtatcttgtagtccctgaaccagtctctgatggcagtcaatgttcccggaaaatgcttctcaacatcatccacatcattcacaagagatgctttaggatcatccaaagaaatagccacaattttccagtcaagctcaccctcatcaatcattgctaaagctgccaacggttttaccttaagaacatctccaatgttagcacgtctttcaccaatctcaacaacatcaacaggatcattatccccaaatgctccttcgacatcggtgtttgcaagagttgggtcctcccatgtttggggaaataatccataattccaattaatgttgtacgggtagtatcggaggttgcccttcttggtgtcctgcttgatgggggtgaatgactcgtcggtggcgacctccatcttggcgctgctctccttggggatctcccccccgaagtggaaccccccctcccctgcgcgcaggggcacgtcgtgcccacgcgtccgcccacgcgtccgcggacgcatgggcggacgcgtgggtcgac

SEQ ID NO: 387458 - DNA, 913 bp, Oryza sativa
  unsure (1)..(913): unsure at all n locations
nnnnnnnnnnnnnnnnnnnnnnnnnnnggagatataaactgaagattataacttaacatgagcactgaacattactacttgattcaacagtggatacagattcaaacattatcataaagtcctcacaactaggcagctcatcgacaattttattcgcacaagtattttgcagacaaatttaaacaagattgacacgataggtccaagtgatcgctgccgttcctaagagctgaagctcttacagtgccttgaggatctcctcagcaccagagattgtgaattggccaccttcctcaatgtttgcaacagtaaccttgaggttgtcagcaaggagagcaaaccgtctcgaacgaataccaagccctttctccgaaaggtcaagctcaagaccaagtgccttggtgtatgttcccaaaccatcggcaaggaatttcacatgcttattctcagggtatgactttgcccacgccttcatgacaaaggggtcgttaacactgacaagcaagatgtcgtctacacccttggctttgagctgctcagcctgatttatgaatcctggcacatgctgattgctgcaggtcggggtgaaggcaccggggacgccgaagaggacgaccttcttgccggcggcgaggccgtggacggagacctgctgcagcttgtcctccccgtcgaaccaccccagctggccgtcggggagggtgtcgcccacggcaaccggggccatgtcgctctcccggatgattcttgtgttgcctgcctggatgtgtggaggagaggaggaacagaggaaggagagaaggtaatcgacagggaagggagatgagtgatgatgaggagaggaatgcgaataaataaggggcccttccctccccactgattgtgatatgctttggggtttggttggataatg

SEQ ID NO: 387459 - DNA, 490 bp, Oryza sativa
  unsure (1)..(490): unsure at all n locations
nnnnnnnngtgttttttttaaaaggggggcaacttcaaattgcaacctgaactatgaatattgctgccaaatggagtaatatatacagcaaaggaaagtaggagcatgaatggaaaaggaaaaaaaatgtggcaaaggttccaaaaaaaaaaacatcctgactacacaacacacaacccattatgatcatgactgaatgtatctgatatctgtgaattctaactgtcgaatgcacaataacaccttgcacagccaaagtaattcccaaggtaatgaaatccagactgaaactcttatttgatggtatatatcatctctaaagccgctaaacctgtaaagccaaatagcttggcaactcctcaaagtgcttccctagcacccattggtcagcgagtcctggggctgttggctggtttagatggagaagacggtttgttcttagcgaaatcgacaagatccttgaaaagagaatcttcaggtttggtctgcc

SEQ ID NO: 387460 - DNA, 504 bp, Oryza sativa
cctatcttgtaaataattgatatatagtctcaaagaggacgttacaaattgtttcgatataaatgaactgcctatcgtttcttagagctaggaccgagcacggccctactcctagcacattaacatacctacgaattttacccaactcttcttttaccataaaaagaactgaggcggcaaagacgctctgtacaatcttcgtacccattcctttgtaaaacccgtgcaatccttcataccggatcatctttatgatcgcgtcaatcgtacctgtgtatctggacatcacattcctgccaatttcttgttttgcttgcaacctagacttaaccactagcaatgggtatgtcacaacagtagctccgagctttgctattgcacctaataagaatacctccatagcagtaaggttctttctttggcagttcctttccagatctctttgaccggagacgctttgccaatgtttcatagatcataaattgaattgatcggacgcgtggg

SEQ ID NO: 387461 - DNA, 684 bp, Oryza sativa
  unsure (1)..(684): unsure at all n locations
nnnnnnnnnnnnnnnnnnnnnngccatcttaaacgatgccacgtctgttacatttttattcttagtaaacacatgtagcattaaaaagtactgtagcagtagacattttctgagcatgtcacaacgtacaacttcatcttacaaggttctgagctcactcacattgcaattctaatgaaccgagaccattgtttggcctgcgtcaactgtgtcgcaaacttgcaatctatgctgatttctatttccctacgatagctgaccttcctagcacatcttaggagaaaactcggtctatgacaaacacggccaagtaagccatgcaatttctgtttcttggcctaaaaacgacgtctatctgacaaaatttcccaatgtgttctgcacaatgctcatgccgaatccaacttgttctgcttgagaaattccaggtccttgagtttgccctgcgctgcttccttggacacggtcttgacgccggggcccttcctctcgccggcagccacctgcttcgccatggaggtcactatcctctcgaccgcctgcctcccgacggaggggaagacggcgttcagcattttgcacagcagcttcacgtccacgtcttccaccatgtcctgcccgaagcagcccacgtagatggcctccagggccttctccgcccgcgcttccgatctagaactagtc

SEQ ID NO: 387462 - DNA, 1251 bp, Oryza sativa
tttttttttttttttttttagtagatggatagctatttcgattttatttaccgatcttcttaaaaaatcatatctaggggtattattttttttcaaagaagtacaagtagtatttactcttgaccactctttgctccgtatatacaccggtttatcattacaccatatttcctccgtcctgagtccctcacaccaaagttgaacaggttgacgtggcaggatcgaacaaagccggaagcaggtatttcctcccgtgtgctccattggcgttgtagctcgctcccgtcgcggggtccaccgccaggttcccggcataaccggggtacgcaccgctgccgtagacccccggacacgccgtcgcggcctccagcggcgcctccttggggccctggtagaacccgtcgccgaacgggttggtcacgacgccggcgaccatgctggcgatgttcatcaccatgccgtccatcccgacgtcgccgctgggcggcaccagcgccggcgtctgaggcccgtacaccggctggtggaacggccacgcgcactggccggggcactgcgtggcggagttgccgacccagacgtaggccgtgcgggccttggcgttcgacgcgtgcgtgccgcaccggctcatgcagaacccctccacggacacgtcctgccgcggtgagaaccagcgcgatcccgcccttcttgggcttggccctcgccgccagcgccggcagctgggacagcttgaggctcttcccgagcgagcactggtcgtcggtgagttggccggcgagcctcacctgcgtggtgatcttgccgcctccgccgccgttcttgcccctgcgccgccgccttggacaggtacagctggttgatggtgttccaccactgcgacacggacggggtcggcgccggcgaggcgacggtgagcaagaggaggaagtcggagacgacggccttctgcgccggcgtgaagcggccgtaccagacgaccgacacggggatgtcgccccgcaacacggtgccgttgtggtacgtgagttgctcgctgggcggtggcttgtacagctccatgagcctcctggctcccgcggagggatgtgccgagcacagcagcagtactgaaaccagcacgattgccgcgtggctcatgtggtggacggtgcaaaccctacgatccgaggccatgatctcgtagtgcaattgttgtgcacgcttgcttggtgcgagagctgtgtatacaagtacgtggtccagcgtccg

SEQ ID NO: 387463 - DNA, 506 bp, Oryza sativa
  unsure (1)..(506): unsure at all n locations
ggagcttacactctattatttacatttgctagttatgaataatggacagctagaaatacaaagaatgtacacccaaagaatattggttacaagcttcactgattatcgtcaggaatcagctctagaatttgatctggtgaaaaataacgcggacccgttaacaccacgaagaatcatcaaccttgcatcaacgtatgtcccacaaacaatttttgataaatcaaacatttctggcggggtctgagtgcggatctcttgcaccaccttctgcgcagaactgacatttaaagtcgagctgcagctcattgatacgtcgagttcatccatggtaatggttacgggggggnggctagcaggcagctntttcattttngaaanttttctccacttaccangaangtntntcntagaagatggngnaganncnaccctactatcntcaccatcctgttcgngaatanaaatnntccagtgngntcctcgctcgtgccgaatcctgcagcccn

SEQ ID NO: 387464 - DNA, 1026 bp, Oryza sativa
gattacaaaattgacaactgagaaaattttatatccataaagattcatccagatatgcacaaaatgatcatttcttgagctagatatcctcaccttacagttgatttaacatggatacagcacatgaattctcaagagtgactattcacttgattattacaaggatatagtgctctcaatactagtcttctttacagtgaactcagggccggatcaggtagtatattgtagatacagctcatagaagggaagcagccatgtcaaacagcacaaggcccaggggtcatcttctgcctcctctcatctaagtctagggtatgaacaaaagccggcaagcaacagcgaccggtgtaccacgccttctccttgcgattcttcgcttctctgatcggcgtcggttctgtgctacacgtggagctggactcagatactggcttcacagctgcagaaataggctggaattgctgcttctcattcttgctgatgtctggaacagatgcatcggtgctatcttcggaaccattctgcatcgcctcctgcaagagctcggctagttttctccttccagttggagaaggttcaggtgatttggaattctgtacattatcaggtacaaagacattgctcataactgtttgtgttctgggttggtagtttggagtgctgccacgagacggagtaaaatctccattcacactgtagaagtcgtcctcgcaatcagaatctaaccatgcccgcgagtcaaagaacatttcatccttgctaccagaaccggggctcctgacgccaacccctgccgccgccgcctgctgctgctcctttcgcttgagatcaacagacacaccgccaccgccacccttcccgttcgcggccttcttctccttggtaggcgaccacgcaagaaacagcttcttggggaacccgaggtccttgtgaaccgaagcgcaagaacccatctctctctctctcactctctctctctctctcttgtcccatgtaatctcctcttattaatgtttttaccat

SEQ ID NO: 387465 - DNA, 441 bp, Oryza sativa
  unsure (1)..(441): unsure at all n locations
agtgctgccacgagacggagttaaaatctccattcacactgtagaagtcgtcctcgcaatcagaatcttaaccatgcccgcgagtcaaagaacatttcattccttgctaccagaaccggggctcctgacgccaaccccctgccgccgccgcctgctgctgctcctttcgcttgagatcaacagacacaccgccaccgccacccttcccgttcgcggccttcttctccttggtaggcgacgacgcaagaaacagcttcttggggaacccgaggtccttgtgaaccgaagcgcaagaacccatctctctctctctctctcccctccactccactttctctctcctctcacacccaacctttttcaaaccacagcgacacacatctttctctcctcttccccgtgcaagaacgagaaatggaagcaatcaaagaatcncgtccg

SEQ ID NO: 387466 - DNA, 1300 bp, Oryza sativa
ttttactggtccagtaatgaccaatgaccgaagattcaaataattgagaagtgaaatcagcatcaggtgcaatgtgcaatggagcaacaacttcctaacttcaagcttatttacattacacataggttaaagaggataacagtgaggatagctggttgcaagaatctccttggatttaagtacactggtgaaactagaataggatgaaatggtgaaaatttctaacaggaaaacgggttactttgaccttaataatgtaatttctccccaaaacgaatttcagaatacatacctagtcctagctgagaaatataaagccgcggcgatttgacgcacctctatatgatgaataatttacacatgtatcagccttagatcggtcattcttgattcgcaggtctttggcctgtatgtgccgctgccagaagccccactggagaatttgacttgacagtagctcggtaagatacttgctacacaatgtgttgcgtcttcagatttcagtaatgtataagccgatagtcaccttgtcacagctgtaccattctataaatatataatcctatttcataccaatccatgagcagaggaaccactgaaagactcccaagggaaatgcaactaatgcgttatcgctcagaaagctgttagatgatttcttcaagatgactccaacttggctactattcacttgacccactgtttcttgaggaggaatctcgtgagtgacgttttccttccattgcttctttcttttcctggcaactgtggcaaaggaaaggcccatcccatggacgcagctttcctgactttgacaaaccctcatgtatggatataccctgaccagactctaactctacttgacaaattgcacatatgaagagcttgaacatattccgaactggatattcagaatctagccgtcttgaaagggaaggacatccatcctcaaagacttcctccaccaaatctggctgggtacattggtccttatctgcatgacatggtgagtctgatgttgctttcttgtaaaagatatttttgaaaagtcctttccctgccttttttgcaggttgcacagtggggcttattttttctggaggtattatgtcaatgacaatacaagtcgtatcatctctcaatccttttgatgcaattgcttctttgacaatttgatccgctgcagcttctggaggaagccctcgtgcacaactaaaagccgtatccacagtcaaggcatcccaaacaccatcacttgaaataatgattctgcctccagcacttgatagcttgatctgct

SEQ ID NO: 387467 - DNA, 818 bp, Oryza sativa
tggttttgataagatttagggagtggtgtactgtatttcccgggtttggtttggttacataacatgtgcttaagttgctgtcctgcaagcttctttttgaaacataaggcggaacttcgttccacttttatatttagaagaagagaattgacccagtttataaggataaccggacccgaaaaccatacatccgcatggttaattacaggaaaaccggctaaaacccaccgctacactactaaccatgatggcggagcccaaatgcaggacgtcgtcgccaagctaaacacaaaagccacccaacagctcccacaccgcagaagaggtgttatcgttgccgagctagccgcccaagcgacccagcagcgccgacttcacaaccacagcgacactaaagccatgaaagtcgccaaagcaaaaagcagctccgacatccaacaatggacatcagccaagccaccgaggagccacttcctttacacggccagcaccacaactcctaggaagagactgcaacatgtcatcgttgccaggcgtcaccgcaccccatcagcgagtagctccgacttcatctcgaccataacggcaaagacaggccctccggcgcggaggcgacggaactggtcgcggacggccagatccagccagggcggcgcaagccggctcgacatccgcgccgctgcagctccgtcgtcgtcgcaaccaccacgccgccacagcctctatcgccaccgctgtgaccccgcgcggacggacgccgacgccgacgccgcgaccggcgcgagcgagccgccgcccctgcctgcccggacgcgtgg

SEQ ID NO: 387468 - DNA, 609 bp, Oryza sativa
gagatattacagtaaactagataaactaatccatcaaatacagtgatttcgttaagggggtatacacttatctggtgaacaggcaatacacacataattgtacgctgtgatggtagaaaaattctactaatcttatcaaagaaagtaaccaacacgacatgccaatcccaacaattccatatatttcttttcaaagggaacaataattccacatcaatcccagggtttgtgtccgatcgagactgcttggtcacacggacagacttgatcagaagcaagcctccaacaggcagcagcagcaaagtgcagccaagcatccctccatgaaggaaggcccgctgctgtggtgctgctgctgctgcggcggcggtggctgcgcgtacggcggcgggtagccctgctgcggcgggtacccctgctgcggagggtatccctggggagggtacccctgcgccggcggtgggtagccggccggcgggtaccccggcggcgggtacgcgtccttccccgggtacccttgcggcggcggcgcgcccaccggcggctgctgaccgtagtagctcatctctttctagtttagctggaggattacttttccggacgcgtggg

SEQ ID NO: 387469 - DNA, 750 bp, Oryza sativa
  unsure (1)..(750): unsure at all n locations
nnnnnnnnnnnnnnnnnnnnnnnnnnnntaactaatgaaccagattcatttattcattcatttaccattcccagcaatgttaagttacaagtttacagctaaattaacaggagatgaattcatatatggacaaacaggatatgtctctgtgattttattcattattttgtagtgctttccacagctttagccctggggaattcacctccaataataatgacctgggaaaggatttaggaggccggggtgaacttgatcgaaacactgttcacacagtgacgctcatcagtaggcgtcttgaagccttctcctttgaacacgtgacccaaatgcccaccgcaagctgcacacgtgatttctaccctccttccatcaggatccggtgttcggtttatggctccaggaagtccctcaaaaaatgctggccagccacaaccagaatcaaacttggttgtggatttgtacaggggtgttccacagccagcacagttgtagaccccatcaccatagaacttgttgtactcacctgttccaggtaactcggtgcccttgaggcggaggatgcggaactgctccggggagaggacggcgcgccactcctcgtcgctccgctgcttgccgctgctgtcccccgacgacgccatcgcgggcggcgcgcggcggccgacgaagcagacgacgacgacgacgacgacacgggagtggaggagtgagtcgatgcaggagggcagcagaagcacggacgcgtgg

SEQ ID NO: 387470 - DNA, 535 bp, Oryza sativa
atatattatactggacggtatattcccaatggtgcaattattttctaaccaacacaaagtttttacagtattacaatgttattcagaatgacagaatacacaagcggtccatacggaacagaaagaccgaagacgatcaacacaattcagagaaacaggctggagtttccattgtccatcatgatcccatatcacacaagactcatatttaccgacgaacatacagagtttcaccaaggcagtagagaacattcatcacataatagctcaagtgcaaatagagcagagcagatgtttggcacggttcacatgccacgacccatagtctgctcctttggtggcgtcatgaccaagacagatcgcccgttgaagccaggatgggggaccctgcgccgcagctcgcgtccctcctggcagagcgcacaaagggtgacagaagtagtgagttgcaaggtcgcaggcaacctccaggtgctcacggttcccctcatcctcaacaaggccatggcagcacccacattgcttagtgaaagca

SEQ ID NO: 387471 - DNA, 306 bp, Oryza sativa
  unsure (1)..(306): unsure at all n locations
tttttttttttttttttgggtactgaatttttctgtgtattctctattgtttcatgctcatgatcgtacagagtgtgatgaattctctgcagttgacagcatctgaaagctgttctcatgcaagtgttcatggtttacttattattcatcagtacagtacattgttgnacatatttgttctctcagtcctcacaaaggaatgaaggataccagcagacagagaacaaatttattcanccagacatggcatcaaggaagcaaactcatcacaatctacactaaactccacgcttactcttcttcgtg

SEQ ID NO: 387472 - DNA, 490 bp, Oryza sativa
actttgaaaacatccttaccatagaaaaaaaatatttcagcttggcattgggacaaacactgatgtgaaggattacagaagtgggagaaaagtattggcccagttctgtttcaaggcttccagagcaagaacatgaacacataacatggaccaaaggtatacacatcgcttggaatggagagaatttaacagagctatttaattccttaaacaacatatgcatgtccaaaattggcaagacgtgttgacaatgaatctgctgcgaattcctgaagacgatttgtcaatagactagctggtagcagcaggttcagcgtttggaacataccaaccacggagtatctcgatggccttcttcctcctcgcaagaagggacttgcgatggttaccagtattcctgtgcatggcgccaaccttcactgtcttgtcaatggctttgtatgcctcagaaatccatttctctatttgaatgatatcttcaggtgtggca

SEQ ID NO: 387473 - DNA, 1178 bp, Oryza sativa
  unsure (1)..(1178): unsure at all n locations
cntccagaaaggatataatgatggattagaatattcagacagtagnaccgtttnaggatngnngcnagatnattganntntgnactttcctcttaccactcgcacttgccaatattttattgcagtgtgcccaatacaccagttctaacattacctatcaggcaagataaaacggtagaaggaatgatctacaagaaagggttaccgtcttcagttacagcagagacgtcagttgcacatatttcgtctcaagtacataatggcatcattagggtacagactaataatattaccagtcaaaaattgactaattacagatacagaatgctcacactggaaaatcatgaagtttatggactgtcattgtgaataagccatgtattcctgattatattaaaacgagcatttcattgaaatgcaaccttcaaatccttttgacaaacaatcttcgacgatagaaggtgagttctgaagacaacctcttgggttgtgcaaatttgcatcatcacaataatctgatggactgtgaaccaaaggagtacctgcattgtattcccaaactccatacttagtaatgacagggctctccttcagccgtttcagaggcgcaagatggactgagcgcgtaaaattatccgaaaggtccacatcctcattaggtttaagacgagtagggcatttcctctttgatccaggtaatggatttattcctccaaatgtattggaaatgttcaattgtgattccatcgcactggagcaatcacaggaattataaatcctgtgcatatgctccccaaaatcatcaactagaactggccaagcaccttttggatcataaccttccaaatcttcatttacacacctgctgaaagctagcagctgctgccagacatcctctgttatgttgtaacgttggtacttctcaacaaagttacaccacctgtcaagcaaccaaaacctcccatttagaaccatcctccatgctcccacagctctctgaacagagatgttcttttggccattttctcgggaaatgaagaagtcaaaatcatagaagatactgaatcggtgagcatcatctaagtcaagagctgacatgagcttggggatgtcactaaatatcgcatccctcaatccttccatgccatctataacttgtgaaagctcagccgatcatt

SEQ ID NO: 387474 - DNA, 382 bp, Oryza sativa
agccgaaacatcaaattaaatcataccacataggggggggcgtgtttattacacgcatccctcgccccaaatacatccatttagtccacaccatgttgcctctcccactctcttagattcttgaatttggggtccgtagcaagtacgctatgaggatcatggaactctcctagatgattgcagatgttgcgaccaatgaacccgcacacgtccgcgcacaagttgataagcgttctctgatcgaaccaacttgcactataagggatactcgggagatatgtaaactcagttctgtatcttccattgacccggataaatgctgacatacccgccaatgtccccttatgtacaatttctctctaattggaatctttacgtaccc

SEQ ID NO: 387475 - DNA, 284 bp, Oryza sativa
tgataggctatcaatgtttatcattgtgaatagaagaatgatacatgaaaaaaaaaacgaagtttgacagtttgcctgttcagattgggatgttagaatcacagtgtgagcagggaacccagggaagcaggaaaaagaagatgcatgccagctatacatgaggcaagtctacagagaaagagattgatgctttgactcaccggaagtgaggacggcatcccaactgcaaatgaagtttttctatgccacggcatgtggtttcaatctgacctaccgcctagatg

SEQ ID NO: 387476 - DNA, 577 bp, Oryza sativa
  unsure (1)..(577): unsure at all n locations
ttttttttttttttttttaaagaataagtatcatgaatatcattatatcagtcagattaattagtattgtcataacagaagctgactcagagcacagagcagcaatgccaattagtaaacacttgtagtttggaatctatggagtgctaaaagaccacgaccacaacaactcaacataatttacagcaggatgacaccaaaaggccaaggcagtgatggcagctacggcactcattctgtaacccccctagcttcaccatggatctccaatctcgttgttattcccgtgttgtttggagctgaagaagaactccgagggctggtagccggctcattcttcttgtagaactggatggagaacaggctgccatgttgatcgggctgatgatatnggtgatccatgaaaganaatgcccgccccatacttttganaaaacccgtgaattcctttcatccgcaagccttgccaagtttgacaaggcagaagatatggtatatcnactaccagtttgccattgagaactggttgggccctnccaatcctgcncccgggntcntattctaaacggccccccgt

SEQ ID NO: 387477 - DNA, 680 bp, Oryza sativa
  unsure (1)..(680): unsure at all n locations
nnnnnnnnnnnnnnnnnnnnnnnngggtaataaacttttgtattttattatttcgggattatcataaatagcagggcttgtattaaactgcccgagtccacaaataactatagatgataatacaagccctgcttacattgcaactcatacatttaacaggattgcatatacatttaatagtatagggcgtacgcccacgagtacatgtgtccgagtatacgaactagtgattacctgccacaccggcaatgtggttgtgtatggatatttatacgcgcgcacgtacgtatgctatacacacatgtatgagatggtgcgccgggaagtatggctggattcttatatgttccttattacaatatagctgaacgccatcttcgatccgatgaatatcttctatgcatgcttccgctgctcacgcgctatgtatttatcatgggccggggaagtacgcgattgtgtttaccgcctggattgcttgctccatatcattctccgatcagctgtgtcaaaggtatatacaaacaaagttattaatccacaacggtggaactgatgnaacttattccaaatattgnnttnnnantttcgcatgcatgcatgtatcgantggancggngttgcacatttggccaattcagtnaaagtcatgtcccgaggacaagagccctaacgacant

SEQ ID NO: 387478 - DNA, 638 bp, Oryza sativa
ccccgagtacatgtgtccgagtatacgaactagtgattccctgccaccccggcaatgtggttgtgtatggatatttatacgcgcgcacgtacgtatgctatacacacatgtatgagatggtgcgccggaaagtatggctggattcttatatgttccttattacaatatagctgaacgccatcttcgatccgatgaatatcttctatgcatgcttccgctgctcacgcgctatgtatttatcatgggccggggaagtacccgattgtgtttaccgcctggattgcttgctccatatcattctccgatcagcgggtggttcgctgacagacggttgttgcgatccagcggcagatgtgccttgtttactggaacgtctgtatgtcatccttgtgccttcgggtggttcgctgacagacggttgttgcgatccagttgcagatgtgacttgtttactggaacgtttgtatgtcatccttgtgacttcttgattgttccctgcctcgtcgttgctgcggccatgcttgaaggtgctcatgcccgcaatttgcaaatacgtactactccggttgatgttataaatcgttttaatttttttggaagtaacttactagcgaacttttgtgtgtgagagtagaacg

SEQ ID NO: 387479 - DNA, 621 bp, Oryza sativa
tttagggaagcaaggggcctttgggtccttgaaacgaatgaaatagagaagatattatcagataaaagtaaattgcaaactctagcaggttttgttgtagacaagaactctttgtttcctcgcctgatggttcatatgaataaactaagaaaggtcaagatatggtgcgagcccgcagctgaacgtaatagcagtatcagcttaatttcagcggctattcagaagtttactcaggctggcatggacactactggtgctcattctctgtcacttcgatccagaaaatttcctaaccgtctactgtgttgtctggagaagtcgtatggttatctcagctccttgaaactgcagggcgagttgagccggtttccacagttcatcacatcactgtgtggtctcacagagctgtgcctttcatcaacaaatctgaataaggaggatctatcaaacgtttgcacattgcaccacttgctttatctgaaactggttgaatctgaccttcagggctttatcataaaaaatggtgacttcccacgtatgcgacacttatgccttgtggtgcaaaatcccaatctccctacagttgaaaaaggagctttgccacatctcccggacgcgtgg

SEQ ID NO: 387480 - DNA, 808 bp, Oryza sativa
  unsure (1)..(808): unsure at all n locations
tttttttttttttttcatcaacacatgatttattatggaagaagaaattaacctcaagacatacacactcttactttctctctcgtcctactaagtaagtactcaacaactaattactactactactaatcactaagcagtaatccataatgaatcaaaatgcaaggtgttgtggaagagggaagattagtcggcggcgaagacggcgtcgttgagctggaaggcgccggtgaagaaggccggccagcagaggtaggtggagaggatgctgctgacggtggaagcgcccatgagcatgttcatcaccacgatctgcagctggatggcctccagcggcgacgcgccgcaccatgatgaggccggtcatggcgcccggaagcgcgatcagccccaccgtcttggcgttgtcgatcancggcgacaggcgatcaccagcgacctcctcacctgcngcgccgtcgcctgccgcggngtcgcgcccagngccaggcacgtctccaccacccctcgctggatccccacgtcctccctcagcttcttcatcgtcaccccggtcaccgtcatcgcgttcccgaccatcatcccggccaccgggatgatgtaaccgcggcgtgaacgcggaacaacccggaagcgccacgaggaagggccaatggtgacggaggtgccggcgaaggatggacgacggcggcgatgtgcttcccccgcgggacgtggcgggcgcgctgccccgcggtgtagccggcgacggtgaccatgaagaggtaggcgaggaggatccaggcggcgctcttctgcggacgcgtgg

SEQ ID NO: 387481 - DNA, 344 bp, Oryza sativa
  unsure (1)..(344): unsure at all n locations
caaattcaagtaggccattcagattcacgggccaaaaccagaaagtcagcatccactggtttctcacgggtaaatttagtacatctcagaacgtggcgataattctaacgaaatatgaatctacatttgcaataatttacatcacttgcaacacctcccttagaaacggttcgggctgatctgattatatcgacaacataagactcgcataaacttggtaaacataacttaaatagaactagtcacagcaaactgatgcatgctaaaacctgcggctaaaccccctatcttcagtgactacgagtagactgacatttacatcttacccagntgctaacacccag

SEQ ID NO: 387482 - DNA, 635 bp, Oryza sativa
caggatgaacaagtatcttcctagtagttcttagagacagggcagcaggggacagttgctttgccatttagagcacccatctgaaaacagaacggtgttcccacagcaccactgcaccagctcgtccaatgatccagtccatgtagcaacagaaaaattgttacaacttctaagtatccatgataggcataaaaccttaaagcttcagcttccctttatgccgcctgtgaagcttctgcttcttctaggcgcagcttctggtaatcgttagcatgcattatgtcctcatgattgattgcactatgaatgccctgagcacaaaaaagactcttcaaaatgttggatacttcatccatgcctagaagagctcagctcagtctcagaggttgtcggcgcagccaaagctgcacatggctgatcttattgcttcatttggaatcccgatattgacatcttcagacaattggctggtctccacggaagccggcggcgaagggcgccgtcgatctaagccggtgctgaatcttcgcgccgccgatgccggcatgccgcggagagtacatcggagatccagatcctcctggagttttgacggcgcgtccgcagccagctgctcgctgccggcggacgcgtgg

SEQ ID NO: 387483 - DNA, 678 bp, Oryza sativa
  unsure (1)..(678): unsure at all n locations
antngtanacgactcactatagggcgaattgggtaccgggccccccctcgagttttttttttttttttttgccagtgcagtaacaaccatccataaattgaaggtaaacgggcgcattttccagcaccatgccaaccaggctgattacaaatcccaacacatcagatgttttcagggaaatcaatagaatatgatcgttgctcgcgacagccgggaatcagtatcagtcccacgaactagttgagccttgaccaccaccatagccaccgccatatccaccgccccctccataaccgccgcctccatagccaccaccgccaccaccataaccgccgccgcctccacccctattgtcgcggcggaagtcacggccaccaaaacgggcaccgcctgatcggcggtttctgccaccaccacctccgaacgaagaacgggccgagtatcgttcaagccattgaggaacctcctggtttgcttcctgcattagctcacataacggcctcgccagggatagattgccctcgttgaaaaatgcagttgccaacccagacttccctgctcgtcctgttcgtccgatacgatgaacatagtcatccatgtcctttgggagtccaattgcaaattggccnnttangttntcttnccnggcanttttnattcccaaangaaggtttgncn

SEQ ID NO: 387484 - DNA, 607 bp, Oryza sativa
ccgaacgaagaacgggccgagtatcgttcaagccattgaggaacctcctggtttgcttcctgcattagctcacataacggcctcgccagggatagattgccctcgttgaaaaatgcagttgccaagccagacttccctgctcgtcctgttcgtccgatacgatgaacatagtcatctatgtcatttgggaggtcaaaattgatgacatgggcaacatgaggtatgtcaggtccccgggcagctacatcagtcgcaccaaggatgggtgttgctccactcttgaatgatctaagcgcgtactctctttcctgttgtgttcggtcgccatgaatacttgttgcagggaacccgtttgtgtaaagccagttctccaaagcatcagctcccctctttgtctccccaaagaccagagtaagcgcttgcttcccatgagtaccattcgctttttgggcatggaggagatccatgaggtaacttttttgacttgcttcaaggataagatatgccttttaggcacccaaggcagacttgagccccctctctcgcgcgccggaacccgcccccccctgcaatgtacgcgtgggtcgggcgggaattccggccggtc

SEQ ID NO: 387485 - DNA, 346 bp, Oryza sativa
ggaatcagccaaccaagactattgccagtaaacgagaaagccagtgcagtaacaaccatccataaattgaaggtaaacgggcgcattttccagcaccatgccaaccaggctgattacaaatcccaacacatcagatgttttcagggaaatcaatagaatatgatcgttgctcgcgacagccgggaatcagtatcagtcccacgaactagttgagccttgaccaccaccatagccaccgccatatccaccgccccctccataaccgccgcctccatagccaccaccgccaccaccataaccgccgccgcctccacccctattgtcgcggcggaagtcggacgcgtgg

SEQ ID NO: 387486 - DNA, 892 bp, Oryza sativa
ttttttttttttttttacaaatctactctcgttttactccacaagaacaaaattatacatacaggttgctcctcatgcaccaggtaatgtatttcacttctagcttaccgatctgttcccttagaattgacatgaaaaaaaattagcctcgctatatcacattacacacggtatgatctgatgacatcgttcctaacagtatcagcaacacagtaattaattcagtaatcatcgtagtcgtcgtcgttcctgttgagaaaccgcctgacagcgccaacgatcgttccgagcacgatgaacagcaccagcgtgtcgaagccgccgccgacaccgacggccacgctcgggccgggagcgaagaacgagaacggcgaccaaccgtagccgtagccatagccgtaaccgccgaccagaggcggcgccaccggtgggttgatgtagatgttcgtcctcgaattgtttatccgtggaccagacggccgtggcgcggaccgtggcgcagaccggaacgcctgcccgccgaccctcccgccggacttggccgccatggcatcgtcgacaggcgagagcgcgagcacgccggcggccagcgcgaccatcgccagcttgccaagcttcaccggaagatcaccccgcgtcgacggcgcctcattggccgccctgcacgagagcctcgccgatggccgccgcctcgtcggcttcggcgccgggagcacggccgccgtgctgcccgcactgcacagtggccttccggtgaggaagcaccggagagacgtgggtgctaaagccatggctgctactcgagctttcttgcgagcttagattgagcttttgctctcgattcgtcttctttctctcagcttcgtcttcggacgcgtgggcggacgcgtgg

SEQ ID NO: 387487 - DNA, 500 bp, Oryza sativa
acatggcaacacacggatcagtgggggttattcaatatcaaattctacaataccaaaaatggttatggttttacaaccacaacctcctttgaatatctgataaatctttcatccattacaatttcccggaacaatatattattagttcttttttatcaacatctatgttaagacaagtttgctcgatatcaacttacatcagtcattccttcctctgccgctttattggggattgggaagtacctgagttgattccctgttgcttttgaggacatctatttgcataatgaccttcctcatgacaggtgaagcagattacacctaacactcgttttggtgccttatatgtcatagctgtagaattgatcttatcagaggatgattccagacttttcatgggattattcctaccacaatggcttgcctcaccacaattcaggcttaggacagttggtactgttccattatccgctttaggttggcgttcatcggacgcgtgg

SEQ ID NO: 387488 - DNA, 555 bp, Oryza sativa
ggcaaggaaaataacaaggtcaggcttgccctgttctttttactgaagaaaaagaacattttatctgcctattatagaaatgtaagcatcacaactcacaagaatgcaatgcagccaatgaaccaaggccacaagatcgtggtgatactatcccaatcacatcgcctcatatttacacacaacctgaacctggagctaaacgaaaattggaaaaaccaaaagggaacatctgctgctgaaaagaaaagccactactgcttttgagtgggttgtccagtccagtaaggtcttgacagccacaagtatcttctcagggttgaatggaccagattcgcgatccattatttggctcttccaccgcatgccttctgtaattgattggatcttcactaacacctccaccgtgtccctgaaaatcactgtcccttcaggccttagaatccggtccatctccaggagaatgtatgttacgtcacacctgtcctgataaaagctgaatattttatcagcatggatgaagtcatatgtcctccggacgcgtgggcggacgcgtgg

SEQ ID NO: 387489 - DNA, 497 bp, Oryza sativa
  unsure (1)..(497): unsure at all n locations
cgtttataccattattttcgctataataaatgtagtancaaaatgtgggttgagacaagtgcaccagcatctcattctcatctcaaatcactagcttggctagatgccaatggccgtatggtatatacatttggcccgttcttcacacatcctgctgattcaaatcatccatttcatgggcaacatctcacattttcatttcatttcatttcatatattcttcttcttcaacacctacgtactactaatttgctgctacaagagtcttgtatgcatatacaaaacctcaaggctgtggaacctcttccttcaacttctccactgaacagttctcacagatgaatacagacaacgtccgtccatctcaataatacagtcttcttcatcagccttgttccggcttgtgttccaacaagctgtcccagcggcttttcaggatctcgtatgcgtctgaacatggaagtgcgattacacgggagccgccgtcagttggcagc

SEQ ID NO: 387490 - DNA, 829 bp, Oryza sativa
  unsure (1)..(829): unsure at all n locations
aaaaccttataccatcacatagctttatagaagcctagaagagccatttttcaattttnatggcttttagtccacaatccaatctggttatgacacactaccggccatgtgaacagaacatgcttgattttgaaattcacaatatatttggaagatatcagtactggcataatggttctagtttttacagtacaattagcaagcaggctccaagagattttgcacatatcagaacttgctaaagaacccgcaaatatggtcggagacctcatcaggcttctcctggttgatgaaatgggcaacaccctccatgataaccacatcttcgagatttggcacacatgcctttagaccacccttgtggatgtaatcttttacacctggaatgttgtacgtaaggtcctgatctccaacgatgaattttgtcggaacttttattggaactccagtccatggtgcagtcagctcccagttcaagtctatgcatctgtagtagttcaatcctccagtaaatccagtcttctcaaatttctcgggcatagtaggaaatgtcttcttctgacagccatgcagggcaagtaccatctgaatcaattgagtcaaataaagtcttgcctgggggtataatcagaggtgctgccttgcgcattccatagaatttcttcaagagacactttatactcacctctaacccaaattcagctttcggggccacnccaaggtttctcggaagaaagcaagatgtagtgggccggtccccgcacacggccctgagggtttgtacggggccctcgtggggttcgcgggtggtactcgacgctgagggcgt

SEQ ID NO: 387491 - DNA, 1044 bp, Oryza sativa
ggagacagatccagctttatattgtagaaaaattgttttgcgctagacattcatccagcacgttttcccatttttttgtgagtacacaccaaaatgacagatccagcttcatatcttagagaatgatgtatagcatctaagggaatggaatcaatagcatatactattggctgtggcaactagtgtcaattcacagcatcacgaacgagagtaaaatgacagacagtggctttttgatcccatatatccaaaattattacaaaattttggaatttgtgaagccaagcagtttggatgttaaaagcaaaacagaacttaaatgtgaatcgcctttgtgaaggtttgcaggcaggcctccttcaaggcttcgctcacggtgggatgagcgtggcatgtacgagctatgtcctcacttgatgctccatactgcaaagcaaggacagcctcatgtattatctctccagcaccgggagccatgatatgcacgcccagaatcttgtcagtttccttctcagccaccaccttcaccaagccctcagcatcgtcaatggcctttgcacggctgtttgccaacagcggaaatttgccaacacggtagggaattcctaaagctttcacctgctcttcagtctttccaacagacgcgacctctggatgtgtatagaccacaccaggcactgtgtcatagtcgacgtgcccctccttgccagcaatgaactcaacacaggcaacaccatcctcttcagctttgtgggcaagcatgggcccagggatggcatccccaattgcatagactccattgacgttagtcatgaagcgcttatccacgaggatcctgccagctttgtctgtctcaacaccaacactttccaacccaataccagcagtatatgggactctttccagcagaaaccaatacaatatcagcttcaatgacactctgctcacctccagctgcaggttcaagtgttagcttcacaccatctccggaggtatcaaccccaactacctttgtcttgagcatgaacttcatcggacgcgtgg

SEQ ID NO: 387492 - DNA, 494 bp, Oryza sativa
gacgcagcagaagatagttatttttccatggcaaatgcttaacagtctctacaacactatgtacatctgatgatctgaacataggacaggtggacacccagggtccacggtggtttaattttcacctagaaacaattgttgctttgaaatgacatcctaccatttctgttacaaccttttcacccccggataaacttaagactacaagcctaacaaccatacaacagttcaaaagataacgccactaaaacctgggaataaaaataaacgaatcttcaaggcaaccccaaccatactattagacaggctgtggatcatgatgcttgagtaggagctgtactgatgcatagtgatgaagagattctggaagttctatatctacataatctattgcagggatggcaattgacaaatcctctgtagaaaacggtatacataagtcgtcatctaataaaaaggaatttgatacgagattctgagtatctttgtttact

SEQ ID NO: 387493 - DNA, 454 bp, Oryza sativa
ttttttttttttatgcacaatttgggcagcagaagatgcacaactgataataatgtcatcagttttttgaaataagtttgtctcgtctttaacagcttccgactgacaacatccataacagcgcagtctgcaaaagagcaacaatcaaacgagtacttaacaggtaatgtcacgtactcacgtcccagcaagagcacaaccacaaaatacataagtcctgcacataatactacctactatgttttttcctcttgtttttaagtttttcgatttttttggtttttatatttttatatttttttgggtatttctatctctcttcttttgtatgttttatttcctttttttggttggtttcttccaaatcaactggattttagtcctcactcctcaccccagtagatgaggtacgcgtgccgtaaccagagaaaactcggcattgccgtgtaatctt

SEQ ID NO: 387494 - DNA, 710 bp, Oryza sativa
  unsure (1)..(710): unsure at all n locations
nnnnnnnnnnnnnnnnnnnnnnnnnnnnnnnatgaacaactgaaaagagctatatatgtgattattatctattgacaaggaacaaatacaacgttttttttttatcaaatacaacacctcgtagtttataaaagcgaaaaaaagatctgctcattagaacttcggttttatgagaaatggcatcttgtcagcaaatggagggtcagagtatctccctgtaaggatctgcgacgcgatgtggaaattcgcagcttctgtgtaatggattccatcccaattgacaaattctgtactgtccttgcaccctttggctgttacaagattaccattcagagacgctgtctgcccacaaggtactctactgccatagttcaagggtggccctccatatccacagcatgcttggatgggattctcgaacccatagcgcgaataattagcgatcaggctgtacttgatggtgtagatgtcaacataagtgatactagccccagcgaattcacctcttaactttgtgcaaagtgcatgcagctgtaagttgaaaagctttgcaacacgattatgctttgctacacaacgaagttcatccagctgggatcggctttgccgaaaaaagctccgttttgaggtaagcagccaagangacctgtgttgngaatccagaatttcctggnaccttgctcatataattctttnaaccccagtttcga

SEQ ID NO: 387495 - DNA, 419 bp, Oryza sativa
tttttgcacatggagaggtgctgactttatttattgccacattttcatacacataatttactgggtacacctatagtggtatgttacaaatataaaagtacaagtgttttaacaacgataatacatgttttctaatgcaaacatgtatatttggaccaacgcttgtaattgggcagtgaatgcagcaagtttgcaaattatttatttaactgcattggttcaaacttgtgtaaacagagtagccctccaagatgtaaatcatcaagctactgactgatagctattacatatctaccggtaatggatggcgaatgactggaacaagcgaaagatcatgggagccgtcgtgctattgcccccatctcctccttcatatcaaggttcccaagctccgtccggacgcgtgggtcgaaccggga

SEQ ID NO: 387496 - DNA, 486 bp, Oryza sativa
tttttttttttttggcttgatagttgatacaacttaatttgcaaattaagcaggatacaaccactgcaagttcttcaaattcctccccctcttctttctcaactcataagacccaaaaaaaaaagtgaaaacacatagcaccgatctggcagttgaccataacttcataaggcaactcaagatcagtagatcactcacacacacagttcatcatagctcctcaaacatgcacatatcagcttcaacttaatttagctatgcatgcatgcaagtctgtatcatatatgtagcagtatacatacatagatagatatattatcatatatatgtatatatgcatatatgcagggtaggttcatcagttcagaggccaccgtagcggatgtcggagaacttggacttgatccacttgaagctgctccggacggtggacttgagcctcccctgcgtcgcgaacacgttgtactccttcaccctgccgcggcg

SEQ ID NO: 387497 - DNA, 401 bp, Oryza sativa
tcttcagtaaaaagaacagggcaagcctgaccttgttattgggggggccaaagtttattgacaaaaaaaaagggtgctatggtacaacgaaaaagagcttttacactatgatcttgcgaagggcttgctgtaaatgggaaggcatcaaaacttttgtcgaaccaaacaacgaagccaagaaattctagtattgaaagctccaggccaggatgaagcccaggaggggtccttggtgggtgatgagggcaaagtgggcgaggaggccggcgacgtacgagaggcccgacgcgctcacgccaatgctcaagtagtaaaggaggctcttcacgtaacttccccttcgtgccacgtgtgccttgcccatggccagcaacgcgattcaccccaatgacgccggcggc

SEQ ID NO: 387498 - DNA, 365 bp, Oryza sativa
  unsure (1)..(365): unsure at all n locations
gcagcttaatctcatggatgtccaattcaaggagcagcagaagaatctgagctcattactcattgttcatctcttccatggagattacaagtgctacaacttaacaagggtgggcggggatactaaaaaccggttaaacaagagggaaacctttttttttaggatttatccaactccacagtggagaagccgcagaagatcacgaggctttgcagcaagcgagccagtagcatcacttgatcactctgcttacaatctgtaacagattactagttctactcggcagaaggggtgaagaacagcagcttcacaaaaagcccctaatgctaaaaccaaaaattacaagggtcaaaaaaagaagangg

SEQ ID NO: 387499 - DNA, 613 bp, Oryza sativa
gaatggacatgcctggggctaatgacaaactagtccggttcatcactactgccccagtgacatgacccccggaaatggaaatatatatatagtagtacttctgatcacagatatgacaattcagatgggtacaacatgtacacatgcccagccattttggccattttccagcaaaagacagcgtatataatccactagaagaattcgatcagttttctcttctcaataaaacaagaacaacaagaattcagtttcacccacagctacttaaagactacagagacagtggtagtaaaactgacatccttgtgggtttcacagggaaacgatgacttgtacaagccaaacagaaacagaagtgaagtgaagtgaagagaaaatttgcataaatgagaattcagacctcggccttgtgctcggggcgatgggtgaactcgaagtcgacgtgcacaaaggcgcgctcgacttcggggagttgctccagcttctcctggagcgactccccgatgtcgggcgcgtggctgagcggcatgtcgccggggaggaccgatgtccacctcacgaagtagtgagtcccgaagggtgtaggccctcaccgtgtcgatgtgccgga

SEQ ID NO: 387500 - DNA, 949 bp, Oryza sativa
ggttcttgcacactggtgcgagtgcgaattaccatgaaacgaatccataaaacagcattaaccacaagtctatgccgaatgcaaaaacatctccagatatatctttaattcgagctatctaacataatgccaaaaagtgctaacataaaccaacatattaaggacacaacctgcttgaattctgaaacccagataggcaagctacagaatttgggcccagttactcagcacagaaagttttatgatcgttacggaaacaactagctgcaaacttcttctcattcctcatcttcttcctcaccgtcaccaccaccgccgcttgccttcttctggttcttccgcttcaccctaccaggggggcctccaccgaatgggcttgtcagtgagaagtcaatgtgcttctcagactcaaccctcaccatgaacgacgggatgttgacaatttgcctgccgaccctgatgtggcgttgcctgatcaggacacgagcatggtggatggacttggccatgccagccttgaagacaagagtctgaagacgccttgcgaggaagttctcaacagtgagggcaaggacataatcaagcttgttctgcccatcagcaaggagcccataacggttcatgcggcgaagcagtgcctcaccctcaaagatgcggcgtggattcttctcatcaagtgtgagcaggtgccttgcattgttacggatacggctcaaagcatactgaacacgccaacagtcacgcttgcacctcagtccatactcacccactagcttcagctctgcatcaagacgctccttctcgtaagggcgacgtggcttcttgaatgtcttaccatagttgcggtagaagctgacgtgaaccatcgtcgccggaccgcctctcacgggccgccgccgccgccgccgattgctggagctttggtttcacgggaggagcggacgcgtgg

SEQ ID NO: 387501 - DNA, 1274 bp, Oryza sativa
  unsure (1)..(1274): unsure at all n locations
nnnnnnnnnnnnnnnnnnnnnnnnnnnnnnnnnnncacagtccatttatctttcacaccgattgccactgtccattataattcagcagattgcagtcgcagatgaccctgaccaatgactatatacatggacgaactattttccaaccttgcatagtacataaagcaattgatttttcagacacaatcacattctccgttgttctggcgtgccgtgcttacaaatgtaataatcgagttatctagatatacatttccttgaacctcaatgccggccccagtatgtcttaagcagctaagagccctgaactaccggcttcatcatggccatgtaattcttgctcgcggtaatcgtatcttaggatgtgtaaagatatccatagacctcactttcgactgttatgatctcccgagtagaattagcatgtactatggggtcatatgttggcagggtgatgtatcgagggcaatacttcttcttcgatacgttttcattggtagcagtagtagtaaggcaatcaaggggcttcaaatctttgtcaaagcataacctcagttcttcaactgagcccttcttgcaaacaatttgcggtgaggccccaaaagcacatttgatggcatcaatgacatcagttagcgcatattgtttaccatttgaaacatggataccaccacttgccaacatttccgtgacgttgtatttgaagtagaggtcaagagcagtggtgaaatactctaattcatccttaactaccggggatgagcatgttccatgtttctcccactcatgagcccagaagggccccttgccactgaagcaagtggaagaggatgagcagtagagggacggccagtacttctcaagcgtcggcttcaggggcaatatcttgtccatgtcgaagctggtgtggcggcagcacgccggccaggtcccgtcgtcgtagtccggccacagcccatggatcgtgaacgtctggagcggctccgagcggcagcatccgttgatggcgcagcagtggcgggttgaggcgcagatggtgccaggccactgcagcgccagcgcgaagtagtcgaactcccgctgcttcttccccacccgtgacgcgccgacgccgaccgcgcgaccgccgctccgaacagatcggcggcgaccaccaccaccaccaccgcccagatcgccaccatgcgcggcgccttcctcgccgtcgccatcgccgccgccgccgccgcctcgccctcgactgattccgccttcctcttctctgcggcttggtt

SEQ ID NO: 387502 - DNA, 744 bp, Oryza sativa
  unsure (1)..(744): unsure at all n locations
ggagcaacttccaatccataaaaacactaaaaacagcattggtttttttgagtataaactagttcaagcacactggtacgagtgaggattaccatgaaacgaatccataaaacagcattgaccacaatgccgaatgcaaaaacatataaaacaccaaaattaaacatctccaggcatatctttaattcgagctacctaacatggtgccaaaaagagctaacataaaccaacatctgaaggccaacctgcttgaattctgaaacccagataggcaagctacagaatttgggcccagttactcagcacagaaagttttatgatcattacggaaacaactagttgcaaacttcttttctcattcctcatcttcctcctcaccgtcaccgccaccgccgcttgccttcttctggttcttcctcttcaccctaccaggggggcctccaccgaatgggcttgtcagtgagaagtcaatgtgcttctcagactcaaccctcaccatgaacgacgggatgttgacaatttgcctgccgaacctggatgtggcgttgcctggatcaggacacgagcatggtgggatggacttggccatgccagccttgaagacaagagtctgaagacgccttgcgaggaagttctcaacagtgagggcaagggcataatcaagcttgttctgcccatcagcaaggagcccataacggttcaagccgcganagtggcccttnaccctcggagaagggggggttt

SEQ ID NO: 387503 - DNA, 801 bp, Oryza sativa
  unsure (1)..(801): unsure at all n locations
nnnnnnnnnnnnnnnnnnnnnnnnnnnnnnnnnnnnnnnnnnnnnnnnnnnttttttttttaatcttaacaactcccctttccctggtgcaacttcgaatccataaaaacattaaaaacagcattggtacgagtgagtatcactagttcaagcgcactggtacgatgaggattaccatgaaacgaatccataaaacagcattaaccacaagtctatacctaacataatgccaaaaagggttaacataaaccaacacctgaagcacaacctgcttgaattctgaatcccagataggcaagctacagaatttgggcctagttactcagcacagagttttatgatcattacggaaacaactagttgcaaacttctgttctcattcctcatcttcctcctcaccgtcaccgccaccgccacttgccttcttctggttcttcctcttcaccctaccaggggggcctccaccgaatgggcttgtcagtgagaagtcaatgtgcttctcagactcaaccctcaccatgaacgacgggatgttgacaatttgcctgccgaccctgatgtggcgttgcctgatcaggacacgagcatggtggatggacttggccatgccagccttgaagacaagagtctgaagacgccttgcgaggaagttctcaacagtgagggcaaggacataatcaagcttgttctgcccatcagcaaggagcccataacggttcatgcggcgaagcagtgcctnaccctcaaagatgcggcgtggattcttctcatcaagtgtgagcagatgccttgcattggtac

SEQ ID NO: 387504 - DNA, 725 bp, Oryza sativa
  unsure (1)..(725): unsure at all n locations
nnnnnnnnnnnnnnnnnnnnnnnnnngctgaagcaatttaccaaatatgaaggtcgacccatttgatatattattatgtatccaaggtacacagcttcacagttggcggcactttcagtatggagtatatacatcggatcaagtggtaaaaaaaccagaaagacttgagcaagctccgctctaacaaacaaaaatctatggatgtctgatcatatttgaagcgaaagaaacgtggcttacatacacaacttttttccctttcagtaatagaaaaaagaagacctaataataagttggctgcgaagcttaacatacaccataggatcattcatcgtgagctcaaataatcctctctttcagatcttcgaatttcgcaaacagtttgtccctgctttccttgaagaggaggtaccgtgaagtgaaccaaattgagtaaccagttcctatgagttcaagaacttttggaaccaagggaatggaatcgattgcagcaacaactgaagatagaacccataggacaaccaaagcaccggatccatagagcacaagagttggtgtctcttggatgtccagcttactaaggatgtcatccaaaacgcggtcctcctcggctgcccccgacgacaccggctccaccgccacggtctccagagacccgccattagagaccgccgcgaccacctcagctcttctcctccgccgacggcggatcgggcttgtactcc

SEQ ID NO: 387505 - DNA, 446 bp, Oryza sativa
gaaggcatcaaaaggttgtattgcactattgttgtaggctaacactcataaagacatgtcaaaacagacagtaccttgcagaatgtttaacactacaacttgagtcatcggcattgtccactggagaacagccatttttctctgctggaattataaagggcctccatttttttcagacgcttcagaagacatacatacatatttaccaaaaatggacatataatacaacacaaaactatcagatcaattctcaaatgtgcacctctccagattatggcgttgtcagatcagacaataatatggcataccatcattagcaataacaaaacccttagtcgtcatccttgaattccctgcggtcaagatagcgtggttgaattccagagccttgacatgtggtgcatgtcaacgagccaaccccatcgcagttgacaccggacgcgtgg

SEQ ID NO: 387506 - DNA, 1333 bp, Oryza sativa
  unsure (1)..(1333): unsure at all n locations
aggtgcataagtgtagaaatgggggtactgtgtatacacacttatactgaggatatacaacaaatatactgtctatgtacatgttgacttaatctttctatcttctacgtacaagtacatacctacctaaggatcatcaaaaattgtcagctgtgtcttgtacatggttctgtgatctgatctgatcatcccattttgccattcaagaaaagcggtgctagctagctaccatctcatgatctggtacaacgtgtctgaatttgttgttccttcctgtctgatttcctgaattctttgccgtagccttctcctgtggtcgtgtattttccacaacccatggcaaagcacaacggtagagtatatgccgtgggtgatcataggtgcaagaatattatctgtctggatccactcaaagccaaggtagaaagccaagattccttcaagaagaggggaatatatcttcctcatttgccgcctttcataccatgctgcaaatagtttcttgagattctctcgcccagtatttgaacgcattgctggtgtcaccacataagtaggatctttcggggcagtagccacataatagagtgatcctgtgagagccgcagtgatggctgctgcaaacgtttgagcaaatggaacaaatggaggcaccatgccactcagggatgcaatccctcgagcgtctttcatgagctctgtgcctctcagaaaaatatcagccaacgcaccctggacagcgacacgatagaatagctcctctccaattgagctagcagttacaataagaatgaactgccatggtgacatgccatagaagaagctgcgaagctcctcatcctcgacatccctgatggcggcgagcatgaggtgaatatgtgacaacttcatcgtcgaggataaagaggcaaagccatatccggcggagctgcatatccgagtccctcaacaagcgcagagagagatggatggaagccccctgtgcagtctattccggccatctggcatatgaatctcccagtaagtgccatggcggcataaatcccaatgccatagctgagcctgacaaccgctcccagcctctcccacatggccagctccgcgtcccgggctgcgaagcccccgcctcctccgcctccgccggtgacgacgggggcggcaggtggggcagcgacctccacgactctggggccatctgcagccaagcggccgctcctccgttggtcgccgcctcggccctnagcngccggtcggatccatctgcgaactcggggggcgaagccganngaacagtgtgtgtagnggagcctgagcctgntnttgcaaagaggcc

SEQ ID NO: 387507 - DNA, 465 bp, Oryza sativa
ccaaaggtcacacaactaggcaaaatatagatgaattcatacagcggcccatacaaatccctggcatggctacatgcctacaaggctacaacacttgctgatactactgcttgctgctacgctacatgcagatgaacgggcaggcttcacaataaaaaatattagcctgcactcaaccataaggcacaacctgtacacatcaagaacaatcaagaaactgtacagaattgagggatgcgatcatacagaccagcatctcatctcatgtcatctcatctgcctgatgagaccaaggacctctcttcagagccctgcttgaccaatggttttgcgggtggagaaagctttgtgcttccacgatccaattcctgggcagctgcggaatgttcgctaggaaccagttctggtttcttggtgtagttgaactgcagatccttgttcgcagccagcgccaatagctccgac

SEQ ID NO: 387508 - DNA, 406 bp, Oryza sativa
  unsure (1)..(406): unsure at all n locations
cataattttaaattaaattattaaatnaagaacattctgtaccacattgagccggggtcgttcagacaaaaaatcgtatctctgtatttaaatgtaacaaatgacacaccacatatacttcatctgtagctataattccgggtaaaatctgctacgaatctagatgaatagatacagtaaccccaccaataaaacggaaaacgaaaggtagcaaaatgaattctatgagcctaatcatgaacttgccgttgcttaaagacagttacagccacttcgtccagaattgagagccttcagttctttcaaagtgacgtgactgaccgattagcaataacaaggacatggtcaagctagctagtacaccaggtttatctaacagcttcctcctccggcagttaagggcggc

SEQ ID NO: 387509 - DNA, 1329 bp, Oryza sativa
ttctttgtatcttttccattaactggttggatcattagttcatgaccagcaagggatacatcgatgggataatacgttttctgttctactttttacagaggttagctttacaagaactgcaccattctgtggtggttattggttcagctacacaaataataactgattggttcaacacaatgatcactcgaattaacacactctcgtcagctgttattcctaggcacaaggtggagaggagaaaaaaaaaaaacacccttcccttctatggtgtgacacaggagtctttttggaatctactacaagcggcaagttattatctagtagaagcagcgaggcacagttttgattttactatgatatgagaatcatataatgttttcagttgggtcttaatcttatcaacaatgttaccaccaaaggcgagtttccggttgacagaagacaccagaaactgacatatccccttcactgctatatacctagatgccgcttctccaacgcaaaaatggccagtcttttcctcacttgtattatttttttcctctactgaaccatgatttccgaactacttgccgggatgtggcgctcatgtttctctaatagttcatcacccttgtgtgactgagataacaaagggccagaatattcaaccctctctccttgatcatgatcacccttgatgctgttttttgacgagagggtatccccaagatacattgcattagaaaaattctgagagtggtaaagtggtcgtaagaatcaaaggaatctggacgtcctaactgtgaccatttcttcagaacggcacgctttgctgcatcatgaggctctcgaactttggagttggcacgtgctatatgcatgtctctgttaggttgttccttcaagccgaggttctggttctctttagctggcatcttattgtcctgatctaactcagcagtaaattggccccttgaactagatttggtccgagatctagcgaatgaacgatcttctggtggttttttagcccaagcaaagccactagatgatgaaacaatcaatggtccagagaaagggatctcttctcgtgaatcattcttaacatggcgagacctttctttgacttgggccactgaaactggctgtatgtctgaaaataacctagcatcaccatttacctttgtacgatccaatattgagttgtccttggttccatttgctttagttttggactcctctttgccatcagtttgcttattaactgtagttgtttctcttgcagctctgctgagccttgatttccttgatgcttctggcccatgacctctgccggacgcgtgg

SEQ ID NO: 387510 - DNA, 769 bp, Oryza sativa
  unsure (1)..(769): unsure at all n locations
tttttttttttggaaccgaaatanccacaggagattattgatgaattcaagccgcagctacatttgacggcgaaaaagaacaacactacagccggtagtcgagaataccatgcatggttatacaaccaaacaacatgttgtcaacaaggaagtttagactagttttgtttgtcaagagctaaagtctgtgcattacggcacaaacgttttacacacatttccttgagctctctttgctcaacccgactcctccacagcttgttatgtcggcaaactgtcatttttaattacggactagcacctcctccccttccaggtgctcttggcgcttgttcagttgctgccatgggtggcaacttctgctgaagtctcactactgtagaaaccaaaagcttgtcaccaacaatctgtctcagctgcttcactaggtcaggcctgcttatctttctcctcttgaattcttcataatatttatgcaccagatccatgtccgaacggggtactttagcggaaatagcagcaaaaaagcattgaaaagggcatccaaggtgaactaggagaccttggacttggagcacgcccaagcatacatgcttgttgttcatcacctgaagacgcaatggtctgtagactgtcatccttggttggattgtctagtgcaccagaatttcttatctcagagatattggatgcagtatctccattgttcatgtaaggtactttgataataacagcatattcgtgcataaatgtgcnttatgcacattag

SEQ ID NO: 387511 - DNA, 785 bp, Oryza sativa
  unsure (1)..(785): unsure at all n locations
nnnnnnnnnnnnnggtcacagacacgaataacattctcggttattacatacaaaatgaaaagcttttccaagtatgagcgtttatttctacacatttgggctctctcgacaatcaactgatgataaccaatcttaccaccgcaatatgctgttcaacaccagactaggaacaatttgaccaaataaccccaaaagcaaaaacaagatacgcaagaagaagacgccatgatcctcgcccatgttgtccctgaggcgagtaaaactaacgcacgcaccgcagccaccttgccatattcacagaaaccacctcatcatgcactcttcgcccttttctcctcttcgatcttagccttgatgtacgagtagatggcaacaccagctatggcaatgcaagtaccaattccagtctgtgtggtaattctgttgccaaaaacaatgatggagaatccaatgacgaaaacccttttcaacacattgccaacggcatgcgtcagaggggccactcgctccagagtgtttgtagcaacctggttatagaggtggtagaacagtcccacgaagaaaaggtcagaaacgaactttgtcaagcctacatttgcaantgcatcgttaaaaccatgctgcaatagttgaggtccctcgatgatcactgctggtggaatgcacacaataagggcaattattgagatataagcatacacattggtgctatccatatcagtcatagctttcttggaataaatgctccggtaagtgaatgagatgttagagatcatagcatttat

SEQ ID NO: 387512 - DNA, 1704 bp, Oryza sativa
tttttttttttttttttttgatcagaaccaagcacttattgcatcttccaacagaagttaaaaacattccaaacacatgtccacaacggtgcaggttggttttttgctaaaatcacctctaagcaggtgatcgattacagacagtggcagctgcgataaccctaataggtactggatctcaacaacaccaggaggggttcgtggaaatcatcacttgggcagaatgggatgcacaaaaatgggacagcactggatggaaacgtgcggtgaaacagttgcacatagggggtttttggatagtgtactagggagttaaattgggaggtccaggcccctacgaatgcacacgcatcctctttacatcgttctctggtacatttgcgtccgccccgttgcctcgtgccgtgccttcacctgaatttggaactttttcatcaggaacaatggcatatctttctgatggcgagacccagactttggctgcaaatggtacagctgttgatggctctaatttcttgcagccaggaccatccgggcttaaggcatcaatcatcacaggtttgttcctgtcaactatttcaccatgaccaagttgtccgctagtacccctcccccatgagaaaacatttttcttttctgtaaatgcaagagtatgcctccacccgcaagcaacttgggcaactttctgatcctctggaaacttgacctgtactgggaaacagtgatcatcagtatcaccaactccgacttgcccaaacttgttccacccccaaccataaagctttccatctgatgtaagcgccattgtatgcctccatccacctgaaatctgcgatatagagctatcctttaaggcctctagtttatgtggaactaaatgatcttcaaaatcaccatgccctagttgaccatatttgctccaaccataagtatccacactaccagaggaagaaccagtaattgtatggcgccatccacatgcaataagcaccatcttctcttccctccacagaagatactttctcaggtaccaaccgatcattgcgatcaccaagccccaagtttccatatcgaccccagccccatccatagaggtcaccatcttcagttactgcagcggtatgttcagcaccagcagcaatcattttcacacaaactccctcaaaagattgaatcttttgtgggagcaatgagtcttcagtaggttccaagacctagctgtccgttttggttgcgcccccaactttgcacttcacctgccatagtgacggcaagacaatggctatcgccgcaagctatctgcttgatctttatcccctgcagggccttgactggctgaggagtgaacacgtcgctggagttgccatggccgagcctcccgaagtctccccagccccagctgtacacctgctgctcgtcctcggagtaggcggtggtgtggtcggcgccgcagatgaccgacgtgatccccggcgcgacggcgtcgaagccgctcagcaccgtcggcaccagccggtcctccgcgtccccgtgcccgagctgcccgtcctcccctctcccccacgagcacagcacattgcccgcgaggagcgcgacggagtggctggcgccggcggagacgagcaccacggctggcggtgggtcctcccggccggacgccgcgcccgcgtcgtcggcggcggacatgaccgccccacgcgtcaa

SEQ ID NO: 387513 - DNA, 433 bp, Oryza sativa
  unsure (1)..(433): unsure at all n locations
ccacaaaatggtctaaataaaataatttcatgatccaatctgggagtcgtgacatataaacactggtcatttactcgggaataaaacatgtcaaggtgactctgactcctgagtcgtcactgactctctctggtgagtgaatttataacgaatgacataatgccatatgcataatttacatggacaaactccaactagtgctgaactgctgatcagagaacgagggagaggaagatcggcgacgccagcagcagcgcgcagagcgcccggcgagcgccggacatgacgctgtcggcggcgtcgaagggggtcagcgcgccgccggggctccccgtccccgggaacgtcggcgacgacccgttgccgaaccccggcgtgaacgggccgacggcggacggcgcgttcccgccggcgtaggtnctccggccatgga

SEQ ID NO: 387514 - DNA, 711 bp, Oryza sativa
gagatcaatttccattaacagcttagctttcaaccagaggtaaaacatggtgcgtactgcttttacaacatcatcagggcagagattggcatcccctataattttaagtactagtctacatgtaacattcttacagcaacaaactgcttacaccatctctatcctttttaaggtgcaagcagcaaacaattcattaatgcaccaccaatccccgcaaacaaacaaaaaaaaatacagtgatgcaagcaacgttcgtgctcctactcttctctgttaaattagcagctttcaagaaaatacccgcttgcctgcgttattgaaatttgcatcttttataaggcacaaatccccttattacctcttcatctccgctgttgcttggcttcactcttacaaacgctgaatttgcgctcggttttagctcaaaacttgaacctgagtctcggacgtaaatcgctccaagtgattccactattctcgagctctggggagcggtcatctgcacattttccccggagtccgaacttgattcggatgagtggctcttcacaccgtcactctcgtcactaccttcagtctgctgcatcactgtgcttagtcctctaggatggctaatgggagcaaaaccgtagtaaggccaccacacgtgtaaagggggaattctagcatctgccgctgattcaccgaatcggacgcgtggcggacgcgtgg

SEQ ID NO: 387515 - DNA, 781 bp, Oryza sativa
  unsure (1)..(781): unsure at all n locations
nnnnnnnnnnnnnnnnnnnnnnnnnnnnnngcataattatattataatcacattccagccataattaattttctagcccatacaaaagcaagtttcagaatacagtttccaacatgttccatacaaaagaacgaaacatgaatacaaaatgttccatccaccatccaactacacaagtcccagccgactacgaagttcctacaggaagtgtcaagttcctgcaccaaaaaaattccacctagcagccactactaagtttcggcgttcatcttgccagcagccaggaaaaaaattccaccaagcagccaccgcacttccggcctgcatcctgccagctgccagcaactagtgccaaaaaatcctgttttccagcaaccaacgcaaaaaaaaaactccggccaccaaaagcgccaaccctgcaagcaaccagcagctagcaccaagttctagcagccacatacaccatacaatagcagccacatacaccaccttctgcaactacactaacaccagccatcaaattccaagctcatccacctcattcctgagcatacaactagcttagggaggactgatctgaccctgtccaaatgctatcatttgtcgaaggaggctctgagtatctgctgccatcttcctcaggctctcaatctcctcagcttgtttttccactttcgcatcagattcttgtgcctgcgccttcaatctttcaagctcctcctgaaagtactgcagactctagcttctttgcatctagttcagcttgtatctctttcatcac

SEQ ID NO: 387516 - DNA, 613 bp, Oryza sativa
ggcgcttcacatattccttttacatttcagtgtaacttttgcaatatataacatgtatactagtatagcagctcaggtgctcagggacatcaaagaatacattacacatacacaaaacttcacataatccaaacgcccgaactatacaaacacaaataacaacacaccaacttaaatatgaaaaataatttagccacaagtactgcttggagttgcttcagcatcaagttctaccctagattaggcatgccaagcttaatataggagggtgcttccttccttaaacagtacaaagatgctgctgccatcacctctggagattctaagctcatcatcaaggtaggttgtgagcaaccaagactcagcattgtcagtcctaattggtatctttaggggaggttgaccagagatggttctagcaactgaggatgctgcattttcaattgatgaaaatatgcccttcaatggggtcaggtcaatattctgcccaaataactcaaacttctcaggtagtacaatagaatcagtcaattgtggagtgccgataatgccgtcatcaaatttgatctgtacacgtttgggacttcgaacccacgcgtccgcggacgcgtgg

SEQ ID NO: 387517 - DNA, 846 bp, Oryza sativa
  unsure (1)..(846): unsure at all n locations
nnnnnnnnnnnnnnnnnnnnnnnnnnaacagtgtgtgaagttttttttcgcttgttattatctccactgatttaatgattttcatacaacagaacatataagctggaaaactgaagcaaggaaacacggctcccagttcccacaaagcttcacagcttcttgttgtccactgcccattaagctacttacaaccgtcactcatctaaatctaaacttataacctaaaaaggcacaacaaacggcagctgatacataagaaggtcaggcaaatggactgctctgggctgcagcgagaagagctgctcggtaggctgacaccttgctgatccatcgaaggtcctgcagttatttttaggggtcgcccggcagctgaagagccagtcctggtcaccaacatctgtatcttccatctgtgtgggtgatggtttccagttcacaaacaaatctgcaagcttcctccctttcttctcagccttgcggcttttccggtcagagctggactgttgtgcctctgttactggggatgctgctgccaagacacttccaacagaacaaggctcttcttgtgcttcgggcacaatctgttgctgctgcttgacaacaggtggttcgacatgcgccttcggtttgttcaccaagccaggtggctcaacacacaacatctccggcttgcttaccaagataggtggatcagcacacaccttgggcttgtttagcagagtaggtcgccctgtgttaagctggcccccaagtaggggacctcctgtccctttcctcaantgaacttgagtactctctctgttgaacactttcgaaagagtgatatggccagccggacgcgtcggc

SEQ ID NO: 387518 - DNA, 466 bp, Oryza sativa
ggattccacccataagtgcttggtcatagtctggattgcaggttcatgtaaagcaaaaggattctacgaagcaaacgccatatatatgacagcagctatttacattagtggccataatgcagaggttctaaacaaatggcgttgcttctaagggtgggtgtgcatactggtgacatcctggacatataaccaaaagggacagtaatgtgctgcatgttgtttccttcttcatccgcttttcttatgtttctgctgactgtcatctttaaatagtttcttagcagctgaggctgaggctgaggctgcaggcctttttgggggaatgtttttggtaggcggtgatggggatgctgatggagtatcttctgctgctattgctagtgcctttgccttgtcctgagtagcagaagatagctcaacagacgatgcaatctgcggaggttctcccttaatttcggacgcgtgg

SEQ ID NO: 387519 - DNA, 425 bp, Oryza sativa
  unsure (1)..(425): unsure at all n locations
nnnnnnnnnnnnnnnnnnnnnngcttttaaaatgcgcttgctgcctttaaatacaaataaatacacacactaatctagtaatacatgtatttatcatctgtacacttatcattctttcctgccatatacatcttgatggagacagcaatattatattgggatttatacttctctttttctactacttttagctactcaattaatcttgcctttcaacaaagaaaccagtgaagaagtgtgaaatgcatcatggttagagctatacatcggaaatttgtggagcagatgtctgtgtagacatcttgcttcttagctcttccaaatgcccttccatgctttccctccatcgaaccctccgggcaaactgtatgaactcggaaaagcaaatctgcacaccctgaagtaagcangtaactctctgtgtg

SEQ ID NO: 387520 - DNA, 405 bp, Oryza sativa
accatagcaaaataaatccagctacaattgcaaactaggttcaattccaccagatcctagatatcaaaataaggtcctagcctcctaggttaacttaacaaatgcagccacaagagcaaactagattcactaagtccacactaggtccacccacaaataactcagcaaaaaaaaaaaaatcaatgtccaactcagccaaccatactttgcaacaacctcaatgtagtcctcctaggcatcttatattggctccaagattccaaagagtagtccatcaatatactcctatgtattagctagcttcagagcttttgatagagctccatctgaatgacacagacatacttatggatctagttactggaccagtgtttttttgtccatacacatataatggaactattt

SEQ ID NO: 387521 - DNA, 1100 bp, Oryza sativa
ttttttttttttttttttgtaatttgaaaagaatgcagtaccgtagttacaagacttcctccgttttcatattgtaagactttatggcattgcccacatctatataaatgtggacaatgctagaaagtcttataatatgaaacggaggggttattacatatgtaattatattacaattataccatagttaaatttaaaagtttttctttacgagaacttgcgacatgttttcagcaattcccttaaggggggaaaaatgtttgttttcccaaggaaatacttgctactgaaagctgctgagcttgcaacaatcatgctctcttcgagatcagatcctcagggagtcgatgtacctctctcctcgagagaattttccaaagatcccggccctgaactcttcgacgctcactttcctgtatcttgcaggccgattctcatccagcaaaccagccgccggctcaatgtctttctcatcgttcacgctgtataacatggccagggagatcctctccttctcggcgtttgtcaccaccctgtgcaccgggctcctgaagatgccattgcacattacctccatggtgtcacctaagttgatcagcaatgtgtgaggagttgcctcaacgttggaccacttgccatccctctgaacttgcaggccactgacatctttgtcgacgagaagaatcgtcaagagggtgccgtcggagtgaggcctgatgccgaacacaaggtcaggccttggacagggagggtagtagttgaatcttgcaaatgcaggagcttcgttgagtcggtccaagaagtaatcctcatcaagctcaagaagcttggccatagcctgaatgatatcgtctctaattcttttggttcctgatgcatacttgttcagaacatccctgaaagattcaggatggtcaggccagaaggcaagatcttgctcctccttgggttcaactctgagatgcaaccgatcagaccagtccaggatctgatcttggggtaccctacccggtcagggccatacccttccacctggaagttcttgccgtcgatcaagttgctgaattttcgcttccgcggacgcgtgggcggacgcgtgg

SEQ ID NO: 387522 - DNA, 378 bp, Oryza sativa
ttttttttttttttttttaaaagtaggaaaaaaaacatatccaatgtagttaatagtgtaattacattacaattatacaataattacaatataataacactataatattaataatgtctaattacaataccattaataatattatagttacatttgaaagttttttgttaaaaaaaacttgcgacatgcttttagcaattccctcaaggaaaaaaacatatttattttcccaggaatacttgctactgaaagctgctgagcttgcaacaatcatgctactagtacaaatcagatcttcagggagtcgatgtatctctctcgtcgagagaattttccaatgatcccagccctgaactctccgacgctcactttcctgta

SEQ ID NO: 387523 - DNA, 792 bp, Oryza sativa
cagcacccccacatcttttgaatgcggtccccagacagcatgagtgtcttcccacattttaggagttcactagctttttttgttgcatagttttacggcttttttttttttttttttttttgtgtttttgtttttttttttttttttttgcagggaaaaaattaaacagaaaatattacaggacgattaggtgattaatgcatacatgtactccgtaagtgatcatttacattgattaaaaaacaatacactaatatataggacaaataaagtagctgcctttttctagtgagatcaaactgggtggctcaaggaattgttccattataaagttcatgtgcattcttctctcctgctagttcaatccacaacaaaagcacagcagtataaatggcgctttggtcctgcaggagaaaatgacggcgctgaataattgtagcttttgtcatcaccttcggtttctctagctaggtagtggccttaactctcttatgctgaatgtacattaacttatgcttggtgcagtctattttcccttgtttcatctccagggactatgtgtcctgtaactgaatatatggagggacggaggaggcttatttcctcgaggcgacgttgttgtccatgaagcctgggataacatccaaatagatttaatctatcaactatttaatttaggtgtcggtcctaaatccttggcattctccatcaatttcccttggtcccaggttgggagccaatacggctgccgccggcgtgaacacacacgggtgaagcgcctcaaaaataaac

SEQ ID NO: 387524 - DNA, 894 bp, Oryza sativa
tgtaaaattctgttgtagacaattaattaaaccgaactgcttacaagaggcgcgcaataggcgcgccccaggctctagtactagaaagggtttgtgcgctacgccgcgcagcaaaaaaaattaaacagaaaatattacagaacgattaggtgattaatacatatacatgtactccgtcagtgatcatttacattgattaataaacaacacactaatatacaggacaaataaagtagctgcctttttctagtgagaactcgtggctaccggaaatggtccatttataagttcatgtgcattcttctctcctgctagttcaatccacaacaaaagcacagcagtatgaatggcagctttggtccaagcagttgactatatatgttccctgaagcctttgtgtcatattaaactctgaaaagtgctctacattgccataactggaaaaaagaagccctcgacagactacttgccagcaaaattaaaggtggaagctaatcatttaattgctgctccttggcaaactcttgaatccaataaccgtggtgctggtgtgtcaccctgctgcagccctattgatgcactaccattccatggtctggaagaccagtgtgggtcttgcaccggcaaaatgaagaaatataccagcaacaaggctttcattgaaagcaagactgccattttgtctcatgtgattcacctcagcttggatgcctgcagagctagtccataacctccatcaatttcttgttcgaagaaaagtagctcatatcttaaatttactttgtgcggctgaggtgactctgagtctctgactacaatgcctgaccgagcttgttcttcacttattgttacaccattaaaaaaagagcacatttcttgtcaacctataaataa

SEQ ID NO: 387525 - DNA, 1152 bp, Oryza sativa
  unsure (1)..(1152): unsure at all n locations
aattttattcttattatgttgttcttttntttgccaagaaaaaagatttttgttcattctgcattgagcctggctgtggtccgtataacagaaaaatgatacataaactttctgaaggaaattcttggccataagttatacagatacaaagttttaactgtctggtcaataaacaggttaaaacaaaaattttgcaagatgtagtaatgcattggagcagcctagtttcctatcatttcttcagaagcttcctcagcacttcctcagcatgatgctccatctttggtaaagcccagtcatgctggattatatccaggttgtctttctctgcggccaaacccattgtgggattaccgccaaatcccccacccatctgcatcatcttttgtgcatcatcattagcattttcttcaccgaggatcagactgaagagacccctcaaaccaaacaaattgagaaagtaccatgaacggctgctaacatagctcacatcaacagtactcaggtctatcccgttttgcagcattcccctgaatcgcggagtcaatggaaagggaatcttagctgcaacaaaacccgaaaagaagaagttcacccatgcaaatgtaagtgtctgaggaactatcatagagaggttcttcttcatcatgtccatggccatgtttggatctgaaaacatggcagcctgagctttctgtgcttcctctttcgggacatgaagcaatccgtttcctcgtttagtgtaataaaccttgcgtgatttgaaggccttggccgggatgtactgcgaattgatcctcaggttcctcgccctaattaccacttgcccctccttgacgagcttggggtcgggggagggcgacgccgacggggagcgcatcagcttggcgacgaagtagcggagcacgccgatgagcaccatcaccacggagagcgggacgaggacccagtcccggatcgccgtgtccagcaccagctcctccgccatcgcagccggcggcaaaggcctctcacgctaaggctaacccccccacctactagctgcggactgcgcggcggagggcggcggcgacccgggcgacgccgacggcgagaggagatcggggtagagagagatcgccgccgcgggcggacgcgtggtcgaccgggaat

SEQ ID NO: 387526 - DNA, 583 bp, Oryza sativa
ggggggtgcaaccatcaagggacttttgattttatttcatttcttttctaaaaggtcatgatagagatgcataccagtcaattgcatgaactgatagggcaccaaatacaaagcattcagtaatgtaatacgttttcacatgctaaaacacgatttaatcagaagagcagactggcccaagcagcgatgaacgcaaagccacccaacggtgccgtggaagaatacttcctgtcttcaagataagccccagtgtagcacgttccagagaagagaacaatcccagcagtaagaagccctccaaaaacatcggggcgcttggtgatgggagccccgagcaacgccgcggtgtggacgagatggtagagggacgcagtgtgccaaacctccttgtacgcggggttcttggggcggaacatgtgcgcgccataggtgccaagtccaagggcagcaaccccggatatggcggccaccttgtgccacaggctcggatctttcatcgccatggccgccgccgccgccatcttctcccttgcccccccgtccgcccccgctcgcttctgttctcttcgctcgtcgacaacac

SEQ ID NO: 387527 - DNA, 2801 bp, Oryza sativa
gctacttccaagtccgttccctgaataatcacgtcatgaaataaggtagtattcccgacatggacagggcacaacggttaaactaatgaacatggcagctctgtttgatcgaaattagacggccattaatttgaactagagtatcacaaactacgtacatcgacaaaatccccgtatcatggtactatgcattttcgcatggaaaaatggacgtccctcgaaaccatcacatttttaaacaacctaacacaagagctagataaaaaaacaacagttggtggcgacacatcactacagctcgtccttatcatacgacgacggctccgcctcctccttgatgttggatgattccttctcttcaacctcggcctcctcgacctcctcttcctcttccacggccgcgtcggggctcaggtcaaggctcttctgcaccgacctgtagatgctggaggcgaagtccttgggatcaggaaggttgaagccgctctccatgagggccgtctggtacaccagcttcgccgtctgcttcaagctctcgctctcgctgtcctgggcgaccttgtcacggagttccttgatgatggggtgcctggggttgatctcgagtaccctcttgccgcgcatgtacgcctgcttgctggcatccgagagggtctgtgactgcatgatcttctccatgttggcgctccacccgtacttggatgtcaccaccacgcagggggtgtcgctcagccggttgctgatcttcaccgagtccacgctctcggtgtcaagagccttcttccaccagtcggtcagctccttgaaggactccttgaggtccttgagcttagagtccttgccgagtttgagaccctccttggagacgttctggaacttcttgtcctcgtagtccatgaggtattgcatcaagtactcgtcaacagggtcagtgaagtagataacctcgtagttctttttggttagcctctcaaggaacggtgatttctctaattgttccttgctgcttccggtaatgtaaaagatgtccttctgccctggcttcatccttgaaatgtactcatcaagagaggcaagtttgccttccgacttggtactttcaaatctcagaagctttgcaagacggttcctgttagttgcgtcttcaatgatgcccaacttgactgattttccaaactcattccagaacttggcatactggccctttttctcctccattgcacttttttcttcatctgtcttatctttgttgctgtactcatcaggatcttcctcagcaagttttctaatcatgtcaagaagctttgcggattagtttcttcttgatggtctccaggctgctatgttgttggagcatttctcgtgatacattgagaggcaatgtgtccgagtcgacgagacccttctaaaagctgagatacttcggaacgaagctcatcaaattcatcacagatgaaaaccccttctaacatacaacttaaggtttgacttgttagagttgtagtaactctcatagagatcatgtggagccttgggaggaacaaagagcaaagctttgaactcaacatctccctcagcagtgaagtggctccaagacaagggcttgtcatcaccaaagtccttagcaagtgagtggtaaaactttgtgtattcttcttcagtaacctccttagggctacgaagccatatagccttcacatcattcagaagctcccactcagtagtggtttcctttactgtctttgtcttgggcttcttctcttcactctcttctgtctcttcttcctctgtagactcaggggatgattcctcttcttcacttgattcacttgactcatcctcatcagctggcacttccacatcaacctccttggttgcccacaagtaaatggggaaattgatgaactcagagtacttcttcaccaaatcctttagcttgtcttcttccacgtactccttggcttcatctcggaggtgcagtcttatttcagttccacggcccaggggttcattccatgtatcctcagagatagcgaatgatccatcagctttggactcccagacatgctgtttgtcgtcattgtgcttgctgatcacttcaacatagtcagcaaccaagtatactgaatagaaaccaacaccgaattgcccaatgagattgaggtcacccccagtctgcatcttttccacaaaagctgaagttccagatttggcaatggtcccaaggttcttaatgagatcttccttggtcataccaatacccctatcccgaatggagagaatcttcttctccttatccagcttaatctggatttcaagcttagcagtgtcaccttcgcccaaaaacctccttatcagtgagagccaggaacctaatcttgtccaaagcatcagaagcattggagatgagctccctcaggaaaatgtccttgttgctgtagagtgagttgatgatgatgtccatgagtctggacacctcagcctggaactcaaatttctccgctgagctcctgagggtcttcctcgagattgactcagcctccctctgaacaacctcagagtccgtggacaggccatggggaacaccaccaatcttctcctctaccttcggcggatcaactaactcatcagtgctgtcatcagcattgacttggagcttcttagctggatcggggagtgtggtgaggaggaggaggaggaggagcgcggaggagagcgcccacttgcgcatcgtgccgcctccgattcactcgtgttgcagcagagagtggaggtgatgagttcgtcgcctcgccgcggcc

SEQ ID NO: 387528 - DNA, 652 bp, Oryza sativa
tatagaatggcatagcattggactcaatgaatcaatcaggttgccgacatatggttcactcaacagttccgcttgcccaggtcgatacagagtaaatttcaccgcctgctacaaacaatgtcatggacatcaatgtccattctttttttgctttgtttccaagtttacatcttattccaagacaacagaaagagaccgtcaaaattgcagcctttcctagctagatactatcggaggaggattttcaacaaatcagtgcttggcgttgacaagagccatgtgggcaatcagatccaacacacggttgctgtagccccactcgttgtcataccatgacacaagcttcatgaaggaagagctcagtccaataccagccttggcatcaaagatgcttgaccttgcatcaccaacgaagtcattggaaaccacatcctcatctgtgtaacctagaataccttcagtgcaccctctgatgctgccttgatggctgctttcacatcgtcataggatgcacttttttcaatccggcaggtcaagtcgacaacagacacatttggtgttggaactcggaaggccataccagtgagctttccatttagctcagggaggactttcccaacagccttggccggacgcgtgggcggacgcgtgg

SEQ ID NO: 387529 - DNA, 448 bp, Oryza sativa
  unsure (1)..(448): unsure at all n locations
atgtggcacatagaaaattggatggaagcatgtaattccagtaattattcacagcccacaccgttctatcaccagtactccataatatttgttcaagtaatacagaggacaaagacgaccacatgaaactactactaggactgttcaattaccctggccagtgaccgggcgagattattcccaattatgtacaaaccaagcacgtcaattgtgccaaactatgctagcaagcaagaattttcacgagccatcttcctttggcttttgactcagttctgcgtactggcctcccatcagcttcaatatctcagtccataggcaagaaggatctgttgcaagggagtcgcttatcaggcctgagctacaggaagtgacatgccagtatccttgatcaatctcgctcaacaactngtcgtaatccaggcagagtncccacatagaagtttag

SEQ ID NO: 387530 - DNA, 1117 bp, Oryza sativa
  unsure (1)..(1117): unsure at all n locations
tttttttttttttnntgtaaaaaaagtaatgaattagcagctaagcaaatatgctcattttttgcgtcaaaaaatatatatgctcatttgataacctagtaatacatgggactgatactgaaggctcgcagtccatataaatgcacaatcttctgtctccgtgcccgtaacattacgttatagaatgaacaggatagatgttcatgctgacttgatttgcaagcgggcagtctacagaaagcgatatacattgaaaagaaacaaatcacctggacttgcgagccaataagttccaattcaaaagcaactggcccaaaggaaaaacacacacggaactgtgatgacccaatagcagcaagattcaagtcaatgtaataaaccataagaaacatatcaacatcaatggcaaaatacagagacaggaatgatgtatatatatgatatttaactcaaatgaagtttctacaagcaaagtaatgacacttttatctgacatttcaacctcaataacttccaggttcaaatatacaaagggctacacaaatgatgagttcttgattcagaatttgtaccgagttctttagacactatatatttatttttttaaaaaataagaagacggcaattggaattggaagccactccccgccacttgctccagcattggcgattggcatctccagaaccaatcacaaacaccctcttgagtttcacccaacacaagaactaccatcccattttcatcttattttgatcccaaatgcacagctgcctaatgccatcatccatccactggttgccaactgactcatgtaacatgtaataacaatagtgataattaacggcaggataactacacttctaggattctcaacataccagagttcacaaatccttgagctatgaagcccgggcctgtttcaggtcagcctggccagcatcgggcgagcccatgggctgatactgaggtggcaatgttggtggtgccgctgcctgcgagtagaagacctgtgctcgcgtgggatccccatagtcatatccaaaattgcctgccacagtccctgcaggctgtggcgctggatcggacgcgtgggcggacgcgtgggcggacgcgtgg

SEQ ID NO: 387531 - DNA, 748 bp, Oryza sativa
tttttttttttttttaaatccaacttattcgatcatatatttctttgcagtgaaccatttgtattggtcgaaaaggtttggtcacaagagtatatgggaagaactgatcgagtttagtaaacaaaaaatggctgaccaaaaactctccagaaaagctaattgctccatctctccctgtacaatatgatgatgtgctccatcatttctcagcctctctgccactctgtttgtctttagactttacgcagcactcacaggtgagatgtctttgccgaaaagcccagcgattgctttgccaggatcctcctgcttgatgagagactccccaacgagaacagctttaaccccagcattctgaacgaatgaaatatggtctggtgtgaacagccctgattcccctacaacaattatgcctttctgagctatagtttgtcctctttcaccctcaagaagatttttagtgtttgaaatatcaacttgaaaagtctcgaggttacggttattgatgccgatgagctggacaccatctatccctaacacacggtccatttccctttcatcatgcacctcaactaaagcagccatgccaagtattttgcatattttcaacatatacttgatatcaagatcaggtaagacagcagcaatcagaagaacagcatctgctcccttcaaacgcgcatagtaaagttgccaggcatcaacaatgaactctttgcacagcagaggacactgtactccagcattg

SEQ ID NO: 387532 - DNA, 922 bp, Oryza sativa
  unsure (1)..(922): unsure at all n locations
nnnnnnnnnnnnnnnnnnnnnnnccatagacaaacatgtagtatttctaaattgtaaccctgggagtggggtggtaaacggactatctaaatcatacacgcataaataaatgaatacttgtccatgtccaaggtaccatgtctgaaaatatacacttcatgtatatagaggctttcgagagtttgctcccgctggactagagggctaaactactagtccctggatttttactctatctggattctgggctaagcatacaaacacaaaaggcaggtacctgatacctccacacactggaaaccattgggaaagggaaaatcccagcgctaaatggaagaaaaataagcatttgagctcattgctcaaaagttctaatgctcatctgtgatcatctcgtccaccttatcttcgtcagctgtctgagctgccgaaacctggatttgccgcacctgaattttcgctctcatcagggggcgtccgtttctcctggtcgccggtgcttacggctttgcctggtacaccctcttgggttgactcctcgtcgctggatacgggcactacagcaggttcgctgctcgtcccaggtgcatcaaccaacggtaatacagaaagttcagtaggtgtattacctgatccagacaattcgctcttctgattgtcagggtcaggagtatccctcacaggtgatctacaagatccagtatccatgtcatctaccgcggagaactcgattctgtgagtaccagtctcaggaggctctggcctggacgggcaagtggcagcagcgacagaagcaggttctgaaacttccatggttctttctggttcttcaaaagtggaaggggttgacgcatcctgcccccgactgccagctgatgatgaagatggtgagttcaagttgagcgagggggcggacgcgtgg

SEQ ID NO: 387533 - DNA, 659 bp, Oryza sativa
tttttttttttttttggagcgaaatacatctttctgcaaggtttatgaatatgttgcagtacatttagcccaaaacacagttaaatacgacgatgcaacagcttatacaaacatgtctatgctctaggcttgaataatcagcaaaagtctgagcggctagaaaatgtattacaacatattagccaaaattcctcctgaatttacttcgtacctttctcaggcaagcattagtcgactcaattcaaactatgatcctacagggtatatgctaaatatggaattatccaagttttccgatctccatctttttctttatagcacgatgaccatggtagacaaaagaatctatgatgccagcaacagtgaaaatccctccaacaatagcacatatgtttgtcaggaagtgaagaagcgatgtattttcttcagtaaaatcaaccttaattggagaaaattcatagaagaaatatacaccaggcggaggcctgggatagccaattgcttctctaaagtgctccgtcacagaaaactgatttgagttgattttccgtcctctaatgtcggtatagattgtgggaacaaccttgacaaagtattggtacattcctgttaatccatttgtgtgctcctgtatccactctacaccatcaagaggattg

SEQ ID NO: 387534 - DNA, 1349 bp, Oryza sativa
ttttttttttttttttaaaagcaatcaagagtagataacgctggtcgaattactagtgagttcccattgtcgataattaaacagagaaaaacacacgaatgcaacgctttggtccaggatggcagcttcaggcagcctcaccatccagtgtccaggataggatttcaaaaccagttctcccttaaggaaatgtgatattcttggcgactgagttcttctctcatgcgactgtgttcttctctcatgctactgactggcttattgcgttcatgtgctttgttcagcttcacatgcatctttggcctcctttaccaagtcctccagttgtttttgtgccataggaataagttgacgggcttcaaccatctcgctgtaggcattcatgaaagatctcttacggatcttcccttcatacttatgtgcatccttcactaacttcgacagctcatcttgtgtaaacatcgcttcctcagctgtagatctctctgtggggtatcatatgatcttaatacccgtaccaagtttcatcaaatcccagtctaaacatttaatgccagaccgtttctcaatgtattcaccagtccagcgcaagtgcttggagtttttcacatcacagtattcgcaatcaagcaagaagcatgccagcttaataatagagtcagtaaccatctctggtttgacatccaaaccatagcggttaaggagcatgtacaatccttggctcattgggaggtagtcgtccttgctcaacttcattttttcttggggtactaaaacatgcatcagattcttcaggccccacatcacttccatcacaatttcatcaaacatgcagggcacactcaagcttctttcaatgatttctttatattcgggttttccaacggccattttctgcccagggtgatgccacttcatgatcatctcagcaaggtcgcaactgacaccagtatcatgattaatggcactggacttgtccttgatttctcgaaattccttcagccaaatgaatttggataccctatagtccacgccaaagtttgcccagatttcctgcagggcatttggttgaatgagtctgtccccactcataccgaacattgcgaagccagagggcgtctcaaacagaactaagactattagacaatggtacgtattgtgatctacaccggcgattgaccccgccgtcgccgtacgagtagcactgcatcctcgcttactcgaggtcgaggtcgaggtcgaggtcgaggtcgatctctttcctgtcatggtgtgtcagattgcgaccgaaggaagacgtctcaacgttggcttcctaataccggcaacagacgccgccggacgcgtgg

SEQ ID NO: 387535 - DNA, 473 bp, Oryza sativa
gttctagatcgcgagggccgccctttttgtttcttttgtttgtagttacaagaggttgtaaattaaatatgctttgtgtctgaggttgcatttacacacttggcgtgcagttaaaggggttcatctatgtaatattagtgaatcataaaatattttcgaattcaatttttgtacagtcctacaaatgccatacatagagtgacatttttgggtgggtcgatcaagaagcagcagtgctccctttgtatcgcatggcgcagaagacaaagaagagcaggtcgaggagcaagagagcagccatgagccagaagaagtagtcgaggtgtcccttgttgaggtcgtcggggatccatccggggtcgccgccgcgcgtggtggcggaggcgacgacggtgaggaggaacgcgctgaggtagttcccggcggcgatggcgagctggccgagcgcggggcacatgctcctcatggagcgc

SEQ ID NO: 387536 - DNA, 573 bp, Oryza sativa
tttgggggaggattagttttcttccttttcattcatgatgtcttccccaccgagtggtcccttgtcttatagaccttacagctaagcaacagcatgagctcgcaggcccaacaacccaacataactcatgtgagcgcgcaggcccatttcactctattcctggaacgctactgtagctgtccatcacgactactgtggcgcgtcgcactgaataccatcagctgtgacagtaccgcccgccaaagatgcagcttgtccccaagctggcgcagaagggaatcgtgtcttcaacacatcataatcctcccaggtggcatcatcagcagacagagatgaccacttgataagcacctgaacatgagctgcattccccttttttaccagacgcctgtccagaatcagttcaggccacacatcggcagcatccagtacaaccggtgtgggtagagaagtaaacactggagtgtgatctggcacatgagctttgagttgagacacatgaaacacaggatggaccgcactgccttcaggtaaagccagacgataagctgccgacccaactttctccaagat

SEQ ID NO: 387537 - DNA, 1414 bp, Oryza sativa
ttctcaagaatcttgtccggctcacgagacacacatggtcatatatcttcacagtacatcaaattttgtggcgcaaaaagacctaattttctgcttcactaggagcaattttttttttgacagtacaacatgggccttttcaatatagtaagaaaaaggatgcttcatcagattatttactaccctaaagaggtgacccctcactgcatggtagagtacaattttgcagactggatgaaatctttgatgttgaaagtctcatcagcatcagactttgtgatcacacccttttccgttatgattgcggtaatcagatttgccggagtaacatcgaaggcagggttccacaccgatatacctgacgcggcgacttgcttacctaggccaccttcagagttcagcaactcattgggagacctctcttcgatcacaatttgctcaccagatgggagggagagatcaatcgaagttatcggcgcagccacgtagaattgcacaccgtgatgcttcgcagaaatggcgaggttgtatgtgccaatcttgttagcagtatcaccattggcagcgatacgatcagctccaacgattacagcttgaatacacccgctcttcatcagtgcagctgcagcagaatctgctatcagcgttgcgggtactttgtcgtgaactaactcgaaagctgtaagcctggaaccctggttaaatggacgagtttcagtgcaaaaggccttctctagaattcctccagagtgaagagcacgaataacccccaaggcagttccataaccagcagtcgcaagactgccagtattacagtgtgttagaacagaaatatctttagagacctcaagtttctgtttgagaaactcagctccatgagagccaattgccttgttatctgacacatcgtcaactagcatggtctctgctgcatcaatgtaggcctgaaagattgctttggcatctttctcagtttctgctgtccttgaaactaaactccgaagcttggttgcagcatcagataggttcactgcagttgggcggctcgatacaaggtactccaatttctcggaaacaaaaactgctgcctctgcaggcgtaccggtgaaatcctccaacccagaaacctctacagccagagccaaagccgctgctatggcaatcgcaggagcgccacggacaaccatgtctctgattgcgttccatccatcgccggagcacttgacgtcgatgtagtccacctcgagtgggagcttcctctgatcaagcaggcggagcgatccgcggtggtagacgatggactggagagcacccaattcgcccattgctggagcggagcgaaattcggcggaaatcgagagaaaacccggagaatcgggaggagtcgaagagcgggtggaggaggcgccgccgc

SEQ ID NO: 387538 - DNA, 728 bp, Oryza sativa
  unsure (1)..(728): unsure at all n locations
gaattcaataatccggaggtttggaacaaaatgaacaacaattacaagcctcaacccttgacagttacaggcatcgcgccattgtacattctcaaaagctaacttctgtgagcgcccatcaaagctatgtctactacaaatatatttcaattacagggggagaacataattgaagtgggaaaatctactagtacatcatcatcatcaccaagcacacaacctagagttccaagaatggcatgtcatgaatcgaaaacagaaacgctagaaataacctattcagtagccctctgcaattgtcatgtagtgaagaaagaccatagctttttcccaattgattggttccgcctttcggagtcatcgtcctcctcatcatcctgttcagctccaagttcacttcctgatggtgtcataggcatcgcatctggtgctgcatctataccatccacaatatctaccccctctgcactagtgacctctacagggccatgtgtgtcaccagcttcagcctgcgagtactcgggtaattgagatgcatcatcagctgattgggaggcccctttgctcccagtggcaggttcctcagcctttgaggttccttctgtgtcatctgcggtagctttactgtctgtttacttccctttttcgcagctttctttttgttggnttgggctgcagttgccgnatttgcaactgtggtgcgctgagggtgtagcgtttttccnctt

SEQ ID NO: 387539 - DNA, 463 bp, Oryza sativa
cactagtaacagtgttcacaagtactttttctttcagtgaactgatgatatttacaagtacttgtgggtatgacgaccaaagaatgaaacaatctgtcaagctccctgtcgatttttttatctccacgctgttatttgtttcttatttttctcaatctccatcaccactagcttatcaaaactctcgtaataaacacagtttgagagagagagagagagagaaataaaaaaagaagaaaaaaaacgacgtttttttttctttcttcttttttatcggggctcgatcatggagatggacacgtcgttgacggactgcgtcttggtggtctccgtcttcatcgccagcgagaactccgacgccgagaccttcttcatctcccgcgccgcgaacagcggcggctgcgcgggctccggcagctgcatctggtcgctgatgagcatgagcaacacgttggacatggtc

SEQ ID NO: 387540 - DNA, 650 bp, Oryza sativa
tgaacagactgcaccggatcagagaatccggcaatttcacaaattattatcgagcgcaatatgaaggcaccaaacgaacatggcgtcatggactgtgaaaatgaactaaaaatgtaagcaagctacatctgcttcgaaaaaactgaaacatgaaacaacttaggttgttacttgaaagcggcatttatgaaatgtcacccgggatagtggtaaatggtgtgcaaacgtcattctgggattccacattttaacccttgtatccaggcataaagtttgctaagatgcattggcgtaatcgaagacggcaatgaagggcatcagaacggatcctatccagagcttcccatccttctcctcaacttcactaacggctcttaccacctgccctgtggtatcctccaagatgtcaagcacctcgccttcggggttgtacttgatgatcagagcgtggagcttgccgccgatctgcatcaggtagtggtacttggcagggattgggaggctgagcaagaacttcctcagcctgacattgcgactgaccattcgggcgtatatgctgcgcctgcaatggattgctacccagaattcacccttgtcgttggtcctcacattgtctggaaacccaggcaggatggcgaaaagacttcacg

SEQ ID NO: 387541 - DNA, 768 bp, Oryza sativa
gtcctgaaccctgatcattgctaaaggtcgaataaacaaatacggtatttacacacggaattgacatgctggcgtttcttacacactacactatccaattatacatcttatgttacaagtaagaggatatatttcactggtttgaccgaagttgtaactacaatagatacaatatgccctgtggaatatttacaacatacatacgccaaaatacttaaatcttgaagaccacaagcacaaaatgggtagagaagatcagtccttgttgcgagaggaccgctcccgctccttcttctgaccaccaagaatccgagagatttgcagtcctctactgaacgcttgattaaatagcatccgtgtctgaaactcggacacaaagggaaaccatgccaaaatagtaattggtgtaaagagaagaactcccataattatctcgtatgcccgagcaagggcacgaacagatccccatagccctgctcgccgagcaagaggcttgcaagcttgtgcaatcagcaatattccccatccggaaggtaagaatgccagaaagcacacagatatatctcgtaaggtcatatgaagtattgctatcagtacaatcaagatggcgatgaacgaaacaaatatcataaacttaatcagacggaaaaatagctgaaaatccgcactaaatctccgccttccgacagatacagtcttcataacaagcaataccaccaaaatcacgagccacgaaattaaatataccaatatacttttgtagccccc

SEQ ID NO: 387542 - DNA, 656 bp, Oryza sativa
  unsure (1)..(656): unsure at all n locations
nnnnttgttttttaagaagaattggtacttcttggatggtgaaaggcgcagtaataagaatgtagtttcacaaaaacatggaagatcagtattcagcatcgacttatttctactcctcaagtaagcattggatgcaacttggtttaatttgatgttaagaaacacaaaatgatgcatcccaacatgggtttcaaatggtttctctcatgcggtaccaaacatccgaagcggattattcaccaaatggctgcacaggcaataattttgctgttggatcaaaggtttgattacccacggctatccaaataaaatctacaggttcaaaatggagagttgatagggtctcgctgcagtgccttctgcacaagctcggtttgctcctgcacatggacggagtagaaacctgttgcggtggctgcagatggggcccttccaacgtatttgatgtcgtctatcgtgccccgaccaagcgccctcatcgcggtcaggaggcgaggattgatgtagctgtacgcccccatgttcatgggttcctcttggcaccaaacaatctcggcatttggatatcgcttcaactcgcgctggatgagggtcatatgggaatggacagagctgttcaactctacatatagcaacatcatcacgctcctttttgc

SEQ ID NO: 387543 - DNA, 788 bp, Oryza sativa
  unsure (1)..(788): unsure at all n locations
nnnnnnnnnnnnnnnnnnnnnnnnnnnnnnnnnnnnnnnntttttttttttttttttttgaagaaaaatttaacatctcttaaatttatcttcttgaacagacacaagcacagatcacaaggttcaacgacaccaccatagattaaatcaacagcattagactactaacagacacacatcccgtccaatctactccagctaaacaagcaaagcgaggcgccgacgcctaggccttcttgggggacttcccggcggccttcttgggcgacttggcctccttgccggcggcggcggccttctccgccgtcttcttgggcagcagcaccgggttgatgttgggcagcacgcctccgtgcgcgatggtcacgccggccagcagcttgccgagctcctcgtcgttcctgatcgccagcagcacgtggcgcgggatgatcctgttcttcttgttgtccctggccgcgttcccggcgagctccagcacctcggcagcgaggtactcgaggacggcggcgaggtagacgggggcgccggtgccgatgcgctgggcgtagcggcccttcttgaggtaagcgccgatacggccgacggggaactggagcccggccttgacggagcgcgacaccgccttcttcctcggcccgccggccttcctcccggcggctcccttcttcaacttcccacccgctccggctccggcggcgtccatggctagcctagctaagctggttgctgctgctgtcgaaggcgaggaggatttttttttcccttttctttagtcgaatgcgtcc

SEQ ID NO: 387544 - DNA, 780 bp, Oryza sativa
  unsure (1)..(780): unsure at all n locations
nnnnnnnnnnttttttttttttttttgaacacaaacaaatttcaattgagaaaccacatattgaagcacatgggatccagaagacaaagcgagacacttcatcttctcattagaactaccctagtgtcttgcaagctaaaatcgaaaacatccagttaaatgcctagtgatacgaactaatctcgaatcgaacaaactaagtactgcatatacagtgaccaatgaatggaaggacatgaagctaggagcgcgcctgcttcttgggggacttggcggctttgtccttggacgccttggccggcttgtcggccttctccgcggtcttcttcgggagcagcaccgggttgatgttcggccagcacgccgccgtgcgcgatggtgaccccggcggagcagcttcccgagctcctcgtcgttgcggatcgccagcagcacgtgcctcgggatgatccggttcttctttgttgtccccgcgccgcgttcccggcgagctccagcacctctgcggcgaggtactcgaggacggcggcgaggtagacgggggcgccggtgccgacgcgctgggcgtagcggcccttcttgaggtagcgccgatgcggccgacggggaactggagcccggccttgacggagcgcgacaccggcttcttcttcggcccgcccagcttccgccccaccgccttcttcgccgccttgccgccgacgccgacgtccatctccgggaaacgtgagggtgaaatggagcggaattcgggggggatttgaagggatttccggcgcc

SEQ ID NO: 387545 - DNA, 1082 bp, Oryza sativa
gaatacaatctcataatgtatgtaaagcaatcacattacatgatatcaagctaaaaagtgccactacataacatgagaaacagcatttccccaaccacccaagcaccccaaatggcaatgctattttcaataattacccaaacacaaacgaagaaccaaataacccaccaggaggcatatatgtgcatccactaccaaacacagatcaattgttcgaaattatccaaatcttaacaatattattacaggcagcatctaacaattcacagttcccccatccctctgcccagaccacactcctcgaccctacaccggtgttaacctacacgggtacaaactgattggcttgactgtccatctattcagaaaacaccacaaattacgtacaaacaaccgaaccgattcacgacaaatgatatagcatgcaacgaagacgatgatgatgacgattgacaacagataggagcgtttcagttcagacaagagggagagggaagcgggggaccccaccaccaagccggcattgcgtgtgccctaagcggccgccgccttctttggcgacttggtggtggccttcttgggcgacttgggggtcttaccctccttggcctccttggccgcggcggagccggtcttcttggggagcagcaccgggttgatgttgggcagcaccccgccgtgcgcgatggtgacgccggccagcagcttcccgagctcctcgtcgttgcggatcgccagcagcacgtgccgcgggatgatccggttcttcttgttgtcccgcgccgcgttccccgcaagctcgagcacctcggcggcgaggtactcgaggacggcggcgaggtagacgggggcgccggtgccgatgcgctgggagtagcggccttgcttgaggtagcggccgatacggccgacggggaactggagcccggccttgacggagcgggacaccggcttcttcttcggcccgccgccgccgcggcggccgccggcgccggccttcttgggcaccttcgctcccacctccatcgatcgcgacgagctcctcctccccaagctttctccctcaaatgttttgttcgatt

SEQ ID NO: 387546 - DNA, 1072 bp, Oryza sativa
tctagactggaaagctaccggcagcataattatgcagcttcttatggctaaacaccaccactcacattgaacagcattcatgacgcaacacaagtaaaagcgaaagggaacacattgagacaggaaagaagattgacagcaagaatttcggaactatgaaattggaattataacctaaagggaggtgaaacaaagcctataatgttgtacaactgaagcagcagcaacacctgacataaccaacctgctcttttaacccttctcacctccataagagcatcatatgatccaactgctgctccaaattagtaaatgatatgggggagaaaatcgactgctttactccacagggctagcgttcgtgctcgccgttccatcttcagccttggtggttgcggtggacgcttcatcagctgaagaaacaccctcaactgcaggcttgctttcgccattctcagtttcttttagctggacagtctgaccaaatgtgtctgagatgtgggccataagttctcctagggccttattctctgctggtttctgcagctctgggctggcaggctgctgctgacgtctattctcctgcaaggctttctcccgctgctcatagaagtcaaagtcttcaagaatgttcgtctccgattcatggttcttgaagatagttaacatctgcagaccatgttccagcttcacctcctgggtgtccctgctattagttacaggtttgttgtcattgttctcaagaatgatgtgccgcagcaggttgttcgggacatccttaataatgtgccacttcacagggaactggccactccacttgtcctgctgccaataatcgacacttttgtcaaaatcgacgggtccaatcatctcagctacaccacagaactgaccactgccattaaccgagaaaaatagaaaaatagggcaatagtcttctttttctttggccaagcgataagcagaatccagctttctattcccactagctgtactggcccaaacattgtacttaatgctcctatgtacatggtcctcagtgtaggactttattacaaaaaattttgcatcc

SEQ ID NO: 387547 - DNA, 1041 bp, Oryza sativa
gacacatcaatagtagcaccagtagtgtaacaaattgggaatacactgtgggagtaggacagggacaatgacacaggaaggcagaagaggacgcatgatgaacacatcaacaagagagtaaaattcaggacgaaatgtcgacaagatattggaatctttggccacgcacgcaccaattcttgggtgacgcggccggaatcgaacggcacacccgacccaacccaacccaacccaacccagcgaactaaacggagtcaatcatctgatgacctaaaaaaaagggaaacaaattctgccaaattttattggtttttctttcccgtttgcttcctctcttcttctgcttgtctctcttttcatcacttagaggcgtgtgcacgtctcgtacaccggcgcgccggtcacctgcgcgactgcgccgggtagggcgcgacgcgcgtcctccgtgtgccgtccgacgagcacgcggccaccgacgccgccgccgcggcttccgccgtcgccgctgacgatgtcttgcagcatcttctgcaggtcctcgagtgtgtccggcttctcgtttttcacgttatccatcatcaccagcatctcctgcatgaaatcggagaaatcctggtcgtcgtcgtcgaggggatcgaacagcccggcgtcgtacatggctcgcttccccttgtcggacagaacggagtacgcctcttggatccgctggaaccgccgattggcctcgccggggtcgctcacgcaccggtccgggtgccacttcatggcgagcctccggtaggcggcgcgcacgtcggtggcggacgcgttcttccggatgccgagcagggagtagtagcagcacgcggacgcgccggcgccggcgccaccggaggcattgccggatccggcggaggcgtccatgggggtgcggtggcgggggcggcgagcgaatccgcgcggcgaggagggcggggcgatgcgaattgctaccgcggctgcatcgaattgggagggagaggggagaggagatgggtttgaagggcgcttggacaaagacaa

SEQ ID NO: 387548 - DNA, 575 bp, Oryza sativa
aagaaagagtatggaggtagagaaaagggaaaagtgaagagataatagaggacttcagcagtaagcctctagagaatgtcttacagcatcttctcagagtcctcgagtgtgtcaggcttctcgtttttcacgttatccatcatcaccagcatctcctgcatgaaatcggagaaatcctggtagtcgtcgtcgaggggatcgaacagcccggcgtcgtacatggctcgcttccccttgtcggacagaacggagtacgcctcttggatccgctggaaccgccgattggcctcgccggggtcgctcacgcaccggtccgggtgccacttcatggcgagcctccggtaggcggcgcgcacgtcggtggcggaacgcgttcttcagaatcccaatcaggtgttagtaccagctcaggtacgctccggcgcggggcccccggaggcattgccggatccggcggaagcggtccatcaggatccggtgccgcgtcacccccgcgaatcagatcgtcgaggaggccgcggccacctcatcccccatcacccacgcgtccgcgtacgcgtgggcggacgcgtgag

SEQ ID NO: 387549 - DNA, 1241 bp, Oryza sativa
tttttttttttttttgagtaacagttagaaatggctacaaaatcaaaatgttacagctggagtttatttcaacggcactaagatggcccagagcagtgatctacaacacatcatgctgtattagacaggcatttgaagcaggatgaaaatgcctgctcatcatgtgcagacaggtaatgctactaagttcatctaggaaacattggacacgtttaagcgtaactttaacgccttcagctcaagaagatataagcgggattggtctcacagcaccctgtatacgacggaatgcagtcttgatcctttctctcagtgtagcattttcacattcaacaccaccactcctcccatccaagtgtgctacttgtccatccacagatataacaagtttcccttcctctgcaactttgacatcaccaaaaagtgacaccataagagcataaactaccttctgggccaccctttccgtctcttcctgtgtcttcactgcttcttcaactgggacaactttgggaccttcacggcctatgttcaagaccatggcgaccacagaatcagacaccatatcactgataggatcagacgaccactgcaatgtaacatagctttctgattccaggcgaatggtcactctctcatgcacaatcaatgttggaacatcagactcctctgttgatgactccacgctctcatatatttgcttcagtctgtactttatgacttcaaaagaaccagaatatgggacggcaatcctttgggtaatgttagctgtagatagctgcgtgtacacacggagatcctcaggagccataatttgatatgtgaatcccttctttacaagcaagccattaactgattctccagcttccggtaccttttcagccaacctgccaattgtcttggccattttctcagaactgaaatacatctccactgattggcaattcttggggttaacaacttttatatttgtcccatcaaactgagaaataagcttctgcttaagtcttgacatctcatttgcttccccgtgtacaagaacaatgttgggtggctggagctcatccaagaaggtgcttgtctgagggaaatcagcatgagcagaaaaggaaatatagtggacctgcatatgaagaggagcagtgagcccattcgccagtgtcacttctcttggctcgttaataatggtctttgcaagggtgccttccacaacataacctggaataacacatgaattcttc

SEQ ID NO: 387550 - DNA, 735 bp, Oryza sativa
  unsure (1)..(735): unsure at all n locations
ttttttttttttttttcagttcaaaattaattgattgtatcatcatgtttaaacctggacctcaatacatggcgatatattgtccaaattgaaaacaaaagagtgcaacnngaggggggaaaggtaaatattaatataatataaaaaaggaaccagccacttaaagctgtaaaacaagtgattgtgatctaactaccgatatcaaatatttaccaaacgaaaagcaagaacaattgtaaaggttaatctgcaaaatccctcccaagtgcacgatttcagcttttctgtggcttgagcacagatgcagaagcagaacaacaagcaatgctgtcaaggtaatcctgtgtcaaatagcagtgagccttatgattcaattccaggcttccagcatgggtttgctttcccattcaatcatatctgaaaggatttttattatcttctttagttccacgaggcaaatccacacccagctgcctcccgaagcccctgtcaaatctccgaggggttccccttctttggggttctggggatctgggagccgaaatacatggacgaagttatctcctgtatgatttctgaactgctttgtgggaccattcctgtcatatggcttggcagaatgngtttcatatctatcagcatactccctttgatcatcaccattcccatcatggcctatttcccctccccctttcgaagccataagggagcttccctgtgttggggggatacaaa

SEQ ID NO: 387551 - DNA, 554 bp, Oryza sativa
  unsure (1)..(554): unsure at all n locations
gcgcatggaacaaacaagttaccacaaattagtcggtcatatgaatcacaactaccaagtagtgaaatttgcagattttgcttctaacagcctactactagttgctgtactaaactcaaagaacttaactcacaaccattatagcttccagcccataatttccttgaacaatcatctatactgaacaagaacatctctcaccgacgaagcagtaagaaagaatgacacaggatgagcaaccaaaggtacaaatgaatacatcgactctgccacagatatggtggataaccccttgccggcttacacaggaggaaacctaaaagttggtagggatctaggagtgactagatgcacaaaaaggattacttgagtacacgtattccacttccaaacgattatagccactgacagtgctctacaagagccaacatcaccatctatggattggagcgtgttgtctaacncgacgctgaagcctgtgacatttgccttttgatagcttctttgtaagtcttgtnctggtaggtcaatgttgtctccagcaaatccttgag

SEQ ID NO: 387552 - DNA, 639 bp, Oryza sativa
ccaccatgcattcaatagttcagattaaacatacatccatcaacactgtataaaacattccactgtagaattccaaatcagaacttcagaaataacaaattcataagtaacaattctattgcatctaggatagcaatatatacatgcatctgcatagagcatatgcatacaagagtacagacaacttttagcattcattaaatttaagtcataacttctcaccacagtttatcgaattactctacattgaagtggcatctcttctagataatataaatccagagagaacttcattggacaagtgacatcttaagcaggtctttattgcacacgtgacatctttagctggtctccattcattaaataacttcatcaaaaaaatcttcaatggacaatttctgggacaagtgacatctttagcagaacaatttcagtagcccgtttcgatttcgaccgtggtacgatgcttttttagatctcctgctcggtagatgctcaacaacgtaggtcgattgtagcaaaatcgatcgtggcaaactaaactgaccaacgggacttccttacgccccaagatgaggtggaggcaggcaccagaggtggaggcgatggggaggcggcggaggaggtgcggacgcgtcg

SEQ ID NO: 387553 - DNA, 571 bp, Oryza sativa
aggataaatgcatctggattctcagtgcatagaagaacaaaatcatttgctgatcatcccgactcggaacagattttctttgaactaaacacacatgaacagagtggataacaaccataaaactaccagcctagcacggacggacgggggtagttcatacttcatggcgttgctactgttttgttcggccactactactactaccacatgactgatattgttggtctaattacagaagaaaaggaaacagactccaatctaatgccatttgaacaccgcccattgtactgatgatcactagctgcttagcatatcacctacacagcaccatgttgtcaccaaagcctgtcaacctccagcacagaaagatggaatccaaactcctcaggctgtgaagggcaagatgctactgtgcaactctttcttccttgacctctggtcctctgactttgttatccttgtgcttctttgatacatcgacagcttgctcagatgggttggaagctggctcagctgctggtctcactttgggttcctccgcagcgactagaggggcaaatagagcttgaga

SEQ ID NO: 387554 - DNA, 415 bp, Oryza sativa
ttaggtggtttcaaaccttcgacagcaaaaacgaaggcacgtcattttcttgagtgaaatcgtatatatacatcatatcccattacaaatactacgaagagcatcataaacacgctctgctgtttcttcatcatcacagtaaatagtagtcctttcagatgtcaccttcaccagggcttctcctggactagtgatcgaaattacacgttcacgatctgaaggtgcagagtaatcagcgtctgcagaaaacgagcatacaattcccttttcctgcaaggctgacggtatacagctcgcgtccacagttccccagtgtagcaagtgccgctctgatcgatctaattcactctttgcagcagctagcacatattgtccattgcttagaaggagctttgctttcaacctcgcaacagct

SEQ ID NO: 387555 - DNA, 330 bp, Oryza sativa
tggatctatataggattatcattaagatttaagagggcaaatgactgatgccattgtacatagattctcaacatctttaccagaaaacaaatcccaaccaactcctgcaatttacatacagcttcaaagaggggttactggtgattttggggctttctaggatcacagggaccacacacatttgttacccaaatgctacaatacagtaaaaactacagcagccaaaagctgcaggattcacttcaccaatcaagaaaatcttggctgcaaataggggaaagaaacacagctggggaggcaaaaaaaataaccgctgctccggacgcgtgg

SEQ ID NO: 387556 - DNA, 676 bp, Oryza sativa
  unsure (1)..(676): unsure at all n locations
nnnnnnnnnnnnnnnnnnttttttttttgcaaatgaagcagaagtaccaaatttgctaattggaatgcgcagtaatcaggagtatatgtacatcagtcacacatggcacctagaaatacagaatcgatgggcatgccaccttaatttgacagaattctatcttgccaatctttatcattcgcgttcaataaagagaattcgttcacgagagagaaggagagggagagagcgaaagtgtccgtacctacagctcgtcatgtgctttcgccttaccagtggtagggggctggtgctcaagcagatagcgagcagctagtgatgcttgcaaggctgcaccgtagggcagggcgtcttcgttgatggtgaagtagggggaagtggtgaggcgcctgcggtccgcgagtctcgttgtacatgcccaggaagtagtagtaagttgcaggaatcgcatcagcgtagaaggcgaatcctcgggcacccatcagtggctgcttgtccctgacattcttggggccaaccatctcgctagctaccttcacaaagaaatcgtggagccccgcgctgttgattgttggaagggaagaaaaaggcggtctttntcgnaggaatctacgacnaggcattgcaccgctggcacggatgcttgtggacacaatgaccctcttacaaattcgct

SEQ ID NO: 387557 - DNA, 708 bp, Oryza sativa
acgcatgcatgccacgccgacagcaaggtagcctcctttttagcggccctccttttttttttttttttgtatctgtacttatgttctgcttcagctggtaatgcataaaaaatgactctaagcagcaaccattcatatatattacaaggaaagaaatcataggcatctacattatgtagaatgagaccatgtaatgtactgtaattaatttcaagaaacagtgtttggtacagactagacaaaaggtaagctcaaggtaaaccataattcaaggggggaaattcagacaacctattccaggatgtcatcgtcgatgtcgatcggggtgacctcgccgtcgtcgaactggtccttcctcggaggcgcaggcggcgcgaacagccgtgcagggccagttcccttcttcttgttgcgcggcctcgcatttccgtacgagtggttgaacctttttcccctcttggtcttcttgtcccctctcccgcagtaaacttcaagaactggagtgagcggggccgagagggtggcggcggcggcggcggcgacgcgagagcgggagcgggagaatgcggcggcggcggggagcgcgcagtaggaggagacggcggcgtggtggtgggagcaggggaaggtggccgggcacgcggccatggcgtggacggcgaggagcgccatggaagcgagagagaagtgagagcttcggacgcgtgg

SEQ ID NO: 387558 - DNA, 560 bp, Oryza sativa
gacaacatccatatattactgtcatttctctgcatctgttgattacatatgtcatttctctgcatctattgattacacatgccagaagcatatgacgcagaataaaaaatgccaaaagtttccattgccgaaagcaaatacttaaaaagaaaatctctccaattgagaaaatactagtactactggcaacagcataaacatggcaagaacccagagaaaaaagaaaagcagtgcatgaacatagcaagaacctagagaaaaaaaagaaatgcagtgttgtttgccttcaccaacgcggctcgtgcatcaagcaaccgcatcaaatcttccgggaatgataagcaattaggcatacaagcccccaccgccgatgaagctgcgtctccccatcgcctccaccgccgccgacaaagccgcgtctccccatcacctccaccgccgggatgtgctgggaggagtgggagggaggtggggagggggtcggaagcccggtcaggtctcgcatcttaccgccgctgcatcgatgcaatcgatttgcggacgcgtgggcggacgcgtgg

SEQ ID NO: 387559 - DNA, 533 bp, Oryza sativa
atgcagatattcattatagaatttggatgaatgaactgaccatcccattgctctatacatatcgagttgattcagtttttgatgtattgtatcctataagaactatgctcaaatattcatatttacatgtcttagaatacatcaggactgaaaaagaatacttgggacagctgggacctaattgccatagtagctgtagtgcacatcagcatttagaaattattacaatggaactctgtatgttgggtcaaccattttcagtatgaacaaattccccttatcgcctcttgaggccctgagctcttcatcaagatatgtaatttctagttcacctttaccactgccaggtgctttgattgaaatcaaattaaatattttgaagtaatcaaaccgaactgccactcttctagaattgagaggtaccaagttggcagtaacctgattaaaatagggccacgtctccatattttgggctcttaaagtgtccggacgcgtgggcggacgcgtgggcggacgcgtgggcggacgcgtgg

SEQ ID NO: 387560 - DNA, 536 bp, Oryza sativa
gcaatgctaacacagatataatacataatattatcaaaattgaggtgatatgaactatctctgcatcttcacaacctaccacaaacctcgtaacgtcaaagcacaagctacacagttgtacgggggcgcggggatgtaaataaaaaaaatccttaacttcgcttcgttgcctgctctggcttgaggcagggtcactaccaaaccaaacactaggcgatatgatgatgtacattggcaactcaaaaaaccctgacaggaaagcttttacatcttgtccgtaatgactgaacagatgaacttcgtttccttttactcagccgatcaacagatgttaccgcagccacttggaagagatgatagggcaacaaaaatcaaaactgcaatctcacggcgacgatccactagccattaatttgagggaagatttgtgatatcttcataaaaacatccatgacctctttgtcgttctggtattttacaatattgagcgggttttgtgagcaatccatgatcgctgtttgaatctttgggttctg

SEQ ID NO: 387561 - DNA, 537 bp, Oryza sativa
aaaaatgccattctattattaatagaaaatactcaattacattgattcttcattttacattacattgattctacgacaatggagctgaaaatattcctctcacaaacatatgatggacacttcagatgtgctgatgaactgattctatcatcgctcagatccaaacgataataaaataaaatacaacacacgttcttgaaagcaaatctaaaccacttgattctagcttgcttctgcaacaacagtggaaagcttgaaacttgaaaaattgcatccgcaaagaactgaagttgaactaatcttctttgttctccaatgcttcctgcccttgcttggatcatgatggaggctggagcaacagcaatcttgtggtgctcactgcttgccggagtgggctcttgtgctgcacgctatgaagaaagaaagtagaggaaaggagatgagaaagttggatcagaacaactaatgcaagacggagacaacggcgtgcggtgagagaggaggctccgtcgagcggacgcgtgggcggacgcgtgg

SEQ ID NO: 387562 - DNA, 973 bp, Oryza sativa
  unsure (1)..(973): unsure at all n locations
ggnacggnntnntggntttgtaattttcgctagatcaacaacgacagtatatggactacatcgaatacaccatcacttcctgaacagtagaagcatgaagaagggaaaaagtgaaggtcataatactacaaaggcacgaaaactctgctgagatgaatcagcgtgcaaagcaaggcctggaagcatattggataataaaaatacggatgtgcagtttcagaccctacgaaaatcattgggaagatgagctactgtactgccacgggttgaattcgatcgaagtgacgtctgtatcgtcgtcggccacacttgagctgtcaatggcagcgcggtgctcggtgtattttccattgtattcatacacttccagctcgccccagggtgtaggggcgatttcatcggtcctgttaaaccatcttggagtaaattgctcccccttggcctctcgtgttcttttctcagctctttgttgctcttcaagcctgctcttttctgaacctgattttgacatgtcacccttctcgagggcatatctatcaggcctcaatcgggagtccgatgccaatagcttcttcggcgccgtatcgaagctgtttattttgtgcgcgaagtgcgtgtactggtacttgtcatttggtggagtaggagcaactctccatatctcctttagctcagttcctggaagaggatcgccttcttgatcgcatggctgacaactcatggactggttccactttccagttatcattattttgggttcttcagctgcactatacacatagccatccacctcgtaccgaccagccccaaaccagccacatggctggaataaaagcacaactttgtctccagttgtcaggtttgtcaataccatctctccaggagaatcaacccaagtacgcccaaatatcaagttgttgaccttcgtgagtggtggtaccaattccagcttgacaccggaccggacgcgtgg

SEQ ID NO: 387563 - DNA, 423 bp, Oryza sativa
gccgaaaagtaacatcatgtcactgccgaaaagtgtgttgtgtgtgtgtgtatatataattcacagctcatgagactttcgtcacttgtcaagacaacaattccgagagctgcacgtacaaaaatatatccaggaaaatttccaacaaggcgctctagcaagaattagcctcaactgcatgcatgctttgatggaccagcttccaattcttcagaagatgtagtcaggcgggtgcagagggaaaggagctatgtcggcaataaaagggcttcctctaggctgaccacacctccaagggacaagcgtcaagttgcccatcacggatccaggctccagtgctgccgatatggaacacccatagacaaacagctcctcgccgcacctcaggagcggacgcgtgggcggacgcgtggcggacgcctg

SEQ ID NO: 387564 - DNA, 739 bp, Oryza sativa
tttttttttttttttttttaaggtgaaatcatgattccctctattgtcatgctcgcaagtcacaggaccataaaaagaggcaacaaaagggccttaggtaaagaaaaattataccgatacattactgcaactcctcccgaattttcaacatcatacacactacatcgcatgcagggaacatgtgccgctaccaagagaccgacaaaacctcattcctcccaatgacaagttactcggatatattcattggaggttcaaggctctcgacaagaatgcgcaggtctaaatccttatcctcaaacttcttgatgaaaggatgattcaagagttctgaagcagacatccgctccgcaggatccttttgtatgcaggaggagataaatgcacaaaattctggagagaactggtccgctggtgcagagggtggtggctggtcaacaattgcttctttataattcgtaggagcttaaccaaccttccccttctgaaggtatataggggaaccgaccaatggcacactcggggaccactaagcccaaactccatatgtcactcttgtagtcataggagcttccactaatacgctcaggcgccatatagttgtaggttccaacaaacgtatcccgctgacccattgaacttgctagcaccgcacttaccccaaaatcggtaatctttacttcacctttacggttaactaacaagttagatggcttcggacgcgtgggcggacgcgtgg

SEQ ID NO: 387565 - DNA, 696 bp, Oryza sativa
  unsure (1)..(696): unsure at all n locations
ggcaccaaaatcatacaaagtggatgttcaactcagcaattcacaaacagaacaaaaaatcaaacaagctgtactggcatctctcatctccagtatagtgtgcagtatacaaatatcatacaaaagaagagataccaagatcacaaggcctaatcctataagcataaacataactgaatatagcctcctgaatatataagtagggatcacaagtccctcctgcctctacaagaattacatagagagtggcaagtgaccgtttgaagcgccgttataggacttgttctcctccttcctcctcttcaagacgatgctccatgtaacagcttccaggatcacggcaatgccacccaggatgctgatcgtgatgatgtagcccgtcttccacttctgctccacgttcaagatggacatccctttgaagatgttgacgatgccgagtatgatgatggtgtaaccgaccgagtggtggtaggcgttccagtagatacggtatttgtgatccttcttgggcctcaggaaaagcgcaaagatctgtagggtaccaagcgcaaatactgtgatcccgatgtttctgtgaagcgaataggtgattcccttagacaggttacctagatgaatgccagtggcccagccagaaactcccacaccataaccaatcagctggcaagctacntgaaggtangaccacgcgnt

SEQ ID NO: 387566 - DNA, 763 bp, Oryza sativa
  unsure (1)..(763): unsure at all n locations
nnnnnnnnnnnnnnnnnnnnnnnnnnnnnnnnnngaacggagaggagaggccttgtgattttacaggcctaatatagcaaatggctgagaagtccatttgaggaggttcgtctcctgaatagtatcagcgacgatcaatacctttgacatagacaggtttgacagattgcatttgcacaagcacaaaaaaaaggtaggcttggtgacaaatatagcataaataatcggtttaaactcagatcacctatcaagattcctctggtcacctttttcttgacctttcttatccttcggtgatgaagcagcctcaactgtgtcttgctcagtttcagaaagtgatagatgagggttcattccgtcatcaattggtaatgtcctcttggatccctcaagagctaaacccagaacaatgttgtcttcaaagacgggtctcgattctttctttgaattagcaacagagacagcgccatctccttctcgttctgtggcctcagctccttgagtttttcctttaccagttttggaagttgatgcaataggatccatattttctgaccatggagaagatggcgatgttgttgtcgcatgatcatttttactattcttcatgcgaccatcttctggtactgattttttctgttcctgcttctcggagttgcttatactagcattatcagctgaagctgacttagcctctgcagaagtgactgtcttgactttatgatcttcacgcgatgctggacgaggcttagacttgtcatcg

SEQ ID NO: 387567 - DNA, 523 bp, Oryza sativa
  unsure (1)..(523): unsure at all n locations
ttcagaaaattgccgggtgtcgttcttaaccgggaattacagagattcaagttgaccgtgtcctccccggcatacggcggattaaattcaagtatcgaaccaagagcaccaattcgatatacaactaattttcattgaccgctaaaatgtatagggaaggaatctacaagaaaaacgaactagagccatgctgttgttggcctctccaaggatcttactacagctacaccacaaaatgggtttagcaaatagtgatttgggtctgagactgaaactacgatttcacctctggcctgctctggttgggtcgtatgcgacaggataagtagctggtgcttgtcctgcattggcagctccactgcttgactgaacaactccagcaggatatccagcactactgatcgcgccatacatgcttgcaacatttgtagctacaccactgtttattggttgctgcggngcaacatacgcactaggataaccgggcaaagcggcctgtgtgtaccctgcaactggataacca

SEQ ID NO: 387568 - DNA, 575 bp, Oryza sativa
  unsure (1)..(575): unsure at all n locations
nnnnnnnnnnnnnnnnnnnnnnnnnnnnnnnnnngatcatagtaggtcgtgccgttttagtcgatcaaaatgttactccaatgtgtttcagtatattgctatactagtgtttcagtaagcgccggagcgcagcaaaagttccaatgtgcttacgtatctctacaattctgcagcacaaggagaggtaaagtaattaacctgaaaattaactaattatcaaggctttagcatgaagcggtggtgctgccgctgccgcttgacgtgaagctgacgccgctcatggaccctccgctgccgcccagaccagacgccttctccttggccgccctccggatgtcggcttcccggcggtcggcgaaggacaggaaggactggagcttgctgcgccgggagagggagcggctgccgtcgctggcggacggctgcagcgcagcgggggtcctcctccgcggcgtggcgggagtactggtagaaaaaggttgcangcgtgtatggcgaaggcgaaagatgcaggngaggccgcagatgaggaacagcgccganaagctgtacangtccaaccggtccggatcctg

SEQ ID NO: 387569 - DNA, 839 bp, Oryza sativa
ttacagagcaaggtatataactcataccaagacatcaatttgaagaacacatgaacaagcaattacaacattttttttttatgggaatttcatggtaatatatcgaatcactcaagatttcaccagtgcgatagaaaaagataatcatgtccaccaaaacacatggtaacttaaagcatcatcatcacggctaagttcaaaatcttgaaagcaaccatagatctaaagacaaaacatagaactcagtagtacgcagagctaggcgagccatggcgacgacggcggcgaagaggcgacgacgatctagacgcggtcgcggcgggggccaccgtacggcgggcgggagtaggtcggcgcggagacctcttgctggcgctcgacgccggggaggtcggccatgccgagcgcggcgagcatctccatggtctccttgtcgacgcggatctcctccacctcgagcgccgacttctccgggacgaagtccatgcggcgctcgcgctcctcctcctgcagcttcagcgagatgccccgcacgggcccgcgctggatgcggcgcatcaggtgggtggtgaacccggccaccttgttgcgcagccgcttcgacggcaggatggacacctcctcgagcaccttcttgttggtgtggaagtcgagcgtcatccgcgagtagtacttctcgatcacctgcctcgaggtcttcttcaccgtcttggtccgcacgcgacccatggctgctcctctccttctccggcgacggcggcggcggcggcgcgggtggctacttgcggcggcggcggcggcgagggtggacgtccgcggacgcgtgggcggacgcgtgg

SEQ ID NO: 387570 - DNA, 512 bp, Oryza sativa
  unsure (1)..(512): unsure at all n locations
aggccgttccggcgggcgtagggaggcggcggcagccgttctgctgcggccgtaggtgaaggcgtcgggctggcgcacgacgccccgnggagcggccatgccgagggaggtgagcatgtcgagggtctccttgtcgacgcggatgtcgtcgacctcgagcgccgacctgtccgggacgaagtccatgcggcgctcgcgctcctcctcctggagcttgagggagatgccgcggacggggccgcgctggatgcggcgcatcaggtgggtgctgaagccggccaccttgttgcggaggcgcttcgacggcaggatcgacacctcctccagcaccttcttgttcgtgtggaagtccagggtcatccgccagtagtacttctcgatcacctgccgacacgtcttcttcaccgtcttcgtgcgcacgcgccccatgccgggctcctcctcttcttctccggcgacggtagagcgggtgcttggagtgggggcggcggcggcggtggggagtgagattc

SEQ ID NO: 387571 - DNA, 766 bp, Oryza sativa
ggtgcgggcggcgatgctggcgctcggggagtggcaggacgcgcacctcgaggtgcggtacaccgacgtcgactacctcgtcttctccgacgccgcggcgtccgtcgccgcgggcgggtcccccttcgcccgcgccacctaccgatactccccgctcctcgcctacctgctcgtccccaactctctcctccaccccacgtgggggaagctcctcttctccgcagcagatttgcttgttgggttgttcattgacaccattctgaaactacgtggtgtccctgacagcactcggatctggtctgttgtagcttggttgttcaaccccttcacgttcacaattggcacaagaggaaactgtgagcccatagtctgcgctgtcatactttggatcctgatatgtttgatgaatggtagagtattgcaggcatcattctggtatggtctgattgtgcacttcagaatatacccaatcatatatgcaattcctttcgttatagttctgggcaagaattatgctggtcctgctggaaggcctattcttacacagtggacttctaagcaacatttacaaagcgataaatccagtccaagtgtggaaagggcaacatcattgttaactaatttatggaattttctgacaagccttataacaagaaatacgatcctgtttggattactttcaggatctatgttctttctctggactggtgttttcttctacctttatggatgggaattcttaaatgaggcactactttaccatctt

SEQ ID NO: 387572 - DNA, 767 bp, Oryza sativa
  unsure (1)..(767): unsure at all n locations
nnnnnnnnnnnnnntttttttttttttttaataacaagttaaatttgccattttgataaaccaatacgattaaatgtggcccgtacagaagcgtatcggtatttggtaacatcaatcaaccttttttgctttcacgtttcgacatgatataaaacttctgtaaggagcgaaattgttacaaagaagcatcaataggaaaaaaaaaagaacagatggaaactaggtatccaaaagttagaccagcttcattgaagctatctgggtagcaacctccatagcttcctttagttgagaggcctcagttccctggccctgggcaattccattcttgccaccacctccctttcctttgaggggcgcaatcgatggtgtcaaccaatccaacaccttcaagctgttagcagcgctgggaggcacaccagcataaatgactgccttattcgtggcttcatccgtgctgaatagcatgattggcaaatccttctggtccttgactttgataactgcttcccgaatagcacttgtgtcaagacccacatctacatgagcaacgcagaagcgctttccttcagacagagcagtttggccggcatctattgcaaacttcacggccttctggatgttctcctcgcccatcttcttcttggccttcctaagttcatcctccaacttcgacacccggcctttaagatcagcttttcttgcagctggaattaaagctgtatcaagcttgctcttgatggaagcaatcgtctcccacgcgtcca

SEQ ID NO: 387573 - DNA, 1592 bp, Oryza sativa
  unsure (1)..(1592): unsure at all n locations
tttttttttttttttaatcaaatggagagtatatcttttcttttattcccatatcaaatggtacaaatattaaactgtctaagaacataactcgaatccgtattaaccaagagtaaagaaacaaataaatacaaacaaaatacgcctcttacaacaacatcatttttcaccagcatgtgttcccctccctattagaagaagcccttcacttcagctcacaagcagcagcttcaagtaacaaaagaaaaaaagctcatcacctcatttgctcagttcatggcaggtcctccttcatgccgcggacgaactcctccgagtgttccttggtgacgcagctggcgagcatccgcgtgccgtcgagcggcagcggcgccttgaggatgacgacggaggcgatgaagtcgttgttgacgagcgggccggcgaacttgggcgggccgaagccgtagtccacctcggcgaacccgagcttgctccagtcggagacgtagatggactcgtagttgaacgtcatctggaacgggtcctgctccgtctcctccttggcgaactggaagaactccaccgccatcctctccttcgcctgccggatcatgtccaccacctccatcaccgacgacgacagcaccgtctcgctcggcgctgacatcttcaccgggaagatggagttgccgtagtaccccctgtccagcttcagcaggtggcgcacgctggcgaagaagcagagcttcacggtggcgccgggctcgaggttgagtgccctggtgcggcattgccacacttcgccgtcagcacgtcgaagccggagcagaacttgccgctgtgcgccttgtactgcgccttcaggccgtcgatgtagccggtggggaantcgaggacgatgtaatcgagcgccagcaccggcagccccggcagggggccgggcttgatgctcgggttcgggaacttctccctgtcccacaccggcttcaccctcggctccgggagcccccgcgccatgtcgcccaccgcgttgatgaactgagccgcgcccatgccgtccgccgacgcgtggttgaaccggagccccatcacgaacccgccgcaggtgaatttggtgatctgcatcatcatgatggtgttgtggggctcgacgccccagcggtcgtcgccggggtaggggacgaggtcctccttggggaggaggagggggcgctccaggaagcggacgtcctccaggctgcagtcggcggcggcctcggcgaagtagacgccgtcggcggtgcaccggatggcgggggacccggcctcgggctccacgatgcgcccggcgagcgggtagaagaagaccagcgccctggcgagcgcgtcgcggatgacgcccggggccgcgtcggcgcccgaccggaagatgtgcatcgactccaccagcccgcggtgggtcgggtaccggtccacccacgccagcggcagcgtctcctccggcgtcgccgccgccggcttcaccgccccctccgagatcctcgtcaccttgaagctccccgtccccgccatggccgcgtctcccttttttttctttttttctctttttttttttgagcttttacgattcg

SEQ ID NO: 387574 - DNA, 613 bp, Oryza sativa
  unsure (1)..(613): unsure at all n locations
nnnnnnnnnnnnnnnnnnnnnnnggataaagcgggatcncacatncccctgtaaatgttggcaatgcaattacacccaacacagccagtataagttcatccattgcaacacaaagaatacgagctagttcaccgaacaccttcagagttgagcaatggcgtacgagagatttacaacccagcttcgtttgagcgtggcatggacatcttgttatgcattccatggaatcaattgacaagttaaatcagaaccaccagaaaaacacatccgcggacatctgacaacgctaaaaaatcgcaggagttcgttgggcaggaagacaggaagaagctaaaatccgtaagctgtacatcgtggaagtctagagtgcaccaggtgcgtccctcatgctgatattcaagctgtttctcattgttcttcgtccgactcccatattgcccttggtcatcatggcaacaaattctccatagtcaatgcgcccatcattgtcctgatcagcttcattgatgacatcatcaagaaaagcatcgggcatgttatgctctttgcaagcttgctgcagttcatccactgtgatgtaaccacttccatctttgtcaaaatatgaaaaagc

SEQ ID NO: 387575 - DNA, 1275 bp, Oryza sativa
  unsure (1)..(1275): unsure at all n locations
nnnnnnnnnnnnnnnnnnnnnnnnnnnnnnnnnnnnnaagcagaagaggtagaaataaacacaggatatttaaatctgagcatgcaaaaggacaaagattatacacatcaaaatacccacatttcagacacggttttcggacttacaacacctctaagctctagagcggttgctcatactagtaacagtaaaatggtgcctttaagtggcacctgtttttattttttattttttttatgatatccttgcaagttgatgcagagcttggtgaactggcagcatggaataaaccacagcgttaaaagttgattgcttgatgtgcactggagatcagatcaccatatgctgcaaggcccaaccttatgtacagtggtgattggttgcctttatatgactgttccgctagggattaaggcgtccttgatcacagtgacaatgccacttttgatgaagtatccatcagtctcccttgaagcttcttggatattgtcgacattgattatcttaacattttctccaatacgggcattcctgtcaattattgcttttctgatgtgtgcattctttccaataccaatgggaatgccaccagtctcagaaagggctttcttgtccgtctccgtctcataatagtctgcacccattagcagagagtcctctatcactgcgccttcagatatacaggaccggagtccaaccacagaatggttgattgtgcaatgtctaataacacaaccttcaccaataacactgtctgtcacatcagcatcaagaacttttgatggaggcaagtatcgaggttgcgtataaattgcggcagaacggtcatagaagctaaaatctggcacaggtttcttggttatccccaagttggcattgtagaatgcctctatagtaccaatatcttcccagtaaccatcatataagtaagcttgcaccctcatcccaatttctgttgctccagggataacctcgcttccaaagtcatttgcagcagggaaattttgacggagaagcttaagcatcacatctttgctaaaaacatagattcccatactagcaatgtaaggcaattcctttgccctctcagtatcaaggccaagtatggtagtgtcaaccatcattgatttcaacttctctccttttggcttttctgcaaattcaatgatcctcccttcatcatcaatcttcataaggccaaatcctgtagcacgttcttcatccatgggcagcgcagcaacggttatatcagcatttgtttctccggacgcgtgg

SEQ ID NO: 387576 - DNA, 457 bp, Oryza sativa
ggcagaaatgaccctaaaacaactaatcgtggtaagtaaatacaatgagcaagttcgtacagaccacgaattagtttgaaagtcgccagattccatcaatattcagcaaaacctaattacttcatattttcggtgtcttgatcttgcctttcttttctttaccaagatctgtacgatccctctaaaactaccatgccacaggaactacggggtgaaaaaggaacagatcattacacaaaatctcccaactggcgtgataatctgttgtccagcaaaacacaccaagaccactccagcgactggtagattggcagctctccacttcatacggcaaaagaatcctgaacatgatcataaaaagggcatcagaagacgacgagcagcgtgaagagcatgtagacaagccagcacgcgttggtgatgagccccctatgcttgtaccggttgatgcaagctt

SEQ ID NO: 387577 - DNA, 631 bp, Oryza sativa
aagaaaatgctttactcacactagcttctctttatattttacctaacaccgttaacaatcacaatgtttttatccaagagtccgccttttcgatctggtcttttacgcagaccagaaggggtagtaacaaactctcttatttgatcgaactttacattacttataggcttataacaaacataatatacacaacgtacaagcgatggactcgatggtaaacttggtaacatcaaccatcggccgggaagatgtttgatcaagttggcggcgtcctagagccgagtgctcttgaaagctctctgataatggacttctccttggcatctttatctccttcgaaatgccattttcgggacatctcttcagcccagcttctcaatggagctatttgttctttgatcatgtcggctcgtggttgcacagcatctcttcctttagttctgacatcatctactgaatgcaactgcagcttatctgctgtgtataataggacagccgttgatcctccaaacaccaatatagttgcagcaataaatgcctttccaatctgcgagtatcccccgaccccagccttcaacttttcagggaccatgggaggtgggtgcctatcacgccgtcgccggacgcgtgg

SEQ ID NO: 387578 - DNA, 1251 bp, Oryza sativa
taataacaatattatattaaacttgattgatagaaaagtcgctaaggagatagctggttgtattgtgaatacagagtgccttgcccacttgcattgcatacatcaaggaccaagtggcaaaagctatcttgcacactagctagatacatgaaacatgagcacacttgcaatgttacatagctgtaaatatttagatccatgctaatgattcttctacaaaagcacttcacttctgctaggtggataattaacttgggtaacctagttcaatatattgcttcaataacatgggcccacccctttaccataaccaaattgtggtgctaccttgatctcatcatccatcctcaagcatgtttctgggcaatagtaatcccacataggatatggcaatagaggaccagataggctattggatgcactatcctttgcttcatcaaaacaatggccctgggagcacatttggggcctcaatttccatccatatctgatccatgggataaccatccatgtcaacaggggtgcttttcatgatgcttgtgatgcagccactgccgccatgaagttcctgctcctcaattccaatgatcattgacggggtctctgggtggcaagattggtatgtcagtgaagacgaggatgatgagggtgacatgttactcttcctctcctgtgctttcttcctcatatgtgtcctccagtagttcttgatctcattgtcagtacgtcctggcagacgccttgctatccctgggaccacctgtttccccagccgagcatggagctcaaggatgcggcgctcttcatgcggagacatgcgcccacgcttgaggcccagggtggaggtagttgacccaccggcggaggcggcagctcttgcctgtgcgattaaggcctaatttttggatcccccacccctcaaacctgatactttggcaatgaaatcccaacgacgttcaccgaacaatcggacagtgcataccagttgcaggtcctcctgctctgtccatggccctttgcgtatctcttctctcactgtcaccatattgattaccctagtatatgatgacagtgttgcactaacgctgctcgctcctaccttgtatcggctcggagccggtcttcttgctcttcttccacctctgtgtgcttgttggctccagcttcaggatgtgatccttgatgaactccagcctgttcagcagcagaggaaaactagctactagagagagtaaaccacggacgcgtggg

SEQ ID NO: 387579 - DNA, 790 bp, Oryza sativa
catcatctatacccagcaaggaaggtgcccctggcgcctcaatttctttccatatctgatcccatggtatatcccatccatgacacttctgaagtgcttttgaggactcttgccatgcagctgcgatcatcatgaatgtctcctccatccatactgatgattggcacagtatctaggaggcaggattggtataccagtgacgacgaggaggacgagggtgacatgtcaccccttctctcctgggctttcttcctcatgtgtgtcctccagtagttcttgatctcattgtctgtgcgccctggcagcctccgtgctatcctagaccacctgttaccccaacgagcatggagctcaataataagatgttcctcttttggtgacatgcgcccatgcttgaggccagggtggaggtagttcacccaacggaggcggcagctcttgcctgtcctattgagccctaatttgcaggtccccacccctcaaacctgatactttggcaacgaaatcccaacggcggtcaccgaacaggcggacagtgcataccagttgcaggtcctcctgctctgtccatggtcccttgcgcatctcctctctcactgtcaccatattggggcttgggatgttgcaatgctaacgttgttcacttctaccttggataggatgggagccactctccgtgttcttcttcctctttgagtttgttggctccagcttcacgtttagagccttgatcaactccagaccaactggaaggttgctattagggagagaggaagcccggacgagtggg

SEQ ID NO: 387580 - DNA, 1000 bp, Oryza sativa
  unsure (1)..(1000): unsure at all n locations
nnnnnnnnnnnnnnnnnnnnnnnnnnnnnnnnnnntttttttttttttttttttaattaagaagcaacatactagttaataataataatacttctcaagcgcaagcgtttcgggttacacgactcgatcgaagagcaaacatgccgaaagaaacaggaaataaaacgggtaaaacatagataatcaggggtcgacgggtcctcccaaatgggaatcagaaccaaatctaaaacgggaagaaacaaaactagtaaaaccatggggagatttcttttgcattctactttcttcttcttcttatgtagacatcacaactcttaacgctgcttctgctgctcgtcgtcactgcctgcaagcctcatcggatccagatcgatcggacacgtacggccaaattacacctcagtgccgggtagtcccgcggtgcgttgcacctgaagcactccatcctgctggcgaattgtgctcattggcatccagacctggtgcaaatccagtcgccagacttccagccagggcggctggcgcggacggcgccgctgccgaagccgtagccccgcgagcgcgacatgtccccaccatcaaaggcaccagcgccgccactgttgacggcagcatcgtccttgaaagcagcgcacttgaagcagctggagcggctggcgaagttgtgcgcgccgcagttgcagtaccagtcacctgggcggacatcagagccagtgccaaagcctccaccgaaggaggaaccaccacggccgccgaagttggcgtagtcaccgccaccaaccctgccgcgatcagcggcgccacgcggctcgccgcagcgctggcataggtcccggcggctgaagttgaggtgctggcacgccctgcagtcccagtctcctggcttcctgttcatcttgtcttaccctaaacaagtatcagctgctgtgttggtgagctctaaggtggaaaatgctgtaaggcggacgcgtgggcggacgcgtgggcggacgcgtgg

SEQ ID NO: 387581 - DNA, 494 bp, Oryza sativa
  unsure (1)..(494): unsure at all n locations
gaantaatttccgnatngcataacgctaccggagtccccgcggtccgttgcaccttaagcactccatcctgctggcgaagttgtgcgcgccgcagttgcagtaccagtcacctgggcggacatcagagccagtgccaaagcctccaccgaaggaggaaccaccacggccgccgaagttggcgtagtcaccgcccaccaccgctgccgcgatcagcggcgccacgcggctcgccgcagcgctggcataggtcccggcggctgaagttgaggtgctggcacgccctgcagtcccagtctcctggcttcctgttcatcttgtcttaccctgctctctggagactcgtcggcgtcctcgcacctgcggacttcggcggcggcggcggcggcggctctttaatccaacccgcggcgttttttctcccttttttttcttttttttggaggtttttatttttcttcgtctttctctcgtgttcgtctcgccggacgcgtgg

SEQ ID NO: 387582 - DNA, 1407 bp, Oryza sativa
  unsure (1)..(1407): unsure at all n locations
nnnnnnnnnnnnnnnnnnnnnnnnnnnnngacaaccattcttcagtttaccattggaacaggttcctgaacagcattcgccctcacaaccagtatttggggaaaacataacgaaaaatatcaactgaccccacaaagaacaagggcctgttgattttattatcaaggtttccaccacaaattaagttgtcccgagtctaataaacatgaacaaaataacgggaggcagctagatgagtaacaacacaacacagcggctcagctcagataaggcagccaacaatagcaccatatgcttcagagcacagggcatcaccatctctgcttccctaccctgtatgttttatcagcacaacttcaatcctcatcgtcatcatcgtcatccttcttgatgcgagtggttccaccctctttgctaatgggcagcttcatgttcccgaacggagtatcgacatcgatcttgcccttgatggtgtagccagtgcccctccccctgatcatgtcccagacagcagagccgaaatccttgggcctgaagctgaatgggacctgcatggtggtgatcccttgcttctcgatcgttgccgactcggtgagctcggcactggcgacgctgtcgtcgccgagcccacatctcatactcgagcatgttgaggcccaggtcgaagtcattcttgttctcgagcttgagatgcagcgtggcggtggtctcctcgaaggggaacctgtgggacttgatcttctcgacgtcgacgtcgggcttgtaggggatggggatctcgccggacttctcgagggggagcttgatcctgcccgatgatggggccgtcgatgaggaggacgaccctgacgaggtaggggatgatgctcccgggcttgatgtcgttgtaggtgctcttgatgtcgtcgtagatgagtgagatggggatcttgacggtctcctcgccatgggcgtggattgtgccggcgtccgggatgaggccggaagacgaagcttgcggccgtcgctctcgatgaggtagtcgatgtcgacgagcgggatagggaccgggttagggttcttgatgagcacgtcgacgacgaggtcggcgcggtggaggctgatgtgcgggatgtggacgccggagacgtcggcagtgggcttgccgaagccgacggccccctcgatcttctccccgatgtcgtggatgaagtccttcaccttctccatgaatcccccgcctccttccttcttttcgccgccgtcgtcgtcccggcggtccttcccgccgccacgctccgtcaccgtggggttctccgacgaagacgacatgctcgctaactgtgggttgatgcggagatctggacgaagcgagtggagatcgcgagcggaatggagaaatttagccaagcgtgcgcggaccgtccg

SEQ ID NO: 387583 - DNA, 590 bp, Oryza sativa
gaccgggttagggttcttgatgagcacgtcgacgacgaggtcggcgcggtggaggctgatgtgcgggatgtggacgccggagacgtcggcagtgggcttgccgaagccgacggccccctcgatcttctccccgatgtcgtggatgaagtccttcaccttctccatgaatcccccgcctccttccttcttttcgccgccgtcgtcgtcccggcggtccttcccgccgccacgctccgtcaccgtggggttctccgacgaagacgacatgctcgctaacttcaggtagcaacaacaacaagcgatcgaatcaagatctcacagcaagatcaaatcaagcaaacagatcgcacgccattgctaactccacaagaatcaccaaagacttgatcacaagaaagattgctttcttttctctttcctattctacacggctaggctacacacggcaacaagatctgaggcacaaatatcctccaaaacgaagcgagagcaagtagaaagaaacatagattgattttttcttactttacctgtgggttgatgcggagatctggacgaagcgagtggagatcgcgagcccacgcgtccga

SEQ ID NO: 387584 - DNA, 709 bp, Oryza sativa
  unsure (1)..(709): unsure at all n locations
nnnnnnnnnnnnnnnnnnnnnnnnnnggaagcccaaaaccttttgtaaataaatccagtaggaacacccttacaacatttcatattgatgatcactattcgtagttcaagtagaatagagtaacaggttacaaagctttaagcccattacaatctttcctggcgattattgtagcggcacatttacattgcaggggttgttttctaaatgttttcaggcttacgacaatagctggacagctgcgattttaggtatcttttctctgagcttctgagttagggcaacgcgaactgtcatcacaccagcagctgggcccgtaagcctaaccttgacgataggttcctcgatcgcaacgaattcaagctcaccacctcctgtgccagaaaggtatggcctaatctcatcgagtaccttttcaatattctcctggttcaactcaaggccagtctcctcatcagcaatgggctcgacagcaacaatttcaggaattttctccatcaagcgtcgctcaatacccatcttcattgttgttactgaagctcgggcatgatccacatgctccttgcagcttcaacctccaaccacattcccatcaattttcaggcaatgcaacatttcctccgtctgccataaggtagggtcgaacttcatccaatacaatctcaacattttcagctgtcaatggcagctcaactgctcggacgcgtcg

SEQ ID NO: 387585 - DNA, 896 bp, Oryza sativa
  unsure (1)..(896): unsure at all n locations
nnnnnnnnnnnnnnnnnnnnnnnnnnnnnnnnnnnnnnnnnttacagcaaggaaatttattgacatgaaaactatacaggtacagagtacaataaagattcaggatgcaaggagtatagtgcaaatgcaacctgtgaagtacatgtcaccaatttattaatacaactctcagtgctgaatacagtgcataagtgcaggttgctctacagatcccgacctttaggtttaagagctcccaagcagcttcttgatatccttctcaatactaagaggggaggtggtgggcgcatagcgatccaccacgcgaccctccttgtcaaccaagaatttggagaagttccacttgatgctatcaccgaaaagcccacctttgttagacttcagatacttgtacaggggtgcagcattgttaccgttgacatcaaccttgtcaaaaatgggatactcagccttgaagcgagtgcaagcaaactggacaatctcctcattggagccgggttcctgccctccaaactgattgcacgggaaagccaatatctcaaagccttggaccttgtacttctcatacagctggctcagctcagtgtagttggagttagttaagccacattgggatgcgacgttaacgatgaggagaaccttccccttgtaggtgctcaggttcacgtcttttccgcttgcatccttgacggtgaagtcgtggacggaggtggcggacggcgcggcggccatgctggagcgagcggcggccgagcggtctccggaggaggaagcgggtggttgcgaaacggtagcgtggagacgaggacgaacgatggaagcggtgggccgagagaccggacgcgtgggcggacgcgtgggcggacgcgtgggcggacgcgtgggcggacgcgtgg

SEQ ID NO: 387586 - DNA, 761 bp, Oryza sativa
  unsure (1)..(761): unsure at all n locations
agatgatccggggtagaccgaggaagggagtcagctgtttgttttttttttttttttaaacaggagcaacgtctgcaacaccagactcagcaacataggaatacaaaggatgaaacggagtgatgcagtgtaacggggaagtgaaacagattacaaatcggagcaccaaacatagcaacgattcaacgaatgtaccaccaccacaccaaaaccaaagctaaaagagtcgatgatgatttgggtatgcagtaaaaatctgaactgtaaagcgacgagccggtgatgatgagcgtgagatttggcattggtttctttataggaaagcgtccatctcgagcaccttgaggacctcatcctggttgttcagcttggccacctcgatgggggtcttcccgtccagattctggggcgtgacagcagcgccatgcttcagcagaagatccacacattctttccgaccatatccagcagcgtaatgcagtggggtgttcttgttcttatccagtgcgtttacagcagcacctgnctccagaagattctgggcatttcaactcaccgtaaccaaacgcaaatgtaagggccttnttcctcagngctttttaaccatgccngcncatcncnaaggtttttagaccncgatgcaaacggagntatggcatggcananatcacaccttagttttnggcaaatnnggggagncnnccggaaatttgaangggnactttnaactgggggncnggtccaaggggggcccttttaaa

SEQ ID NO: 387587 - DNA, 1550 bp, Oryza sativa
  unsure (1)..(1550): unsure at all n locations
nnnnnnntgtacaccggggcagtgcatctcttatctatataaactcccaatctgacacgataacgctgagaagaacaggagcaacgtctgcaacaccagactcagcaacataggaatacaaaggatgaaacggagtgatgcagtgtaacggggaagtgaaacagattacaaatcggagcaccaaacatagcaacgattcaacgaatgtaccaccaccacaccaaaaccaaagctaaaagagtcgatgatgatttgggtatgcagtaaaaatctgaactgtaaagcgacgagccggtgatgatgagcgtgagatttggcattggtttctttataggaaagcgtccatctcgagcaccttgaggacctcatcctggttgttcagcttggccacctcgatgggggtcttcccgtccagattctggggcgtgacagcagcgccatgcttcagcagaagatccacacattctttccgaccatatccagcagcgtaatgcagtggggtgttcttgttcttatccagtgcgtttacagcagcacctgcctccagaaggatctctgcgcatttcaactcaccgtaaccacacgcaaaatgtaaggcccttcttccctcagcgtcttcttcatccatgtctgctccatcctctaaagctttcttcagaccctccgcatcgccaacactggcagtatgatggacaatggactcatcatcatctccaccatcctcttcagtttcttcaggtccagacaatgtagtggaagtagcagcatctcctggaaaattaattgacatagcctgaccaatcttttgaagaacttcagggtcattccagtacttcaccatagcagatggaccaccactctctatctcatcaagaatccccttcaaagagggatcttctttaatacgggacatccgctcttcaagcagctccttatgagaaggactagtcaaactctcgagcatactggacattccaggatcctgcataagagtattcccaagacgttctgccattgacatgaattgagggttttgcatgacttgtgtcattgtttccatgtactgctgaggatccaatgcagggccaccctgttccccggtcacatgagcactcttctgcagctgctctgccatctgggtgaacacagggtcgcttgcaatctgctctgccatctcctttatagatggatcattgagcaagttgctaaactgagaaaaatcaaaaggattgggaaggcctgcatcaggtgccgggggagctcccctttgcgagccagaagacccctctggttttgcatttttcttctggtcttccatccgatccgaacctggggtgctcgtcggccacgcacgcgcgtgtggtggggactggggagaagcccctacctaagggcgagaggggatcgggagaggagaggaggtcgcccacgccgtggctcgccggcggtgggcgggtggggggtgaaggctcgccgcagcctccgccggcggcgacacgaggggatggatgcgatgcgagagagagagaggaaaaccctcgatgaaaact

SEQ ID NO: 387588 - DNA, 1448 bp, Oryza sativa
  unsure (1)..(1448): unsure at all n locations
tttngtcttcaagcttatctgtgtacttgactgcccttttntttattataaacaattatggttgctcattgttgattttgagctaaggacaagtggtcaatagtatccattgtgatatgcacttgtgttacatataatagtgtataaacatttgtctcatggttacaaaacaatgtggaaagaaaaagcatccttgtgaccttagttgctaaaaattggcggatgccgcctatacaaaagtaaggggcctcgcccatctgtaacacatttacttcccatttcttcagacagttgctgctttgagggtgagaaaatcagaaatttggtttgtgtagaaatctggctggatcgagttgtcagggctctgaagcatctgtacagaagtgacacctgaaaggaccagaagagttttgcaacctccgttttggccaaacaagatgtcggtatccaaacggtcaccaaccatgcatatctgggatgttgtgatcccaaacttctttgccaggtagtccatcatgaatgttgacggcttcccgacaacgagcggttcttgtttagttgaaccaagaattgcaccaaccattgaccctccacctgcccactcttgggcatcagtaagatgggtgacggcgtcccggtttgtggcaatgaaaaggcaccctggattctcacgaatgcacagtgtcccgtactgtactttgtagtagttaaaatagcgatcgaatcccacaacaactgctccaacatctttgtcatgttccatgtaaaatccaggcttcagctctatcttcttgtctccatcagatggcccgccgaggtactgaaatccagccagctccagctccttcagaatcccgtcctctccaatcacataacccttcttgtctttggggaaatcgatggactgcaggtacgcggcagctgcgaccgacgaagcgaagatctcttcctcattgacgtttagtcccagcgtctcaaacttcttcccgtattgcttcctcgacttggtcgagttgttcgtcacgaacaccagcctcttgccctttgatctgagcatgtcgagcgtctccggcactccgtcgatcagcttgtcgcccttccaaatcacaccgtcgcaatcgaatatgaacgtctcgacggagtcgatgagcgcgtcggcgttctcccacttcgccgcggggaccgcgccggccgccgccatcacggacctcctcctggcagcacagcgctgaccggccaccggagaagaaacggagaccaatccacctccccggcggtactggctcctcccgaaggtcggggaggacggcgcctgctgcggcgagggcgaggcggcggaggtggaggggaggaaggtgggggaggcgcgcgtcaggagcatcgcggctgctgctgctgctgctgctacgtgcgtttttgtttatccggtggcgtctgtttggttggtt

SEQ ID NO: 387589 - DNA, 1226 bp, Oryza sativa
  unsure (1)..(1226): unsure at all n locations
nnnnntttttttttttttttgaataacaatcaatcttgtgatgtgtatatattagcagtacatttgctttgcttctacatggcaatgccaaagcaaaacgatattgaattggtacaaatgaggtttcttgggttgtactgattacagaatcttctgctttctatcatagcaatttgattcagattactggtcataatcatcagctactttctttacattcaatcctagtatatatatcagaagaacatcgccttgtcatcggatcatctcctaacacaaaacacccaattcaagagttgtgataacctctatgactgaatcatctgatgagaggggcatctcagaattgagcattgattcattggctcgattcctgccgcaagctcaggtcgggagcggcaacctgaggtcctaacccaagccatggctgactctcctgcagctccttcttgaccggagaagcatctgaaggggaaccctggtagggtgctttagcctgaaggcgatcctttcttttctcgaggaaccggtgaagcgacgccttcctagcctgaggcagatcagcagcatttggacgaacaggtttcggggcattggcctgagcaacaggaagtgcacttgctggggctggtacagcagacaccttagtgttgtcggcaacggttgcagtagcggaagatggaagaaggacacagttctgcgctgtggaggaactcttgctggccatctgcatcaggtccttggccttctcagctgggaagtcatcaaacaccaggaccttcccaccgtagaagatggttaattggcgcttctcttgctccctcgcatccggggtctccttcacggcagcagcttcagagccgaacccggaattctgggggaacagctccatggtctccttccccttgttcgcatcggcttcacctctgatgccgaggccgagctcgcccggggtgcgccgttctgcctgacgtagcggctgagcaggctgcaggccatggcgaagctgctgctccccctctccccggatttcgcggaagccatcttcttcttcttcttctgcccacaagctgaatccttttctccgaacggagtcacggacccccgaaatcctcccgcttcgattcgattcgatcgagtcttctcctctggtcgcggttgcgggttgctcgtccttgtctgtctctgagttgtcttcctcctccgtccggcggttcaggttctat

SEQ ID NO: 387590 - DNA, 591 bp, Oryza sativa
  unsure (1)..(591): unsure at all n locations
aaggcttcgacagactttacctgaggacgcacaaacaaattttgcagcaccacatttttccgtacattgcatcattcatcacaaaagtggtatgtacatcatcagctgtcaggagttgcttttggtttttcagcacatatattacaagcaacagtngcagtagtgcagcacacccatgactcgtgaaaaatagaacccaggagaagacatctgcaaaaactagctgggatggattggggcagagcttctattagtcaggaacgttccaacactgggttgatcgttgaggacgaactatttcttttgctttgcacgatagtcagcagctgctgctttgatggtagacttggcgagtgaggttggctttaggacgcttcctcgggttcaaggcctgccgaatcttgaacactgcccatgctgtcccgattgcgtggcctgctgcatccatcccttcattggtcgcagccgcggctttctccccatatttgtgggatacaagaccggtagtcacagttcatatgtggacagaacattcgttccagcaacttcgactgcgtcgcaaatcttccccacgcgtccgcggacgcgtgg

SEQ ID NO: 387591 - DNA, 740 bp, Oryza sativa
  unsure (1)..(740): unsure at all n locations
caatgtgcaccatggccccacccgttgctgtaggtgaatttttcagggatctttgcagttttgctagtgacaataagaagtgttttgtttggttcagtacaaggttgactcgaaaattcagctgaatttgtatggctcgtggtgcagacaacaagatattgcagatatcaccaccattcagttagagttgctgttacacagctgagctcgactcaactggacaaaactatggtccctgggcggtgagaaccaggcattactgatgaacaggaaggtgtcaggccgctggcactaaaatctggggtaccagaacatgcccttgatgccttgagggtcagcttcgaatcccaagttcttgtagaaatctacaactttgttatctgcaaacagcgtaatattgctgatgtctctctggagcaaagttcggattactttctccattaacgctttaccaagaccttgaccctgatatgaagggtcaacgagaacatcccaaatggtagcattaaaggcatggtctgaagttgctcgcgccataccaattagttgcttcctctcttctccctctggcttttgaaggcatagtaactgaatgtaagtgtagccaaccaggtaactgtttcttaagggatgctgctattttggttaggggtctgccgtgggccatcccaccttgtcggcataaaagctttggagantcatacacattaacatctccagctgaagaaaatatgatctgc

SEQ ID NO: 387592 - DNA, 445 bp, Oryza sativa
  unsure (1)..(445): unsure at all n locations
atcatcgggacacggtgattttattcataattttgatgctgacatgtagataggagtttgcaacaggacgagaaaatgcgactagattgacaaaactgaacgaaataaccaagcaactgacactgacgactgaaaaagaagcatcgtcgaattattacgcgcaacccgaccagctgtagtgatgaactcggggacaacgattccggcaggaggagatcagctcgatccggattacggaggcatcggtggctctcacaccttgaagctgaagctgaggaggaacttgttcaggccgnccttccagccgccgccgccccgtttcttgcagggattgcaggtcgcgacattcgccagctcaggccggccgcccttggccatggtgtcgcgcgccgtcttctgccagagcaggaagctccggcagccgttgaagtagatcttctcgtcg

SEQ ID NO: 387593 - DNA, 590 bp, Oryza sativa
ccatgccaatatttgaagcgatcccgttaccagctttggtaaatgtgttctggaatcaatactaacttcagcaggattacaaaattaacgttccatatctaaaataccatcaccagatgcacagatacagttacaagaagccttcttcaacaatccctcaaattaagtgacagttgatctcatttaaacgatagcagcatcatattccaatggatcagactgggcatacttcatatgcttcttaaataaaagcccaaagaacacaatcagcggttgccctcaggaggttgtgcataggagaaaggagcctgtggaggtgctggctggaggtggagcagaaaccggaggtggagcaccagaagttgggcctgcaggttgcggtggatttgtttgatacatggctggaggtgccccactgttggggatgggggcccctggggctccagatgttggaggtggtagtgtcgaagcccttgggagaggtgccatctgcataggcatagaatgagccgccacagagccagtgggcatggatgcagagatggaacgcctgtgtgcggcatggttggaacatttgtacggacgcgtgg

SEQ ID NO: 387594 - DNA, 1502 bp, Oryza sativa
ggtagagaaatttttttccagaaaaaaaatgaatggttcagtattccaatattggacaatacataaccagcggtgggtacacgtataaatagacaagccgctctagaggcatcatctctacacttcagttattctgctataggaaataagacatgacatgatcttccagagatgctcaggtaggtcatgcatcaacaacgtgaaaatgtctagacatcacagggagaattacatgaccaaagaaaagacgatttatcacagcagtcgcacaaaaggagaacaaatttataggttcattacctgttcctatgaataatggcctaacctgaaacatggcaatctctagctgctcctgttgtgcgagagctaaccttttctatactgggactttcttagtggccccaaaaaggagttaccaactccgcttgctcttccagccttttggacaaccagtattactcacacttgatggattttgtatatgttgacggaccaaaggaacaatgcggcacggaaacccgatcatgcccagcatcaggaagaaagcatagcagatgcaagccatgtagccgaagaagaatgatgtctgcataaatccagacatatctgatcgtgcataatagtagtacagacaatacccatagacaaaaaatccagttgatcctccacataggaatgacctccaccaccattcatggtcttcagcagcaagctgaaagtacgtcagtgcaacagtaatgaaggcagtaacaataaggaggatgatgaagactatgaagagaatgctgtaaattgtgtaaatcctgtggccccaaacactagcaaagatgtagtagagctcaatatagatggcactgaaaggtaaaaacccagccatagccatctgcgggattgtttgccggtaccacggaagtggaggaatctccctaggatatttggtggtacggcagggagcttggaattcagtcttgctgtttttaccagcaatgcctcccaaaactagaaggggaaatgtaactaaggtccagatgagcacaatgacacagatagtgccgaagggcaaagctgctgttgcactataagcaatagcaacagtgtttaggaagcagaaagtcaggaataggggtccacagaacaggcatcctgtcaacagcaagttcctcacccagtttgttccctctagctgacagtagaaagaggttgcaatatacccagcaattcctgaagtgagagcatagatcccacaccaatgcagtaaaaagagcaccacgattgtacgggtagaatactccaacaagtgcaagaaggaatataaaggttgtgagggcaaacagttgagttccggtgccgagagcagccgaaaaaaaggacttgttcttggggaaccggaagacatccccatggatatacttccatccagactcttcttggtcatcagctgcttcctcatcatgggcatacttgacaaaatcgttcttcagtactcgcatgaggatggtaac

SEQ ID NO: 387595 - DNA, 1855 bp, Oryza sativa
  unsure (1)..(1855): unsure at all n locations
nnnnnnnnnnnnnnnnnnnnnataagaaactcgtgtatatatacgtaacgtactaaaagaattatccaacataccccttgcatgcacgcacactctgacatgaacataaaacacaagagaacgaataaggacatgataaaagcaagcggcccatgattctgatgccgaagcggcgcaggtaagaaaaatcaacaccacaaaaaatattttcaaacggaagattggacaaccaaaaactacaaaagtataatgctgtgaatatactcttcaagctacaaaatataaaaatgagtacctgggcattcaggtatgattaaggtaaccatgcaaaaaatttgagataaacttcaacaaatgtgcatcttcaaaatcacatcagagatttctgggtcaattattgccagtttttgcatctagcttcttttcagcttcactgataatctctagctgttcaaaaaaactagtgagttttctcatgtcctcctcctggacattctgtggagccttctctttgtaaccagaagcttccattttctgtgacagtgcgtgttggagcttttgaatttcttctctctttttcctcagcttttcaagctcaacttctgcattgagagctccttggagttgaaggtatacagacaaatctttgtttacaacagctgttgcacagtcaggtggcgtttcatcattctctgtcaggatctttagagatgatgtggaagaaagagacacaactagagactgataacactgaatggtggcagtaatctcttggcctcggcaaagtgcaaaagcaggtcgtctctcatttgtatcagatggtggcttcagagatcttagtttgttgatagtatctaaggcaatatctatctcattttcaagtttatcatccgtccattccttaacaacagatgggtactctgataccataatggaatctttccgacaagaatctttaggctgaggaagacgctgccagagctcttctgtaacataaggcatgaatgggtggagcaagcgcaaaccagtgtctaagcaaacccataaggcatctctagaggcagctcttgctgattcaaactcttgagagtcattgaagaagtaaggctttatagcttctatgaacacatcacatagttggtactgccaccacgagtatatagcagatgtagcatcagaaaatttgtatgcttctaacgaggtgacagttttgccaatagctttattaagtactgacaatatccatttgcatatgggtggcattgtagttacagaaatagttgcagggggagtgtaatgattgccaagcttgcccattgcaaaacgaatggcattccataatttattgcaccactgtcgatatccaacaactcgtttgatatccaggtttatcttgtcagactgcgaagtgtaagaaaccagtgcaaaacggagagcatcggtaccacattcagcaatgccatccaggaaaatccttcttccttcccttctggttgcaatggtcaaattcatttggatctagattgccttctttcaaacgtttgaggagaccatccagtgaaatgccatttatcacatcaacgggatcaatgacattaccaagcgacttggacattttgcgtcnatgagcatcacgtatcatagggtgcaaataaaccttctcaaatggcacatcgccaccaagttgcatccccatcatcaccatccgtgctacccaaaagaagataatgtcatgtccagtttctagcaccgaaccagggtagaaagctttaaggtcagctgtatcatctggccaaccaagtacggttaatgggaagagaccagatgaaaaccatgtatccnanatcgccgtccg

SEQ ID NO: 387596 - DNA, 662 bp, Oryza sativa
  unsure (1)..(662): unsure at all n locations
nnnnnnnnnnnnnnnnnnnnnnnnnnnnnnnnnnnnnnnnnnntgttgcaaatattggaccacagattaaatgggccaactgggccaaacagatatacacaaagctcaatacaaatatgaagaaagcaccctcaagaagggagtaaatacacagctagctatacaatacatctaacacagactatgtgatatggtaatcgtatcaccatctttaacagaaagcttactgtccgtgtaagcatcgccttttaaaaacacaattgacttcattgcgacatttggatctgtagtccagcactgatttttgtaaaattcattgcacttggaaaattcttgctgttgaaagtcccaaacctttgatgggaggtgaatggatttcaaaattaattcagaggctgtagaccacccgttaatatgtgctgctcccatatcatccagtgcttgaagccttgcaccaatatgtggattgaaagaatttaacacaagacttgatatatatttattcttcaaagtctcagctgtatggatgatcagtgcagccatcgagcgcttgtgtttatctgaatagttgtttggatcaaagtgagccaaattctgcagcatatccctcattgtactgtatactacttgaaacagaggcagtctgttaggtccaagaagag

SEQ ID NO: 387597 - DNA, 1553 bp, Oryza sativa
  unsure (1)..(1553): unsure at all n locations
nnnnnttttttttttttttttcatccaacaggttacacacagtataatgacgattgataaatagtagaaatccagcatcatcaaattacagatacatgaactgcagaactggcaaacttaacaacagaatgatcgtgtatatagtagcactcttattccacttgtctcaccccacaaacaaacgaatacttctgagggacaagcaaaggcaattacatcacaagataaaatagactcaatatcaactctccactctccagggatactggtagatacaaattttccaatcagtgagcaatcagaaacacatgcttggtgttggagcagcagcaccaccagaagcccgtcccgccatcatcttcatcgcgagcggatcccatgccttgccctcggtgtcactgcaatttccagtcttgtttggatacatgtcagccacggtggtggaatcagcgtcgctctttgcagccagtgccttcagacgaatgcgctccgccctcgacccgattgtctgaccaacaatggaggctgctatggtgaatgccatggcagtcttgggcatgttgacagatttcctcagcattccaatgaatggaacagcggcatggacagctgcaaaccactgaggggagaatttcttggtgtgctcacgccacaccccaagagggatgtttgctgccattccgagcaacgcaatggctaccatctttgcaggcagaggctggggacggagagacttcacaagttcagtccgtgcaagggctgcacgcacagcgaccacagcaggtgggcacttcagcttcacaccggctggtggttgtaaagccttggcaacaaggggcagaatgccactcattgctcggtaagaccgggcaagtgggcactgcccattttccagccattcgttgctcattgcctcgtgcgatgatgaattacctcctttctgtttcatggaattctgattcggattgctgggcttcttgtttgactgatttagattgttgagcttcttgttctgccttttgcccttgccattaaagaagttaaagccgaatggcccaaatgcagatagacttattgtggcagctctagcagccaatgggttaaacggcagagcaggttcaggcttggcatcaacgctctcgctgttgttctcatcaggtacatatgactttcctgaaagcggaactattccatcccgtccatggaaaagtttaaatgctgaatcaaagcctggtccgtcctcaaaaattggacccttggctcctcgggcagctactggcaaagcagaagaaaatgaaaatgttgtagctccattgatgtttctcaggaatgggcatctctcgacatttggacgaccagagaagtactcttgtgatgctgattcattaagaaaactgccaaagaacatttccatcctcgccgatttgccggagagagagagagagctccgcctgcgggactactgcttccgtgcgggaggaggagactcgggcgagagagagagagagagagtgcagggggggggggatcgtgtggagggcacggaaccgaag

SEQ ID NO: 387598 - DNA, 439 bp, Oryza sativa
ttttttaaaattaaggcgggtgaacaagcctgatccaataagcagtttccgcaagagaaacagcacaaatgccacacacaccatgctcttcttttgcttaaatagataaatgttagacaaaacttttggatgcatcgacaaattggggtagaggggcatcataacagtagcctacgtgcatcaactcgtggccacaaccaacagttaacaagaaaggagcagtaaacagcaggcatgagaaaggacttgggaggatacagaaccaagaatcgcaagaaagctactatttgagggactaaaccagtatcagacgtgctatgatgcctccgatgctgttaaacccccacaaagcctgctatcccattaaaagcctcggcgcggggtcgctcctctgcaacattcactctcagcgcacggccatccaaactctgtccatcga

SEQ ID NO: 387599 - DNA, 1039 bp, Oryza sativa
  unsure (1)..(1039): unsure at all n locations
tttagtcaaattaaaatgtagaagaatacacaattgggttagaccgcatcnccgtgttcttcacaaaatatgttgcattncccgctacagaagcatgaatttcaatgattagcatgctcttcaaaatgaaacagtagttacaatttacaaattatctctgctgaatcgacgcactgaaaattttgtaatgtcaattagtaacaacagtttcaaatgctgatgtgtaattatttatgttaagatcaactaaatgctatggagatggcaaatcaacatgtacagagctngcnacatatgagatcagaactgtactgtgacgtgtgtttgcctggttagcaacttaaagcatttcagttagcattggttagcagcactagtgttagaatatatacttactaactcgaagtcaggggggtcctattgtaaaattagtcaccttttgagatcacaacaaaaacatcgtctagcgaccacttcctaatctcagacttctgttctggattaatgattgcctggtcatcgttggcaaggcggtagccaatgacaacctcgtctctttcacgagccctgaccattatatcaaagacactcagttcctcttgctcatagaggtaaaactcagctgaccgtatgcacatctcgttgccctcctcggcaaaaagttcttcaagaactctgttgatttgtttgtcctctgctaccattgctaatgccatgctgacgagttcatttgatagaacatagtcgctgattttggagacagatacaaggtttctggttctggaatccagaatttcactgataattattgatttatctgatgcgtgctgcatctcccgaatccaggagctgtgacagaagccattgtaacgcagaggtgattttagttcctttgatggaagacgtttagactgaatgtcgcgaattagaagaagtgtagctaaagaacgtgaatcagaatgtacgatggaatcctccactgactcatagaatcgaatgtctccagaggcaaactttctaagtgccacctgatgacgac

SEQ ID NO: 387600 - DNA, 409 bp, Oryza sativa
  unsure (1)..(409): unsure at all n locations
nnnnnnnnnnnnnnnnnnnnnnnnnnnnnnnnnnnnnnnnnnnnnnnnnnnnnnnnnnnnnnnnnnnnnnnnnnnnnnnncgaccaataataaccaatcatgcatcaagttggtagtgctatacagtctgctgctgcttcttgtctctctgtttttttttttttttgaaaggagtctgcttcttctactgctagctaacctactgaaggcatacatggactgctcaacgcacgtaccgagcccgcacaggtcggtctttcacagattatatacacatgagagagagatcgaagggcacggccggttggtcgatcggtgtacggtgcacggcatgttgttcgcgctccgatccgtcgcgcgcgcgcggtgcggtatcgtgacggacggtcggtcctngccttggcgagat

SEQ ID NO: 387601 - DNA, 1516 bp, Oryza sativa
  unsure (1)..(1516): unsure at all n locations
nnnnnnnnnnnnnnnnnnnnngcacccgcaagcatacatcttatatataataagtgtacaacattctttcttgggtgaatgcttatatcaaaagaaaattttccaagtacacatacaatgatacaaaacgacagctttgtttgccatgtttatggtgaagacatccataaaagaaaaaaaaacatgaaatctagctactccttgtcatggtaaggagaacacatcgtaaagtaactcaaatcgacatcgccgtagctggcctcttcaaagaaggttattcgtttaatttgcggcccatctcaacatactccttagccaaggtcggacctgatcagaggtcaactttcttcgcaagctttgtatagatgatgcgattatcccttgcagaattgctctcaacaagggcgatttgaaccaaatccttcacatccctgttagataagaacttccccaaattatgaagaatgcaccttaaatcatccaccttcaaataaccggctctgttttggtcgaagtatctaaaagcctgcagcagctctttatcaacgacctcatcttttgttgaatcacctttttgtgatctagttgtctttacctccttaccaactgccttgtcacctttctccgatacagattgtttgccctccactgaagcagatttttcaactacagactgtttgtcctctcctgaagcagctttttcaagcatattagcattgttttctgactcacgctcctctgtgttcttgtttccatcctcttcagtagttacttcctgcttggccttatcattcaaattatcttcattctgttctaccagttcctcagcagcagcttcatccatctcctcatcatcttcatataattctacctcttcaggatcttcttcataatcaggctcttcatcctccattttctcatcagctacaggctcaacatggacagctgctgaattatccgtgttcatgttttcctcaccctcttttataagttctttaccggccgctgtcgagtgatctgcactcatcttctccttgccctctttaaccagttcatcctgggcagctgctgagtgacccgcattcatctttgtctcatcatctttattgggttggccagctgaatgagctgtacccttacccgcttttatcatttcaacactttccccttgattactcgggccactttcacttaaagtttcatcatttgtcttgggccgcttctctgatgttttcttgtcttccttctttagatcctcttctctttggcgtttacgctgattcctcttgataacatagcgcttatataatttctcaagaaaagataatataacacaacccatcttgtgttgaagcatttcactgaaagactcggcaaacaaagaaagctcaaatactgactcctccagatcgttggccgtatagtcaaggaggccatccaatgaaagggatgttgatcggactttagagtctttactccttttggcctgaagaatgaatcctggatgtttgggagg

SEQ ID NO: 387602 - DNA, 760 bp, Oryza sativa
cgcttttaactgattgcgattctctcttatatggagtatatatagtagtgtaatacacacactgttacacagagatagatagaaacactacacggcagtatcaggatgcttttaacataaataaataaataggaataggagtagagttatctatcctgatcctagatggatggatggatgatgaactcactcttggtttggcgaattggtttcctatactccctattacagatgattactagagtttgctagatggtgcaaggtagttggagtagcgggcttgagcaatgagtttgcccgatttcttcttgaggtccacgagcgccaccccaactgccttgccggcacgaagaacctttgcttcgatctcaatctcttcatcggggaaagctgcatccaagtaggagatgttcatctccaggggcgaggtagagctagagctagagctgctgttgccggtggtgtggaagacggcggaggcgacgaggtgaatgagcgaggccgtggcgccgccgtgcaggaagccgcccgaattcaggagtcgggaggggacggtgaagcggcagaggaggcggccgggctccgcggcctccacgcggatgcccctcagcacgaaggcgtcgtagaacccggagggcagcgccgccgccgacgacgcgtccgtcggagtcggatgctccagcacacgccgggccgcctccatccccgaaccccttccccccgctattctcaacttccggacgcgtgggcggacgcgtgg

SEQ ID NO: 387603 - DNA, 635 bp, Oryza sativa
  unsure (1)..(635): unsure at all n locations
aggtcaatatgttttttttcttcttctctaggcaagcatttctttcttcctgcagtgatcaactagacactgcttaatttccaggcatgacaacaagtgctctatagcataggaggaattattcaggaaaaaaacacaaaaacttgtacaatgtcttatctgagaatctgtggtccttaggatgtaccgtgaggtatcaccacacttcaattatgcacatatataccatcatcaaccccaattcaacatctccatctcctgactcccaaaaccaaaggaaacccagcgattttcattgtttaccaatgaacaatgcttataccaatatgagtccattgggtgatcaaatcctggccgtccggtttgtgcccggggacggccgccccagatcgacggccggcgaggcgaccggccgctgggtcgacctgatgggatcggcgtagcgcggcgagccgtggaagaaggcgtggacgcagttgtggtaggcggcctgggtgccgtgcaccttgtcccagaagatgtagttgtcccggtccgggcacagntgggtggtcgccgagcagtcggcntccgtnttcagnttgcngtctccncagcacgccttcgccacctcgtgccgaatcctgcagcccnaa

SEQ ID NO: 387604 - DNA, 885 bp, Oryza sativa
  unsure (1)..(885): unsure at all n locations
nnnnnnnnnnnnnnnnnnnnnnnnnnnnnnnnnnnnnnnnnnnnnnnnnnnatgatcaaatcaagatgctttcaaattccaattcagaaaatagagatgtgtacaggggaagggggaatggagcatactgcatacacaccatcaagctagacaaactgacagaacctaacagacacgcatgaaacttataggaagctagctaaactctaccggtagctgcacatcgatccaacattttcgtcatcatcattggcaaacacgcatagacccacttctttattgtaaccaactgactagcttcatcgcgttctttatctgcatattttttattcttcagtaactcaaaagtttggtccagcagcgaggatcttgtctgtcaggctgctgtctcccccgatcttgtagttggcgaacacctcgaagttcttcttgaacaggccagccagcttcaggagcgtctccttgtacgcgcccttgtccgtccaggtgttgatcgggtcgaggatttcagacgggatgccgtcgatttcagtggggatctccaggccaaacacctccgtcttcttgtagttggcggtgaggagctcaccggagtggatggcgtcgatgatcttcctggtatacggcagcctgatccgcttgccaactccgtaccttccaccggaccaaccggtgttgacgagccacccggtggcgccatacttctgcatcttctcggcgagcatggcggcgtacttggtcgggtggagcatgatgaacgctgcaccgaagcaagcagagaacgtagcctgcggctccttgatgccatcctccgtgccggcaaccagagcagtgtagccactgatgaagtggtacatggtctcggacgcgtgggcggacgcgtgg

SEQ ID NO: 387605 - DNA, 376 bp, Oryza sativa
  unsure (1)..(376): unsure at all n locations
nnnnnnnnnnnnnnntttacagatggaaagcggctgttattacatgcctaggaaaatgtatatacataaacttacaagttaaacaagaattttgcgaacatttcaactcctcacgataggcaagccgcggcaccgtacagtacacagcatattctacgtccttatgtgtagataaccaatgtgttggcagcacatatactgtccacttacaaccccatctcaattcctctatataaaattgcaagagagtaataacatattccttttttttcctttacactgtatgcatacatgtacatcaaatataaacaggcagacagatactaatagaaaggtagtcggccataatgttaaacaaggtttttgcgtagcaacg

SEQ ID NO: 387606 - DNA, 415 bp, Oryza sativa
ggggagctcaattgaaagccttcggattagcatttggggtcttcttacaccaaaaataatagcacaacaaaacttagctattcaattacttaatctagtatagttgatcaaataatatcagctatccctagccctgtagcacactcatggtgaatacgtagcagcttagtcattccaagtgcctgcctcccttttcgtggaatgaattatggcatgtatattctctggagaagaacacgctgcagccatcttatcctgccacttgattgattatgccatcactctccaaaattacaaccactaaactacggccttgggatcattgggttgccattttcccttggctttgaaaaaccctgtccatgtccaagaaattccgccacgtttttacgctttcctaaatttttttgctctc

SEQ ID NO: 387607 - DNA, 359 bp, Oryza sativa
atctttaatctgttatccatgcctgtccctgagaagagttcagaacaagccttgtttgttaaacattccgattcattacatgaatcccaagcttcctcttttttctttccctgagcagcaatcgaagatggcctccatactctctagcatttcttaacctacacaagttgaaccctcctcctcctgaccgaccaacgcaccgagctggggaccaaactcttggctaacttccggcctttgttgggcatatgtttctgaaatcttttttcatcaggatgcaaaagcaaaaaaaaaaaggccgtcgcgatccggatcaccacttggtcttgaagggggacgagtgcttgagcgactcgctg

SEQ ID NO: 387608 - DNA, 472 bp, Oryza sativa
tttttttttttttttgcggaatagacttgtgcaatcttcaaatgaaattagtctaacaacatagggctctagactagatgcactagtgatcaatgacatcgattgatcgatctgggtagatatgaaagggtctcaatttgacaatgcctgatcatataagtataaaccagtgaaccaacagtgccaaagatagcacatctcatctatctacgacggtagtaacaactatactaacaaggatatatacacacacactggactagtccatctccaacagagggatatctgaattttgagatggacagtgatcttgatgcaatgttgatgttcagaacagactcgagatcagccggcttctcaggctcctcgacgtaaagtggtacgaacgggccaggaggccggcgccgatgccgatgccgaggcagatgcctacgctgatgccgacgccgactctgacgcccggggtgaacca

SEQ ID NO: 387609 - DNA, 769 bp, Oryza sativa
tgagtcaggacaagcaagacatgggggtcattattagcaaaggtttgaagctgttcgtgtcctgttgcgcgttgatagtaatattgtttggtccatattcagtttgacaagtgcttctccatgcggaaaccatgggatgcaagcaaacgaccactccaacacgataagaatattggatcggaaactctgttcacacctggaacaatatggtatagcgataaactaaatatagaatcaataacttgtcgatccgctgtgagccccacggccagatagagggccccaagattgtatcttcatctactgtgcaccccaggaactggatggagggccccatgattgttgtggctgtgagttcatttctggttgctgcggtggtgttctgggtctagcatattcagcaaaaataacccatccatcgagaaactttccatccattccttctattcctttagctgcatcctcaactgtagcataccttacgaagccaaaccccttagagaatccagtgacacgatctgtgacaactcgagcatgtatgacttccccaaactttgcaaaagcttctttaagcccatctgttgttgtacgcttgcttaagcctgagatgaagaggttgggggaggggtcggccttcgggggcggggtgggcggcttgggcggggagaaggccgagatggagaacatgcgccggaatccggacctcgccgtagccgccgccgccatcgccgccgccggatttcgaaggtgaggtgggacgggtgcgtgg

SEQ ID NO: 387610 - DNA, 329 bp, Oryza sativa
  unsure (1)..(329): unsure at all n locations
nnnnnnnnnnnnnnnnnnnnnnnnnnnnnnnnnnnnnnnnnnnnnnnnnnnnnnnnnnnnnnnnnntttgttcaagtaaaatttttttttcctccgtgggagaattggtacaatgatttgtgtacaacacagagatcacttgagattaaaagcgtaacagattttctacagctatcttcgagaaaccacccatggttgcaactcgtcttattgcacctcaattcccaccttgaatatgctgagctacctacttgttaactatatggtacaaagtagtgctccgctaagctagcagcaaggagcgcctgcaagtagggcactccatcttg

SEQ ID NO: 387611 - DNA, 559 bp, Oryza sativa
ttcagtgagctgctgccaaagattggcaatgatccagaggagccattgaggaggctggtcacaggtttcccccccttgggtatggatggggatgtcatttctttcctgtccaagatcaatcgcttggatgataagggatgggttatctctgttgatctgaggagtaagacgctgcaaggcgtggctgagattgatgagaggaagtatttcctcttcgagcgctactacaacaccagtgagatctccaaatatcttatcaaggctacaggtgaggcaggaactcttgtaaaaactggggttaatagtagagtctcaaaaaagaagatgtaggaattaattaatgaatcacgtaggctacctgggttgaagaaatgaaacgagctgcagagactgggcgattcatgagctactttctgtaatgagctattatcagagttgttctgttcaagacatgctactttctgtaatggatttggttttcgtctgtttatcccaagttaaactgctatcttcccctgatgattggcctgaaatggatgctcaggaattttcttcggcc

SEQ ID NO: 387612 - DNA, 1081 bp, Oryza sativa
ccacgcgtgcggtggcctcgaggcgcccgcgtggattgcagtggcgctgctcgtcacttcgtctcctcctctccaccactcgtcgtcgtcggcggcgtgggcatggcgacacccgcgccgctctccggcctccgcccgcgcgctcccgctcccgctcccgcggcgcgcagtcgcctgtgcggccagtcgccgccggtcgtggccccgcggctcggggcgttcccgcggcggcgtggtggggcggcacggtgctcgccgcgcgccgaggccggggacgtggaggcgcttagggcgggggtgtcggtgtacaagccgcggtcctacgacgtgctcgtctccgacgccgcccgctccctcgcctgcgccatggacgagggcaagacccgcctcgagatcgagttcccgcctctgccgagcaacatctcttcttacaagggttcctcggacgagttcatcgacgccaacatccagcttgctcttgctgttgccagaaaacttaaggaactcaaggggactagatcttgtattgtgtttcctgacctaccagaaaagcgcagggcatcccagttgttcgggactgctctagactcgattgagactgcaactatcagttccctggatgaggcatctaccggacctgttaataccttcttcagatcaatgagagataccctggattttgactttgctgacgatgttgaagatcgatggaaatctgatgaaccaccatcgctatatatcttcatcaattgcagcacacgtgacctttcaactatagagaagtatgtggaacaatttgcctcatctgtcccagcccttctctttaatcttgaactagataccttgcgctctgacttggggcttctgggattcccaccaaaagatttgcattacagatttctttctcagcttaccccagtattttatatcaggcagcgtgactactctaagacaattgcagtcactccatatatcgtgaactacagtggtgctgtattccgtcaatacccagggccctggcaggtcatgcttaagcaagcgatggttcttatgcatgtgtcgcagagagtgcagctcggtt

SEQ ID NO: 387613 - DNA, 590 bp, Oryza sativa
ccacgcgtccgcggacgcgtgggccaagcgctgcaaccatctgccccagcagctgctgccgccgcctcttcttctgcccaagcgagtgccggctcttccaaggcagctgctccaggtgcattatttgaggataagccccaatctgcaaatgatgcatggagaaaactccacactgatcctcttctactaataaggcagcgggagcaggatgccattgcaagaataaaaaataatccaatcaagatggctgagataaagaaatcagtggaagctgagaaaaagcaaaaggaagaaaagaaagagaagagaaagcacaagaagcgccatcatcacaaatcaaagagtaagaggcatcactcaagtgagaactcagattcagaggaaagtgatggcagcgatgagagaagaaagagtgttcaggcctcagagcataagagagaagagaaaaggtcaagacatgataagaaggatcacggacaagattcagaagacgatgaacgaaggaaaagacggcatgcaacgtcagaagatgatgagccaaagaagtcacagaaaagatgtagaaggagacgagggaaacttgatgctag

SEQ ID NO: 387614 - DNA, 657 bp, Oryza sativa
ccacgcgtccgcccacgcgtccggtggaagggctcggcaaacatcagggaggcgtccctcctttatccacttcgctctcttctctgcagcgctgcatcctactccctggttagcaatagcaagggtaggaagatgagcacgttagatgccacgcgagcagagctcggccttgttgttctgtacttgaacaaagccgaggccagggacaagatatgcagggcgatccaatacggctcgaagtttatcagtaacgggcagcctggcacggcacaggatgtcgacaggtccaccacccttgctcgcaaagttttccggcttctcaagtgggtcaatgatctgcatggtcttatcagccctcctgctaaggggactcctcttacactggtcttgcttgggaagtccaaaaatgcgctgctctcgactttcttgttcctggaccaatttgtatggttgggaagaacagggatatacaagaacaaggagcgcacagaccggattgtaaggatatccctctactgctggatggcctcttcagtctgtgcagggctagttgagcttggagagcttaagaggctttcaaaatcaatgagggagctggcgagagagctgagggatactgacaaatatgagaatgaccagtacaagagccagatgaaa

SEQ ID NO: 387615 - DNA, 780 bp, Oryza sativa
  unsure (1)..(780): unsure at all n locations
gttgtgacagatatggaaactaagattgcagcaaagaacttcgagattgcaaggctatccgatagggtccagtactatgaagctgcaaacagggagatgtctcaaagaaaccaagaggctatcgagatgtcgaggcaacaacgaaatatccgaaagaagagacagaagtggttctggggctcggttgggcttgcagttacccttggcacaccagccattgcctggtcctacctacctgcagcgcagccccaagccagtcaagactctaataccaacagcgattagagctagatgaagatgtatcttctcgacccttcagaaatcctaacaagctctaactatacaatcctaggggaaagaaaagattgtataagttcttttggtgatcggccgngatcactgcaatcttcattcgccgcttcctctgtaaatgccgaatgggccatctccctacaggactggctccattccctcacagtaaatccctctttgcatagttggttgtgcaaaaatagtacgaggaatgtggatggctagtaaaaaaaaaaaaaaaaaaaaaaaaaaaaaaaaaaaaaaaaaaaaaaaaaaaaagttataaaatatatagaaaagaaaattaaagggcggggaaaaacataaaaggagaataaattaaaaataaaatctgaatacatttaaatatgtggggggttgacataaaaaatgactcaaaaaaaacatgtctggataaaacaaaataccttttaacaaaactgcctaaaaacaaattggggctcaacc

SEQ ID NO: 387616 - DNA, 627 bp, Oryza sativa
  unsure (1)..(627): unsure at all n locations
cagcaagccattagccatggataaggcaggcggcagcggcgaggcgccgccggagccggagccggcggcggcggcgacggtgaagtcaatcgtcgtgtaccccatcaaatcatgcaggggcatctccgtgccccaggccgccatcacctccaccgggttgaggtgggatcgaccgtggctggtgatgaactccgcagggagagccttcacccagcgagtggagcccaagctcgcgctgattgaggtggagatgccgcaagaggcgttcactgagtggcagccaacgcctgattctcacatggttatcanancacccggattggatccactgaagattcctcttggcgcgaaacntgccccagttgaatnatgtctctatctgggaatggtctggttcngcnttttganaaaagaaaataaagggggccaaatggtttccccntttctttnggaaacccaanccncccttcnggtttttgaaccccccaattttaaaaaacaancccantttcnccaggttcnaattnntttttntgaaaaatccnttcctnnnggccccgggntnttgaaanntaaaattttcttnaaaacnttcctttaatcctccnnacatttttttaagntttt

SEQ ID NO: 387617 - DNA, 540 bp, Oryza sativa
  unsure (1)..(540): unsure at all n locations
ggcatcatcagcaagccattagccatggataaggcaggcggcacggcgaggcgccgccggnagccggagccggcggcgncggcgacggtgaagtcaatcgtcgtgtaccccatcaaatcatgcaggggcatctccgtgccccaggccgccatcacctccaccgggttgaggtgggatcgaccgtggctggtgatgaactccgcagggagagccttcacccagcgagtggagcccaagctcgcgctgattgaggtggagatgccgcaagaggcgttcactgagtggcagccaacgcctgattctcacatggttatcagagcacccgggattggatccactgaagatccctcttggcgcgaaacgtgccacagttgatgatgtctctatctgggagtggtctggttctgcgtatgatgaaggagatgaggcggccgaatggttttccagttactttgggaagccgactcgactcgtacggtttaatgaagcatcagaaattagagagaccaatcctgactatgctcaaggttacaaagttct

SEQ ID NO: 387618 - DNA, 692 bp, Oryza sativa
  unsure (1)..(692): unsure at all n locations
ggctgaagactggaaatccaagtctgatgaatgtgaaacgggtattgatgaactgaaggagaagaatggtagtgttgctgcagctttggcaaagctggatcgccaagtgaagtcaaaggaagggaagcttgtgcaacttagatcacaggaacgggagattcatgagaagtgtgaactggagcaactgaagcttcctacagttaatgggccaatggatactggatcatcttcacaaataccaatccttgactacagtcagcttagcgaaaactacctacaagagatgcggctttctgaacgtgacaaacttgaggcagagttcaaaaaaaaaataggggatctagttgctcagattgagcacactgctccaaacctgaaagcgctcgaccaatatgaaacattgcaaaggaaggaaaaggatgttatggaaaagtttgaagcagcaagaaaagaagagctggagatagctgacaagtacaattctgtcaagcaacgaaggtatgagctgttcatggaagcctttgatcacatatcaaaaggcatagaccaaatctataaggagttaacaaaaagtcaaacacatctacttggaggaacagcatatttaaatctagaaaatggagatgagccatttttacatggaatcaagtacacagctatgcctncgacaaagcgctttagagatatgggac

SEQ ID NO: 387619 - DNA, 682 bp, Oryza sativa
  unsure (1)..(682): unsure at all n locations
gtcgacccacgcgtgcgcccacgcgtccgatattagcagccagaatagttatgccatatgattggcacagaaaagaatatacctagtgttcgccggtgagtgtacaactacaagatctgcgtttttttctagctagctctagctagcagatgaagtatctggtgttcagcgctgctccaagcaaattaggcaaaaaccatggcatccaaacagatggtacatatgaatcgaggccaaggggaaacaagctatgctcgaaactccattcttcagaacgctgaacagaacaggatgaggccgctgatagaagacgccatcgccgacctcgtatgcagcagaagcatggtgatcgccgacctgggctgctcatccggcccgaacgcgctcgcgctcgcgttgatcgccgtcgacgccttccgcgcgccggtgcctcgcgctccggcggccaccgccaccggcggagctctgcgtactcctcaacgatctccccgacaacgacttcgccacggtggtgaagagcctcgtggagttcaggcgaaacaacggcgacgagcctgtcctcctgaccggcgtcgtgcctggctccttctacgggaggctcttcgccgctgaatccctgcatctcgtctgctcgtccaacagcctncactggctctncgaggctcctgaagatctgaagatg

SEQ ID NO: 387620 - DNA, 510 bp, Oryza sativa
ttgtgggtgggcttagtgcatggctattccctctctgccttagctagatcaagctagctccttttcattcttggagaaggatcgattaggaagataagttcttcgcaaatatagatagcttcttttcttaattttctccttctcagttctcgtttttttcttcttgatcgaaaccgatcgatcatatatatagttagctagcatccttgttgtttttaatcccaaggatctagttaattaattacttcttgcaaatttcatgcaaaaactgatacacagacacaagttcgatataatttaatttcgagctttgatcatatcgtccccttgatcttttccttctctctttggaaatcccatcaaggctccatatttccttttgtggaaaaacgccttagatcgacgatctgagcgagaaattcgaattacttttcgtctcctcctagagatcatcatggaccacgttcttctggatcgccgggctttccggagcttcgagtccccaggaga

SEQ ID NO: 387621 - DNA, 470 bp, Oryza sativa
  unsure (1)..(470): unsure at all n locations
tnagcccggatgtgcaagnnnnnantncaaggaaaaggcactctttgcncatgactnnnggtaagcaagattcatctcctcgcatgcaacggatcatcatcccaaggctcagcagaaatgtgaaaaagcaaatgggtgctgttcctgttcccctcccccaattcatctgaattaggaagatggcatataatgatgagtggccgccctagccaagagtttttttagccgaggtgccatagaggaagccattttgattgagaatgactcagggatttgtggcttgggttttccccaccgcacaccaccacccatctaattcgtcccagttttccttttattctttgttggaatactcggtatggttggaacttgggagaagaacagcaacagctttcctataatgtacatttgttggttcttggtttgttgttatttgactggtaatgaatgaatgaatgatttgtgtgtgt

SEQ ID NO: 387622 - DNA, 489 bp, Oryza sativa
ccacgcgtccggaatctgcaagggcaaaggcatctgctagtgtatcaccaaaggtaagccccgatgtgcaagacaacaatccaaggaaaaggcactctttggccatgactaacgggaagcaaggattcttcccctcgcatgcaacgatcatcatcccaaagctcagcagaatggggaaagcaatggtcctggtcctggtccccccaattcttctgataggagatggcatatttgatgagggcccctaccaaagagtttttagcgaggtcccataaaagccttttttaagatgactcaaatttgtgcttgttttccccccgcccacccccatttaattggccagtttttttattctttgttggaatccccggtatggttggaacttgggaaaaaaacagcaccagctttcctataatgtccatttgttggttcttggtttgttgttatttgcctggtaatgaatgaatgaatgatttgtgtgtgtaatat

SEQ ID NO: 387623 - DNA, 572 bp, Oryza sativa
gccttggaggaccaaagctacgtgcggacaaatcgtacggcaagtctaccccgctctggtttcctccgtcgcatcgcaaattcgcaatatcgcatcgacgcctcgtccctcctaggcctagctagtctactccgaccaagttgtcgccgagaagcgaggagcgccggcgatggaggtgaagtgccgtcggctggaggggaaggtagccgtcgtgacggcctccacgcagggcatcggtctcgccatcgccgagcgcctcggcctcgagggcgccgccgtcgtcatctcctcccgcaagaagaagaacgtcgacgaggcggtcgtgggcctcagggcgaaggggatcaccgtcgtcggggtggtctgccatgtctccatcccggagcagcgcaagaacctcatcgacacggcggtcaagaattttgggcatatcgacatagttggcttcaatgctgctgccaatccttccgtagataacatattagaaatgaaagagcctattccttgacaaactatgggatttttatggtaaggcatctattcttctttttcaggatgctgctgcatatttg

SEQ ID NO: 387624 - DNA, 1296 bp, Oryza sativa
cggacgcgtgggggtggctgcgcgcgcgtgcaatcgtcttatccccggtgtgcacgccacaaagccccagcggtgatcgccgcgccctccgcgccaagtacatatacgcgcgcatccgggcgcctcgatccatgcagccgagcgagctaaggaaggaagaagcatacaggcggcagcgacgagccatggccacacacgcagcgctcgcggcgtcccgcattccggccaccgcccggctgcacagcaaggcggcgtccaagcagagggtggacttcgccgacttctccggactgaggccgggatcgtgctccatcagccacgccgcgagggaggcgtccttctccgatgtccttggctcgcagctcgtcgccagggctaccggagagaacgccgtgagggcgccggctgaggcgaagctcaaggttgccatcaacggcttcggccgcattggccgcaacttcctccggtgctggcacgaacgcgagaactccccgctcgaggtcgtcgtcgtcaacgacagcggaggcgtcaggaacgcatcacaccttctcaagtacgactcgatgctcggcaccttcaaggccgacgtcaagatcgtcgacgaccagaccatcagcgtcgacggcaagctgatcaaggtcgtctccaacagggaccccctcaagctgccatgggctgagctcggcatcgacattgtcatcgagggtaccggagtgttcgtcgacggccccggcgccgggaagcacatccaggccggcgcgaagaaggtcatcatcactgctccggcgaagggtgctgacatccctacctacgtcctcggtgtcaacgagggagactactcccacgaagtggccaacattatcagcaatgcttcctgcacaaccaactgcctcgctccgttcgtcaagatcttggacgaagagttcggaatcgtaaagggaaccatgaccacaactcactcctacaccggcgaccagaggttgctggacgcgtcgcaccgtgacctgaggagggcccgggcggcggcgctgaacatcgtgccgacgagcaccggcgccgcgaaggccgtggcgctggtgctcccgcagctgaaggggaagctcaacggcatcgcgctgcgcgtgccgaccccgaacgtgtccgtggtggacctggtgatcaacaccgtgaagaccggcatcaccgccgacgacgtgaacgccgcgttccgcaaggccgcggcggggccactcagcggcatccccgacgtctgcgacgtgccgctggtgtccgtcgacttccgctgctccgacgtct

SEQ ID NO: 387625 - DNA, 657 bp, Oryza sativa
cccacgcgtccgcccacgcgtccgcacagacacagaaggaaatgtcggcttctgcggcgcccacgcacatccgcttctcctccgccgcacctccatcggccgccgctctccggcggcctcgccgccggtgcgccacgcccgtccgatgctccctcgccgcagcgccgggtctccgggcgccgcctgagctcatcgactccatcctctccaaggtgaagggaactgaccgtggagttttgctgcccaaagatgggcatcaggaagttgctgatgtcgcactacagcttgccaagtactgcatagacgatcctgtcaagtctccactaatatttggagagtgggaggttgtgtactgctcagtaccgacatcaccgggagggctctaccggactcctctcggccgcctgatattcaaaaccgatgagatggctcaggtggtgcaagcgcctgatgatgtaaaaaacaaggcgaccttctctgtctttggctacgacggtgcggcatctctgaaaggcaagctgcatgtgctgtatggtaagtggattcaggtcatattcgagccaccagcagtgcaggtaggctccctggggtttcagtatggtggcgagagcgaagctacgctgagatcacctatgtcgacgagaagacaggctggga

SEQ ID NO: 387626 - DNA, 526 bp, Oryza sativa
cccacgcgtccgaaccccccaaagcctcactcacttcgctgcagaggaaaaaaaagagagaaaaatctccgatggctctccaggcggccaccaccacctccttcctcccctccgcgctctccgcccgcaaggagggagcggtgaaggactcggcgttcttgggcgttcgtctcggcgacgggctcaagctggagaccagtgctctcggccttcgcaccaagagggtgagcacgtcgtcggtggccatccgcgcgcaggcgtcggcggcggtgtcgtccccgacggcgacgccggcgtcgccgtcgggcaagcagacgctgcgcaagggcacggcggtcatcaccggcgcgtcgtccgggctcggcctcgcgacggcgaaggcgctggcggagacgggcaggtggcacgtcgtgatggggtgccgcgacttcctcaaggcgtcgcgccgccgcaggccgccggcatggagaagggcagctacaccatcgtccacctcgacctggcgtcgctcgacagcgtcaggcag

SEQ ID NO: 387627 - DNA, 466 bp, Oryza sativa
ccacgcgtccgctgcgcgcgaccgggccagcgttagtcgaaagctgaacctgagcgagcaactgatgccgttagctatagctgctgcctgcagcacgcagcgcccgtaacctaacgtatcatttacttccattgcactgcacatcctgtgagttcgttgtctgagtgagagctggacgtgctgcaccgagctcctggccgagatgcttgccgtgtcgccggcgatgtgccccgacattgaggaccgcgccgcggtggccggcgatgctggcatggaggtcgtcgggatgtcgtcggacgacatggatcagttcgacttctccgtcgatgacatagacttcggggacttcttcctgaggctggaggacggtgatgtgctcccggacctcgaggtcgacccggccgagatcttcaacgactttcgaggcaatcgcgacgagtggaggcaaaggtgtgcaggaccagga

SEQ ID NO: 387628 - DNA, 638 bp, Oryza sativa
ccacgcgtccggtttcaccgggcggtgaacggccaccgtaccgcgtctcgcggtgtctccggccactcgctgtccccgccgaactttcaaaaaggaggaggaggaggagaggtggccggcttctgagaggaggagaagtcagtgattgctcgctcgtttttccaagaaaccggccggactcgagcgctcgtcaagtccgtgttccagatcgagtttgtagagccatggcggcggcggcgcgcgcgatcatatgcgagatggcgccgcagaggggggcggcggcggcgccggcggcgccggcgcagcagaaggcgacgacgagacgggacggtgggaagatcatgctccagccacgcctctgcacgctccggtcgtacggcgccggcagcggcgtggtggcgcggaggcgggtggtggaggaggaggagagcggcggcggcggcgcggggtcctccccgttcttcgcgtcgctagccgactacatcgagagcacccgcaagagccaggacttcgagaccatcttcggccgcctcgcatggtggcgttcgcgaccgcggtggcgtggtagttgacgacggtgaactcgctgttcaagaagctggacatgcaggagatcgaggaggcgggccgggtgtgcc

SEQ ID NO: 387629 - DNA, 673 bp, Oryza sativa
ctcacagaacctggtcttagtgtgatcatcagtgctgtgcttacaagtcgtgcaattttccagcgtatgaagaactacactatctatgctgtctgggtcaccattcgtatagtgcttggatttatgctacttgcgctcggctggaaattcgatttcccccctggggtggtcctaatcatagcaattctaaatgatggtaccatcatgactatatcaaaggatcgggtaaaaccatctccactacctgacagctggaagctggctgagatttttacaactggagttgtcctcggtggatacttggcaatgatgacagtaatcttcttctgggctgcatataagacagactttttcccgagaatatttcatgttgaaagccttgagaagacagctcaagatgatttccaaaaacttgcctctgctggttacctccaagttagcaccatcagccaagctctcatctttgtcacaaggtcccgcagctgggcatttgttgagcgccctggatttctgctggtctttgctttcttggttgcacagctgggcgcctccctctctctcactggctccctcttataatttgcttcaggaggtaaaacccgcattgacgtaaacttttgggttaaacaaatacagattgctacactgattgctgtgtatgctgactgggcgt

SEQ ID NO: 387630 - DNA, 492 bp, Oryza sativa
cggtttcgtggggctggacatccacttccccccgggggacgtgttataatcacaggaagtctaaaagatggtcccatgatgactatatcaaaggatgggggcaaaccatgtccactacctgacagctggaagctggctgagatctttacaactggagttgtcctcggtggatactcggcagtgatgacagtaatcttcttctgggctgcatataagacagactttttcccgagaatattgcatgttgaaagccttgagaagacagctcaagatgatttccaaaggcttgcctctgctgtttacctccaagttagcaccatcagccaagctctcatctttgtcacaaggtcccgcagctggtcatctgttgagcgccctgcatttctgctggtctttgctttcttgggttgcgcactgctgattgctacactgattgctgggtatgctgactgggcgttcacctcaatcaaaggcattgggggggggttgggc

SEQ ID NO: 387631 - DNA, 584 bp, Oryza sativa
  unsure (1)..(584): unsure at all n locations
ccacgcgtccgcggacgcgtgggcccgccgtcactatcttcatccgccgtcccgacgccgcgagcccaaaccccgaaccccggagagcctcctcgccgcagatggcagtccccggccgccgcgacgacctcgtcggcgacgacctcgtcgacgacgacgggatcggcgaggagtacatggccccctccgacgacgaggaggcgcaactgcctgacgaactcttccgcctcgccgacgccgcccagtccggcaacgtcgctgccctccgcgccgcgctcgataattattctggcaacattgatgatccaatagaagatggtgatactctgcttcacatagcatgcttatatggccatctaccttgtgttcagctactgttggaacgtcaagctagcttggaatgcaaagatgaagaaggagcaattcctcttcatgatgcttgtgctggaggctttagtgatatagtccagtacattatgaaatttgctgcgaacattgatggctgcgtaacaagaatgctcaacacttngtgatctgaaggcgacactccactccatcatgctgccagaggggaacatcttggt

SEQ ID NO: 387632 - DNA, 841 bp, Oryza sativa
  unsure (1)..(841): unsure at all n locations
ccacgcgtccgctgagtccttctgccaggcccgtcgcaggttgcgcagattcgttattccaggcagtcaagccctatctttgctgagtcgagatctacgtgaagcccatttgcaggtgcttctgggaggtgggggacataggtcaaacaacagcagcaacacaacaaatatttcagctgaccctcttctgtcatcgtttggccttagctttccaacatcagacacagaggaaacatcaaaaccacctatttccattccagatgatgcatctgtgataaaagagacacctgctcagccatgggattcaagtattgactcatccctcacaagggaagaaagggaacagaaacggaagcaagcgagtgtcagagcaacatttgtgcaagacctgctgctcactactttatttggagattaataaatcaagatgagcctaagtagtcgatagatgcatgggtaaatcctggtgcatatttgcatagataagtgcccggtcaaattgctgaaggtaatatccatggcagataggcacgcttctgcggcaccaggcgtcgtttcctcccgtaaggtgcagagttgatgtgggcacgggggcatcttaagtgttattgtagccggtctgtaatctgtatctccagttccataacaatccgcgatcagcatacgatacacgtagcagatcgcggttgtgtttgtagcgcttctatgtttagaagcattggtttcttgtaccaacgtaataattatgttacgggacagcagaatggtatgcagtttgtctacttctgtgagagtataataaaccaagtttacaacacggtgggggtttnggaganatact

SEQ ID NO: 387633 - DNA, 384 bp, Oryza sativa
caaaggagagagaaaagaagcttagaagaaaagaacgtttgaaagaaaaggaaaaggagaaagaaaagataccagttcaattgaaaccttacattggtacctcgtcatcacccctgagcaactcagcaacaccaattaatgatcagtcaccagatattgcccactccaaatactcagctagcgatgatgaagataaagatagtattgtggtcacggaatcgttctctcctgatacctgtgttgatcaatctctaacaagggaaagtgttggacaaagcaatgagtttcattgcagtacatcactggaatttattccatcagattgcaatggttctttcatgtgtgagcaatctacatcctcaaggggggaactcagatttagga

SEQ ID NO: 387634 - DNA, 812 bp, Oryza sativa
  unsure (1)..(812): unsure at all n locations
cccaacacaaataccaccaccacctcccacacccacaccaagcgcagagctccagagagagagaagggatccatcgacgcgcgagcgctttgcttagattccttcgtcgccggcgaatccgtccccttcgcgccgcccgcaatggcgaatgcagcatctgggatggctgtggacgatgagtgcaagctcaagttcctggagctgaaggcaaagaggacctaccgcttcatcatttacaagatagacgagaagaagaagatggttgtcgtggagaaggttggcgagcccgtactgaactacgacgattttgccgctagcctccctgccaacgaatgcagatacgccatattcgactacgatttcgtgaccgaggagaactgccagaagagcaagatattcttcattgcatggtctcctgatacatcgcgcgtgagaagcaagatgatctacgcgagctccaaggacaggttcaagagggagctcgacggcattcaggtggagctccaggcgaccgatccaactgaggttggcctcgacgtgatcagaggccgtgcaaactgagcattgttttgatgctgctacctataaaagtatgagcttcagatgagaatttagagagctcccctgaggcaatgggttatgactttgttatcatcttagtactactcctatctaagggacggtgtaaggctgtaatctatgtgcggtgcaatgataaggctatcctttctgcgtttgatcatgacaacnnnnnnnnnnnnnnnnnnnnnnnnnnnnnnnnnnnnnnnnnnnnnnnnnnnnnnnnnnnnnnn

SEQ ID NO: 387635 - DNA, 737 bp, Oryza sativa
ctaagccgtaagtgagaagttgaaggcgatagaacctcttagaaaccgtttaggaaagttccgcgatgaaaacaatgctatccgggcacagggtgcaggcatatgttcttcaattgaagagcttgagaaatcgatcaagagattgaacgaccgcatatctcatgagagcatacccttggatgaggagaagcggttgatcaaacagattagagagcttgaaaagaccagaccgaaagtcatctccacttctgctaaccgagctcaaatccaagatacagtggtcgaaagagacgccatacaggttcaggttaaaatcatcggggagggcattgatggagtaaagaaggagcgacaagcagtcaggtctaaaattaaggtcctggaggatgagctaaaggctattgacatggagatgggttcgcttcaagaagatttaactgctgccaatgccagaaaggacaaggcacatgaatcattggtccaattgagacatgcacgagatgcctataacgcatcattccatcaaaaccgccaacttctgagcaaagctagggatcttgcttctaggagtgagcttgcacaagtgcaagagctctacaagacacaggttgacaaattcgtggcagaatggtgcaacagcaaggccttcagagaggactacgagaaaaggatcctctcctccctcaacagtcgacagcttagccgagatggccggatgaggaatcctgatgagaaac

SEQ ID NO: 387636 - DNA, 481 bp, Oryza sativa
  unsure (1)..(481): unsure at all n locations
gacccacgcgtccgcggacgcgtgggtggttgtctctacattggcacaggatgcttccacagaagagagatcctttgtggtaggatattcagcaaagactacaaggaaaactggaacagaggaataaaggaaagaggaaaagagaacataaatgagattgaggagaaggcaacatctttagtaacttgcacttatgagcataggacacagtggggtaatgacattggagtgaaatacggtttcccggcagaggatatcattactggattggcaatacattgcagaggatgggagtcagccttcataaatcctaaaagagcagcattttttgggttttagccccattcaacaactttgcccagaatatactgcaacataagagatggagtgaagggtaatctcacaaatttttctttttcgaagtacctnngtccnttcctttgttttggccangggnaaaatcaagntacaacctncattt

SEQ ID NO: 387637 - DNA, 398 bp, Oryza sativa
  unsure (1)..(398): unsure at all n locations
ccacgcgtccgcaacaaaggtcttaattaggagctctctccattaggatcctcgagcttcaggaagctatctccaacaaaacatacacattcagatcaacttcagtgatggctgcagaatcagagacgccgcgaataacagagcttcatgtgaggatggactgcaatggctgcgagcacaagatcaggaagactctgcgtgccattgatggtgtgagcgaggtgtacgtagatgcagcgagccagaaggtgacggttgtcgggatcgccgacccggagaggatcgtcaaggcgatcaggaagaccaagagggtccccaccatcttctcccacaccgacccggcggcgcccccgtcgcccggcccgaagggagngcccgcgccaccgccagccgacggg

SEQ ID NO: 387638 - DNA, 615 bp, Oryza sativa
ccacgcgtccggggaggaggtcattgttgaccttgttgggcagtgccgatcttatcaaggtcgagtcatggaccttgttagcaatactggtgatgagagccttctatttcaagctctcggtttaaatgatgaactgcagcgtgttcttcagcgtcatgatgacatcgcaaagggagtgcctcccggttcaggcccagctcctgctgctgctaatgtaaaccgaggaacagcccctcctaggcctactggggtttcattttccccacttcttaatgtgcaccatgaagacgatgagccagaagacgagttctctgttctttcccgcaggtctgcaagggatggcacagcagcacagggcaatctaccttctgctccaaaaagtgaaaggccttacccaagcccacttcttcctccgccaccatcatcaaagaggccagttttcacggaggcaagcagtgttgactatcttagtggcgactcctacaagacagaaaaagtatcagatgactttattaatccaactgccccagccaatatacctgcgccgtctcattcaaaaacagaaacgaatccgccgccaagttatgatagccggtcagaaagtgtgtctgatga

SEQ ID NO: 387639 - DNA, 850 bp, Oryza sativa
ccacgcgtccgcaagaacgagtcgcgggctcgcggctgccgatctccatctggcgaggagaggagagcagatcagagcaggttggcgcatgtcaagtgccgcagtgaatggattggctggtgccggtggtggcatcatcgcccagatcatcacctaccccctccagaccgtgaacacccggcagcagacagagaggtctgcaaaaaagaagaaggccaatggcgcagccatcgccaatacttccaccctcttccagatgcttcagctgttccaaacggaaggatggggaggttgtatagcggcctcaaaccctctcttattggcactgctgcttcacagggaatctattactacttttaccagattctcaaaaacaaggtggaagatctagcagttgctcgcggtaagaagggtctaggggatggtacccgttgggatgttctcctggcttggtattgcagctgttgctgggtcaatcaatgttcttcttaccaatccaatatgggttctcgtgactcgtatgcagacacatacgcaagcagaaaagaagatcatggagtctaaaaaggagcttttgctgaaggatgttgctagggccaattcaatagaggtctcaattcttaaggataggttgtataaacttgattctgaaaagcctcgtccatatgggacaattcaagcggtccgggaggtctaccgtgaatcacgcataagaggattctggaaaggacttattccgacactaattatggtatgtaatccatcaatacaatttatgatctatgaaacattggcaaagcgtctccggtcaaagagatctggaaaggaactcccaaaaaagaaccttact

SEQ ID NO: 387640 - DNA, 851 bp, Oryza sativa
cttttgatttccccctccctggccagccgggcgagggcaaaacaatggggacagggctcttggctctcgcgccatggctggtgctgatcctactgcagctcgccagcgcgtcccatgtagaccaccggagcctcgaggccgagcaggcaccgagctcggtgccgggctccattgtcagacccctgctcaggacaggataccacttccagcccccgatgaactggatcaacgatccgaacgggccactgtattacaagggatgggaccacctattctgccaggacaaccccaagggagctgtgtggggcaatatcgtgtgggctcacttcggtatcacaggacctcatcaactggatagcccttgagccggcaatcaagcccgacatcccctccgaccagtacggttgttggtctggctctgccaccatccttcccgatggcacgccggcgatcctctacactgggatcgaccgccccaacatcaactaccaggtgcagaatatcgcatttcccaagaatgcgtcagacccgctccttcgtgagtgggtcaagccggcctacaacccggtggccacgccggagcctggtatgaacgcaacccaattccgcgatccgacaacggcctggtacgccgacggtcattggcggatgctcgttggtggcctgaagggggctcgcctcggccttgcctacctctaccggagccgggacttcaagacatgggttcgggccaagcacccactccattcggcgctcactgggatgtgggagtgcccagacttctttccgttgcaagcaccaggtctccaggctggcctcgacacatctgtgccgagcagcaagtacgtgct

SEQ ID NO: 387641 - DNA, 522 bp, Oryza sativa
  unsure (1)..(522): unsure at all n locations
ggcgcgcgccacgtccaccacacacaatggggacgttacccgtcgcccacaggttctcgctcgcntcggccttcctgccgcgccaccgccggccatcgccgtccgcccccaaccggcgccggcggcatggaacggtggtggcgtacatggagccgaaccccaactcgccgtcctccatcgcgggccgtctcatcggggctctccccgtggtgggcctcgtggcgcgcatgctgagcgactagggtggcagccaaattaaaattgcagatactactgaaatgactaaggtcaacaaggctggagtggatctcccaaaggagactgctgaggagattagaccctgctggtctaaaccaagatcaaatgttcaggagtctaagggtttggttacattctcattgactatgggccctgaattccacatctcacagattcttgatgctgtggttattcgaagaaatttaggcgcaacacttgtgcttccagaaattagaggaattgtatttgtatgatgctgtaaat

SEQ ID NO: 387642 - DNA, 595 bp, Oryza sativa
ccacgcgtccggttacccgtcgcccacaggttctcgctcgcctcggccttcctgccgcgccaccgccggccatcgccgtccgcccccaaccggcgccggcggcatggaacggtggtggcgtacatggagccgaaccccaactcgccgtcctccatcgcgggccgcctcatcggggctctccccgtggtgggcctcgtggcgcgcatcctgagcgacgagggtggcgtcggcggcgacatgatcgacttcgccgagttccgccgccgcgtcagcaagaagtgcaccgtcatggactcccaggccttctacgatttcaacgaacgccgcggcaaggcaggagatcccttctacgttctgctgtgctgctggctggccgccgttggtggcgggctgctgaaaacggaggagatcttggaaggcgtcgcgcggctccgcctctccaacgacatcgagttcgaggaggagacgttcctcgacatgatgaagacggcaaaggagaaaagagcaaagcttgaaggctccggcgccacagataccaatgggaagcgcgggcggagaaggcccttgaggcatctacgtttcttcttcgggcagg

SEQ ID NO: 387643 - DNA, 510 bp, Oryza sativa
ctctcctcctcactctcctcggctgctctcctcctctgtcggtggtgcactgcttgctcgatcctctgcaatggcggtcgacccgcgccaggtggtggccgggttcctgaccctgtccatgttcgtcatgctcggcaacatgatcaagcacgaccacttcacccccgtcggcgccggccaggaggagttgggcttggaggcaacaggcatagaatcaaacgaaattaaaattgcagatactactgaaatgactaaggtcaacaaggctggagtggatctcccaaaggagactgctgaggagattagaccctgctggtctaaaccaagatcaaatgttcaggagtctaagggttttgttacattctcattgactatgggccctgaataccacatctcacagattactgatgctgtggttatcgcaagatatttaggtgcaaacttgtgcttccagaaattagtaggaaatgagttaggaaagaggcggaaattcgaagacatgtatgatgt

SEQ ID NO: 387644 - DNA, 511 bp, Oryza sativa
  unsure (1)..(511): unsure at all n locations
ccacgcgtccgcaagacgtccatgaagatgaagcgcaccatggctgctacttccatcctgttcttcttcctcgccggcctcgccgccgcccacggcagcacagcggacgacaccacgaccaccaccaccaacaccatacgcctcccgatcgacggagcagtggcggcgcgaaggaggacgaggccgtggaagtgctgcgacaacatcgtgaggctgccggagaggatcaacccgccgttctggcagtgcgacgacgagctggagcccgggcagtgcttccgccagtgcgaggcgtgccgggatcccgccgggcggccgttccccggccggccgctcatctgcgacgacgtcttctggggcgacgacccgggcacctcgtgcgcgccgtcgtcggagtggccgtggggcccgtgctgcgacatcgccgtctgcaccaagtcgctccctcccaatctgcactgcttcgacgaggtggagcgtgcgccgncgcgtgcgggcagtgcgagatggt

SEQ ID NO: 387645 - DNA, 599 bp, Oryza sativa
tgttcatgtaagcccaatagacaaacatgttaaagttggtattcttgggaatgctgttgattttcatgacaatgatcctagaaatagcacattagcaagtaatgatgaaaggagaaaaatgatgattgcatttgacatgagatgtgttggctttatcatggcaaagatggttctgagagagctaatggattcttctactttcctaaaattcaagtcattcttgacaaagggagatgacccagcatgtctgcgtgagttccttttacctattctgtgccgaaattctccatccgggaatattggtctgcagatgcttgatcgacaatggggtgctggttggaatcttttggcgttattgctggcaacaaaacctgacaaaaggataagttgtgtggatgcattgaggcaccccttcctttgtggacctaaatggcgcataaatccatcagttgatgtcatacggtggggcttgggttctactgctgtccgcatggctgaagattatatttatggacagcatcagcgtagacgattagcatattttgttgaattgatggaggtgctaaaccctaatccaagaacagagaactggcttaaca

SEQ ID NO: 387646 - DNA, 621 bp, Oryza sativa
ccacgcgtccggctttcacctccgtattttactcgcgcccttctctctctcctcgacctcattcgcctcgcctcgcgtctcgtctcgttcgcccctcgccaccacgcaacacgccatgggcgcggccgacgacgccaaccaccgccacgaggaggccagccccctcctgccaccgggcggcggcggcggcggcggcaagaagctccaccagtctccgcctccatcgcctccggaggcagccaagtgctgcgccgatggagtccccgtcgttatgggcgagccgctcggggcacccgcaccgccgcgggagagctggaactcgggggtgctctcctgcctcggccgcaacgacgagttctgcagcagcgacgtcgaagtgtgtcttcttggaagcatagcaccatgtgtgctgtatggtagtaatgtcgagaggtttgcagccagaccaggaacttttgcaaacagctggcttgccttacactggcctctatatgcttgggaatgctctcttcgggtggaactgcatagccccatggttctctcatcacactcgtacagctattcgtcgacgatacaatcttgagggtagctttgaggctttcactaagcaatgtgggtgct

SEQ ID NO: 387647 - DNA, 884 bp, Oryza sativa
  unsure (1)..(884): unsure at all n locations
ccacgcgtccgcccacgcgtccgggcatatacaagtcanaagtagtcatggtgatggtggccttggctgttggatctgatcaaatatccacccagggtagacgtcaagctatcatcagtggtctttccaatcttccaagcaatgtcagcgaggttttcaaacttgataccgagatgaaggaacttgcctcttccttgatcgattcagagtctctccttgtgtttggcagaggttataactatgccactgccttagagggtgctcttaaagttaaggaggttgctctgatgcacagcgaaggcatgcttgctggtgaaatgaagcatggaccacttgcactagtggatgaaaaccttccgatcatcgtcattgctacacgtgatgcgtgcttcagcaagcaacagtcagtgattcagcagctcctttctcgcaaggggcgtctgatagtgatgtgctcaaagggagacgcatctgcagtttgcccctagtggatcttgcagggttattgaagttccagaggtcgctgactgtctccagccagtgattaacataattccgttacagctgctcgcataccatctgacagttcttcgaggatttgatgttgatcaaccaaggaatctggcaaagagtgtgactacccaatgagtagggggttctatcataagttgtatcagatccaatagagatcagacgttgtatcaaatccatcctatagagaataggttgtgtagctattgattgaatgttattactcatagccatttcgcagttatgtaattatttttagataactgagattcttgaggtggctagcattacaatattgttgatgaactccatcaatttttcnnnnnnnnnnnnnnnnnnnnnnnnnnnnnnnn

SEQ ID NO: 387648 - DNA, 498 bp, Oryza sativa
gccggggagccgtcggaggacgaggcgcagagggagtgggaggcggagatggccccccgcccgccggaggccgaggagatggaggagctcgagcgcaccgccgaggagctgcagagccaggccgccgccgaggcccccgacgagtccgaggaggagaagcgcgagcgcgtccgccgcgagctccagaaggtggcaaaggagcaagcagagaggcgggcgacggcgaagcaaatgtttgatttggggcaaagggcctacggaagaggaatgtatggccgctctattgaattcttggaggctgcactcacaattattcgcccttcatcgctccttggtggggagatccaaatttggcttgcaatggcgtatgaggccaataggaggcacaaggattgcattgcactgtacaaaggagtggagagttcacatccaatgatcagcattaggcggcaggcagcggaacttcggttcatttctgaggcacccaagctgaagatc

SEQ ID NO: 387649 - DNA, 912 bp, Oryza sativa
gaccgtccggaattcctttcgtcatgcgccgacctccatccacagagagtgcagaccttgcatttgcaagctgtctggattgactttgtctctccggaatttattgctgcattgtctgtggatcagaggaggagattcaagctctttttcctgctactatctacggatgcttggaatgcctctgtcatacttgatgtggtataggcctctgtaccgcgcaatgagaactgatagcgcattcagctttggatggtttttcctttgctacatgcttcacattgccttctgtgtatttgctgccatcgctccaccagttatatttcgtggaaaatcattaactggtatattggctgcaattgacaccttctctgatcatgcaatagtcgggatcttttactttgtcggatttgccttgttttgcttggagacacttgtgagcatttgggttcttcagaaagtatacatgtatttcagagggcacaagtgaaatgggccgtggaagaaatattacaaaagcccaccaaatactatctgattgagctgcagttctgtgcatacatatatgtacatgtcgatcttgtatgttatgtagtgatggagatgttctaagtacatgtcaatctatagtgttattttttttaacaggaatactattttatagtgttgttttctgggctgatcggtctgttgtgttgaacctcaattctttacctatacaaattgcactttgttcactcttttgtttgatgctcaattttacggttgattggcctgttggccttacacaagagccatgctcgttggaaccagtagacagctccccatctgtctggggatctcatttgtgccttgagacttggaaggaatcttgcacttctggagattacagtatccccgaactgggatcaggtg

SEQ ID NO: 387650 - DNA, 465 bp, Oryza sativa
acgcgtccggtcgcaggaggctgagagccggcacaagcatccagcaagagctcccatgggaagaagaaagcgaaggtggactggacgcctgagcttcaccggaggttcgtgcaggcggtggagcagctcggcatcgacaaggccgtgccgtcgaggatacttgagatcatggggatcgactctctcacccggcacaacatagccagccatcttcagaagtaccggtcacacagaaaacacatgattgcgagagaggcggaggcagcgagttggacccaacggccgcagatttacgccgccggtggaggtgctgttgcgaagaggccggagtccaacgcgtggaccgtgccaaccattgcgcttcccttctactccgccaccaccaccatcaccggctccgattcaacattttgctcgcccgttgcatgtttggggccacccgacgatggacccgtaccgagttca

SEQ ID NO: 387651 - DNA, 562 bp, Oryza sativa
  unsure (1)..(562): unsure at all n locations
ccacgcgtccgcccacgcgtccggggctaggcaatagccaaggacatggcgcagcgcaaggtggaaaacatgaagcagattgccaagaaaaaagcaaatgaggaaagaaagcgtctagaatctgagcttgagcttgccctaatggtcgagaaactacaggagcttcgctctatgagagttcaaaaaatgaagaaacaaggtcattttctgccagaagaagatgataaatatcttgagcgtgttaaggctgcagttgaggaagaggagcgccaagctgcaagtgctgctcggactgatgctgccaaggatgctattctgaccgcggaagagtcgaggaaggctgtgcagtgttcaaattcaagagaagatgattctgatcaagccaaaagggcaccaacactggaacaaaaccagagagatccaggaataagcggcagaaatcatcatgcaagccaanaaaccagggcatggacttcattaaggttgncagcaaaggggcatggggcattttggattctgttttccagtctgncctttttgggtcttcccttattttcattgg

SEQ ID NO: 387652 - DNA, 556 bp, Oryza sativa
cgctcccatcgatccctccttctccttcctccgcctccgcgggcacgacgcaaggccgcctcgcgccgcccctggtcgaggatcgatctccccttcccctcctcggctcccgtctccttcgcccgcttgccggcagcgccggtctccgtcccgcgagctgcggtggtgccgccgtctctgtccctgctgctgctgctgcttccgccgccgatctggaagcttgtagcagtttatgtgttccccagaaagtttgggggttcaactgaccccttgcctgaagggagggagtattcgattcttgaagaagagagagagagagagagagagtatttgattcttgaattctactagtttggaaggaggggagctgcgttattattattattattattattattattattattattattattattattattattattattattattattattattattattattatttttggctcgtttggttcatggagtcgaaggaagtgcatggccgggatgtgctggttgatctggagacagggaattgcttgctaatgagagagggg

SEQ ID NO: 387653 - DNA, 320 bp, Oryza sativa
gatggattcgagctgaggcgaagacctgacccaaacggaagtcttctcctctccccttgctcagttcattcagttggcctcctcgatccacctccagcctctcaattcaatcgccattgacaacaatccgcgaggcgaggtgcttaggttctcagccaagactcgagtcgacgccggccatggctttctgggaggattggggcaagggcgactgcgactgcggctggaagaagtgcctcatctggacggcggccatcgccggcgtgggccggctcatcgtgctcctcgtcttcgtctttgccctcgtgtttccggccaag

SEQ ID NO: 387654 - DNA, 327 bp, Oryza sativa
ccacgcgtccggcactgtcatcgaaaggaatctgcactgatgatactcacagttcaatggaactgtcttgtacaatagccgaacaaagccaaaatacagaggctgatgatgaaatgtcttctctggtcacttcacaaggatcaccatcccaagtctccgaatctcacaaaaccaaacctgagatttttttgatgtttgaaggttcctggctgattgcacgctcttcctatctgatgtatatatctctatttttggggctgagcgcttgtgtgtcgttctttttttacttccagaaaggggcgataggtgctacaacaatattaagcc

SEQ ID NO: 387655 - DNA, 470 bp, Oryza sativa
ccacgcgtccgcccacgcgtccgcggacgcgtgggttcatttagagttacttaatagcctatttcttataccatatctctatcccgtgaaattctcgagccgaaagatggatgcatatgctatgtttcattttgctaaatgatatcaattaaacggtgtatcaattccataaatgggatatagcaataaataaatcagcaaaattcttttattttagatagaagaaacttttcttctatctaaaataaaagaatgtacccttctatccaaatccaatttgcatcgataaaataaatccaaattccagtagtagatgaataattgcaaatttttgtgtgtacgagattagaataacttcaaaataactgacataattttttatttttcctgatcagaaaaatacatgaaaaagaaaggaggtagaaaaatttttggatttatggttaaagaagaaaaagaagaaaactggg

SEQ ID NO: 387656 - DNA, 674 bp, Oryza sativa
ccacgcgtccgctttaccaatgatgttgtctactccgaaattgtatttgacatgagttcgttgaagaaagatcatctgcagttgttgccgttgttctgccaatctttgctggagatgggcacaaaagacatggacttcgtgcagcttaaccaattaattggaagaaaaactggaggcatatcagtttacccattcacatcgtcgataaggggaaaagatgatcctcttactcggatcgttgttagggggaagtctatggcaacacgagtagaagatttgtttaatctgatttactgcattctccaagatgttcagttcacagagcagcagaggttcaagcagtttgtttctcaaagtaaagcaagaatggagaatcgattgaggggcagtggccatggcatagctgctgctagaatggatgctaagttaaatgcagctggatggattgctgagcagatgggtggtattagttatcttgagtatttacgtgatctggaaacgaagatcgatcaagattgggacaaaatatcatcttcgcttgaggaaatgagacaatctctctttagaaaggacggttgcctggtcaacataacaagtgactggaaaaatcttgagaaatctaacaaacatattgccaaatttcttgattcgctgccaagtactacatccctttg

SEQ ID NO: 387657 - DNA, 1682 bp, Oryza sativa
  unsure (1)..(1682): unsure at all n locations
cgcgccgccgcgaaacattagctatagctagctagatatagccggccggcgatcgaggagatcgatcgatcgaacgccgccgcgcgcgcgcggtcataacgccggcgagggtggtgttcatctgctgcgttgttctgctcgccgccgccgccgcgggntcngttcgtcgacggcggcggggatcaccagggccgacttcccgccggagttcatnttcggcgccggctcctccgcttataaggttgaaggtgcatttncagaggatggaagaaagcctagtatctgggacacgttttcgcactcaggctattctgttgatggagcaaccggtgatgtaactgcagatcagtatcataagtacaaggaagatgtaaagcttttgcaagacatgggcgttgacggtacaggatgtccatttcttggtctcggcttattcctgatgggcgaggcgcggtcaatccgaaggacctggaatactataacaacctgattgatgaacttctgagccatggaatccaacctcacgtaacgatatatcatttcgattttcctcaggctctccaagatgaatacaatgggatacttagtcctagatttgtagaggacttcacagcatacgcggatgtctgcttcaagaactttggtgatagagtgaagcactggagcactgtcaatgagcctaacatcgagccgattggcggatacgatcaaggaatccttccgccacggcgatgctcattcccctttggtgtcctcagttgtgacaatggcaactctaccacagagccatacatagtagcacatcatcttcttcttgcacattcctcagcagtgtccctctacagagagaagtaccaggccactcaaggaggacaaattgggctcacattgctcggttggtggtacgagcccgggacgcaagatcctgaagatgtagcagcagctgcaaggatgaatgatttccacattggatggtacatgcatcctttggtgtacggtgactaccctccggtaatgaggaagaatgttgggtccaggctaccatctttcacagctgaagaatcaaagagagtacttgaatcctatgattttgtcggatttaaccactatgtcgccatttttgtgagagccgaccttagcaaacttgatcagagcctcagagattacatgggcgatgcagctgtcaaatatgacctcccattcctgaaatcaaataatgagttcccactcgggttgacgagtgacttcatgacgtcgaccccatgggctctgaagaagatgctcaatcatctccaagagaagtncaagaaccctattgtcatgatccatgagaatggagccgctgggcagcctgacccttcaggcggaaacacctacgacgacgatttcaggtcgcaatatctgcaggattacatcgaggccacacttcaatccatcaggaacgggtcgaacgtgcagggctacttcgtgtggtcgttcctggacgtgttcgagtacctgttcggctaccgcctccgcttcggcctctacggcgtcgacttcgcctcgccggagaggaccaggtaccagaggcactcggcgcggtggtacgccggctttctccgcggtggcaagcttcggccggcggcgggggcgctttgccgctgggggacctactcccagtgatcaagggttttttttct

SEQ ID NO: 387658 - DNA, 948 bp, Oryza sativa
  unsure (1)..(948): unsure at all n locations
gtcgacccccgcaccagcagcaagcttcttcttcagcaactcagcagcacttcacctgctgctgctgcgaccgccgtgaccatcaccacctcgtcgccggcgagaaacctgcagagggcgagggcgagtgcggcggagcaggggatggaggagcatggcaaggcggctgtcggctgggcggccagggacgactccggcgtcctctccccgtacaacttctccaggagggctcagaaggacgatgacgtcaccatcaaggtgctctactgcggcatctgccacaccgacctgcacgtcgtcaagaacgattggggcaacgccatgtaccccgtcgtccccggccacgagatcgtcggcgtcgtcaccggcgtcggcgccggcgtgaccaagttcaaggccggcgacacggtgggcgtgggctacttcgtcgcgtcgtgccgcggctgcgagtgctgcgggaatgggtacgagaactactgcgccaagatggtaaccacctgcaacggcgtcgaccacgaccacggcggcggcgccgccacccagggcggcttctccgacgccatcgtcgtcagccagcactacgtgctccgcgtcccggcgggcctgccgccggacggcgcggcgccgctgctgtgcgccggcgtgacggtgtacagcccgatggtggtccacggcctgaacgcccccgggaagcacctcggcgtggtcggcctcggcgggctgggccacctgggcgtcaagttcggcaaggcgttcgggatgaaggtgacggtgatcagctcgtcgccggcgaacggggaggaggcgctggaagcggctcggcgccgacgcgttcctgtcgagccgcgacggcgaangggatngcggcggcggcgggcgacgatnggacggggatcatcganaaggtgttccgcggggcaaccnctggtgccgcttgctgtcgcttct

SEQ ID NO: 387659 - DNA, 743 bp, Oryza sativa
tcactgaggaagaagagcatagcaaaagagtggtcgatcgtcatcaatggagcacgacggcacggcggcgctcggctgggcggcgcgggacgcctccggccacctctcaccgttcagcttcacaagaagggttcaggaggaagacgacgtgacgatcaaggtgctctactgcggcatctgtcacaccgacctgcacaccatcaagaacgagtggggcaacgccatgtaccccgtcgtccccggccacgagatcgtcggcgtcgtcgccggcgtcggcgccggcgtgaccaggttcaaggccggcgacacggtgggcgtgggctacttcgtcgactcgtgccgcgcctgcgacagctgcggcaagggggacgagaactactgcccgacgatggtgatcacgtcgaacggcacggactacggcggcgccaccacccagggcggcttctccgacgtcatggtcgtgaggcaggactacgtggtgcgcgtcccggcgagcctgccgccggacggcgcggcgccgctgctgtgcgccggcgtgacggtgtacagcccgatggtggagtacggcctgaacggtcccgggaagcacctcggcgtggtcggcctcggcgggctgggccacctgggtgtcaagttcggcaaggcgttcgggatgaaggtgacagatgatagactcgtcgccggcgaagcggggggaggcgctggggctgctcggcgccgacgcgttcctgtcgagccgcgac

SEQ ID NO: 387660 - DNA, 474 bp, Oryza sativa
cgcgtccgtaccagactggtgttagggtggttgttgcgtatggtggaccaccaatacatcaacagtggagggaattggaaaggggcggggaaatccttgtggcaactcctggtcggttgatggatctgctggagagggctagagtatcactgcaaatggtgaagtacttagctcttgatgaagctgatcgaatgcttgacatggggttcgagccgcaaattcgtaaaattgttgagcagatggacatgccccctcgcggtgtgaggcagacaatgttgtttagtgctacttttccaaaagaaatacagcgcatggcttcagatttcctggcggactacatcttccttgctgtaggaagagttggttcaagtactgacttgattgctcaaagggtagagtttgtccttgaagcggataaaagaagttacctcatggatctcctccatgcccaaaaagcgaatggttctcatggga

SEQ ID NO: 387661 - DNA, 356 bp, Oryza sativa
cgcgtccgcttgtaacaacaatctctgggagataacaaaagcttcttttggtgttttatttgggaagtcgactcttcaggaaccagcattccaagaactgatcctactttatactgatgaggctgatcaaagcatagagagagaaaattcagacatgatgccatcgcaactgaaaatttttgaaaggatccccatccctgatctgccagtggtttttcctcacaagaagttgtccttccgcatcctagatacagtatggttggatattgctaccgtaataggtttgttggcttatgtcgtgaactacaaatttgagagtttagcctcacctccatcggcttttcttcttgatatag

SEQ ID NO: 387662 - DNA, 447 bp, Oryza sativa
ccacgcgtccgcccacgcgtccgcccacgcgtccgatctcccaccgcgagtagcaacagcggcggtggcggcggcgacctgcgatctcgcagccgaggcagggcggcggctacctgccctaccatgagcagcaacggcaatggcggcgccctcccccaccgctagcggtggctgcggtggctcccttcgctacttccgctgggtggattcggcggcagcggtgtcctacggggcgatggagcggcctcggcgatggcgtgtcttgagccgctggcgctcacctctcctccccatctttctcagcggtggccggtgatctcgcgaccaacgcagggcggtggctccttcccccaccgcgagcaatggcggtgccctccctgtcgtgagcggccgtggcggtgccctcgcccaccgctagcggtggcggccttccccaccgcgagcagc

SEQ ID NO: 387663 - DNA, 483 bp, Oryza sativa
ccacgcgtccgcccacgcgtccgatcaagtctcgtcggctcctcttcccctacctctgtcctccgcccctcccatctaagcctggacgccgacgccggcggaggctctggagcacgcgcagatggagacgagcaggtcgcgaggaggtggggctgccgcgactgccggcgcgattgaggaaatcggccagcaacaggcgcccccgccgccgccgccaggcaggcctcatccgctaccgcatgccctccccacctaacctcttcgttccggcgagcggttgatttatgtagagcaagcggctggcaaatgaggaggttgggtggtggagctctgggacccagcgccgtatgcgggggatgtggtgcgccggctcgacctacaggctaaggacatgattgccgcagctcaagatccaacgattcaaggacgtcatcttcgcgcagagcaagctgctagcgagcaccaagaccttcgcttcactca

SEQ ID NO: 387664 - DNA, 757 bp, Oryza sativa
  unsure (1)..(757): unsure at all n locations
ccacgcgtccgcgtcgccggagttcaactacccggcggtgttcaacttcggcgactccaactccgacacgggagggcgcgtggccgccgggttcgagtccatcgcgcctccctacggctccaccttcttcggctccccctccggccggttctgcgacggccgcctcatcatcgacttcctcatggatgcaatggatatgccgttcctcaatgcatatttggattctgttggtgcacctaacttacgtgcgggtgttaattttgctcaagctggctgttcaattactccagcaacggcaacatctgtcagcccattttcatttggtcttcagattaagcaattctttgcattcaaggacaaagttactaagcttctatctaaaggagatacgtacaggagatatattcctcagtcggattacttttcgcggggactttacacgtttgacataggtcaaaatgaccttgctggtgaattctactggaaaacagaggaccaagttgctgcatccattccgactattttgttggaattcgaaactgggctgaaggtttgtatacacagtattttcattcttaagcttttgcagtgcatggaacctttttttcttcttcaatggtcttcagtagtttgtagaatatggttttcagtcttcaaaaaataatctgtttgccttggccaaaaaataatcagtttgccattnttccatactggtccaactatgtactgtttgattgggaaaggacctactctaacg

SEQ ID NO: 387665 - DNA, 737 bp, Oryza sativa
  unsure (1)..(737): unsure at all n locations
ctcgagctanattgccccccngaatggccaaagagatntcggtggttgattcgccatgancagcnggcgcgagaacacgtgggaactcccggcgacgctgcgtgcgctggcgcgcgacgccggccancaactgcgggtnccccgcgcggccgcggccgcggccacgccggcggcaacggcggggcggcgcgcggcggacngcggcggcaaagcggacaaggtgatgcacctgctgctttgggggcccaagtgatcgatcgatgggcctccgccgcgccggccggccgccgccggcgggtcatcgtctcatctccgaccagatcacggctgtacaatatatatgtactagtactagctggctgattgctcgcttgctccgttctctttaatttcttatggtgtttttggtccagtatccatgcactgatgatgcttgtttgccgggtcagtctacaggggtttccaccgtttttctgtacatacgaatcaagtggttttcctcgtgaaaatcacatgcgttctaatcggtcctttttttatggagcaaaacttatgtatcatcaatcatgtactactaccttgtaaacttttgccttgagtttggggcaagtaatgatcagatcgtgtaagactgccacttttaaaaaaaaaaaaaatacaaattaaaaaaatatttagaaaatattaattataggaatatcaaaatgggcgttcccttatgagtattaacactgact

SEQ ID NO: 387666 - DNA, 543 bp, Oryza sativa
ctccatgctacctttgcttgtcctccgtcgctggtgaagctgtcaccgaggagcatatgtccatggcttgcacgaaggtgtggagaagcacgatgtacacacccaggcggctgaagcgaacgacaccggcgtcaagagtatcaagcacggccatggcggcggcgaacggcgatgccagccatggcgccaacggcggcattcagattcagtccaaggagatgaagacggccatccacagcaacgatagccccaagaccctcctcaagagtgaatccctccacgagtacatgctgaacacgatggtgtacccgcgggagaacgagttcatgcgcgagctccgcctcatcaccagcgagcacacctatgggttcatgtcgtcgccgccggaggaagggcagctgctgtcgctgctgctgaacctgacaggcgccaagaacaccatcgaggtgggcgtgttcaccggctgctccgtgctcgccaccgggctcgccattccggacgacggcaaggtcgtcgccatcgacgtcagccgggagtacttcg

SEQ ID NO: 387667 - DNA, 1016 bp, Oryza sativa
  unsure (1)..(1016): unsure at all n locations
gacccacccatctcncctattctctcttcaaaaaaaaatcaggaaatttaatcgcgaggaggagagagaaaagaaaaaaaaaaggaaattcgcaggagaaatccctggaagcctctagagaccgcgcgaacaggagaccccgaggagcagagcagagcagagcagaggcggcgccagctttgggagctctcggattgatcaagaactggggatcctgagttgaatatgatatcaaatccggtgaattggtacagtttcggtcccggatagaatttgtagtgatgccagattggagggtgggcgagtttgaaggtaagctcaaggatggatttgctcggagcaataattagcgaacatgaaaatggagccgggactgtgagtatatccagcaagaagtcgaagcatcgggttgacagtgaaaaaaaaccccatgttgacatctctggagtggattgattcagattcgcaggaatgtaattcagagcaaatccattcagctaatgggatagtatccccgggtgtcaaccatgatcacatagaaaactgcaaagttgaatcaaatgattttcccttgaatactatctctgaaacaagatatccaacagacaattggaacagttctcagtttgctctgagcaatgatggttcacctgttctcaataatcagagtactccacaaactggtcatggctatggagataatgatctaacctacattgattggcctgctattgataattttgaggacgtcgacaacttattcaggaggtgtgattccacgtacggtcagcagcaactgccgaacacggatgaactgtcatggattccttcttcagatgccatgtactcttctgatgttgctatgcaaccagggtttgaatcctcgtattctgattatggtatcctggatgacctctccgcattcaattgtacggaagataaatccctgacaacagctgatccttcaagtgctnnntgtgacnngcanttcgatgacncnnnnnnnnncnatgagc

SEQ ID NO: 387668 - DNA, 564 bp, Oryza sativa
ggaaattcgcaggagaaatccctggaagcctctagagaccgcgcgaacaggagaccccgaggagcagagcagagcagagcagaggcggcgccagctttgggagctctcgggttttgatccagagcgtttggaattgggaaggattgatcaagaactggggatcctgagttgaatatgatatcaaatccggtgaattggtacagtttcggtcccggatagaatttgtagtgatgccagattggagggtgggcgagtttgaaggtaagctcaaggatggatttgctcggagcaataatagcgaacatgaaaatggagccgggactgtgagtatatccagcaagaagtcgaagcatcgggttgacagtgaaaaaaaaccccatgttgacatctctggagtgattgattcagattcgcagaaatgtaattcagagcaaatccattcagcttatgggatagtatccccggatgtcaaccatgatcacatagaaaactgcaaagttgaatcaaatgatttttccttgaatactatctctgaaacaagatatccaacagacaattggaaca

SEQ ID NO: 387669 - DNA, 1083 bp, Oryza sativa
cacgcgtccggctgccacttccctcgctctcgcatcttctcctcgcgcccaggggccaggtaagcgaagatgtacaccgcgaggaagaagatccagaaggagaagggcctcgagccctccgagttcgaggactccgtcgcgcaggctttctttgacctcgagaatggcaaccaggagctcaagagcgagctcaaggacctgtacatcaacaatgcagtccagatggatattgccgggaacaggaaggctgtggtgattcacgtgccgtaccgtctgcgcaaggcattcaagaaaatccatgtcaggcttgtcagggagctcgagaagaagttcagcggcaaggatgtggtgattgttgcaacaaggaggattgtgaggcctcccaagaagggctcggctgttcagcgccctcgcacaagaactcttactgctgttcatgattgtatcttggaggatgtagtctacccagctgagattgttggcaagcgcatcagataccgtctggatggtgccaaggtcatcaagattttcttggacccaaaggagcgcaacaataccgaatacaagctcgagaccttctccgcggtctaccgcaggctttgtgggaaagatgttgcctttgagtaccctatgactgaaactgcttgaagatgcattccttggattgttcccaatgtattccagaaatcatagttttgatgccaaagttggtacttgggtatttgttactttgagacgacaaatcgacttgaacaatgttaaagttttgggcatttaaattatagacctttgctttggcacggttagcttgtttcaaatccgttgtttgttgtggaatgtgtttcacatatgtggtaggtgaagaatctcattatggttcgctgtttcattctcttgcgtttatcacccgctgtctgctaacttagggtgtgtttagtcctcgtcaaaattggaagtttggttgaaattggaacaatgtgacgaaaaagttgaaattttttttgtgggtaggaaagttttgatgtgatagaaaagttggaagtttaaaaaaaaagtttagaactaaaaaaaaaaaaaaaaaaa

SEQ ID NO: 387670 - DNA, 493 bp, Oryza sativa
  unsure (1)..(493): unsure at all n locations
ccacgcgtccgcggacgcgtgggcggacgcccgggcgccggcgccgccacttccctctcgcatcttctcgcgctcaggggccaggtaagcgaagatgtacaccgcgaggaagaagatccagaaggagaagggcctcgagccctccgagttcgaggactccgtcgcgcaggctttctttgacctcgagaatggcaaccaggagctcaagagcgagctcaaggacctgtacatcaacaatgcagtccagatggatattgccgggaacaggaaggctgtggtgatccacgtgccgtaccgtctgcgcaaggcattcaagaaaatccatgtcaggcttgtcagggagctcgagaagaagttcagcggcaaggatgtggtaattgttgcaacaaggaggattgtgaggcctcccaagaagggctcggctgttcagcgccctcgcacaagaactcttactggctgttcatgatggtatcttggnaagatgagtctaccc

SEQ ID NO: 387671 - DNA, 594 bp, Oryza sativa
  unsure (1)..(594): unsure at all n locations
caggaccaaaagcaggagcnggattaagagcaggagcaaagcagaagcaggagcanaagcaggagtcggagccgctcatttcatagtgcatcccctactcggcacagcgctagccctcctctcaagggatcaacaccacgcaggagccctgctcgcaatggaagtcctgaaaaagagacaaatggaaaaggttcacctccttcacgcagtgtttcaccatcaccacagcgtgctggctcccgtagcccaggtagtgatgacaaggaataaagtttgttgatccagtgatgcttaagaagagtcttcaaattggactagaaaagtttggctgagcatgggagtagcaccgaagcagattcaaggttgctagttcttcgtggtttctagattgtatttcctggtactgtcagaattatgttgtcggtttgtattttcacctctattgtgccttattttgatactgtcgtattaacttgtgttaaaacatttgtcattttctagttatctgttcgtgagacgggttgctgttttctagtagaatgatattgcacgggatcgcccatgatggntgnnnnnnnnnnnnnnnnnnnnnnn

SEQ ID NO: 387672 - DNA, 987 bp, Oryza sativa
  unsure (1)..(987): unsure at all n locations
caaagggtactaggacaggcactgatcttccaaatgaccaaaccagacattacctctgaaatggacattttaccagctcacctattctcagtacgaactatgcatctactaatcacatcaggcaacctataacaactccacccctgagaagaagcaagttgctcctttggtgatctttctcctcataccactgacaatggccaccgagtgtgatgtgaacaaatctcgccgcttcgatcttggcatgtcgaggcggacacgaagatcaacaagtctcatcacttgttatcaagatcaacaggtgcagccccttgtgcagcagctacgtcaagatgccaagctgaagacattgttccagtgccaggatacagagctgcagccaccatgtccatatgaagatcaggagttgaggattctacaggcaccactgcaatgcgaagttgatgcacaggagacactgaatcaacaccgtgatgagcaggaggagaaacttcaccattatctagatgaagagcatgagaagaaacttcaggatcatttggatgaagaaccggagaagaaacttcatcattatctagatgaagagcaggagaagaaacttcaggatcatctggatgaagaaccggagaagaaacttcatcattatctagatgaagagcaggagaaactgttccaggatcaagacgaagaggagaaaacaccaaagcaatatcttgatgaggatcagaagacattgcagcaatgtcaagatgaggagaaggcgccaaatcaatacgaagatgaagacaacactacagggcaataccaagatggggagcagaagacagctgaacaatgcgaagaagagaagacatcagagaagtatcacaatgaagagcacaagtcactcgaggcacagcagcaattgccaagacacgaagcagaaggcccaggagcaacgcaaactttttgaagaagccgttacgccgccgtttcgccgacgacgtn

SEQ ID NO: 387673 - DNA, 653 bp, Oryza sativa
  unsure (1)..(653): unsure at all n locations
tcggtttctcacgtctctcgctgccgccgccgccgccgccgccgccgcgagaagccgtaggaggaggagagagagggagggatggcggagaagaagcagcgccccggcggcgcgaggaaggacgaggtggtcacccgcgagtacaccatcaacctccacaagcgcctccacggatgcaccttcaagaagaaggctcctaatgccatcaaggagatcaggaagtttgcacagaaggccatgggcaccattgacgtcagggttgatgtgaagctcaacaagcacatctggagcagcggtatccggagcgttccaaggcgtgtccgtgtcagaattgcccgcaggaggaacgacgaggaggatgcgaaggaggagctctactctctggtcactgttgctgaggttccccaagaggggttgaagggcctgggtaccaagcttgtcgaggacgatgagtaaatatgcctaggttttgatcttacctgcatcaaagcaattttgtgttcacgagttgtttgaactagaatgatcttgattagtaaactagcagaggtttttggtactgaactatgagttattcagtgcagttgtttctggttgccatattgttgaggtcaggtgcttngtttgnnnnnnnnnnnnnnnnnnnnnnnnnn

SEQ ID NO: 387674 - DNA, 731 bp, Oryza sativa
cttcctctcgccgcagcctccctcggagccagacaaaggagagaagcgcgaaggcggcggcggcggcggcgcatggcgaagatgtcggagaagaagcgcggcgccggcacccgcaaggacgaggtggtgacccgcgagtacaccatcaacctccacaagcgtctccacggatgcaccttcaagaagaaggcgccgaatgccatcaaggagatcaggaagtttgcacagaaggccatgggcacaacggatatacgcatcgacgtgaagcttaacaaggccatctggaccaatggtatccggagtgtcccaaggcgagtccgtgttagaatctctcgcaagagaaacgatgaggaggacgccaaggaggagctctactctctggtcacagttgctgagatccctgcagagggtctcaagggtttgggaaccaaggttgttgaggatgaggagtaaacttttcattgttatctgtcagttagcgcttagtgcatatttccatgattccagtcactatgctgagagcaaatttggaagtcttgctttagcgttttgttatctactgttgatgattcaagactgcattttcttaagcgcttggaattttgacatgtttgtcaaccttttgggatatatactccatgctatcgggctgtgaacaaggatcactcttaagcttaaaaaaatgtctgttagatgctggtattgatttttttgcttgaatttgctcaaaa

SEQ ID NO: 387675 - DNA, 924 bp, Oryza sativa
ccacgcgtccggcgagacaccgatagctagctaactaatcttccccttcgtctccggcattattccacttggacgaacactagctcaccggccggccatggcgtcttcttccgttctgatcaagctgctcgtcgtcgtcggctgcgccgccgcggcctccgcggcgacgctcaccgtgggtggtagctccgggtggacgcttggccagaactacgatacttgggcaagtggccaaaccttcgcggttggagacaagctcgtgttcagcttcgttggggcgcacacggtgacggaggtgaacaagaacgattacgacaactgcgccgtcgcaagcaactcgatcagctcgaccagcaccagcccagccaccctcgacctcgccgccgccggcatgcactactacatctgcaccatcagcggccactgcgccggcggcatgaagctggccatcaacgtcggcagcggctccggctccggctccggctccgggacgccacccagcaccaccccaggaagcagcggcacgccgccggccaccccttcttccccctccaagccgaccggcggcgcgtccgccggcctgcaggccagcgccgccgtcgccgccgccgccggcgtcctcgtcaagctcgccctcttctgatcgggcccacctgccaggatagaggcagtgcatatgattcttgtttcttgatcatttcgtctgacggccggcatgcatgtgtgtgagagagatgagtggtttgctagctagctagatgatgatggtgatgatgatatggggttgttgttccgttccatcgtgtacttagtactgtaattacgagctgtcatgtgatttgttttctcatctccatggatttgtataattttcctctgaattttatcatctgcatattgatcggacaaaaaaaaaaaaaaaaa

SEQ ID NO: 387676 - DNA, 497 bp, Oryza sativa
ccacgcgtccggtacattgcaaagacatacgctggaatgggaacagcttttgaggatctactgcaggctgggaaaatgggtgtccttaatggagctgagaaattcgacagccaaaaaggatgcaagttctcaacttatgtgaagtactggataaggaaagcaatgttagcacttcttgctgaaaactctggagtaatccagctgcccgcaaggatggagggtataattcgtaaggtcagggaagcgagaagggcgattcgctacaacacagggaggaacccaccagatgcagaaatcgcagccctcatcggtgtatcagttgccaatgttaggttggcacggaaatgctctcgtcgagttgtgtcgctttacacagagatcggagttggacagaatgcaaaatttgtggaagtgactccggacacatctttagaagcttcatatgaggctatgttccggatgcagttgatagagagactgctttatgttctggacag

SEQ ID NO: 387677 - DNA, 986 bp, Oryza sativa
ccacgcgtccggctgatcggcatccacaacaagaaagactgcctgcagaagtgatacctcagaagatgataggattttcaagttcagctatgtctaccctaaaagaagctgaatttttcattcctgactccaaaaaatccagtgtcattcatatggatttagatcgcagcttcttgccagtgccttctgcagtgaatgcctccatttttgaaagttttgttaggcggaacattactgagtctgaaactgatgtccgttccagcattcagcagctggtgaaagatagctatggtttcccagcagatggttgttctgaaatattatatggcaacacctgtcttgcactcttcaacaagcttgccctttgctgcatccaagaccagggcaccttacttttccccttgggcgctaatggtcactatgtctcagcagcaaagtttgtgaatgcaaatacgctgactattccgacaaagttagaatcaggcttcaagattgaaccacgggttctagctgacacacttgagacagtatctaggccatgggtttatatttctggccccacaattaaccctactggtttcctgtacagtgacagtgatattcaagagctcctttctgtttgtggtaaatatggagctagggtagtaatagatacctccttctctggtctggaattccaaactgatggctggagtcgatggaatttggaaagatgtctttctgctgtgaattgtccaaaaccctcgttctctgtagctcttctcggagaactgtcctttgagctgactgctgcagggcatgactttgggtttctgattttgaatgactcatccttggttgacacatttcacagtttcccaagcttgagtcgtccccacagtacgctgaagtacactttcaaaaaactactgggcctcaagaatcagaaggatgaacacttctccaatctcattatggagcagaaggacacactaaagagtcgtgct

SEQ ID NO: 387678 - DNA, 789 bp, Oryza sativa
ccacgcgtccgcggacgcgtgggcggacgcgtgggcacacgccaaagcaattttagcccgtacccccctgcatcccaagcgcccgagaccgcctctcccctgcaccaataccaccaccgcttcctttccgatccgagcccttcccctcgatcgacggcggccatggcgagaatcccgctgctgctggccctcctgctcgccggctccgccgccgccgccgcgcaggtcgggggtagccgcggccatggcccgctggtgggcgggtggagcccgatcacggacgtgggcgacccccacatccaggagctcggcgggcgggcggtggagcggcacgcctcgctctccagcgacgggctgcggttccgccgcgtgacgagcggcgagcagcaggtggtctccgggatgaactaccgcctcgtcgtctccgcgtcagatcccgcgggggccaccgcgtcctacggtcgccgtcgtgtacgagcagtcgtggaccaacacccgccagctcacctccttcaagcccgccgccgcgcactgatccatccctccctccagatctatcttatctatgtctcttctgctccatctcgatcagctgttaaattttccctgcctaatctctctctgttaatcacacatctcatgtaattctcatgtatgatgagcacaagctaagtacctgtacttgttcggtctgagttgtgtccccgtgtgtgcggttcaatctttttcatgtaagacagcgaggccacacttgtaatgaattagcgaataaaatggtgggattggaat

SEQ ID NO: 387679 - DNA, 495 bp, Oryza sativa
tgcgaatttgaaaaggaactgagaggagaacaacaggttagcacatttgtgcatacctgtccgattggggatgggttgatgggagcacctatatgtagtcgattcggaaaagtttttggaatgaatgttgctcggacagcactgtgtttatcaattaattttggccctgaacaatagtcaattaaaggttgaattggcaaaactattacagaatgaagattatgagatgtcagctcttattgagaagtacgattctgaaaaaacgagtgcatcgaagaagagaaagggaaggggtgttagcagttcgcaaatgtcaaggtcaccagtgaagagaaaggcgggtggcagttcttcgtcaagaagggagaagggtgttgccagttcgcaaatgtcaagtttaccaagcaaaaaaaagggcggtggcaattcttcgtcaagagcgatataaaagaggctttggtttgatggagatgggcttaagccggttgggctgat

SEQ ID NO: 387680 - DNA, 673 bp, Oryza sativa
ccacgcgtccgcccacgcgtccgcccacgcgtccgcccacgcgtccgctgtaatacggaagccagctcgtcctgccgttatcttcttgcagaaatttttggcgtctccagtgtggccacgtctgagcgatggtggcctctccaacgactggactacctccgcacgattgcccatctcgtcttgcaaagaagataggagagaggaagctgaaaatcattggcccaagagaaaaccttgctaggctagcagggcacagcaagaacaaggccagaaccaatggcggcgacagctacacttgctgccccctccttcttggcacatcagtcgatcttgagccacaagcctctgaggaagcttggtctatccctggaactgccaagaaccagatctgtcaaaattagagctgcaaagctgcctgcaggggttgaggtgccgaggaagcagccaaagctgagtgagcccttcctgggtttcaccaggactgcagagatatggaactccagggcctgcatgattggcctcattggcaccttcatcgtggagctggtgctgaacaagggcattcttcagatgattggtgtgtgagcggcaagggacttgatctccctctttaaatgctagtccatatatatttgtaccatatatactatgagatttatcagtgaaattatag

SEQ ID NO: 387681 - DNA, 296 bp, Oryza sativa
gaattccctgctcgacccacgcgtccgcctgctcccacttcacttggaattcgaaatccacacgagcgcggcggcggcggcggcggcgatggcgagcaccattaacgtggcgtcggccacctcgaggttcctgctggccggcgggaacggcggcagcggcggcggcggggccagccgcgtgagcttcgcggcgaacagggtcgggaggaggatggtggtggtcgtcctctatatctttaaatccaattgtctcttcttctgtttttaatcggtcattgcttttatgatcttttctt

SEQ ID NO: 387682 - DNA, 664 bp, Oryza sativa
ccacgcgtccggcagcaggagcaggacgcacaatgcttgttagtgatgctggtagggtctatgcatttggaaaggattcatttggagaagtggaatatgcagcccaaggttctagggttgtcaccacaccacagctggtggaatcattgaaggacatatacattgtccaggcagcaatcgggaacttctttactgcagttttatctcgggaaggtcatgtgtatacattttcttgggggaatgacatgaaacttggtcatcagacagagccaaatgatgttcagcctcatcttctagcaggccctcttgagaacattccagttgtgcagattgccgcaggctactgctatctcctggctctggcatgccaaccaagtggcatgtctgtttattctgttggttgtgggttaggtgggaaacttggccatggttctcgaaccgatgagaaataccctaggttaatcgagcagttccaagctttgaatatacaaccagtagtggttgctgctggtgcttggcatgctgctgttgtaggcaaggatgggcgtgtttgcacttggggatgggggcggtatggctgcttgggtcaccggaattaagaatgtgagcctgttcctaatgtgtgagagtcctttaccaatgtgagggccttccatgtagcaac

SEQ ID NO: 387683 - DNA, 685 bp, Oryza sativa
ccacgcgtccggcggagaaggacggcttcgacgcgtggctcgccgggcacgcgccggagcgggtgtcgggcgacatcgacgcgtgcacgaactggctggtggacgagttcacggcggcgggggtgtcgaggaagctcgggataatcgggttctgctacgggggcggccggctggtggagacgctggcgcgcgacggcggcggcggcggcggcgcctacagcgcgggggtctgcttctacgggtccaggatggacgcgtcgctggcgccgcggctcgccgcgcccgtgctgttcgtgtgcggcgacggcgacccgctgtgcggggtggagacggtgcgggcgctggaggcacgcccgaggggcgccagggccgccgtgtacgccggcagggggcacgggttcgcgcaccggccgcagtcgctggaggacgacggcgacgccgaggacgcgttcgcgctgatgcgggggtggctgcacgaccaccttctcgcctgatcatccttgttccgtttcaaactgttcgctcgtagacattggacagggttctatttatactattgactatgttactgcttgtgtaaatgtgtaatgcacatgggcattgcattgcacttgagaaatgagtagttgagtattgtaagttcaatagtttcgtttcaaaaaaaaaaaaaaaagcggacgcgtgg

SEQ ID NO: 387684 - DNA, 960 bp, Oryza sativa
tacgctgagactagcttgcaactaggctcgatgcttttgagaggactgggtgtcatgtctgatgatgtatccttctttagtaagcttgtgagagactcaatggagttacaagctcaggaagcactcaacaacatcgaaaatcgagaaattgatatcatgaagccgcttgagataagaatatcagacttggttgagcgcaatgggaatggttcaagaatgatagcccaggaggattcactaaggctaagtagtcgcccaaacataccactaattgaagcaactctagaggaccgaatacccgaaactacaggggaaaatgaccagactggatatgacttcaacaacatagattctgaagatggtgtcaaatattgtctcttggaagctagtgatgacgaaagcgaagcctccaattcaagcaaggaaatgatcgaccaatctgtatagcgccactagtaaagaaccaagaggctaaacttccacttctaggatcaagcccatagaatggtagccaggcagagcagaagttcagacctggcacttctcttgcaattggacatatgcctatagcttacatgcagcatatatttctgaggactggattgatggttatcagtgaagggcatatgatcactggattatatgtcactcaatcctaaatcatgctgcagatagagaaaaatttcagctgacaaacctgatactcatatacctactgatgcagctcagagtgccagactgaaggatcaccatccagaattcagaatagcatttttactttttacaggacccttaatttgttcagttaggacgacacctatatgcatatatagatgcacattccttacacaattgtgctgtatttgtagcgtatatcggaccgaacattaattcctgtaccaattcaggtacgcacagagaattacagaaatagtattgcagtcatcgtggatttgtgat

SEQ ID NO: 387685 - DNA, 480 bp, Oryza sativa
ccacgcgtccgcagagagaaaagtttgcacacagctagcatggcgaacaagctgcagctcgccatcgcgttcgtcgtcgtcgtcgtcgtcctcggcgccatggcggcatcggcggcggcggcggtggcccccatgctgacgatgcacaacctgtgcccgtacacggtgtggccgatcgtgtcgccggacagtggctcgccgcccatcgccgacgggatacggctggagggccgcggcgtcgggctgaggtcgctcaacctcccggcggggttctggtcggggcgcgtcgtgccgcgcacatggtgcagggacggcgggcggtgcgacaccgggaacgcgccgccggcgacggtggtgaggctgtcgttcaacggcgccggcgggctggcggagtacagcgtcaacctcggggaagggttcaacgtgccgacggtggtgagcccgcacgccatcggcggcgggatgtgcccggcgctgggc

SEQ ID NO: 387686 - DNA, 500 bp, Oryza sativa
ccacgcgtccggctgcagagaagaacatccacttgatatctgatgaagtgtttgctggctcatacatatggatctggaaaatttgtaagtgtggcagaggttgttgatgatctagaagactttgacaaaggcagggtgcacataatatatggactctcgaaagacctatctcttgccgggtttcgggttggggtaatatattcctataatgaaagcatcgtgacagcagctgctaagattgctaggttctcgtctgtgtcaactccaacacaacgcttgcttgttgccatgctctcggaccaaaagttcatttcagattacctaaaagttaatagagagagattgcgcaagatgtaccatttgtttgttgatgctttggatcaagtggggattgagtgctacaagagcagtggagggttctactgctgggcagacatgagcaagttcatcaggtcttacagcgagaaaggggagcgcaagctttgggataggttattgga

SEQ ID NO: 387687 - DNA, 660 bp, Oryza sativa
ccacgcgtccggcgacgcgtgggccattggagtagtcttggtcaccgagaaggttgcttcagcaataaacttcggcgaccacggtaccacattcgggggaggccctcttgtttgccaagctgcattgaccacattggataagatccagaaacctggcttcctagcagaggtggccaagaaaggagagaacttcaagcagcttctcagtaccaagctgagcggaaacgcccatgtgaaagagatccgggggatcggtctcattgtcggcatcgagctcgatgtcccagcgggtcctttggttgatgcgtgcttggatcgcggtgtcatagtgctgacagctggtaaaggcaatgttgtgaggctggtagccgccactcatcatctcggaaaaggagcttgagcaggctgcagaggtgataagggactgtctacctgcacttgatgcctctacctcttaatgtaagcaacatccttagcaatggaggctagaatgatcttccccttttgggaagacccttagcaatggatgttagaatgaacctcccctttgggtggaagttcagatataatgtgtgccataggtctacttgtcgaatcttcttccaaattttggaaacaaataatgatatcaaaatgttgtagtccaattcgagacaagta

SEQ ID NO: 387688 - DNA, 338 bp, Oryza sativa
cccaaaccgagcgcagcagcgcggaccgagatctgcgcccggcagcggcggcgaactccggtgaaccaaccatggccgtggacctgatgggctgctacgccccgcgccgcgcagacgaccagctcgccatccaggaggcggccaccgccggcctccgcagcctggagatgctcgtgtcgtccctctcctcctcctctcaggccgccggggctcacaaggcctcgccgcagcagcagccgttcggcgagatcgccgaccaggccgtctccaagttccgcaaggtcatctccatcctcgaccgcaccggccacgcccggtttcggcgcggcccggtcgag

SEQ ID NO: 387689 - DNA, 472 bp, Oryza sativa
ccacgcgtccggattgatactcctgcaccagagcaaagggatgattgggacatcctgaaagctatcgtatacggtggcctcgtggaatcgatcaccagcctctctgtggtttcagcagctgcatccagcggcgccaggacattggacatattcatcttgggcatagcaaacctcatcggtggacttcccatcatctttcacagcatggctgagctgagaagcattggagatgtggatgagagggaggagcagggcggtcactactggttgcagctggggaggcgatccaagtaccggctgcatgtcgccatggccgtgctgtcctacctcctcttcggcctgctgccgccgctcatctacggcctctccttccgcggcggcgacgtgagggagaagaagatggtggcggtggcggcggcgtcgctggggtgcatcgcgctgctggccatgggcaaggcacacgtggcacgga

SEQ ID NO: 387690 - DNA, 567 bp, Oryza sativa
ccacgcgtccgaaaaacttgacgcctcaattaagtcttcgccttccgataaaatccccgaattccccacgcccaaaaacccaagcaaaagaatccccaaattccaacaagaacaccttcgatttcgatccaccaatctaacacaacatccaatatccatggccgattcaggcagcgacgccccgatcagcaaccgccccgaggaggaggtgacggtggagaagacgccggagatggaggcggcggcggaggaggagaggctgaggtatctggagttcgtgcagcaggcggcggcgcaggtgctggtgctggcggcggcggcgtacgcgtacgccaagcagggcgccggcccgctccgccccggcgtcgaccacgtcgagggcaccgtcaaggccgtcgtcggccccgtctacgaccgcttccatggcgtccccctcgacctcctcaagttcctcgaccgcaagtttggtgagtccgtccaggagctggaccgccgcgtgccgccggtggtgaaggaggcgccgggcctggcccgctcggcggcggcggatgtgcggcaagcggggtt

SEQ ID NO: 387691 - DNA, 822 bp, Oryza sativa
  unsure (1)..(822): unsure at all n locations
agcgcggcgcgctgcaactgcttcaacggcagcaactacgaggagagtgacgacgaggagggcttcttcctcccctccgaccactcctccgcctccgcccccgccgccgccggcgacgccttggagtctctcaagggtttggtgcagagcgcgagcgtcgcggcagcggaatcttctcgcggacgcgtcgaggatagcggagaggtgctgcaagggatccaagggcaaggcggagtgccgccgcgcggtggccgacggcctccgcgcactcggctacgacgccgccgtctgccgctcgcgatgggagaagacctcctcgtaccccgcaggtgaacatgagtacatcgacgcggtggtcggcgaggaggtgaggctcattgtggaggtggacttccggtcggagttcgaggtggcgcggtcgaccaaggcgtaccgggcggcgctgcaggcgctgccgccgctgttcgtggggacgccggaccgcctcgggcagatcgtggccgtcgtggcggaggcggcgcggcagagcctgaagaagaagggcctgcacttccctccatggcgcaagccggagtacatgcgcgccaagtggctgtccccgcacgtccgctccggcgacaaggccgccgccgccgctaaaactgtgacgtccactacgtcggcgacggcgacgccggtctcggcggcgagcttctccggcgcgttcgagctcctgttcgataggaaacagagcggngagatccccgccgcggagatgatcacggtggtggtgtctccgtcgccgtggcgcccgacggaggaggcgagcaagaagaaagccgc

SEQ ID NO: 387692 - DNA, 513 bp, Oryza sativa
  unsure (1)..(513): unsure at all n locations
ccacgcgtccgcggacgcgtgggcggacgcgtgggtagcactgcctctcctccaagctagcagctcagctaagctccattactacccagcttctcctcatccctctcaagatcaagaactcatcaagaagcctgcgacctcaccggaatcaaatcgtcagtggcggcgtggtcgctgtgacgatggagaagtgcaggtcggtgccgcacgagcactcggcggcgtactacggctgcggcggcgggtacgactacgaggacgtgagcggaggcggcggcggcgccgccgagaagtcgtacagcttcaacgggccaagcgcccgcgatgacccggaggcgaagcggcggcggcgggtggcggcgtacaacgtgttcgcgacgcaggggaggctcaagtccaccgtccggagcagcttcaagtggatcaagtccaagttctccggacatccgctacgttgncctctgaactgatngaacttaccctgncatatatgccatatantacatatatatg

SEQ ID NO: 387693 - DNA, 296 bp, Oryza sativa
caactccacccgaatccgcaagagagagagagagagacgatggcggcggcggcgggaggagggacgagggaggagatggtgtacatggcgaactggcggacaggcggagaggtgcgaggagatggtggagttcatggagaaggtggtgacggcggcggcggcgggcgggggtggggagctcacggtggaggagaggatcctgctgtccgtggcgtacaagaacgtcatcggcgcgcgcagggcgtcgtggcgcatcgtgtcctccatcgagcagaaagaggatggccgtggcagac

SEQ ID NO: 387694 - DNA, 638 bp, Oryza sativa
gaattacgtagatacaatcttggagaagactgcccagtctttgataatctgtttgagttttgccaaatatatgctggaggaactctagatgcggctcgcagattgaatcataaaacatgtgatattgctatcaattgggctggtggattgcatcatgcaaagaagtgcgaggcatcaggggtctgctacattaatgatctggttttgggaattctggagcttctcaagtaccatgccagggttctctatattgatatcgatgttcatcacggggatggagttgaagaagccttttatttcactgacagggtaatgactgtaagtttccacaagtatggtgattttttcttccctggcacaggtggatattaaggatataggagaaagagaaggaaaatattatgccattaacattccacttaaagatgggatagatgactccggctttactcgcctttttaaaacagttattgccaaagttgttgagacatatctgccaggtgctattgttcttcaatgcggggctgattccttggcacgggaccgtctggggtgcttcaatctgtccattgaaggccatgctgaatgtgtgaagtttgtcaagaaattcaatatccctctactggtgactggtggtg

SEQ ID NO: 387695 - DNA, 918 bp, Oryza sativa
  unsure (1)..(918): unsure at all n locations
ttcacgtttccggaaagccaataattacgggccgcaggtcagccaaatcagttactcctccttgcatgtctcgtgaaccagttaggcggttaacttgtatatcaaacagacgccgcgcgcgcgagcagttcgtcgtcgtcttcgctcgatcgtagtagttgccggccggcatcggcatgggcgacggcggggagaagcaggcggcggcggcggaggggtggcggctgagcgtcaacgacttccagttgccggagcggcccaaggacccgcacttcgtcaagagggtcatcaagcgatgccacggaaagcatcggaaaattgcaaaatactacaagaagcaggaaaatctcctgaaggatttcagcgagatggaaaccatgaatgagattggttccttagatcagaatgctcctactgaggaagagttgaggcaaatggcaaagggcgaacgattggccatcaacctgtcgaatatcatcaatctgattcttttcattgggaaagttcttgcatcagttgaaagtttatcgatggcagtaatagcatcgacactggactccctactggatcttttgtcaggtttcatactctggtttactgcacatgctatgaaaaagcccaacaagtatagctatccaattgggaagagacgaatgcagccagtgggcataatagtatttgcatctgtaatgggtacacttggcttccaagtgctaattgaatccgggcgtcagcttatcacaaatgagcaccaagtgttcgaccacaggaaggagctgtggatgatcggcagcatgtcctcagtcgcagtggtgaagttcttcctgatgctctacttgccggtcgttcaagaacgagatcgtgagagcctacgcgcaggaccatttcttcgacggtgatcacaactnggtccggctt

SEQ ID NO: 387696 - DNA, 559 bp, Oryza sativa
gtactatcttgttgcgtgctcctgatcatatcgctgcctctgcaccggcctagccatggggagccgaggacgacgcggcggcggggagagagagaccgagacggaggaggatgagacgtggaaagctgcgggtgggcgacgacttcaccgtcccggagcgcttccaccgcaagccccccttcttctccaggatcttccccgccggctcccatggaaagcatcggaaaattgcaaaatactacaagaagcaggaaaatctcctgaaggatttcagcgagatggaaaccatgaatgagattggttccttagatcagaatgctcctactgaggaagagttgaggcaaatggcaaagggcgaacgattggccatcaacctgtcgaatatcatcaatctgattcttttcattgggaaagttcttgcatcagttgaaagtttatcgatggcagtaatagcatcgacactggactccctactggatcttttgcaggtttcatactctggtttactgcacatgctattgaaaaagcccacaagtatagctatccaattgggaagaga

SEQ ID NO: 387697 - DNA, 428 bp, Oryza sativa
  unsure (1)..(428): unsure at all n locations
aagagtaacaagcattgacactcatttttgtgatcacgagtgatctgctatgtgtgatggttgtgatagacccctagaatgtttgtaagttttttgtttgtctttaattagacattcacttaggatattgtaccaaggagttccgggagaatgtgtatccgtattgtgtttaatgctattttggaacgaccgtcacggtttactctctaagactgttgcgggcaaagctgctctgtttttaaaacgaggacctcttgcagactgttgcggtnaaaaaaaaaaaaaaaaaaaaaaaaaaaaaaaaaaaaaaaaaaaaaaaaaaaaaaaaaaaaaaaaaaaaaaaaaaaaaaaaaaataaaaaaaatttaagggggggccgttctaaaggatccaagtttacgtacccgtgaatgcaatgtcttatcttt

SEQ ID NO: 387698 - DNA, 1329 bp, Oryza sativa
  unsure (1)..(1329): unsure at all n locations
ggaattctcatgtggaaggatgagacgaggatccagatggagacgcgggagcgagaagaggaatcgaagtcgtcctgtgccgcaagggatgtggttattgacccgagttgtgaagagcccctcctatgccagcctcagcccaaggagaaatctgctctggagactttcttgttcaatttgaggtggaagaatatcctagttctcatgactgtatggtcgtctttcttggtgctgcaaatcttcaagaataactcacaatcatgcagcactttctactgggtgatcaacattcttcaggtcccggttgcgttaagtgtattcctgtgggagggcgtacagctgtgcagagagagccgtgctcgacgcatggatgggaactggggagtgtgtctgtggaggcctcttattgagtggtcacctgcacagctcatcttctgtgccccctgtggtttggcttggtgggtactgttggtggccttcttggatccgggggtgggttcatccttggtccacttctccttgagcttgggtgcatccctcaggttgcaagtgcaacaagcaacattcgtgatgatgttctcctcatccctatccgtagtggagttctacttcctgaacagattcccaatcccttttgctgtctacttgatctgcatttccatattggctggattctggggccagtccttggtccggaaactcgtgcacgtgctcaagcgagcatctctgattgtcttcatcctatcctctgtcatcttcgcgagtgctcttacaatgggtgttgttggaacccagaagagcatcagcatgatcaacaaccatgagtacatggggttcctcgacttctgcgagaagtgaagaacccatcagactgtccatactctctgggggaaatccaggtcaacacctaattgacctcacctcccccaaatttaaacgagaaaagaaataaggtcgtgaagtgcacatatgcaccgcgttagcgcctcgctaacctgcaagcgcacgtccgacaaagtatcgtagtgtattccagttttcatggcatatgcatgtgttagctcctggctaacctgcaaaccctatctcttggtcttgtaagagtcttctggtctttttgtcatgcatgcgttagcccctggctaacctgcaatttagtttctctagggagaaatcgcagctatgcccattcattcttgtgcttgctcctggctaagntagcctgcaaatggttattgtatggaacagtgtaaatatgccagcccattccttctgtcaatatacaattgttgcattntttnggtnnnnnnnnnnnnnnnnnnnnnnnnn

SEQ ID NO: 387699 - DNA, 741 bp, Oryza sativa
acccacgcgtccgtccacgcgtccgcccacgcgtccgaccgcatattatgacatcaaagtcacttttggttgagattttgaaaactctgaagaatacattttggcctttccagtccaaccagtctggtagcttatttttaaatgctgtttctgcaaaccaacatggccctggtaatgtaggtgataatcaaacaacgccacatggcaatataagtaccatagagatggctgctgcaaaagctgcttaacataggttgatgcgtggagtatggactaatgtccggtttggtgatatgcggcgtgctttagcagcatgtgaccgacttatcctactgaacctcgatccccgtgaactgagggattatgccgcccttctctaccactgtgggtactatgaagactgcctgcaatacttggcatcataccaaaccgcagtggctgggcagcattggaacaatccgctggagatcatggaggacgaagcggtgaaccccctgagagcgcgggtaagcttgattttagcagaggatggctggagcagccgcagatcccctgccacgagttactggacgaagaactccgagccgtggtagaattagataggacgatgcgttacatgtgtatacggttttactgaaacaacacgagcttgtacatataatttcgatggcattttcgcaatcatttgtactggatgaagtgagctcatgaatcatgatgatgctaccatctcttccctct

SEQ ID NO: 387700 - DNA, 512 bp, Oryza sativa
ccacgcgtccgcccacgcgtccggtctgtctcccctcccaaccagacgcctcctctctccaagtccgtctgcctctctcaccaccaccaccgtgcgctgctccaagggggagatggcggtggtgaagtgcatcagggtccacgagctgggcgggcctgaggtgttgagatgggagcaagtggaggtcggggagcccaaggagggcgagatccggatcaagaacaccgccatcggcgtcaatttcatcgacgtctactaccgccagggggtctactccgctccactgcccttcgtccctgggagggaagccgttggagtggtgaccgctgtaggtcctggcctgactggcagaaaggttggggacgtcgtcgcctatgccggcaatcccatgggctcttatgctcaagagcagattatttccgcctccgtcgctgttccccttcctccttccatcgaccacaacacttgtgccgctattatgctcaaggggatgactgctcacgttctacttc

SEQ ID NO: 387701 - DNA, 497 bp, Oryza sativa
tgtcaaacagaaggtactcaatgaaagtggtgaagtttctggggaccgctaaaaagggccatttaagccatatgaatgaaactgctgatggggccatgcaagctcctcgttataatcaaagtgtccagcgtgctgattcagctgttcggaatttgttgtttcaaggatcaggccatctatttactgaaaaagacatcatcggtatttatagaaccccaatgctagatcaacttgggaggtcccgttatagtcttttccagaaggaggtacaagtcacaaaaaatcaacggggaaatgcaaatgagcgttatgcatggcttgcttgcactaagggtactatggaggagatgatgatgaatggtgctctggaaatagcaaaacctctgcagggcccaatgtatggcgttggggctcatcttgctccagcaaactcctccaatatctgtgttggtttatctgatattgacgaaaatggaatcataaggatgatgttgtgc

SEQ ID NO: 387702 - DNA, 1299 bp, Oryza sativa
ctcgtcgtccccgatcccctcctcctctccggtcctctccactcctcgagatctcgcaaggtcagggagccagcaaattcacccgcgattccgcgcgccgccgccgtcgccgccgccgacgtcgccgcctgggtgggggaggagatggccggcctcgggaaggccttctacgcggtagggttctggatccgggagaccggccaggccctcgaccgcctcggctgccgcctccaggggaactactacttccacgagcagctctcaaggcatcgcacacttatgaacatctttgacaaaacccctcatgttcacagagatgcatttgttgccccaagtgcatctctcattggtgatattcaagttggacaaggagcttcaatttggtatggatgcgtcttaagaggggatgcaaacaacgttcaaattggatctgggaccaatatacaagacaattctcttgtccatgtggcaaaatctaatcttagtgggaaaagtctttccaaccatcattggggataacgtcacagtaggtcatagtgctgtattacaaggatgtactgttgaggacgaagcatttgttggtatgggggcgaccctgttagatggtgttgtcgtggaaaagcatgggatggttgctgctggagcccttgtaagacagaacacaaggatcccctgtggagaggtatggggaggaaaccctgccaaattcctgaggaagctcactgatgacgagattacgtttatcaaagaatcagcttctaactattccactctggcaaaggcccatgctgctgagaatgccaagcctgttgaaaagactgaatttgagaagctgttccgcaagaagtctgctcaccaggatgaggaacacgattcaatgattggtgctactcgggaggttactccggagtgacgccctcgagttctgcccaataaaccttgtttctgtttttgcttctctctggtgcctttgcatcatcttatattggacagtgcaggattgttgaaggtgacactgttccatgagttcggcggtttatgtttactttcctccccaataattttgggtcgagcattgtgcaaaagctggccatgtacttcgttttctgtattccatatgtttaagatgcgctccatggaacaaagagaaccattacgcacaaaaatctagcatcgttttgacaaaaaaaaaaaaaatttaaaaataaataataaaatataataaaaatatataataaataaaaaaaaattaatttttataatatcaactttatttttaaacaatatggggggggccgt

SEQ ID NO: 387703 - DNA, 572 bp, Oryza sativa
cccacgcgtccgccttaaccaatcaccacacagcagttaacccctctcctccccttcctcttctcccccctccctctcctcgtcgtctccaccaccaccatctccgtctccactcgatcgatcgatcgatctccataggtgggggaagggaagctttggaaggtggagggacggagggggggatgacgaggcggtgctcgcactgcagccacaacgggcacaactcgcggacgtgccccaaccgcggggtcaagatcttcggggtgcgcctcaccgatggctccatccgcaagagcgccacatggggaacctctccctcctctcctccgccgccggatccaccagcggcggcgcctcccccgccgacggccccgacgccgtccccaccgtcgtcgactgctactcctccgactacttttttcagggctccttctccgtcacccgcgaccgcaagatgggtgttccttggactgaagaagaacaccggaggttcttgcttggattgcaaaagcttgtcaaaagtgattggcgaggaatctctcgtaatttctggtcctaagaacacctactta

SEQ ID NO: 387704 - DNA, 371 bp, Oryza sativa
  unsure (1)..(371): unsure at all n locations
tcgcccacgcgtccggatttatgccctccccagacttgctattggaatcatcgtccaggtgctctgcanctacagttcgctgccgctatacgccatcgttacccacatgggcggagacatcaagctgcaggcgttcggcgagacggtgcacgtgtcggtgcacagctgggcgacggacgtgaggaagaagaaggcggcgccgccgtcgcactcccacctccgcatccccttcctcatgaagcgacgccacagcacccgcggcgccgacgacgccgcggacgacgccggcggcgtcgtcgaccaccaccaccaccatcacggccaccaccatctcggtcaccaccaccaacgaggggagctccgcgggggcg

SEQ ID NO: 387705 - DNA, 909 bp, Oryza sativa
  unsure (1)..(909): unsure at all n locations
acacaacagaaaaagaaaatcngctgggtttttttttcngccnaccaacnacnctgcgtncctctgaagtctgaaccattacacnatctcctttctctctctctctcatataatctcttggcagtattagtattagtgccgaattgcacctcttctaatctgtttccaaagcaaaattacagccaaatcgctcctcttcgtatatacttagtgccaatagaaggtaggaaagaccacatatccaggtttccttgctaggctctgctcatatcccgcaaattgagggttcagacttcataagttcgagctctgtccacaagaaaggaacaagagattgttcttggcagttggaagaagctaagaacttggcgagttggtggccaaggtgctcttggagggttcttggagcagtacaatgttggccaaaagattgaaaagatgcagcattcttctgttcgcctttctcctcgcagacgcatccgggagtcttcttgagagcagcggcggccaggccgaggcgatcggtccacagatctccccggcgacagagggcgagggcaagaggcggtcgctggcgacggggatgttctgcgtggcgctgccgaacgcggacccgacggcgctgcaagaagggctgaactgggcctgcggccagggccacgccaactgcgcggcgatccagccggggggcccgtgctacatggcgaacaacctgccggcgttggcccccttccccgtcaccgactactaccagcgcaactccggcgccggcgcacctgcagtttcaacggaacgcaccaccaccgcaacgacccagttcagggnatncgtcttttaaggaagttcatggccgagaccaagttgngggaacgggcgtncgccgttgggccctttaggcggggtttggaa

SEQ ID NO: 387706 - DNA, 492 bp, Oryza sativa
  unsure (1)..(492): unsure at all n locations
ccacgcgtccgaattaagcaaagaaagatccaagaacaagaacactaatggctgacgagtcatggagggcgccggcgatagtgcaagagctggcggcagcggcgtcgaggagccgccgagccgatacctgctacgggagaaagaccgttctgacgtcaagctggtcgccgccgagctgccggagcccctccccgtcgttgatctcagccggctagatggtgccgaggaggccaccaagctcagggtggctctgcagaattggggcttcttcctgcttaccaaccatggagtagaagcctctctgatggacagcgtgatgaacttgtcgagagagtttttcaaccaaccaatcgaacggaagcaaaaattcagcaacttgatcgatggcaagaacttccagattcaagggtatggactgaccgggtggttaccaagatcagatcctggacttgtctgatcggttgcatctcagagttgaacccaaggagggnt

SEQ ID NO: 387707 - DNA, 558 bp, Oryza sativa
  unsure (1)..(558): unsure at all n locations
cggacgngcccgcgacgcgaaaaggtgacacaacccacagaaacccaaaccccccaaaaaagccatggccatgtctcctctcaccaccatcctcctcctcgccgccgccgtcgggccacctgcgccacctccgccaccgcctcggccgcgccgctccacggcatagcgaacgacctcctcccggagtacggcctcccgcgggggctgatcccggagacgatcgcgtcctacaccttcgacaacgacacgggggacttcgagatccggctgacgagcacctgctacatctggttcggctcccacctcgcctacttcgaggacgccatccgcggccggatcgcgtacggcaccatcacggggctctccgggatccaggcgcagaagttcttcgtctgggtctccatcaccaccatcgtcgcccaccccgaccagggcaccgtcgagttccgggcggggttcatctccgaggcgctgccggagtcggacttcgccgaggtccccgtctggggcgccggcgcgngggctccnggcgcgccggtgcttcgcacggaagttcgg

SEQ ID NO: 387708 - DNA, 522 bp, Oryza sativa
ccacgcgtccgcccacgcgtccgcccacgcgtccgacctgagattaagaaggaaatcaaggaaagccgaatcaacgttacatcaaaagtggtgaattacataaataatgccagtggtgccgctcggccctcagttttcgtgagcgcaacagccattggcttctatggtaccagtgagatcagtagcttcgatgagtcaagtccgtcaggcaatgactatctagcagaggtgtgtcgagagtgggaggccagggcatgccaagtaaaccaagaggatgttaggcttgtgcttcttcggattggggttgttctcggcaaggacggcggcgctctagacatgtatgcagccaagatgattcccctttttatgatgtttgccggcggccccctggggacgggacggcaatggttttcctggattcaccaggacgacctggtggacctcatctacgagtccctcaagaacccatcatataaaggcgtgataaacggaaccgcacccaacccggttcgctgtcggaga

SEQ ID NO: 387709 - DNA, 604 bp, Oryza sativa
cctggactggtcggcctggcgctgtcatatgccgcacccgttgtaccattgttgaatggcttcttaaccacctttacagagacagaaaaggaaatgatttctgttgagagagttgttgagtatgttggcttacctcaagaagaacttcatggatcgggatcccctcacagtggctggccaacagaggggaacattgagtttgagcgtgttactctaaggtacaaggaggatttacccccggctttgaatgatgtttcgttctttatttcatcaggcatgcaggttggaataatagggaggactggagcaggcaaatccagtatactgaatgcacttcttcgtttagctccaatctgtaatggccgcatcttagtagatgactttgatgtggccaaacttgctgtccgagatcttcgtggacattttgcagtagtcccacagagcccgtttttgttcgatgggtctttgagggaaaatctagacccttttaatagaacaacagatctcaggatatgggaagctcttgataagtgtcatatgaagacagagattgaatctataggtggacttgacatccatgtgaaagaaaagggtgcggcttttt

SEQ ID NO: 387710 - DNA, 432 bp, Oryza sativa
  unsure (1)..(432): unsure at all n locations
tccccagcaagccgggtctgnggcggaggcccaagacgngcacggaggacaagaagncgaagtgagcccctacntgctctgcacctccagatcatccaaccacagaacacatctcggctgccaccgggcgtaaattttctgtgccgagcttggaacgctggactcgcctcacccgtcgctgaatgctgctgaccataagagattgtagtaacaggctttgagtgggcgcatcgacgaacccacatacacttgcccaatctatggacgggcaacatcgtcaaacattatcgccactatttcccagtttgtcttaatctttttttaggtaacaacatcccccaccattaccagatgtcgataacgatgcactaggcgcggacttcattgggttatgtataagatttgcctcggctgaaaaaaaaaaaaaaaaaa

SEQ ID NO: 387711 - DNA, 1132 bp, Oryza sativa
ttaagatatccaaggaagatattgataagatgcagaagaaggtcagcactatctggaatgatgaattccaaaacagcaaagaatatattcccaataagagagactggctctcagcttactggactggattcaagtcaccagaacagatttcacgaatccgaaatactggtgtcaagccagagattctaaaacgtgttggagaagccatgactactctgcctgaaaatttcaagccccacagggctgtcaaaaagatttttgagctgcgtcgtcagatgattgagacgggcgaaggcattgattgggctgttggtgaagcacttgcttttgcaactcttataattgagggaaaccatgttaggttaagtggtcaggatgttgagaggggtacattcagccaccgccatgctgttatccatgaccaggaaactggagagcaatactggccccttggataatcttggtatgaaatcaggatgagggaactatttactgtaagcaacagttccctgtcagagtttgctgttttgggctttgaattgggctattccatggagaatccaaactcactggttttatgggaagcccagtttggtgatttttccaatggagctcaagtgatatttgatcagtttctgagtagtggagaggcaaaatggctccgccagaccggtcttgtcgtttgccttcctcacggatatgatggtcaggggcctgaacattccagtgcaaggttggagcgtttccttcagatgagtgatgacaacccttatgttattcctgagatggatccaactctgaggaagcaaatccagcagtgcaactggcaagttgtgaatgtcacaactcctgcaaactatttccatgtcctgcgtcgccagattcaccgggacttcagaaagcctttgattgttatgtctccaaagaatctccttcgacacaaggactgcaaatcgaatctttctgaatttgatgaccttgctggtcaccctggatttgacaagcaaggaacccggtttaagcgtctaattaaagatcagaacaaccataaggaccttgaggagggaatcaagcgtttagttctctgttctggaaaggtatattatgagttggacgaaaaaaaaaaaaaaaa

SEQ ID NO: 387712 - DNA, 672 bp, Oryza sativa
ccacgcgtccgcccacgcgtccgggagagccaacggccggtgtatccgttcgcggcacgcgtccggcaggacgagatgaagctgtgcctgctgctcaacgtcatcgaccctaagatcggcggtgtcatgatcatgggagaccgtggcaccggcaaatccaccaccgtccgctcgctcgtcgacctgctcccggatatccgcgtcgttgttggcgaccctttcaattccgaccctgacgatcccgaggtcatgggccctgaggtccgggaacgcgtgctggagggtgagaagcttcctgttgtcacggccaagatcaccatggtagatcttccccttggtgccactgaggatagagtctgtggcaccattgatattgagaaggcgctcaccgatggtgtcaaggcgttcgagcctggtttgcttgccaaggccaacagggggattctttatgtggatgaggtcaatttgttggatgaccatctagtagatgtgcttctggattctgctgcgtcaggatggaacaccgtggagagagagggtatctccatctcccaccctgctcggatcatcctcattgggtctggtaaccccgaggaaggggagctccggccacagctgcttgaccggtttggcatgcacgcgcaggttggtactgtcagggatgctgaactc

SEQ ID NO: 387713 - DNA, 810 bp, Oryza sativa
  unsure (1)..(810): unsure at all n locations
cccacctcagattagtcccaaagattattcgcgattaagcttgtttttttttgttcctaatcgcagatacaaagaattcgctttgcgtttgccactcgagaaagattttgtttttttttttggttaacggataattaagcgccgtcgacgtcgatggcggccaagtgggcgatgaagaagaagctcgtcggcggcgacgnggntacgtgctcgaggacgtgccccacctcacggactacctgcccgagcttccgacttacccgaatcctctgcaagacaacccggcttattcagtcgtcaagcaatacttcgtcaacactgacgacaccgtcacgcaaaagatcgttgttcataagaccagtgctaggggcacccatttccggcgagccgggccgcggcagggggtgtacttccagtccgatgaggtcaacgcggccattgtcacctgcggtggcctctgccctggacttaacactgttatccgcgagcttgtgtgcggcttgtatgatatgtatggcgtcaccagcgtcgttggcatagagggtggatacaagggtttctattctagaaacaccgtcgcactgacaccgaaatcggtgaatgacatccacaagagaggtgggactgttcttggaacctccagaggaggcccatgacaccggcaaaatagttgacagtattaaaggatcgcggtattaaccaggggtatattatttggaggtaatgggtacccagaaaggtgcttccctaattttataaggaagttccgaagccaagcctaaaatgttcttttggttgggtcccaaggcc

SEQ ID NO: 387714 - DNA, 492 bp, Oryza sativa
ccacgcgtccgcccacgcgtccgccacctcagattagtcccaaagattattcgcgattaagcttgtttttttttgttcctaatcgcagatacaaagaattcgctttgcgttcgccactcgagaaagattttgtttttttttttttggttaacggataattaagcgccgcccctcctcgtcgtcgtcgccgccgcatggaggccgtcggcgtggctccggcccccgcgggggtgccggagaagaagctgctcgaagtgaaggagtcccggaaggcggcgccggcggcgccgtcgacgtcgatggcggccaagtgggcgatgaagaagaagctcgtcggcggcgacgccgggtacgtgctcgaggacgtgccccacctcacggactacctgcccgagctttcgacttacccgaatcctctgcatgacaacccggcttattcagtcgtcaagcaatacttcgtcaacactgacgacaccgtcacgcaaaagatcg

SEQ ID NO: 387715 - DNA, 712 bp, Oryza sativa
  unsure (1)..(712): unsure at all n locations
atccccagaaagacgcttcagtactagtggtaatcgatctgttagatatgggcctgatatggataaagatcatgctaatgtaaatatgagctcagctcgttgctcactggccagtagacaaaggaggttcccgcaacatagagcctcacttaacctatcacgtgctcacagccgatccccttctggttcaaggtctcgatctccgcatgcttggacatcacctaggaacagaagggaagttatggtgaatggtagttcaaagtttatggaggcatagtagaagtagatctccgcctaattacatgactgaagttagaatgggaagaatgacttcgccttctagacaacctggatttggtgatcgagctatgcgttatagcccttcatcaagagatcgtgcttactctcaacatgcttctacatgggctgatgggaggaactgctcaactgttgatcttcctgatcataaaaagcgatattcaaggaggagcccacccctgagagttacctcaagaaatgacaggtttgatgtggactcccatggacggccaaggtctggagagttgtatcgcccaacacaggggaagacttccctatggcttcgaaagggggagggggaataggcatgatggggaatgggggcccacctatgggggggtatgctgatagatatggaactccatctgccnagccataatgncaaggaatgggt

SEQ ID NO: 387716 - DNA, 747 bp, Oryza sativa
  unsure (1)..(747): unsure at all n locations
ccacgcgtccgcccactcgtccgcccacgcgtccgagagagcttctcatttctttcaagagggctgcgggacagaaaccccagaggattatattttacagggatggtgtcagtgaaggacagttttatcaggttctgttttatgagcttgatgccattagaaaggcatgtgcatctttggaagccgattatcagccacccgttacctttgtggtggtccagaagcgtcatcacacaaggctgtttgctaataaccacaaggaccagcgcactgttgacagaagtggaaatatactaccaggcaccgtggttgattcaaagatatgccatcctactgagtttgatttctacctgtgtagccatgcgggcattcagggaacaagtcgccctgcacattatcatgttctgtgggatgagaacaagttcactgctgatggtttgcaaactctgacaaacaacttgtgctacacctatgcaaggtgcacccgttccgtatcaatcgttcctcctgcatattatgcccatctcgcggcatttcgagctcgattttacatgganccggatacttcanatagtgggtcnatggcgaacggtgcccatacccgtgggggtggccccttcctggtgcacgcancactaaacctgctgggaatgttgctgttanggcncttcctgatctgaaagaaaatgtcnaacntgtcatgttctactgctaagtttgggaatattgtntttgggggaaaactct

SEQ ID NO: 387717 - DNA, 698 bp, Oryza sativa
ccacgcgtccgcccacgcgtgcgcccacgcgtccggaaaaatttttgaagaaattaatctaaagcataagaggatttgatgaatggaactcgcaaatgacctcaaaaaatcaccagccaattgttcaggttctgatagatgggaaaagccaaaatgcagttgatgacgacggaaatgtgctaccaacactggtatacatggcgcgcgagaagagccctcagtatcaccataacttcaaagccggggcattgaacgctttgataagggtatcagcactgataagtgacagccctgttatcttgaatgtggactgtgacatgtattccaacaatagtgattcaatcagagatgcgttgtgcttcttccttgatgaagaaatgagccacaaaattggatttgtccagtatcctcagaactacaacaatatgaccaaaaataatatatatgggaactctctcaatgttatcaatcatgtggagatgcgtggtttggacagtgctggtggatgtctctatattggcacaggatgcttccatagaagagagatcctttgtggtaagaaattcagcaaagattacaaggaagactggggcagaggaataaaggaaagaggacatgagaacatagatgagattgaagagaaggcaaaatctttagcaacctgcacttatgaacttaggacacaatggggcaatgag

SEQ ID NO: 387718 - DNA, 595 bp, Oryza sativa
ccacgcgtccgtctctctcacctctctggctctcccctctcctctccatccctctccccggcgtgcacggatctggccagatgctacggtcgtagggcggtggcggcgacggttaccggcggtggcgatggcgttggcggctgcggctccaggcagtggcggcgcaccccagctcggtcccctccctagatccggccggagggagggggagggcggtggcggtgacggctaccggtgctggtggtgcccgttggcggctaacggctccaggcaatggcggcgcaccctggctcggtcccctccctaagatctggcctgagggagggggagggcggtggcagcagcggctatagacggtggcgcaccccggtgcggttcccctcctctccccagatccgggtggcgtcggctgctcccctccggatctagcgcggtggcagcggccctcccctccggctttggcgggcggcagctcctcccttccggtgacgactgtgtctatggatttgttttgtttgtgaatcatgttgcctctatgtgaatttgcgatgcttctgtgaatttgatttggtttgattggaaaaaaaaaaaaaaa

SEQ ID NO: 387719 - DNA, 1262 bp, Oryza sativa
  unsure (1)..(1262): unsure at all n locations
tgcatttccttcctgatgttgctgagtacttcttgagcagggccattgaggtatcgagcaatgagtatgaaccttcagagaaagatgtgatctttgctgaaggtgtaacacaagggaatgggttggctttcattgaattcgcccttgatgatcgcagtcccatgtctgagccttacattgagaaccctgaagcacattcccagcctcttaccaaatatcagttgattagagtaagtgccaagggcatgaatgatggctgcaagtgggtggaaatgtttgaggatgtccgcatggtgatattctctgtagccctcagtgactatgaccaagtgggacctcctgtatatggcagcagtcggccttctcttgaacaagatgatgcaaagcaaagagttatttgaggcttacgattcggcaaccatgcttctgcgatactcctttcgtcctggtactcaacaagtatggacctctttgaggagaagatcaaccgcgcacctctaacgacctgcgagtggttcaacgacttctccccggtgcggacacaccacaacaaccagtcgctcgcccagcaggcgtactactacgtagcggtgaagttcaaggacctgtactacgagcacacgggccggaagctcttcgtgtggcaggcgcgtgcccgtgaccgccagacggtcgacgaggcgttcaagtaccgtgagggagatcctccggtgggaggatgagaaagaggagaacttgtatggcggcggggaagactcgttctacagcaccacggaaatgagctcctctcctttcatccgagcagaatgaattcgacattggctgctgaaatcgaattctttgcaacccggcgaaagagtgcccggttcctttcgccgaattggtacagaaaacattggatatggttgtatattgattttacaggttatcctgatcgaaattgttgctgttcatcacctgaagagaataggatccgttggtcctgttgttgcgctagcctgtactaatttttttcgaaacaaatgtacaaagaaagaaagaaaaagttgtgtgatatgtttgtgatttgtaccagtaaaaaggtaaaaagcaaaagtgtggatgatagtggccatattgtttggtgaactaaccttagctacactagctgtaaaatcatgtagcagttcagctgttctgtcgggttgagaaaaataaattgacatccacattcaagnctnnnnnnnnnnnnnnnnnnnnnnnnnnnnnnnnnnnnnnnnnnn

SEQ ID NO: 387720 - DNA, 573 bp, Oryza sativa
ccacgcgtccggcagaaacaaatccttccacgatagtacttcgtatgagcaagagcagcagcatagcaaagagtaagaggagatgcttaatcttcacaccattaggatgtccattccttcgctacacagatcctccccataccgatgtgcgctgctaaagaggaagagatcttgtatccgtgcctgcagctctgaagatgatggatccgatgcttcgtcgtcgcttggcggagacaaacgccagcaggaggtccttgcgaagatcgcaatgcttcaggcgcagaaggtgcgcatcacaagcttcttggacgagcgctctgcttacctgaccaagtttgcgaaggatgcggacaccgagttcgatctgattggccagaacgccatgaaagagcttgatgaagttggggaccagataatggagaggctggacagcaagatgcaggcctttgaggagactgctgaagttcaaaggcaggagatagaaatgaacgagagggtgcttgaagacttcgaagattggattgagaaggagaaaaatgaaggtatgttcttcaaaagccttgggaaggtgga

SEQ ID NO: 387721 - DNA, 560 bp, Oryza sativa
ccacgcgtccgagataagtaagcagtgagctacctagctagctagctaacagtgagctgaatcagcagcggctcctgtctcctggagcttgctgatccagtagtccagtactactctgccattagctaagctagctggagcttaattagtggtgatctctgtctctctcaagctaggcgccatgggagactcatcatcctcagcttcgtacatcagaatggttcaccacctgatagagaagtgcatttgcttcaacctgaacaaggaggagtgcatggaggccctggagaagcatgccaacatcaaccctgtcgtcacttccacagtatggaaggagctggagaaggagaacaaggagttcttcgagacctacaacaaggacagggcggagcgcaacatcgaggcggagacgatgcagcggatccagaagatgctctccgacgccgcggcattcaagggcttcgacgacgactacgacgacgagagctagctctagctaagctatagctatagctagagtcatgactagctcttacatgagccctctaagtagctagctt

SEQ ID NO: 387722 - DNA, 733 bp, Oryza sativa
cttcgatggtaaagaaatatgcaatgcaacaagcattcatgtcaatgatgacccaggcaccgtcaaacacttttggctcaaactcgcctttcccatttgccatgccaccacaggcagctcctgcagctcctagcagttacccatactcacaaccaaggaaagatacctctcctcaatctgcaactgtcgatgtttcagctactaaagtggaagcaactggaactttggaagaggctgatgtggctgaacagccaaagaagaaatttgcctttgttgacgtttctcctgaagagttgcagcaaaaggaacttcaatcttcactggagacagtggatgtaaaaagtgagagtaaacagagtgaaactatggaggatactgagctaaatgctccaacaaatggaactgctttgaagatgaatgaaggttctgctagcggcacaactgaatctagcaattcagggcctatgttggccgttgatacaattgagaaaatgatggaagatccagccgtgcagaagatggtttacccctatttgcctgaggagatgaggaaccctgattcattcaagtggatgctgcagaatccaatgtaccgccaacaactacaggatatgctaaacaacatgggtggatctcctgatcaatgggataaccgaatgctcgatcacttgaagaattttgaccttagcagtccagaagtcaggcagcagtttgcgcaagttggcatgactcc

SEQ ID NO: 387723 - DNA, 835 bp, Oryza sativa
ccacgcgtccgcgctcccgtgccgtgccatggcgccgctcgtgtcgctctcgctccccctcccgtgcgcggtgcccgcctcgtcgctccctccgcgcgcggagccagacgcctcgtcgtccttccacccgcccgcgtcgtcttcgtcgtcgccgcgcggcggccggcttgcgctggccgcggcgcaaccgggctccgggcgccgttgggtagggaggtggagggcgggcgtgtcgtccttctccttcctggcgccgttcttcgcggggaacaaggagaaggagaaccgcgagaaggcggagaggctcaaggaagagctcctcgccaccatcaggccgctcgaccgcggcgtcgacgccacggcggaggacaaggagcgcgtcgagaagattgttcagcaactggaggaggtgaaccaagtgaaggagccactcaagtctgatctccgcacggcaaatgggagcttctctacaccacctcagaatccatactgcaaccacaggtcccttctcatctcaaaaagaaaaaaaaaatatgttctgttcaagcatgcaatacattgcggataaaaaccaaaaatgatagttgtgtagtcaggctaacctttcagattgtcaaattctgttcgcttactgatgcagaggccaaagtttctgaggccgtttgggacgatttaccaagcaatcaatactgacactttaagagcccaaaatatggagacgtggccctattttaatcaggtgatttcctcctaaactgattcctatgtgcctgtaacatgaagagatgatcattttgtaatacctttctttggtttgaagaaaagaataatttca

SEQ ID NO: 387724 - DNA, 386 bp, Oryza sativa
  unsure (1)..(386): unsure at all n locations
tcggcacgnggggctcggngccgtggncggngtcctggcgccggagctgctgctcgacgtcctgctgcgcctccctgccgggccgatctgccgcctccgcgccgtctgccgctcgtggctcgccttcaccaccgacccgcacttcgtcgccgcgcacgccgcccgccaccctgccccgctcctcgccgtcggcgtgcagggcttccccaggctctgcgtcgacctcgtcgacctctccggcaaccttgtcaagcagatcctccgcgtggggaaaggcacggtggtgagcgggagctccgccgaccgtgtcctcgtcgccggcgaggaccacagcgtccgcgtgctcaaccctaccactggatccatttcaattntacctagccatc

SEQ ID NO: 387725 - DNA, 430 bp, Oryza sativa
ccacgcgtccgcccacgcgtccggaagctatatacattcctaaccataagttcacagtttctattttgagaaataacactcagaggacccattggcgtattaagacctacctggctttaagccacatggatgctgcgaaaattggtataattgttgcggacatgagaaaagtgttggcaaagaatccacatatagagcaacagaggctgcataggagagtattttttgagaaaattgatccaaaaacccaagctcttatgatttacatatcatgcttggtgaagacatctcattttgaggagtatctcaatgtccaggaagctgttatgttggatcttcttagaatagtcggccatcatagggcaaggcttgccacccagattcgaacagttcagaaatcttatggcaatgcaaacatcgataacatttc

SEQ ID NO: 387726 - DNA, 460 bp, Oryza sativa
gattgatatctctagaggctcatctagctttctgcctggcgctttagaatcagctgaattaaatcaacctgcagaacatactgcccccacagaagatcatggcaattgtctccaaagtgaaggtactgctgttgatgtgccttgttccaaggaagataatatggaagttgaagaccagtttgacggtatttctagaggcccatctagcttttctcctgacactctagaatcagctgagttaaatcaagctgcagaacatgctgcccccacaagaagatgatggcaatggtccgcaaagtgaaggcacttctgttgatgtggctggttctaaggaggacaatatagaagtcgaagagaagattgatgatatctctagaggctcgtctagtcatttgcctgatgttttacagtcgactccaaatcagcgtgcagagcaagagtgtttagataatagtgatga

SEQ ID NO: 387727 - DNA, 411 bp, Oryza sativa
ccacgcgtccgcccacgcgtccgcccacgcgtccgatctggtcaaactcgtcctcctctctcatctccctccccgtctcgccggcggaggtaggcttcgccctctcgcggcctcgcgtgcgcgtcgccggcgagagggccgcccgtaggcacggcgccgacggcctcgatccttccctatccacgcgctctgcgtggcatcctcgtcgaggtcccggaggggttgaccctgccaagctgcggcgcgcgcgcggcctgttcgacggaatgcgccactgagagactcccagcgtgagccgcccattccgagacaagaatggccgctggggtggctggagcgaggggcgcaagtcgcccgctcatgcggctggtcaccatgagcggcgtgccgatcctgcggcagctgcaccct

SEQ ID NO: 387728 - DNA, 588 bp, Oryza sativa
  unsure (1)..(588): unsure at all n locations
tactgttgagatggataaagtaactaaagagctacataagttctctggtgacagtaagaaacttcctgaattactgactgagctagatgggctccgaaaagagcatcagagtctaagatctgcttttgaatatgagaaaaacacaaacatcaagcaagttgagcagatgcggacgatggagatgaatttaatgactatgaccaaagaggctgacaagttgcgtgctgatgtggcaaatgctgaaaaacgagctcaagtggcagcggctcaagcagtagcagcacaggcgggggtggcacatgtgactgcttcacaaccaggggcagcacaagctgtggcagtgccagctgcctcaaacccatattcaagtgcatttaccggtcatccctctgcatatcaccaaggagccacccaagctggggtttatcagcaagggaccacccaagctggggcatatcagcaaggatctacccaagctggggcatatgcttacccaacttatgatgccgctactgcttaccagatgcatgctgcgcaagcaaatgcatacgcgggctatccttggtatccagtngcagggtacacaca

SEQ ID NO: 387729 - DNA, 472 bp, Oryza sativa
ccacgcgtccggttgatttcactcagccatatgtgtcgtctgggcttgtgggccttacctctgttaagaggcagaactcgggtggatgggcctttctgcagccattcacgatcaagatgtggaccgtcactggactgttctttcttatcatagggacagtagtttggatgcttgaacatagaatcaatgatgaattccgtggccctcctgcgaaacagcttattactgtgttctggttcagtttctcaactctgtttttcgcacacagagaggacaccaggagcactctcggccgcttcgtgatcatcatatggctgttcgtcgttctgatcatccagtcgagctacactgccagcctgacctccatactcaccgggcagcagctcacgtcgccgatcaccgggatcgacagcttgatcaccaacgacgttcccatcgggtttcaagtcgggtccttcgcggagaactacct

SEQ ID NO: 387730 - DNA, 504 bp, Oryza sativa
ccacgcgtccggtcttgattcttgtccagcggcagaaagagttgcaagcacatatgagggattggacagactgggctcagcagaaggtgatgcaagtcactcgtcgacttgccaaggagaaggaagagcttcattcacttaggaaagagaaggaagaagcggaccgcctccaagaagagaggcacaatctggaagagagcactcggaagaagcttttagagatggaatctgcgatttctagggcgaacacccagctggaaaaggcagaatcttctgctcgtagacgtgaagccgagaatgaacagctcaggatacagatggaagctgcaaagcggcatgcactagtgtctgcaacaaatattttggagctttcaaaggaaggatgagaacagtcataaaagggcttaacattgggaatctggaagagccctgttgcaagaggatcttgctgctcaaaggaacaagctatctcaggtccaccagcaacttcatcatgctaaagag

SEQ ID NO: 387731 - DNA, 441 bp, Oryza sativa
ccacgcgtccgcccacgcgtccggctgtctctcgtcactgtttcatagctagtaggacgaagctgagctttgccaagaagagaggagatcgacgatgatggcgagcagggcgtccttgttgctccaggtcgtccggacctcgtcccgctcgcgcaagggcgagggcggcgtcgtcttctccgaggtcgcgccgtggcagcagcagcagcccatctcggcgcccgccggcgccggcgccgccggcataggctcgccgcggccggcggcgaagctggacaccatcgtggaggaagatcactccagcatgatgatgcaagaagccgctaccgcctttcaggccggcccgtctgctgctgctgcttcttcttcttcttcttcagcgtcgtcgtcatcgtcagctccggcggccatggcttaccgtttcggcgccgcaaagaacat

SEQ ID NO: 387732 - DNA, 450 bp, Oryza sativa
  unsure (1)..(450): unsure at all n locations
ccacgcgtccgcccacgcgtccgatgctgtgaagattgctccaatcgggaaggatagcaactggggaaatgtgacaaagtattctcaaacaacaaccagccccacggtgctgcatttcagcattcccattcataccaagatcacaaaagtgaacatatgagttcaagtcctgggactttaacagggcctgagtttctatggggtagtccaaagccttattctgaacatgctcaatcccctatttggcgtccaccagcaattggtcatgcaataccatctaatacccgttctcaggggcagggattattgtatggtggccgtcangtttcactttttgggtctcaagatcagcttcatcatcatcatgttggctctgccccttcaggtggctccatttgagagccactttggatttttacctggaatcaccagagacgttctttatatgga

SEQ ID NO: 387733 - DNA, 639 bp, Oryza sativa
agggcgtctaccctgttcgccctcccctccctgccgctgtcgcaggctacgagggggtcggccaggtccacgccctcggggccgccgtgcgattcccggctcctctcccccggcgactgggtcatcccttctccgccctccttgggcacctggcagacctacatcgtcaacccagccaccgcctggcacagggttcgctccgatgtgcctccccaatacgtcgccaccgtcaccgtcaacccactcaccgcgctcaggatgctctgcgacttcgttaacctcgcccctggtgacactcttgtccagaatggcgctaccagcattgtcggccagtgcgtcattcagctcgccaaactgcatggtcttcacaccatcaacatcataagggacaggcctggttcacaagaggccaaggacaaacttaaacagcttggggcagatcatgtgtttacggaaagccagctagacatcaagaatatcaaaagcttattgggtgctttgccagaacctgcattagggttgaattgtgttggaggaaatgctgcttctgtcatactgaaatttttaaggcaaggtggcacaatggtgacatattggtggaatgtccaagaaaccctgttactgtttctacttcatctt

SEQ ID NO: 387734 - DNA, 448 bp, Oryza sativa
ccacgcgtccgcctctctctccccaaatcgaacatcgagagagagagagagagaggtctaaaaccctaacccccgaatcgaatctcgtcggaagccgccgccgccgccgccgccgacgacgacgcccgcgacgccatggacatgggagcgatgagcgatcctgagaggatgttcttcttcgacctggcatgccagaacgccaaggtcacctacgaacagaacccgcacgacgccgacaatctcacgcggtggggaggcgcgctgctcgagctctcgcagatgcggaacggccccgagagcctcaagtgcctagaagatgcggaatccaagctggaggaagcactgaaaattgatcccatgaaggcggatgcgctttggtgcttgggaaatgcacagacctctcatggattcttcacttcagacactgtcaaggccaatgaattctttg

SEQ ID NO: 387735 - DNA, 819 bp, Oryza sativa
cacggcgcccaatgcccaccacctgttcgaccacctgacacgcctgccatgcctcccgccctcacctccaaccccccctccttccgccccctctccacccctctaacccgccgccgtgccgccacaaccttcctctgccgtgtcggccctggcaagccttccaaggacaccggcgcggatgacgagccgaagaagaggtcgttcttcgccgatttcggtaagctctcggatggaaggtcgctgataccggccttcccgccggccgcggctgggtctctgttcgccggcgggagggggaggaaggacccgcagacagtgttcgtcgcgggcgccacggggcaggcgggagttcgcatcgcgcagacgctgctgcggcaggggttcgccgtgcgcgccggggtgccggacctcgcgtccgcccaggagctggcgcggctcgcctccgcgtaccggctcatttcccccaccgaggcgcgccgactcaacgcggtggagtccgatttcgaggaccccgaggcgatcgccaaggccatcggccctgccactaaggtggtggttacagtcggcgcagctgagaaggggcccgacggcggtgtggtcaccaccgacgaggcgctccgagttgtgcaggctgctgaccttgccggcgtgacacacgttgtggtggtgtacgacctgggggccggtgaccccagtggtgagtcgacgtacaatgtgctcgacgggttcacgtccttcttctcgaacctcttctcccgtgtgcagtccttgccactaaacgagttcttggcttaggtggtggagaccgacgtcaggtac

SEQ ID NO: 387736 - DNA, 431 bp, Oryza sativa
ccacgcgtccgagtcaaaggtctctacctctaacaatcccctttctctaacatgtgcgttttctttttcatttgggcccacgcgtcgcagggaaatgctatctgagctagatgaggaatcaacaaagatttcttgctttcagacactactggatattattcatacttatagcaatgatcatgatgttacagttttgactctcattttggtgtcttgattagcccattgtctgaccatgtactggcacagtgatattgcatagaatgtctggcaatcttggatatctgcgttttgtttaccgtaaaagatgtattcattttcaaggcctttcgtgcctatactaatttgtggcatacagtgacgctattactacctgtctgaatattcgatataatcggcttgttatggccaataaaagtttattcttgtct

SEQ ID NO: 387737 - DNA, 760 bp, Oryza sativa
ccacgcgtccgcgcatggttgcgccgacgcttgggctgcgctgtcccttacgccagatccgtcagggtcgagatgaggcgcggtgtcggacgacggatctggagcctagtgcggtggcggcttacgttttgattctactcctacctttggtccgattcctctttcccctcttcgtcgtctccaatctcccatcgaccgatcggcggcgcccggagcaaacgaccgccggcgacgatgatctaccgcaactggtcgctgctctcctccaccgtcgtcatctggggcggcgtcgccaccgccggcctcgccgggatcttcctcttcggcggcaaggagaaattccagaactatctttgccgtgaaggtgagaggcttaggcaacaggacagagcagcaatgggcaagaactagctgaagacctaagataatgcactagaacaaatttcctcctagagagaaccccagtggcgttggctcactcaaactatctccacaataaattgtgatgcctggaaggaactcttatctcttcttctctagtttctggctgttgttaatcatctgtataaaatggttgacgatatcgttttagccgctgatagccatgtttgtcaaagctttttacttgtttttatcaacttgtgtgacatgtcgatgtccaacttgtttgtgggtactcaataaaaggttgtttcagttgacgggacatcattaaaaaaaaaaaatataatattatataaaaattaaaatatatatattt

SEQ ID NO: 387738 - DNA, 672 bp, Oryza sativa
aattattgtgtctggggaagtgccattgggctatctatgccattctacatatgcctcatcgtgatgacgccccatacatccatgagaagttgatcagggaaattttgtcacaatattgcgaatcatggagcaaggatgaaactcagagagtttatattgcacaacttgttattccagtagaatggatgcatgacactctggctctttacaatgaatactatggagatcagcaaagcgcactggagaattatattctgtgtggcaactggaagaaagcccatacaattttcatgacatccattgatcattctttgtttctgtcatctaagcatgaagagatctgggacattacacgctctttggaggttcacaagtctgtaattgctgactgggaacttagtgctggaatatacatagacttcttcattctaagaaattctatgcaagaaaaaagtaccatggatgatccagatcaacttgagaagaaaaatgaatcatgcagcactttctttggccggttaaatgattcattgatagtctggggaagtaaattacctgttgaggcaagggcatgcttctcgaagatggcagaggagctgtgcgagctactaatgaactcccccggcgagggcttgacgccagatctctacatgggctgctttcagacgatgc

SEQ ID NO: 387739 - DNA, 813 bp, Oryza sativa
  unsure (1)..(813): unsure at all n locations
ccacgcgtccggtggaggcggagctgaaggcgaccagcctggtggtgttcaccggcgacggccggaacaagacgcgtgtcgctggaggcgaagcaggagacgaagacgctgatccgggcgggcgacacgcggaaggtgatcggcagggtggagagggaggccaagtacccgctgtcgctcttcgcggagaccgaggacggcgagaacggcacgtccgtcgtcacggtgagcctcacccacggcctcagcgtggagacggaggtcgagaccgaaggccctcgagagcaaggagaagctcgatgacgcgcaggccgcgcaagggtggatggtgctcctggaccacgacgtgctcaacggntcggtgacgacgacccaggcgtaccgnttcagcgacgacgagccgggantacgagcgggcgatcgacgtcntggacggcgccgtgctcagcgacaacgtccaccgagagcttcagcgccctgggccgcccgcagcggcggacgctcgccgcccgccggttccacgcccggcattgctgcgttgtaaggctaccttggattnccgtgggagttgagctgtttcgtgtcatcgatggctacggaatccaggtgaaattcgtcagttcgaagaattcttatgtgcaggattcgtttccgaccgcatcgacgtgaccaagactattgcttttcttcagaggtaaattgtgcactgtaatttgtatttagcgtatagtttctgtaatctgtattatgtatgcaattttgtcggtgtgaatcgtcgtttctgcttttgcagttcaaaaaaaaaaaaaaaaa

SEQ ID NO: 387740 - DNA, 491 bp, Oryza sativa
  unsure (1)..(491): unsure at all n locations
ccacgcgtccgctcagctcttcagcttctgctcgaatggagtctacttccaccactgtgccttccattgttgtgtatgtgacagttcctaataaagaagcaggaaagaggctagctgggagcattataagtgagaagcttgctgcttgtgtgaacatagtgcctggtattgaatctgtttactggtgggaaggaaaggtgcaaactgatgctgaagaactgctcatcataaagacaagggcgtctcttcttgatgcgttgaccgaacacgtgaaagccaaccatgagtatgacgttcctgaagtcatcgcgctgcccataaaaggaggcaacctcaagtacctggagtggctaaagaacagcactagggcaagctaactctgtgccgtggcatgctttttcactacatttcgaagcgtctggtgatacgtatactctgcatctccatggctttggtgggaatgtgaatggtntcctatttttacagcttat

SEQ ID NO: 387741 - DNA, 467 bp, Oryza sativa
acgtttacgcgaaccggagagcgagccagccgacgggctacaacccatgggatgtcaaccccggcgtcgccggcgccggcgccgccccgatgatgcagcagccgatgatgcacgacccgttctacgcctccagcggctacgcggcgccgcacaacgtgcagatgaccgccatggcgcagcagcagcaggccttcatgctccagcagcagatgatgatggccgccgccgccgccgccgccgcggcgcccccgcctcaggtgttccaccaccaccagcagcagcagcagcatctccaggccaacccggcgaacccgttcggcaacccgttcgccgacggcgcagctcgaccaccacccttaccgggccggcgtcgtcgtcggcaacggcttcacggggctcatatgatgatcattatccaggctcggcgatgttggtcggtgtcgcacctattttcatgttggattttt

SEQ ID NO: 387742 - DNA, 672 bp, Oryza sativa
  unsure (1)..(672): unsure at all n locations
ntgncnggtacccagtgattacctataagggacaagngggtcncgcggggngcctttaggaatanggatccccgggtgngggattggcaggagtaacaggacaaattngggattacctccaaanaatgggaattaaantccntgtatttntggcgggtcaatggcattcgttgantggccaatccnanggggantggcngggatatttagtcttaaagttgttgatgtttcaagcaatgatctgtgtggaacaattcctaacatcaggcaccatttgagcaacattcccctaagcaactttgagaagaacccacgcttggaaggtccagaactacaaggcctggctgtatatgacaccaactgctagatggaaacacgaagaaaagaatgggtagaaagtaatgggcgtaaaatgttaccgaaaaccgggtgatatagattatgttaggtttggacctaccactctgtaatcctccatgcatagctcttgtttgtgctgtttgtcggcaatgaagttgtatgttgtagcagaatactttctttctgtgaaagtaaacatggaactgcttatgtcatgagtcaaatgttattgttatcaaaaaaaaaaaaaaaaaaaactcgagggggggcccggtacccaattcgccctatagtgagtcgtattacaattnc

SEQ ID NO: 387743 - DNA, 1085 bp, Oryza sativa
  unsure (1)..(1085): unsure at all n locations
ggtggtggtgttgttgctgctgctactactcttcttcccccttcctcgtgttcctcctcttcgcctcgtctctctgccctgcctcgtgcgcgtccagatccgggagggatgggggcgggggcgctgggggtggtggcgatggtggcggcggcggtggtggtggcgatggcgggggcgaactccgagggcgacgcgctgtcggcgctgcggcggagctcagggaccccggcggggtgctgcagagctgggaccccacgctcgtcaacccctgcacctggttccacgtcacctgcgaccgcgacaaccgcgtcacgcgcctggatcttgggaatttgaacttatctggtcatctggtgcctgagcttggaaagttggatcatctgcaatatctggagctatacaagaataatattcaaggaacgatcccatcggaacttggtaatttgaagaatcttataagcttggacctgtacaagaacaacatttctgggactatacctccaacacttgggaaattaacgtcccttgtattcttgcggctcaatggcaatcgcttgactgggccaatcccaagggaactggccggaatatctagtcttaaagttgttgatgtttcaagcaatgatctgtgtggaacaattcctacatcaggaccatttgagcacattcccctaagcaactttgagaagaacccacgcttggaaggtccagaactacaaggcctggctgtatatgacaccaactgctagatggaaacacgaagaaaagaatgggtagaaagtaatgggcgtaaaatgttaccgaaaaccgggtgatatagattatgttaggtttggacctaccactctgtaatcctccatgcatagctcttgtttgtgctgtttgtcggcaatgaagttgtatgttgtagcagaatactttctttctgtgaaagtaaacatggaactgcttatgtcatgagtcaaatgttattgttatcacgcttccctgtgttatattgaccaaactaaagatgaaagttcttgtctgctgattaaatcctttgctagnnnnnnnnnnnnnnnnnnnnnnnnnnnnnnnnnnnn

SEQ ID NO: 387744 - DNA, 836 bp, Oryza sativa
ccacgcgtccgcccacgcgtccgcaattacctgaccagcgtgtatgtagaaggcgacgcaaggtcagctttgattgccatggttcagtcacttcaacatgccaaaaatggtgtggatatcgtctccggcagcaggattcgcacacattttgcgaggcctaactggagaaaggtgttctctgacttggcgaatgcccacaaaaactcacgcataggtgttttctattgtggatcccctacactcacgaaacaactcaaggatctttcaaaagaattcagccagacaaccacaactagattccacttccacaaggaaaacttttaagaccgtaccaaaggacgtctaaacagactgcatatacttgtataggaaagaaatacgatagcattgggatagcaaatatagtcttacaagttttgctctacgatggattgtacaaaatatatgttgaaagctagtgtcaccatcgtgcatagattctggaatgtttacagatatatgtattggaacagtgggaatgcatgttagaaaaattgagttccaggtggtgcgccttgagcatgcatattttctctcttcagtctttctgccttcgccagtttttctgccctgactgtctgtgcattgcgtataagaacactattttgtggggtgcattcagcactctgagcattttcagacaagtttcctgtttttggaggcctgcctcttcttttaggctgagtattggcaggaatagttgcatcctttcgaggatacatagttgcatcctttcgaggccttgccctttttctaggttgactactagcgttaacatatgcatcgttggatgagat

SEQ ID NO: 387745 - DNA, 693 bp, Oryza sativa
ccacgcgtccgcccacgcgtccggttggatgaagattttgaggcagtcgtgggtgactttggactggccaaacttatggattacaaggacactcatgtaaccacagctgttcgtgggacgatcggacacattgctcctgagtacctctctactgggaagtcctctgagaagactgatgtttttggctatggaatcatgcttcttgagctcattacaggacaaagggcatttgatcttgctcgtcttgcaaacgatgatgatgtgatgttgctcgattgggtgaaagggctcctgaaagagaagaaggtggagatgctggtggacccggacctccagagcggcttcgtggagcatgaggtggagtcactcatccaggtggctctgctctgcacgcagggctccccgatggaccggcccaagatgtccgaggtggtgaggatgctggagggcgatggcctcgcggagcggtgggaggagtggcagaagggtggagtggtccggcaggaggcggagctggccccccgccacaacgactggatcgtcgactcgacctacaatctccgggcaatggagctgtccggcccgaggtaaaagaaacgaaagacaaaatcacaaagcatccaacctttgctcgacggctttctcgcccttgttttgtatatgacagacagatcgatagcttgcaaatctgga

SEQ ID NO: 387746 - DNA, 868 bp, Oryza sativa
gacgtcgtggagccgatcctcctggaggtggaccagatctaccacctggcgtgcccggcgtcccccgtgcactacaagcacaaccccgtcaagaccatcaagaccaacgtcgtcggcaccctcaacatgctcggcctcgccaagcgcgtcggcgcccgcttcctcctcaccagcaccagcgaggtctacggcgacccgctccagcacccccaggtcgagacctactggggcaacgtcaaccccatcggggtgagaagctgctacgacgaggggaagaggacggcggagacactgaccatggactaccaccgtggcgccaacctcgaggtgaggattgctcggatcttcaacacctacggcccccgtatgtgcatcgacgatggccgggtcgtcagcaacccggtcgcccaggcactgaggaaggagcccttgacggtgtacggcgacggtaagcagacgaggagcttccagtacgtctccgatctggtggaggggttgatgaagctgatggaaggggagcacgtagggccattcaacctgggaaacccaggggagttcacaatgctggagcttgccaaggtggtgcaggacaccatcgacccaaacgcgcggatcgagttcaggccgaacaccgccgacgacccgcacaagcggaagccggacatcagccgcgccaaggagctcctcggctgggagcccaagatccccctccacaagggcctcccgctcatggtccaggacttccgcgaccgcatcttcggcgaccacaagccccactccgtcggcggcgacaactgaatctgaatctgaactcgatcgatcttatcttaccggcattttctggagaagttgatcaagatatacacag

SEQ ID NO: 387747 - DNA, 1095 bp, Oryza sativa
  unsure (1)..(1095): unsure at all n locations
ccacgcgtccgcccacgcgtccgcccacgcgtccggcttcgcctcgtctctcccccccgagtccccaacccctcctcctcctcctcttccccttccccgcgccgcggcgagatcgctccccccgggggcagcagctagatcccgatggcttcgcgccgccgcaccctcctcaaggtcatcatcctcggcgacagggggttgggaagacgtccctgatgaaccaatatgtgaacaagaagttcagcaaccagtacaaggctacgattggcgcggatttcctcaccaaggaggttcagttcgaggataggctcttcactttgcaaatatgggatactgctggccaggaaaggtttcagagtcttggtgttgcattctaccgtggagcagattgctgtgttctagtttatgatgtcaattctatgaagtcatttgataatcttaacaactggcgtgaagaatttctaattcaggcaagcccatcagaccctgataacttcccttttgttcttttgggcaacaaagttgatgtagacggtggcaacagccgtgtggtctctgagaagaaggcaaaggcatggtgtgcctctaaagggaatatcccatactttgagacatctgccaaggatggtacaaacgtggaggaggctttccagtgcattgtaaagaatgctctgaagaatgaaccagaggaagaactgtatgtgccggacaccgtggatgtggtgggtggcaaccgggcccaaagatcatcaggctgctgctagaacatgatggaccatgagggctgagactggtggctatgcggtaacagaactacctttggacattgctgtgcctccatggtgactctcaaggacccattcgtaaccttttcaatcacctcatgtacccagttaagattgatgcgtctggcctgagttgtcaaatttgtggatgttgtgcagtttatcagtagcgtcatatctttgtgaatacaatcggtgaaataagtcgngtgtaaactgaagtttctccattatggttctctctgaaacgaacaagatgaatttgttttgtntgnnnnnnnnnnnnnnnnnnnnnnnnnnnnnnnnnnnn

SEQ ID NO: 387748 - DNA, 548 bp, Oryza sativa
gcgacagcttcgcctcgtctctcccccccgagtccccaacccctcctcctcctcctcttccccttccccgcgccgcggcgagatcgctccccccgggggcagcagctagatcccgatggcttcgcgccgccgcaccctcctcaaggtcatcatcctcggcgacagcggggttgggaagacgtccctgatgaaccagtatccttcgattcggataggggatggcggatgatatagcccgcgtcgtttcacgaacacgggcgggttttttttttcttcttcgatttatttggggggttttgttttcttgagctgtgatttaattcagatatgtgaacaagaagttcagcaaccagtacaaggctacgattggcgcggatttcctcaccaaggaggttcagttcgaggataggctcttcactttgcaaatatgggatactgctggccaggaagggtttcagagtcttggtgttgcattctaccgtggagcagattgctgtgttctagtttatgatgtcaattctatgaagtcatttgataatcttaacaac

SEQ ID NO: 387749 - DNA, 597 bp, Oryza sativa
  unsure (1)..(597): unsure at all n locations
ccgccggccnacccgccgtacgccgaggtataaccgtctcaaaccctacgccgtcgcggggattcttggattgaaatcatcggatgggttttggattcgtctcgatctatcgtttgcttttgcgtgtttggatctgattttgttttggggtttttttnagatgatcatggaggcgatcgtggcgctgaaggagaggactggatcgagctcccaggccatcggcaagcacatccatgccaaccatggcgccaacctgccgcccaacttccgcaagctcctctccggcaacctcaagaagctcaccgccgccggcaagctggccaaggtcaagaactccttcaagctctcctccacccgccctgccgctccggccgccgccgacgccaagcccaaggccgcccccgccacgaagcccaaggtcaagaccaccaaggccgcgaagccggctgccaaggcgaaggctcctgctaccaccaaggccgcgaagccggcgaccaagaccaagatcaaggtccccgccgcgccggcggcgaagcccaaggcgtctcccaaggcgaaggccaagaccgccacctcgccggtgaagcccccgcggcc

SEQ ID NO: 387750 - DNA, 787 bp, Oryza sativa
  unsure (1)..(787): unsure at all n locations
ccgccgccgccgccgcagaatcggaagcaatccgccgcgagtcgcgaccatttcttgcgagtagtagtagaggggagagtgagtgaggggcgtgctgcaatggcgactgaggaggttgtccctgaggttccggtgaccgaggtggaggctgccgcggcggaggaggccgtcgaggagacgacggcggcggaggagaaggccgccaagccggcgaaggagaagaagaaggccggcaggccgccgaaggagaagaaggaggccaagccggcgaaggagaagaaggtgaaggaggccaaggccaagaagccccgcgtcgccgccgcccacccgccgtacgccgagatgatcatggaggcgatcgtggcgctgaaggagaggactggatcgagctcccaggccatcggcaagcacatccatgccaaccatggcgccaacctgccgcccaacttccgcaagcttctctccggcaacctcaagaagctcaccgccgccggcaagctggccaaggtcaagaactccttcaagctctcctccacccgccctgccgctccggccgccgccgacgccaagcccaaggccgcccccgccacgaagcccaaggccaagaagccccgcgtcgccgccgcccacccgccgtacgccgagatgatcatggaggcgatcgtggcgctgaaggagaggactggatcgagctcccaggccatcggaagcacatccatgccaaccatggcgccaaccttgccgcccaactttccgcaagntcctctccggcaactnaagaagccaa

SEQ ID NO: 387751 - DNA, 465 bp, Oryza sativa
  unsure (1)..(465): unsure at all n locations
ggacgcntggncgacgccaagcccaaggccgcccccgccacgaagcccaaggtcaagaccaccaaggccgcgaagccggctgccaaggcgaaggctcctgctaccaccaaggcccgcgaagccggcgaccaagaccaagaagaaggcgtcggtggctgcggcgccggctgctcgcaagggtgcggcgaggaagagcatgaagtagaggtcgccggcgatgatgccacctggattggattgcccaccttttgatctccacaggcgacagcgccattagcatcatcatcagcaagtagtagcagaaattgtgttctgtaaatgcttgttcgtcttagttcgtttcacctccctctaggcggtatcatcatcttctcgcctgtaatgataggatcccatcatcctcaaaaaccataatacaaatatctatttcgtcttaaaaaaaaaaaaaaaaaaannnnnnnnnnn

SEQ ID NO: 387752 - DNA, 538 bp, Oryza sativa
  unsure (1)..(538): unsure at all n locations
aaaaggatngatggnngcccctataccaaaatcaacgtttcntccgcnccggnggcgaagcccaaggcgtctcccaacncgaaggccaaaaccgccacctcgccggtgaagccccgcggccgccctgccaagtccgccaagacctctgccaaggactcgcctgcccaaaagaagccggccccggtggccttgccaaggaaagaaggcggcggccgaccaagaagaaagccgtcggttggctgcggcgccgggctgctcgcaagggtgcggcgaggaagagcatgaagtagaggtcgccggcgatgatgccacctggattggattgcccaccttttgatctccacaggcgacagcgccattagcatcatcatcagcaagtagtagcagaaattgtgttctgtaaatgcttgttcgtcttagttcgtttcacctccctctaggcggtatcatcatcttctcgcctgtaatgataggatcccatcatcctcaaaaaccataatacaaatatctatttcgtcttaaaaaaaaaanaaaaaaa

SEQ ID NO: 387753 - DNA, 500 bp, Oryza sativa
atcgagcggataacgaacagaacacacacccactgtgctcatggcttcctcttcctcctcccttggccttggcgccatcttccaaagcggctgccccctcctcccgcctcgccccgccgtccgccgcgcgcccaccaggcgccgcgccgtcgccaccaagatctcctgcatcggatgggaccccgagggcgtcctcggcccgccgcagggcgcccacatcgtgcgcctcgagttccgccgccgcctcgagagggactccgacgcccgcgaggccttcgagcgccaggtccgcgaggagcacgagcgacgccgccaggagcgcgaggcgcgggtcatccctgacacggacgccggcctcgtcgagttcttcctcgacacggaggcgcgcgagatcgaggtagagatcggcaggctccgccccaggctcaaccagccctttttcgctacattcagcgcgagatcgcccagatcaagttctcaatcacccgaacagcggaaat

SEQ ID NO: 387754 - DNA, 626 bp, Oryza sativa
ccacgcgtccgcttttctcccattagtttcttctcaaattgtcttggtttgcgtgtatcagtgtatgggcatagagcaaacctaactataactaccaaatcataattatatttggtcacaaatatatatatctatagcctttgtccaatagaaggattgagcatttgctttcccgtgtcatctttgtgaagcaaagcgatcgatggaggcgcgagtgcttgtgttggtgaccatggcgatcgccgccgcgtgctgggccaccggcggcgtggccgcggcggcgacggcggcgacgacgacgacgacgtcccgcctcaagggcctgcgcgtgcacctgacgcacgtggacgcgcacggcaactactcgaggcaccagctgctgcggcgggcggcgcggcggagccaccaccgcatgtcgaggctggtcgcgcgggccaccggcgtgccgatgacgtcgagcaaggcggcctgcggcgacaccaacgagggcgacgggttctcccagggcgccgggctcgtcggcctcggccgcggcccgctctcgctggtgtcccagctcggtctggacaagttcttctactgcctcaccttcctcgacgacaccaacaacagcccgctccttctcg

SEQ ID NO: 387755 - DNA, 467 bp, Oryza sativa
gtatgtgcttgtacctatgctccgccaccaccagcagcgagtcatggcggccatggcgatggtgtccgtgcaactcacagtcgcggcgaggcccctgcgctcccgccgcgcgctctccgtcttcacctgcgccgcacccccgaggcagcggcctcctccaggcccaaccaagcaccgtcgcctccgccacgacgccgacgcgcagcctcccaggaagcgaggtcatcctcctcctcctcctcccaggcgcacccgcacccggggcccttccgctcgcccccaacaatcctacactgacgacgacgaggaagaggacgaccaagacgaggaggaggggagcttcggtgggggcacccgggctgccgccatgcccaagcccccagcgggcttcgtgctggacgaccagggaaggtgcatcgccgccgcctccaagcgcatcgtcaccatcaatgatgaccaccaacaac

SEQ ID NO: 387756 - DNA, 580 bp, Oryza sativa
tttatcttaggcatgtctgttttcccatggtaggatacttccacccagcttccctcctctcacccttatataaagttcttgctgctgtgactctgctttgcttgcttcttcacccaactaccgccacctctgtgttttcctgcactctccttgctagtggtgtgactgtgaaggtggcggagcctgcatggaagggctgacgagcgagcagatggtggcgttccaggaggcgttcttgctcttcgacaagaacggcgatggatgcatcaccttggaagagctggctgcggtgactcgttctcttggccttgagccgaccgatcaggagctcaacgacatgatgagggaagttgatacagatggcaatgggatcatagattttcaggagttcctgagcctcattgccaggaagatgaaggatggggatggcgacgaagagctgaaagaagctttcgaggtcctagacaaggatcagaatggttttatctccccaactgagctgaggacagtgatgaccaatcttggggagaagatgacagacgaggaggttgagcagatgataagggaggcggattccgtt

SEQ ID NO: 387757 - DNA, 605 bp, Oryza sativa
gacacagattgagagcaagcagcgtggcgacgcccaaatcgcgcgattcgatcgaggcaaccctccccaattccctcaaatcccctatccgaaatccgccaattggccgcgtccgccacgccaagagaataaaggaaaacatcggcgtatcaacaagtgaagctgcattttcttagagctcagatgaagcggcctcgaaggcgtctgtggtgggatgactgatgagggatgatagtgacattgatgaacttgttacgggcatgctggagaccatcatccaaccagcatgcccgggcaggctcagatgttgccggcaggcaggatggacttctatggtacaaggacactggtcagcatgtaaatggggaattctctatggctgtggtccaggccaacaacttacttgaggatcagtgccagattgaatcgggtccattgagctttcttgactctggtccatacggaactttcgtcggggtttatgatggacatggtggcccagaaacggcttgctatatcaacgatcacctattccaccatctgaaaaggtttgcatctgaacagaattcgatatttgctgatgtgctgaagaaagcatatgaagc

SEQ ID NO: 387758 - DNA, 455 bp, Oryza sativa
  unsure (1)..(455): unsure at all n locations
tgcgtaccgtcctgattcccggtcgacccacgcgtccggccggttcatgaactaatttctcgcaacaatttaaggcaggagcttctctttggtccagtgtcgcggttttattgtacaatgtacaatgcatccatgccatgtctgtgtataaatcaagaatgctcagctgctgtaggctgtgttgtgtgtagtattttctcccccttttttcataaactatttgagttctagttgggctgcttctgccccatgtcactgagatgtagctgttgcttcacaatttagctaacctgatgattattgttgaatggttgatgtgctgtaacttaattcagtgctgtgttcatctggggtgtttcctgaccgggcaggttcagacgtaggctatttgactgnacttctgggaattacatgtgatcatccnacaagaatttagccganaaaaaaaaaaaaaa

SEQ ID NO: 387759 - DNA, 632 bp, Oryza sativa
ccacgcgtccgattgggaagccattgaatcagaggcccattatcaaatcttgggtatttttctgtgtagttcaggtatgtattcttggtgctgaaagacttccaagaagtaatttatcaacaatagctagttcgattaaccaaatctcatctggaggctatccttcatcaagaggtccgggtgtccctgttctaaatgaagatggaaatataatcagcgacatccgccatgggaaaactgcagatttggctactagttcagaggcatccaggggtaagagcaaatgcaccctttgtctcagttcccgtcagaatcccactgccacaacctggggccatgttcttctgctggaggtgcattatgtgaggggggttatcggtaagcctgaatgccccctatgcagaactccgattacacattcgagtttgatttgtatatatcattcagatttctagcaaatgattactagcaaggggtcatatcattctccagtggattcattaaaatgatactgaatccccacattttggcgagaactcttcttctgaagtgttttagtgtaccaaaagaggagagtagaaaccatccaatgaggctgaagatcaatgctgccattcaactgtattgtagag

SEQ ID NO: 387760 - DNA, 858 bp, Oryza sativa
gcgacgcgtccgcccacgcgtccggaagctgcgaggatagcaaatgcccaccatttcattagcagcttgccacataagtacgacactcatgttggaatgaggggggttgaccttacagctgggcagaagcaacgaattgcaattgctagggtggttttgaagaatgcacctattttgttgttagatgaggccggctccgcaattgagtctgaatcaagtagggtggtgcaggaagctcttgacacattggtcatggggaacaaaacaaccatcctcattgcgcacagggcagcgatgatgaagcatgtggataacattgtcgtcctaaatggtggtaggatagttgagcagggtacacatgactctctgatggacctgaatggtctctatgttagattgatgcaaccccattttggcaagggccttcgccagcatcggctaatgtaattagtgttgagtttgttaggtgtaaattatcctagcgcgtgatcaagttccttttcgctctgttcagccaggggtcatgggtctgtggcttaccgttttgtcggaggaaaaatgttaggtgtcgctggcgctgctctgaatgagcggaatggtgacctggtcttgacaacaaaattttagtctgaacattcagatgactagctttgttgaaactctaggaacttattctggaaatagttagcgggtttggaggggaacttattctggaaatagttagcaagtttggagggcattgtaattgttgtaatatatgagttgcaaacattctttttgaggcctgtgtacttgattcctttcgcctctgtaatgtattggtttgatcgtgcaaaaaccaaaaaaaaaaaaaaaaca

SEQ ID NO: 387761 - DNA, 1080 bp, Oryza sativa
tgggttatgttcctaaggaagatatattgtatgctataaaagcaatagtcgtcacacagagggaaaatgggagaagggatgaccgccgatatagcaggatgaagtatctgattgataactggggaattgagaagtttcgggctgaagtcgaaaaatactatggaaagaagtttgaagattctcgtcctttgcccgaatggcagttcaacagctacctaggatggcaggaacagggtgatggaaaattattctacggagtgcatgttgataatggtcgtgtcgcagggcaagcaaagaaaactctacgagagattattgagaagtacaatttggaagttagcattactccaaaccagaatcttatcttatgtgggattgatcaagcatggaaagatcccatcacagcagctcttgctcaatctggcctgctggaaccaaaggatgttgatcccctgaatattacttccatggcatgtcctgccttaccactgtgccctctagcacaaacagaagctgaacgagggattctgccgattcttaaacgaattagagcagtttttgataaggttggcatcaaggaccatgagtcggtagtggtgaggataacaggctgccctaatggatgcgctagaccatatatggcagaggttggctttgttggtgatggcccaaacagttaccagatatggcttggaggaacaccaaaccagagtaccctagctgaaacctttatgaataaagtgaagcttcaagatattgagaaggttttggaaccattgttttcctattggaacagcacacgtcaggaaggtgaatcttttggtagcttcacacgccggaacgggatttgacatattgaaagaggtagtgaacaagtgggcagagtcagcatcagctgcatgatggactgctttcgctgaacaagttgataacaattctgaccacgggtccaatgcgggcatcgtcaagggctctcaacataactatgtgagcattgcaggagaaaattttgtcaatttcgttgacaagattgaggactcgccgactcgggtttggaatcgttcgttcagataattaatc

SEQ ID NO: 387762 - DNA, 431 bp, Oryza sativa
ccacgcgtccgatgaacttttccgcttaaggtggaattgcactagctggatctagtatagatgctgcttgccatcagcactatctcgcctagctgttgcatagaaccagcgctttgacaaattccaagaggtagtgaacaagtgcgcagagtcagcatcacctgcatgatcgactgctttcgctgaacaagctgataacaattctgaccacggctccaatgccggcatcgccaacggctctcaacataactatgcgagcattgcaggagaaaattttgtcaatttcggtgacaagattgaggactcgccgactcgggtttggaatcgctcgtgcagataattaatcaaaatttttcgtgtactctggtttgagaaaaaaaaatgtgcttatgagaaaacaaaaggaaccctggtgtttactttggaataaa

SEQ ID NO: 387763 - DNA, 1150 bp, Oryza sativa
  unsure (1)..(1150): unsure at all n locations
tgtttctctatatcttgctgcatcctgtccacaccttgtaaagggtgtcacattacttaatgcaaccccattttggggattccttcccttctcctgctacatctcctcgcttgtcggggatttttccatgggctgggacatttccacttccatcggttgtgaggaaacttactgaaacagtgtggcagaaaataagtgatccaagaagtatacagggcatactcaagcaagtatatgctgaccactcaacgaatgtggacatggtgttctcgcgtattatagagacaacacaacatccagcagctgctgcatcatttgcatccattatgtgtgctccaaagggacaaatatccttcgaagaagctctatctaggtgccaaaggcagggtattcccatatctcttatgtatgggagagaagatccttgggttagacctatttggggtattaaagtgaaacagcaggtgccagaatcaccgtattacgaaatcagtcctgctggtcactgccctcatgatgaggttcctgtggttataaactacttactcagaggattggctaaagaatgtcgaatctgaggggttcagttgccagttccatttctttgaagaacccagctatgctgaaaatggtgtatcaagggagctggaatttgttaggggaggatcaaaaaaaatctgtccatgtgcgactctttggttctaaaatttccttatggagcccaacttcgttcgcttttgaagtccaacacatgggtaatatctagataagatagattgtccatacaagtatgatgttagaagcttcagtcaaatattgtattcattattctttatttaaagtagtcagtttgatgtctagaactctagatatacccagtagacaggattttgaacatttctagtggatgtaaaaatagcaagcttcaaaattcttgtgccagaacaaagggagtagccaagtttagtccttgtttgtataggctatcaatctttatcaagttcaaattgtgatttctgtataagcagaaaaattggtatcatatgccattgttataggatccacacttcactgtccttagaactttcagttctatatcaactcaggtgctttttttcnnnnnnnnnnnnnnnnnnnnnnnnnnnnnnnn

SEQ ID NO: 387764 - DNA, 797 bp, Oryza sativa
  unsure (1)..(797): unsure at all n locations
ccacgcgtccgcccacgcgtccgcccacgcgtccgctcgccgtttcgcgaattccggcggcgacccacctgcccggcggccggctacccccgccacgcaccaccgccggatcaagcctccctgccacaaaccaggagctcttcctcgccggcgctctcctcatccacccgtagcaggaatggagaagtatcacagcaactcccgatttgctcccttcagagatgctccatttgctctccgtggtgcccttggtagctcaggctcatctttcagcagcatcgacagcctcagacgctcctcaacccttgagcaagctagggggtacacatctcgtcccctaggagctgtgcggccaaagatgctcccatctggatgccgacccctgcacacaagccatcctctgtcggctcctgttgctaaccgccccctgtcaccccaccttcctctgaagaagccacagctgagtgctacattctctatctcgcaccgtatatttggtgctgcgttgggtgctgccattatatccattcctctcgccaccaagttcagcctcatgtttgatgtctgagagagaaatgtggtctgcatgatgagaaagaaatgctatatttctgtgactatctcagcatctgaatttgccttgcaatgcaactgtagctgccgttggaataatatctttgctgtgcttgtagacttgtgaataataaacaaaacatgcaatgaccatactccctgtgagatatgatgttttatgctaagtgttaattttctctnnnnnnnnnnnnnnnnnnnnnnnn

SEQ ID NO: 387765 - DNA, 404 bp, Oryza sativa
  unsure (1)..(404): unsure at all n locations
ccacgcgtccgcccacgcgtccgcggacgcgtgcgtgcgttgcttattttactctagcttctccattccgaagattcaccaccgccggcgccgccatctccattccaaaatttgctctgcgtcgagtcgtgtgatcgatcgatcgatcgaggtgtacgtgtgcgctgctggggaaaagggaaatggatccgtcgggcgccttcttccacgcggctccccggagcggctcgaatgtgtcgctggcgtcgctggcgaggacggccggagggaggaggatgatgcacagggtcttccgcggcgtcatcaccttcatcttcgccatagctggactgtttcttggagcggtgactggcgggctgatcgggctggccaccgagagcggcctcttccgcgncaccggcatc

SEQ ID NO: 387766 - DNA, 819 bp, Oryza sativa
  unsure (1)..(819): unsure at all n locations
nnnnnnnnnnnnnnnnnnnnnnnnnnnnnnnnnnnnnnnnnnnnnnnnnnnnnnnnnnnnnnnnnnnnnnnnnnnnnnnnnnnnnnnnnnnnagaagctcaagtaatatatatgtgtagtatatatgtattttatttacatctcacacctccaaaatcttattctactacagtaaactgggtacagagatataataatactcatacaagtatgtacaacaacaagcacaccacacactgatcaacttttccttggattttttgctctgcagcaaaacaccaaggcaaaagcttaccactgctcatatgtatctcctcatactgaattatactaagtagtagtagtaactacatggctgcagtagctatatgcagaccaaatctcgtcaaaattaaaatcctaatatccaagaagaaaacaagaaggagtaacaaatcgaatgaaggtgtgcagtgcaggtaggaggaaggtagcaatcaacggtgactcaaacacacccaagagcaagaaagatgacgacgaagaggagctagctcgagctcgagctcgagccatggcgatggcgatggcgagagagagggggagagggagagatcaccacttgccgtcgacggcgcgggagcacttgcccttgatccacttgacgctgcggcgcaccgagtccttcaccttcccttccacgtcgtacgccttgtaggcgaccagccgcttccgccgctggagctcggcgtcgtcgacgacggcgccggcgaagctgcccgtcggcgacacctgcttcgttggccgggatcggcgttcgaaccggntcntgcacccaag

SEQ ID NO: 387767 - DNA, 457 bp, Oryza sativa
cccacgcgtccggtcagcttgcaggagcgcgagagaaaatcgatcatggcgagagcctgcagccccgcgttgaggctgcagctgccgccgaacccgccgatcacgccgcagctcccgagctgcaggactcactccgctggcgccaggtgcagaggcttcgccgccgcccactcgcagccgcctgcagccgggcgcccggacgagcctgccgcggagccgtcaccgaagcaaccggagatcgcgcagacgcagaacctcaggaggagccgcaggagggggccggggtcgcggcagagcctcgtgtccgtcgggacgtcgtgcggcggaggggatcagtggagcagcgacttcgacctgacgctgcggcagctgcacctagacgacctcatcgaagacggccagaacgacgacgccgacgttctggtgcacctcctagttcagcagcatactcagtttg

SEQ ID NO: 387768 - DNA, 637 bp, Oryza sativa
ccacgcgtccgcggacgcgtgggcggacgcgtgggctagaatgcttttaacggtggatgaggatctaaagcccctatctgttccagtacgggttgggcaagctgttgatgtggttggtcaggctggaaggcccaaggcaattactggtttccaaacacattcgacacccgtattgcttgcagcaggggaacgggctgaattagcaaccgaaaaatacattccgctgacttcggtattggagggctttgtaattctgaagaagaacccggaatataacgaggagtgagggacatttccaggcttgatacaatgctgatttctggggctcacaggcgtggcatactagggaaccatgctgcaacatgggacaggatctttgcctattgggttccctcctcggcgcctcctggtgttaatcggataggtcttttatctcttctaccggagtctcgagtgttggagcagagctctttgaattctgaaatcctttttggttgtgcaatgactgacgtgacgtatcacttgtacccaaacatgggcatctaggagttgaactgtttccttttacctccagtttatttatctgtatgtagcaaagtatgtactagaaatttgaggtcgaagtattattcttgat

SEQ ID NO: 387769 - DNA, 434 bp, Oryza sativa
ccacgcgtccgcgttgtcaaagaaattttcggagttacagatgaggatgcagacagcattaggattcacatacttgctgaaaccagtgatattgagtcattagagaagatggtcgatgattctgaactggggcatggcccctcgcctttatcatgaagggcattaatggtaaaacataactgagcaccttggtggatagctggtgctgctctgagttttgagtcatcgaagaagagttccaggatactcagctggaagttttgtaaatcctattaggattataacttgtggcagtatctccaacctttctattattacttgagctggcaaaagtgttgtttaagagcctggtagttatgagttatacaaagcgagaatgctgattggattaattatacatattttaagtttttgtttcgacttaaaaaaaaaaa

SEQ ID NO: 387770 - DNA, 454 bp, Oryza sativa
ccacgcgtccgcccacgggtatcctaacacctgcccaaaagagtgaccgaggagtcttcctcccccgtccgccgctgctcgcgaatcaccacagatcgccgcggcggagacgaagagcggcggcgcagaggctctcagatccggcgagatggcggcgaaggcgatctcgagccccgtgccggtggactggtacccgacgctggccgtcgtcatggtccccgtcggcctcatgttcaccgcctctttcttcatctatgaagcgacttcatccaggcgtaaccgtagcttagcaaaggagattgccacagcaaccatcgcatctgtttttctggggtttggatctcttttcgtgcttcttgcaagtgggtgtttatgtctgatcgcctggggccatgcagaaagcattttgttgtgttatctattccatagtgaaagttcatctaggatatgtaag

SEQ ID NO: 387771 - DNA, 615 bp, Oryza sativa
  unsure (1)..(615): unsure at all n locations
ccacgcgtccgttcttctggggctacctgctaactcagatagcatgatgaatctgggcagatacagttggagggagagactgtccttggcttcggcgtcatttggtggtcgatagccacagctcttacgccttttgcggcgaagctggggttaccattcctccttgtgacccgtgctttcatgggagttggtgagggagttgccatgcctgcgatgaataatattctttcgaaatgggttcctgtatcagagaggagcagatcattggctctcgtgtatagtggaatgtaccttgggtcagtgacagggcttgcattttccccattgctgatacataactttggctggccatcggtcttctactcctttgggtctctgggtgtattttggctttcgacatgggcgagcaaggcgtatagtagtccacttgaggatccaggaattagtgctgaagagaagaagcttataaccagtcaaaccacaggaggagagcctgttaaagaaattccatggngactaatattatcgaaaccccctgtttgggctcttatagtgtctcatttctgccataactggngaactttcatcttgctcacatggatgccaacatactac

SEQ ID NO: 387772 - DNA, 940 bp, Oryza sativa
  unsure (1)..(940): unsure at all n locations
ccacgcgtccggttcattgggcttattgttggtgctatgctcccatactggttctcagcaatgactatgaagagtgtaggcagcgcggcgctaaagatggtggaggaagtccgcaggcagttcaacaccatccctggactcatggagggcacaactccgcctgactatgcaacttgtgtcaagatctccactgatgcatccatcaaggagatgatccctcctggtgctcttgttatgctcaccccacttatcgtcggaattctgttcggcgtcgagaccctctctggagtccttgctggtgctctcgtctctggtgttcagattgccatctccgcatcaaacactggcggtgcttgggacaatgcaaagaaatacattgaggctggagcttcagagcatgccaggacccttggtcccaaaggttccgatccccacaaggcggccgtcatcggtgacaccatcggagaccctctcaaggacacttcaggaccctctctcaacatcctcatcaagctcatggcggtcgaatccctcgttttcgcccccttcttcgccacccacggtggtatcctcttcaagttgttctaaaccggcgacgttgggtgtaacaaaggccatagttttgttggggatgagcaaaatatgtagactattttgtcatgatttgctccttgagttgatgactccattgtctacttgatttcccatttttgttctagttccaggttccaaccttgtgttttgatcccagaattttctctggtcctctttagcttttgtctccagctgcataagtcatcctgtggcacagtgaacaaggagcattggaaaatttgccattttctagcgataaaatgatgaggatgatgatgatgattgnnnnnnnnnnnnnnnnnnnnnnnnnnnnnnnnnnnnnnnnnnnnnnnnnnnnnnnnnnnnn

SEQ ID NO: 387773 - DNA, 690 bp, Oryza sativa
  unsure (1)..(690): unsure at all n locations
aaaaaagatgccatgcttagttacctatggaaaattaatgtggttgatattgagtcaacacttacacatgtttgccaagcagttttgaaagacgccagtgtcccaaaagatgttctgaagttacgagcaagagcattgaaaaagcttgggacaatattccagggtgcgaagtctctgtaccatcgtgaaaacagcctacaggtggaaaccagcccacggcagggagcagcaacatcgaactgaagactgcaaaagtacaaaaaggaaaaaaaaagtacacctgacagacgcaatttctggttttttggaggtgtcgtctctcgtgtccgtttattcatttttgtaagattttagacgacgcgtatcgttctgggtgaaatttgctgtttgatttggtctccgttttctttgtaaaaatggtgatgctgtcgtgagctctgaacacgaagattttgttggtgctctgcaacctgcatattactagcttgggctatctcgttgtnnnnnnnnnnnnnnnnnnnnnnnnnnnnnnnnnnnnnnnnnnnnnnnnnnnnnnnnnnnnnnnnnnnnnnnnnnnnnnnnnnnnnnnnnnnnnnnnnnnnnnnnnnnnnnnnnnnnnnnnnnnnnnnnnnnnnnnnnnnnnnnnnnnnnnnnnnnnnnnnnnnnnnnnnnnnnnnnnnnnnnnnnnnn

SEQ ID NO: 387774 - DNA, 1002 bp, Oryza sativa
  unsure (1)..(1002): unsure at all n locations
tcggccgcggaggcgtcgtcgtctcccgtggggggcgggaggctaatgctatggggtccaagacgaaggggtgctgcgggtggctgatcgtggcgctggtggcgtcgctggtggcgacggcggcggtggtggccatcatgaagaagaaggtcggcggggggagcgggcgcaagctcaagccgctgccggtgcccggcccgcccggggccatcgactccaagtacggcgacgcgctcggggtggcgctccagttcttccaggtccagaaggcggggaagctggagaacaaccagatcccgtggaggggggactcggcgctggatgatgggaaaccagcggggctggatctttccaagggaatgtatgatgctggtgatcatatcaagtgtagtttcccgatggccttcacggcaacggtgctctcgtggtccatacttgagtatggagatcagatgagcgccacgaagcagctggaccctgcgcttgatgctctccgatggatcactgatttcctcgtcaatgcgcatccatctgacaatgtgttctacattcaggccggtgatcctgatctagatcacaactgctgggaaaggccggagactatggctgagaaaagaccactcacacagattaacacaaagtctcctggatcagatgttgctgctgaggcagcagcagctatggcatcagcatcaattgttttcaaatccagagacactacatatttctgattcacttcttcaacatgctcagaagttgtttacttttgctgatacttataaaggcctcgccagtgacacctatccaaagctccaaaactactataattctactggttatcaagacgaactcctgtgggcagcgagttggctctatcatgctacaggagaccaaacatacctcagttatgtgactgtagagaatggaaaagcttttgctgattggngaaggccaacatggttcagttgggatgacaaacttgcatggacacatgtgctcttg

SEQ ID NO: 387775 - DNA, 523 bp, Oryza sativa
ccacgcgtccgcccacgcgtccgaaattaacaacatgcatggttaaatttgatcacttcaagttcaaaaaggacagattaaactaaaaatagttaacatacttgcaattataattgttatcgttcgtagttatacttgttattttattattatttttttagataagtttgttattttattataacttgtagaggttgaatttacacttgcattattctatagtgatatgttttataaatctatattattaaaaaaatatttttttataactatttagatggtatgcaagaaatgattgatatcttcggggagatgaaaacactttccttttgatagtgagttccatgcctttttttttctcatctcatgcaaaacgtgtgtacgattattggtaggcgttcccgagggactcgccgctgtcagtggacctgtcgacggcgatcctggagctgtcggagaacggcgacctgcagaggatccacgacaagtggctggcgagcgacatgtcgtccatgtcgcaagc

SEQ ID NO: 387776 - DNA, 587 bp, Oryza sativa
agtcatcttcttcctgagcccaaatattacgctacaagccatgcttatcttgatggccactgcgctcatcatctcttcgggcgcattcttgttacttacacttgttgtggagaagccatcgaccgtcagattgtgaggaaatccgaaatccttttgtccaacagaaaccaattccaaagtggggccaatttcaccacatatcttgatcagtgttaccaacaaccaaagcagcacatactgtatgcacgagcgatacgaaaccaaaaggaaatgaggtatctgtcagttgatgtgcaacacaacaccaccctgactccatttgtttcagcgatttttgctgaattgaagtgattgcattcaaaattagagtgacggccttgtagcaaaatctgttttcctccagttgtttctgttccgtggttgtttctaccaaatgtaacatcagtcaaatatatatgtttataatagctgctcttttgttctgaaaaaggatgagtgttatttcgacgtggtttgatgaaaaaaagaaggaggttactccttcggtcattaatatatgaagggcctcatctttttcttaacccaaa

SEQ ID NO: 387777 - DNA, 807 bp, Oryza sativa
cggacgcgtgggcggacgcctcccccgcgtccggatcgagctagcaaatatcaaaaagcagctccagcttcttctgatcgatcgatcgagctgagctataggcagtagctgctaattaagctaattaattgctaagcagtagtagagctagctaattaattaagatggccggcaagaaggtgcaggtttgtgcgctgttccttgccctcaatgtgctcttcaccatgcagatgggtgcagtagtgcaggcatgcgagccctactgccccacaccgacgccgccggtgacgccgcctccgtcgccgccgtcgggtggagggaataagtgcccgatcgacgcgctgaagctgagcgtgtgcgccaacgtgctcaacctgctgaagctgaagatcggcgtgccggagagcgagcagtgctgcccgttgctgggtggcctcgtcgacctcgacgccgccgtctgcctctgcaccgccatcaaggccaacatcctcggcatcaatctcaacatccccgtcgatctctctctccttctcaactactgccacaagacctgcccctccgacttcacctgccctctctaaattaatcgatcctccgatcccttaattaccataccattacaccatgcatcaatatccatatatatataaaccctttcgcacgtacttatactatgttttgtcatacatatatatgtgtcgaacgatcgatctatcactgatatgatatgattgatccatcagcctgatctctgtatcctggttttttgtataccgtcaaataaaagtttcttccacttgtgttaat

SEQ ID NO: 387778 - DNA, 647 bp, Oryza sativa
  unsure (1)..(647): unsure at all n locations
aggccacgacgctcacgcgtacgcctaggcgtgcgcgcgagctagcagcagcaaaatatactatatcatcatcaattaattaagctagtacaattaagaagtagctaagtagtccaatacgatgggcggcggcaagaataaggtgcaggtttgtgcggtgttcgtcgttgctctgaatatggtcatctccatgcagatgggtgcagtgcaggcatgcgagccctactgccccaccccgacgccgccggtgacgccgcctccgtcgccgccgtcgggtggagggaataagtgcccgatcgacgcgctgaagctgggcgtgtgcgccaacgtgctcaacctgctcaagctcaaggtgggggtgccggcgagcgaggagtgctgcccgctgctgggggggctcgtcgacctcgacgccgccgtctgcctctgcaccgccatcaaggccaacgtcctcggcatcaacatcaacgtccccgtcgacctcgtcctcctcctcaactactgccacaagacctgcccttccgacttctcctgcccactcatctgattcttaatcttcattaccaccacaaccctagctacctaattaaggcttaagctttgcatggcttaatctgtgtgttgcaantgtgtcatacatatatacc

SEQ ID NO: 387779 - DNA, 857 bp, Oryza sativa
  unsure (1)..(857): unsure at all n locations
gcacggtnggcgaacgtggctgcggtggaaggagggcaacagaggccatggtggtggtgaccgtgtttgcggtcaccggaggcatggcggcctcggttgactagccgagggcgtgggagacggctgcatctggccggcgcggcatcgtgcggtggaggggtcggagaccggcttggcgcagagaagtgcagccgatggcagcggaggccggctcggcgcgagaggcgcgggcggcggagatggaggccggcttggcgcgagaggcgcggccgatggagggaggccggattggcgcgagaggcgcgtccggtggaggaggccggcttggcgcagagaggcgcggccggcggtggaggaggcgacctaggtgtgaggaggagctgccggtgggtgtggcgcggtcttcggcgcacgaaggctggccggcgggggacgccggtgcaggggtcccacatgtcggcaaagcttgtgtggtggtggagcatcggtgcgtcagacgtggtttcgcagaatctcgtctgtgcccctttgttggcctagtggcggtcggtcacgcttagtggcggccgatccggtgctagccttctcctgggcgtgtgtgttggcgatgtcggcgtgtgggtggtggtatattttttccttttcctggttacgactctccagagttgtaatattgtatttttttcctgctctatcaatagaacttcgcaccgtctcgtgcgagtcgttcaaaaaaaaaaagaactaaagtaacagaaacttgaccctatccgtcttggttgatgggtttgctccaatcattataaaataaaccttgaacaggaaatcagtctacaataaaaaaaaaaaaaaaaaaa

SEQ ID NO: 387780 - DNA, 1032 bp, Oryza sativa
  unsure (1)..(1032): unsure at all n locations
ggangcngtgtcgaacgantgtctggagggtggcggcagttggcgacggcggcacggtgtggcgacgatggtggcggcaattggccggcggcagttggtgatggcggtctctctggacgccggcagcagttggcgacgacaaccgcggtgtgatggcgtcgggcagctagctgctcggtggtggagggcgacggcgcggcggcagtttgcggaggcggtggttggcgtcggtggcagcggtgacggcagctgcgactctggaggcggtggcaacgtcggcggcgaggaaggagttgggtgcgaggtgaggatgacgacggcgaggtggctgggtgtttggcagcagcggccacggtggtggtgaccgtgtttgcggtcaccgaaggcatggcggcctcgcttgactaaccgagggcatgggagacggctgtagctggccggcgcggcatcgttcggtgaaggggtcggagaccggcttggcgcagagaagtgcagccgatggcagcggaggccggctcggcgcgagaggcgcgggcggcggagatggaggccggctgggcgcgagaggcgcggccgatggagggaggccggattggcacgagaggcgcgtccgttggaggaggccggcttggcgcagagaggcgcggccggcggtggaggaggcgacctaggtatgaggaggagctgccggtgggtgcggcgcggtcttcggcgcacgaagcctggccagcgggggacgccggtgcaggggtcccacatatcagcaaagcttgtgcggtggtggagcatcggtgcgccaccgtgcctttgttggtctactagcggtcggccacgcttagcggcggccgatccggtactagccttctcctgggcgtgtgtgttggcgatgtcgtcatgtgggtggtggtatttttttcttttcctgcttacgactctccagggttgtaatcttatacttttttttcctgctctatcaatagaacttcgcaccgtctcgtgtgagtcgttcaaaaaatttcacataaaaaaaaa

SEQ ID NO: 387781 - DNA, 1175 bp, Oryza sativa
  unsure (1)..(1175): unsure at all n locations
ctttagccgcgttggcggtggcggcggctggtgggggcggttggtgacagcagcggcgacagcggccggcttgcagcggctgtgaatgttgaggcacggtggcgaacgtggctgcggtggaaggagggcacatggtggtgatcaccgtggctgaggtgggaggatgtatggcggccttggacggctagccgagggtgtaggagacgattgcatctagccggcgcggcagcgtttggaggaggggttggagaccggcttggcgcagagaggcgcaaccgatggcagcggaggccggctcggcgcgagaggcgctggcggaggagatggaggccggcttggcacgagaggcgcggccgatggagggaggccggattggcgcgagaggcgcgtccggtggaggaggcccgcttggcgcgagaggcgcggccggcggtggaggaggcgtcctcggtgcgaggaggagctgccggtggatgtggcgtagtcttcggcgcacgaaggctngccggctgggggcgccggtacagtggtcccacttggcggctgaggttgagtggtggtggagcatcagtgcgtcagccgtggattcgtaggtggtgagcaacaggtgaaaacccagcccggccttggccggaccgacaacgatggttaattctccctcctgagggcgttgtcgtgctgtctcatccctcaagggtggttgccgggcgaaagccagtcttggcttctttgagccccgacggacggtgacggcggttttctatcgcttctcttcttgaagacgtcgttttggcatcccctagccgaagcctctcgatcgattggtgcaagcacactctaggagttggctttgcgttggttgtgagggtgttcttttaggtgatctcgtctgcgttcctttgtcggtctagcggtgatcagtcatgcttagcggcggccggtccggtgttagccttctcccggtcttgtgtgttggcgctgtcagtgtgtgggtggtggtatattttttcctttttcctggttatgaccctccagggttatagtcctgtaatattttcctgctctatcaatcgtattgtctcgtgcgagtcgttaaaaaaaatattttcactgtactttgatcaactgtgttgggacattttttaggctggtttttttctatatattataaaaat

SEQ ID NO: 387782 - DNA, 588 bp, Oryza sativa
  unsure (1)..(588): unsure at all n locations
agggacgccggtgcaggggtcccacatgtcggtagagcttgtgtggtggtggagcatcggtgtgtcagctgtggatcttacccctcaagggtgattgccgggcgaaagctcagtcttggctcctttgagtcccgacggacggcggtggcagtttttctgtcgcttctcttcttgaagacgtcgttttggcatcccctagggggcaatctcggttgtccctttgttggtctagtggcagccggtcacgcttagcggcggccggtccggtgctagccttctcctgggcttgtgtgttggcgatgtccgtgtgtgggtggtggtattttttcctttttcctgtttacgaccctctanggttgtaatcttgtaatttttttcctgctctatcaatagaacttcgcaccgtctcgtgcgantcgttaaaaaaaaaaaaaaaaaaaactcnanggggggcccggtacccaattcnccctataatgagtcgtattacaattcactggccgtcgttttacaacgtcctgactgggaaaaccctggcgttacccaacttaatcgccttgcagcacatccccctttcccagctggcgt

SEQ ID NO: 387783 - DNA, 950 bp, Oryza sativa
  unsure (1)..(950): unsure at all n locations
tttgcgcagagaggcgcaaccgatggcagcggaggccggctcggcgcgagaggcgcgggcggaggagatggaggccggcttggcgcgagaggcgcggccgatggagggaggccggattggcgcgagaggcgcatccggtggaggaggccggcttgacgcgagaggcgcggccggcagtggaggcgacctcggatcgaggagctgctgatggatgtgacgcggtcttcggcgctcgaaggctagccagtagggggcgccggtgcaggggtcccacatgtcggcagaggttgaggggtggtgggagcattggtgcgtcagccgtggattgcgcggtggtgagcagcgggtgaaaacccagcctggccatggccggaccgacaacgatggaattccccctcttgagggtgttgtcgtgctgtctcatccctcaagggtggttgccgggcgaaagccagtcctggctcctttgagccccgacggatggcggcggtggtttaccatcgcttctcttcttgaatacgtcgttttggtatcccctagccgaagcctctcgatcgattggtgcaagcacactctaggagttggctttgtattggttgtgagggtgttcttttgggcgatctcatctatgtttctttgttggtctagcggcagtcggtcaagcttagcggcggccggtccggtgttagccttctcccggtcttgtgtgttggaactgtcggtgtgtgggtggtggtatatttttcctttttcctggttacgaccctttagggttgtgatcttgtaattttttcctgctctatcaatagaacttcgtaccgtctcgtgcgagtcgttcaaaaaaaaatgtatcaagaaacaacactatattattcaagtaacatgtctataactccaacaacgacgacgacaacatcaacggattttacnnnnnnnnnnnnnnnnnnnnn

SEQ ID NO: 387784 - DNA, 638 bp, Oryza sativa
  unsure (1)..(638): unsure at all n locations
ccacgcgtccgtggcaacggcggcggaacccatggcgtcgggctgctagctgttcggtggtggagggcgacggcggagcagcgatttgcagaggcggcggttggcgtcggtggcagcggcgacggcggttatgactctggaggcagtggcgacgtcggcggcggggaaggagtcgggggcgaggtggctgggtgttcggcaaccaaggctgtggtggtggtgaccgtgtttgcggtcaccggaggcatggcggcctcgcttgactagccgagggcgtgggagacggctgcagctggccggcgcggcatcgtgcggtggaggggtcggaaaccggcttggcgcagagaagtgcagccgatggtagcggaggccggctcggcgcgagangcgcaggcggcggagatggaggccggcttggcgcagagaggcgcggccggtgatggaggaggcgacctaggtgtgaggaggagctgccggtgggtgtggcgcggtcttcgacgcatgaaggctggccggcgggggacnccggtgcaggggtcccacatgtcggcaaagcttgtgtggtggtggagcatcggtgcgtcaaacgtggtttcgcagaatctcgtctgtgcccctttgttggcctagtggcggtc

SEQ ID NO: 387785 - DNA, 337 bp, Oryza sativa
ccacgcgtccgggcgattgtggagacgaatacagagcataattgtgcagagagataaagagagagagaggcagagggggtagaccaatgaggcgtgtgcctgccagtggtcgggagttctgaaatctgatctgttttgtcatgaacgtagtgtgcagcagctatctgatcttccagtatactactactccagatcagtgtgtaaaccaacctcccaaaagaaagtggcattttataagaactgtacatacacaagacagattataatttgatatgcccattaatacggattcgatttgcgcagttagccaaaaaaaaaaaaaaaaaaataataatat

SEQ ID NO: 387786 - DNA, 502 bp, Oryza sativa
ccacgcgtccggttacaacgggatcccgttttgtagccgctctcatatttatattataattataaccagtcgctggtagttggattacccaccatggattagtctcttgtagttggattattcccccaccatggattagggtgattaaaccggacctcttgttgtgcaggcagtaaaaggtggttgtgtgcttgttgtgacacaacatttacccccaaatttagctctcatttgagctcgtcagctaattaaatatgtgaagatcaagtggctgcagttgatgattttgaattatggatcattcaatcatgggaaagagacaaagaatggtacactggtaatgatcggactttgagccgatttatatatgaggatcatttaaacatgggaaagagccaaagaatggtaagctggtactaatcggattctgtgagtcaatttatatatgaaaatttctgcagtggacaaaacacttggttctgctgtaataggagttctagag

SEQ ID NO: 387787 - DNA, 500 bp, Oryza sativa
ccacgcgtccgcacccggccgccgcagaagcgcagaccatcaccggatctttccgcgcgaagacgagcacgccttgtgaatggtgggagcccgcacgacctcccccgcctccccgccgcagccggagagggcctccttccgcagcttcggttgctgcatgcagggctggcaccaccgctgcatcggcctcgacccgtgaacgcctcgtcgccggcgacgagcgcgcaacgggcgcaggatttcgtcgattcgattcgactcgactctcccgcctgattcttttttttttttggtcgtgagttcttcctcttcttgcgagaaaacagagagagagaaaggaggttaggcaattccctgattctaggcggatttgttccgatttggccgttgctctaccgccgacgatgatgaagctgggcaaggcggagtccgcccgcggaaaggtggcgcccgccgggtccggcggccgagcgcgcatgctggtgaccgtgaccgtgctc

SEQ ID NO: 387788 - DNA, 682 bp, Oryza sativa
ccacgcgtccgcggacgcgtgggtgagctggtagtggacacagagagttctgcactctctttcactgaggagagcagaacagaacaagaggaggagaacaaaaaaaaaaaagagaaaaatcctatggcctcttgtgcatcaccaaggctcaaatccctgtgccaccatccactcttcatcatcttgcttgctctctcattgctgcagacaatcacagcagaggatgagctgggggctgatagggttgccttcctccctgggctcccaaggagcccacagatgtctcggtgctcaggctacatcactgtgaacagccagcatggcagggcactcttctactggttctttgaggctcaggcactgccttccaagaagcctctcctgctctggcttaatggaggtcctggttgctcatctgtgggctatggagcagcttctgaattgggtcctctcatggtcaatggaaatggaacaggtttggaattcaacaagtttgcatggaataacgaggccaatttgttgttcttggaatctcctgttggagtcggcttctcctacacaaatacctcgtctgacctagagagcatcgattgaccgtttgtcgctgaagacacctacaatttcttggtgaattgtgtcaagaggtctcctcagtaccaaaaaccatgacttttacatcttt

SEQ ID NO: 387789 - DNA, 546 bp, Oryza sativa
ccacgcgtcggccgcctggcctcctccatcgccatgtccctccgctccctcgccgccaccgacgccttcctccccaagccctccccctcctccgccccattcctcctcctcctctccccgtccaccccgcgcctccgcctccacctccacctccgctccacccgccgcctcccgctcgcgccgctcgccgcgtccgactccttcgaatccgcttcgtcctcctccgccgccgcgctcgacttcgctgagccaggtgccgccgaggagtccgacgtgccggaggagtctgaccaggaagaggaggggtacgcgccggaggccgaggaggaggcggaggcggatgaggaggtggaggaggaagccgtcgaggccttcgcggaagttgcggaggaggccgaggacgtagaggaggtcggcgagtacgtggagccgcccgaggaggccaaggtctacgtcgggaacctaccctacgacatcgacagcgagcgcctcgcccaagctttcgaacaggccgggatcgtcgaggtcttcgaggtcatctacaac

SEQ ID NO: 387790 - DNA, 550 bp, Oryza sativa
cacgcgtccggaagaaatggagatggactttgggaagctagagtttgactttatgggaacatctgtaatatgtagaagtggcagtgctctaattctagctgatttgaagaaggtttctgtttctaaagcacgtgctattattgttttagcatccgatgaaaatgcagaccaaagtgatgcacgggctttacgtgtggtcctgagcctgactggagttaaagagggtttaaggggacatgttgttgtagagatgagtgaccttgacatcgagcctttggtgttactggttggaggtgaactaattgaaacagttgttgcccatgatgtgattggacgtttgatgatacaatgtgcactccaaccaggcctggcacagatatgggaggatattttggggtttgaaaacgcagagttctacattaaaagatggccagaattagatggcatgcgatttggggatgtcttaatctcaatttctggacgcttgtccatgtggagtaaagattgcttcaaaagctggaaaaaatttaatggattctgtatatgatat

SEQ ID NO: 387791 - DNA, 740 bp, Oryza sativa
ccacgcgtccgcccacgcgtccgggctttcatagagaaagaaatgggttgcccaattgaagttgtgtacaaggaatttgacaatcgtccgatagctgctgccagtcttggtcaggtacatcgtgcagtgcttcacaatggagagagagttgcagttaaagtgcagcgaccagggctcagaaaactttttgacattgacctaaggaatctaaaactagtagctgagtattttcagagcagtgaggcatttggtggtccttcaagggattggattggtatttatgaggaatgttccaaaattttgtatgaagaaattgattacatcaatgaaggaaagaatgctgacagatttcgccgagatttcagaaatataaagtgggtccgtgtgccacttatcatgtgggactacacaactgaaaaggtgttaaccctcgagtatgttcctggtattaagataaacaacttgactttgttggataatcggggatatagtcgttccctgattgcatctcgttcaatagaatcttatcttattcagatactgaagaccggtttcttccatgctgatccgcatcctggaaaccttgctatagacacggatggctctcttatatattatgattttggaatgatgggtgaaataaaatcattcactcgggagagattactttccttgttttatgctgtgtacgagaaggatgcaataaggttatgaaagctctaattgacctagaagcctcc

SEQ ID NO: 387792 - DNA, 467 bp, Oryza sativa
tttatcaacttcgacggaggggatgtcgtgtttttgaggacttggggcccctatctactttgccaacgataagttccataaaagacaggtgggcgtgaatatgagcttaatctcccaaattcaaaccgtggacctgatgtcggaagagtgtactttgtgatcctcgagatgtcccctggtacatacatcgattcaagggctggtcaggctctcaaggacttgtatcaagaatacagggatcgccatatccagattgcaatagcgaacccaaaccggcaggtacacctgctgctttcgagatccggcatcatagacatgattggtactgggtggtgcttcgtgcgagtgctcgacgctgtgcaagtatgcctccagaaggtgcagagctcatcatcaagtcccataaagctgtcgccacagtcatctagggacctaattgactccgttaccactccaaagggttcaac

SEQ ID NO: 387793 - DNA, 628 bp, Oryza sativa
  unsure (1)..(628): unsure at all n locations
ccacgcgtccggcaaaagctgtgattatgcctccgcttgcaaatgctgtctgacagaaacatatgtcatgcctgtatcaccaagccaagtgaaacaaatgctctctggtctgtggtggttgcagctgctcttgtcgggctcgtaatcttgggacgctggcacaaagacaaactgcaccttaagaatcttaaatggcgatctggctcaacagtgagagggtgaccaacagggctggtgggtgtttttatggtcttcttcgatgcaacctctgatgagtcatcacatgtcatctgaagttgtaactgagacggttggcaatatgattgtgacaatgacgaaaggagtatacctaatgtaataatatgaagtttgacagtggtgcttgtagccttcgtttggttgccttgccagctctgagatgccgaagtttccaccgctacacacaccaccgtaccattgtacacttgctatgctacattttcttttatgttctgaggaatggctgtcaacacgcaattgcatactgcgaaatccatgtaacctcgttgttcttccagaacaaattcagatgcatttgtgctgttcttttaagnnggnnnnnnnnnnnnnnnnnnnnnnnnnnnnnnnn

SEQ ID NO: 387794 - DNA, 491 bp, Oryza sativa
gtttttacggagaagtacttggttttgcatgaaattgttgacacagcgatgaagaaactggaggctgaggttggtcctatatctggagttgcaaatatgggtcgtggaattgtgagccggcttgctgttggtgctgaagttcagaaactttgtgctcgagcaatagaaaccatggagtctctgttttgtggatctccttctaacttgcaatttcaacgggcacggatgataccatcaaacttcgtaaagtttgaagctataacccaaacatctgtcactgtagttttggatttgggtcctataccttgctcaagatgtaacatgctttaatgtatggcacagagtggcagccacaggctcgttctcatcatggccacctggcatcacacgtgcaccatcaaaaacgttagtggtcactcaacttgtgccagctacaagctatatattcaaggtagttgccttcagtaactacaagggagtttggatcgtgg

SEQ ID NO: 387795 - DNA, 749 bp, Oryza sativa
tttccacttcgtccggattagatcatgatgaggctctggatgatcctgctctagagaaacttcgtcaacaaaggcttgtggtagaagctgactttaagtcaactacggaactttttggaaagaaggacggcagtgaaaagtccctagataccttcatcccaaagtctgagagtgactttgcggaatatgcagagcttattgcaaacaaactgcgtccctatgagaaaagcttccactatatgggtctacccaagaatgtcatgagcctttccatggcatcattgaaaggtgcggatccgaaagatatatcgtcctccattgcagcaattgctaatgaaaagatcaaggctgagaaagaagctgcagcaggcaaaaaaaaacaaggggcaaaaaagaagcagctacacattgagaataaagacgatgatttcatccctggaaagggtaattttgatgatccggatgagtacgatttcatgtgatcggctgtgagggaaccgtcatcttctatgtataccttggcaagcagagattagagtttgcggcatagttggtattttcattcagaggcccctgaacccttgaaacgattgcatgggaacaatgcccatttgttcgacgttgattctgactctcacagaatagagaagagcacctgtgtgctcgagcttcacacataggccgtatttattattcttaatccacatttggtttttggtctggtcatgggttgggatctatattttttt

SEQ ID NO: 387796 - DNA, 635 bp, Oryza sativa
  unsure (1)..(635): unsure at all n locations
cggacgtgncntnctcttctctctctccataaacctcaccattggtgttcttttaatcggtgagaaagcaagtgctccaagaattgcaaaggggagaggagagatgagagagtgaagaacaactacataactaaagcatctctctctctctcctctctctctctctagaacacaagaacaatttagcgattactagctagtgttcatcaaaactgaacttggacaagaaatttacctaaagttagtattccacgatgagctttcttgagcaggcaaccgagcggaaggcaccaccgccggcgaggctcggctccatcaccaagctgacggcggcatcgtcgtccttcgccaacctcttctccaccttcctcgggccagtgagctcccccgagccgaggccgaggcgcagcttcgacggcggcgccaccggcgtcgggcttggcatcgtcgcggccatgagccacgcctgcctgacgaccgaggccgagccgatcgccaatcggcgcggcggctcggcgccgcacgagagaggaggccgagctctctgagagctacacgtgcgtcatcacgcacgtcgccggcgtcgatggcgccagcggcagcgtgaggaagcgggtgtactttgggttcggcga

SEQ ID NO: 387797 - DNA, 1393 bp, Oryza sativa
  unsure (1)..(1393): unsure at all n locations
caccatccagccgttgaagaagcaaccaatggctggattaaggtcatagcgcttccaatcctcctcctccttcctccgctcgccgtcttctcgacgacgacccgcggccaccgccggccgccctcctcgccgccgccgccgccgccgtctccgcagaatctgatcgatggcgccgtcgtcgacgtcgtcggagggtgcctccgacgagtggttgccacccagccggcggccggagctggcggacgtggtccccgtgacgcaggacgacgggccccaccccgtggtggccatcgcctaccgggacgagttccgcgaggtcatggactacttccgcgccctctacttcgccggcgagcgcagcgtccgcgccctgcacctcaccgccgaggtcatcgaccttaatcccggcaactacacggtgtggcattttaggcgtcttgttctagaggcactggatgctgatctgcgtgaggaaatggattttgtggaccgacttgctgaatgtaacccaaaaaattatcaaatctggcatcacaagagatggctagcggagaaattaggaccagatattgcaaataaagagcacgaatttacaaggaagatactttctatggatgctaaaaattaccatgcttggtctcataggcagtgggttcttcaagcactgggtggatgggagactgaactacagtattgcaaccagctgcttgaggaagacgtcttcaataattcagcttggaatcagagataccttgtaataacaagttcaccacttcttggaggccttgcagcaatgcgtgactcggaagtggattacacagttggggctattctggctaaccctcagaatgaaagcccctggagatacctcaaaggcctgtacaagggtgaaaataacttgctgatggctgatgagcgcatctctgatgtttgtctcaaggtcctgaaacatgattcgacctgcgtatttgctttgagcttgctgctcgatcttcttcaaattggtttacaaccttcagatgaactcaaaggaactatcgaagcaataaagaactctgatcctgaagcagatgaagcagtagatgctgatcttgcgactgcaatctgctcaatattgcagagatgtgatcccctgcggataaattactggtcctggtacaggaccactatttcttctcaaacctgaagcatgcagtggcctccatgaggtcataatggagatatcttctatcttcgtgtgattctgggcgttgaggtgcctagctacatttgttatgaactttccttgggcataactgatcactgatattactccaatattgtgttcttgtgcatcgtatgttattccagatattatattgggttgcnnnnnnnnnnnnnnnnnnnnnnnnnn

SEQ ID NO: 387798 - DNA, 420 bp, Oryza sativa
cccggcccgacgccacgcgtccgagagcatcgatgcttatgttgaggttgaagttgattaatattattgtgccccgcaattcgggggttgtggtgaatcagtctggtcttctaccggagacactgattgatataacaccaaaagatccactccctacaccttcagttggtcctcttgacccagactgttccaaagaaggtttaattctctgtgacaaagagaggatgaaaggacaacaaggagtaagcttagacgcactggttggaatatttactcgtctaggaagagatatggtggaaattggtgttcacaaaagctacaagttggctgaaaaagtagcatcaataatggaagaagcgctgcctcttcttttcacggattgaagcattagctgaagaaattcaaccgttgctttctgag

SEQ ID NO: 387799 - DNA, 492 bp, Oryza sativa
cagatgatgctgcatctactaaagaggcaggtgcagtagaacatgatgaatctgattgtgacacagaacaacagggagggaataatacaggtcttggaaataacctggaaaactgttctgattcatcaaggcctgagactatccctgttcctattccaggaagtgagtttcactcagatgacaataatctggaggctaaatctctaccaaatctccgctctcacatacatgatcttgaaaggtctgacagttttcagctaagccgctcactacagtcgaacggtgaaaataatggggttgagccagtcaagagtacaacttctgacttgccaattcaggaaccagaagatactggtgattcaaaagaaaattttgtcccaccggagcctactaacagcgcaattagctgataacctgaaaatagatccattccaatcctgtgtggaattatccctatgcaggcacctgttatcagaaggcatgggagaagat

SEQ ID NO: 387800 - DNA, 328 bp, Oryza sativa
cggccgtcgcgctgtcggcgatcggggcccgcgcccagcggcgccagcgccgcgttcgccgagtcggacgtgaagcgcgggacgcccgaggcgaagaagaagtacgcgcagatctgcgtcaccatgcccaccgccaaggtctgccacaactgagctgtggttagagggaagaggggctatggatgcagtaaatacatgtacggttttttaatctcctgtctattaaaaattcgagctctgattagactgtcgccatggatggcatcgaaatcaagttgttgtaatatgatgatcattgcgaattcgaggtgaaaccgtacgttctctt

SEQ ID NO: 387801 - DNA, 426 bp, Oryza sativa
ccacgcgtccgcccacgcgtccgtgacatacacctcacacacactccccttcttgttggtttctcccccaattcgagccgaggttgagctgagctgagctctcgcagagacagggcgatgaacatcttgaaccagccgatcaaccctggcggccacccggcgttcccggcggcaagggagaccggccagctgatgccggcgtcagtccgcttcgacggcctgtcgacgcagcagagcacggccgccgccgtggggcgggcgcacgccgggcagtccccgcggtggcaggcgcagacgctgcgccggccaagcagctacgtcggcgtcgagcacgacgagccggcggacgccgccggcgccgtcgcgctggcgccgttccagccgctgacgctcgacttcctgcggtcgctcctggacaggaacgct

SEQ ID NO: 387802 - DNA, 780 bp, Oryza sativa
  unsure (1)..(780): unsure at all n locations
ccacgcgtccggatttattggagtatgctgctgagaacaatacctctttaactcgtatccgcccgcgcgtccgggttgtccctcttggtaacggtgatattgatgtatcaatgctcaaggatgccgtggagttgataaatggtagatttgagactgaggcatctggaaatgtgactattgacacagtgaagaaaattggagaaacgggggttacctatatttcaagtggagcattaacacattctgtaaaggcacttgatatatctcttaagatagacactgaactcgctctccaagttggaaggcgcacaaatcgcgcctgactctacagaactaatgtaaccttgcaagatctgcagggtgtttctgtggcgtggcttgccagtctatcaatccatgcccttctcatcaacttgtaagcgttgagtgtacaacaaagaatgtgttttcccatatttatgggatataaaccaacgccagcataatacagcaaaataataacattaccttgtaggcttgcctaccgtcctagcatttgtatttggtagaaaaaaaactgcagattgcggcaagttatcgaattttactcaggtattaataagactttttgcaccatgaaaaattagcaagctggacactgtaaatgggatgtgcgcggcattgaacttgcagttctgcacttgtgtttgaccaaacaaacactataaaatggtgatgtttgtgatctacaaaagaaaaggaagtctaacacagcagtgcattctttttcaaaaaaaaaan

SEQ ID NO: 387803 - DNA, 1494 bp, Oryza sativa
ccacgcgtccgcccacgcgtccgatcttcatctcgaacaccatggcgcacctttaccccgtcttcgcgccctcctccagacgcgctcctctccccaaaggcgctcttcatctgggccatgctgccgttccagctcgggctcaactccatcaagacgctgacgctcctcgcgccgctcagcatcttcgccgatgtggttgacctcggcgccatgggcgtcgttctcggggaggacgtgtccgtctggctcgccaaaccaccacccgtcttcgccttcggcggcctgagcgcgatcctgttcggcatcggcgtgtccgtgtacgccttcgagggaatcggcatggtccttccgcttgaggcggaggccgccaacaagaagaagttcgggaccacgctcgggctatccatggggttcatcgccgtcatgtacggcctgttcggcgccatggggtacatcgctttcggcgacgccacgcgcgacatcatcaccaccaacctcgggaccgggtggctctcggccgccgtgcagctcgggctgtgcatcaacctcttcttcaccatgccggtgatgatgcaccccgtgtacgaggtcgccgagcggctgctccacggcaaacgctactgctggtggctgcggtggctgctcgtcctggccgtcggcctctcggccatgtacgtgcccaacttcaccgacttcctggcgctcgtcgggagcagcgtctgcgtcctgctcggcttcgtgctgccggcctcgttccacctcaaggtgttcggcgccgagatgtcctggtccggggtgctcagcgacgtcctgctcgtcctgctcggcctctcgctcgccgtcttcggcacctacacgtccctgctgcagatcttccattcctccagcgcttaatctctggagaatctttacggatagctgcgccgatgattgatttgctcatttgcttcgcgcgcgggtgtcagcctgtcaggtacgctggttgcattcttcgtgtacagagaaggtgatcggtcgatcagaggggcaatgcccaattcagcttgctgttgatttgggcatggacagcgtgcatcggccgcattctttcgattacaaagtcaagatgggttttgtacaacgttagcgtggatggcattgaggaaatctgtatggttttgcaacgacagattcccatagctactcgtgtcagttaatatttatgtgtatgtcttggatgtttcagctgctgcattgcacggtggaatcgatgaaaggacatagtaagtttcagtctaagtttaagcctatttagttgataaataaagtgtctagttgaggttgcagcttgtgtgcggtactgcgggttgtgtcaattaggaaggcaagcaatcgggacgacttggcaaagtatacattctattctgttcattctgttttgtcccaagcaagtaaacttgtaatgccccaactaccaatcgaaatatcgaatcttctttcaaaaaaaaaaaaaaa

SEQ ID NO: 387804 - DNA, 616 bp, Oryza sativa
tccgtccacaatcaaaccacttccatctctcaattctcaagcacacacacaatccaacaagcttctcgaagaattctcgatcgaggtggagtggtggtgtatgcgcgatggggctggatgtgggggaaatcggcgtcggcgcggcggacctgagcctggatctcaagatgttcgccgccaagagcttcggccgcgtcaggggcaaggacaccaccaccaccgccatgggtgactgcatccggaggctcgaggaggagatgggcaagatcgaggtcttccgccgcgagctccccctctgcgtccgcctcctcgccgacgtgattgatgtgatgaaggaggaggtggagaagaagggtggtgatcgtaaggaggatgaggaggacgccgccggcgacaagagcaactggatgagcaccgcgcagctctggactgggaattccggcggcccagacgccgccgccgctgatccagagaagcaggtcaaggtgaggatctcgtcggaggcgaagtccaacggcggcgcgtttgtgggctctggcgcgccggctttcgcgcggccgaagcagagcttgatgaggaaggaggacatggcgtacgacgtcaggatgccggatct

SEQ ID NO: 387805 - DNA, 901 bp, Oryza sativa
ccacgcgtccgcccacgcgtccgctttcatgccaagcacacacaccatctgcatcttctcttctaccattcttgctttctccttgtagcctcttccttctggtcttccagagaagagaaacatatctgtgcaagctttgccttcttccatggcagtggctatagaggctccgttccatgtcctggctgtggatgatagccttcctgacaggaagctcatcgagaggctactcaagacctcttctttccaagtaaccactgttgattccgggagcaaggctctggagttcttggggctccatgatcatgaggacagcccaatttctactcaatcagatcagcaggaggttggagtgaacctgatcatcacagactactgcatgcctggcatgacaggatatgatcttctcaagaagatcaaggaatcgtcttatttaagggacatcccagttgtgatcatgtcatcggataacattccttcaaggatcaatagatgcctggaggaaggagctgatgaatttttcctcaaaccagttcggctctccgacatgagcaagctgaagccccacatactgaaaagcagatgcaaggagcactaccagcaggaacaacacctgcaaagcaacagcgaaagcaacaacagcagtaaccccacaagcgagaacagcagcagcagcactagcaccaacagccacaagagaaaggcagtcgatgaagaaattttgccccacacaataagaccaaggcatagttgatttagcatctgactggtcatttgacactgatttttttttcttgcttctgtctgatcggtttttgacatactggattcgtaaaagggatactaacatctaggttacaaaatagaatggaatccgttaacggttactgttggattccga

SEQ ID NO: 387806 - DNA, 1086 bp, Oryza sativa
cccacgcgtccggatctaccatattatttcgaccatctattacaatacaagcatcttatgatatttggatgaacatgccaaagtcagatgtgcagataatttagtaaaaacatagagcacataataggagaacatctttgtatgcatatagagaaaaaaggtagtggaaaccttatcaattgtgaaaaataatcaaatatagaaccaagctggtttaggctaaacttgatatggagatctctccgaatccctaattgatttggagtcacatgtagtataattaaggaacaagccccacagctcacgtcgtcttaatattctatctcgacagttttggtgtaaaatcaataatgaagatatggagtgatacgcaaatcaatcttgtcgatcttccatgatgtggtgtctaataaaatggtctttagttgcagacaactaactagcaccacatgtctttgtcacaatatattctattatacatgcacaacaaatggagcaacaagagggcactctaaaagtaaagtaaaaaaaaatcctccagatatcataagatatgaataaaaaaagaaatttgtaatggatagtacatggagaataattctgtgttcaatttctggattgcatatcatggtttttgatcttagaataaactctgatacagttatgattttggtatctgaatcagatgcctggaggaaggagctgatgaatttttcctcaaaccagttcggctctccgacatgagcaagctgaagccccacatactgaaaagcagatgcaaggagccctaccagcaggaacaacacctgcaaagcaacagcgaaagcaacaacagcagtaaccccacaagcgagaacagcagcagcagcactagcaccaacagccacaagagaaaggcagtcgatgaagaaattttgccccacccaataagaccaaggcatagttgatttagcatctgactggtcatttgacactgatttttttttcttgcttctgtctgatcggtttttgacatactgatttgtaaaagggatactaacatctagtttacaaaatagaatggaatccgttaacggatactgcttg

SEQ ID NO: 387807 - DNA, 569 bp, Oryza sativa
cctcgcgcccgggcgccggcgccggcggcggcggcggcggggcggtgaagacgccctccgacttcctcaagcccatcagggggcgccccgtcgtcgtcaagctcaactccggcgtcgactaccgcggtattttggcttgtcttgatggttacatgaacattgcaatggagcaaacggaagaatatgtcaatggtcagctgaagaacaagtacggtgacgctttcatacgaggaaacaatgttttatacatcagcacatcaaagcgtaccctcactgatggtgcatgagaaggtgagacagcatgcagttcaatgcctgccactatcgcaactttgatttcctctgtgatcaatctctaaagaaatactgccttacaatatcgtagttgctacatggaaagagatgttttctggaatggaggattatcaccagatatttgtaccccaaaaaaaacttatgttcgattttagtagattctacagattgtggtctgctgcactcttgatgtatgtggtgattattggaccgtcagggatatggataagatttataaaaaaaaaaaaaaaaaa

SEQ ID NO: 387808 - DNA, 505 bp, Oryza sativa
ccacgcgtccgcaactctacacgcacgcggcgacagcgagagagatgagcaccggcggcggcgcggacaagtccggcggcggcggcggaggggcggtgaagacgccctcggacttcctcaagtcgatcaggggacgccccgtcgtcgtcaagctcaactccggcgtcgactaccgaggtattttggcttgcctggatgggtatatgaacattgcaatggagcaaacggaagagtatgtgaatggccaactcaagaacaagtatggtgatgccttcataagaggcaacaatgttctatacatcagcacttcgaagaggacccttacggatgacgcatagatcgagtgggacagagtcgactctttttaaacttcaaaatcgtttaagcttgattggttgtgatctctctctgacccatgctcgtacccctgctgtttgaggtggggaaaatgtattgcatatttgctagacttatcaagaaacttctttaatgtaactgtatcagc

SEQ ID NO: 387809 - DNA, 472 bp, Oryza sativa
ccacgcgcgcgtactgtcagaataaaacgcggcgcagcacacaccccagctcctcctccggcgacgagaaaaaaaaatggacgcgcagtacaacccgcgaacggtggaggaggtcttccgcgacttcaagggccgccgcgccggcctcgtccgcgcgctcaccgcagatgtggaggatttcttccggcaatgcgacccggaaaaggaaaacttgtgcctttatgggtttcccaatgagcattgggaagtaaatttgcccgcagaagaggtgccacctgagctcccagagccagcattgggcattaactttgcacgagatgggatgcaggaaaaagattggctgtccatggttgcagtgcacagtgatgcatggttactttctgttgcattttactttggtgctcggttcggatttgataaaaatgacaggaagcgcctgtttggtatgaataaatgatcttcccacgatttt

SEQ ID NO: 387810 - DNA, 616 bp, Oryza sativa
gttcgacccacgcgccacgcgtcggcaccatgtcgagcggcggcggcgcggcggcggtggtggacccggaggcggcgacggagctggtgcggaagggcgccacgctcctcctcctcgacgtgccccagcgcaccctcctcggcgtcgacacccaggtgttctccgtcgggcccaagttcaaggggatcaagatggtgcctccggggccgcatttcctctactactgctcccccaacaggcacgcaaatgagttcgcacctactgtcggattctttcttactactcacccatctgaggtgattgttcggaagtggcatgcacaggaggagagattaataaaactaccagaagaggaggaatcagatattctgaagcagtaagacatttcgagtttgacagtcagcttggaccatataatttggattcatttggagattggaaacaactctcaagctacttgtcacaaagtgtcattgaacgtcttgagccaattggtggagaaattacaattgcatgggagtcatcatggatggataaagctccgcaaacagacatggagagacgtttaatggaccaactaaaagatggaaaatttgcaaaagaatgctcctgtgca

SEQ ID NO: 387811 - DNA, 422 bp, Oryza sativa
tctgggttggtcccttttacagagcagcccttttttgaattctaaagttattgttctggtgtcagtgactccgtaacatggaagctgcggatgatagtgatgttaattcaacttggagctaatcgtaatcaccttagtgtcaggtagatagttgtttccgtgccattttaagtccacctttagaaggtgaaatatgttttatgcagtctagataactggatggaggtggctgttgcagcggcaaacttcgtttctttttggtggattctgatccaaatcctgggcccggctgtatattttcgatgcgaggtccatgctttctagaatcaggaggataaagtgtaaccctgtaattgcttcaactacaacttggtgaatgcaaaagtgcttatttgcattttgtaatgcgcagtttgtttgtc

SEQ ID NO: 387812 - DNA, 570 bp, Oryza sativa
ccacgcgtccggtgacccaagaattattgctgtagcggctgcacaacgtcgtcttcttgaaactgagtatgatgaatatgctggtactgatgctagtggtgctgcattctgccgttctgctgcacttatactaatggccttgttgctattgaggcatgctttgtctatctcagacaatgaaggagatgatgatgcttctaccatgttctcgctctttctacttcgagctgctggatttctgctgccatgctatatcatggcttggatattcagtattttgcatcgccggcgacaaagacaggaagcggctgcaattgctgcagcagaggtggcattcatcctgcaatcagcccaaggccatgcccttcagttcaccatcgctccagactcccccgccactccgcagcatgagccacggcagcagcagccgcagccgcagccgcaggaatagctagttacttcagtagcgtctctcaactactgactcgcacatgcagaagaagaggatacctcagctagtggccgctttgttgtttcctgctgcaactggcccagggacgctaagaacct

SEQ ID NO: 387813 - DNA, 702 bp, Oryza sativa
  unsure (1)..(702): unsure at all n locations
ccacgcgtccgcggacgcgtgggtttatctgaagacatctttgttttgaataggattatatcccanaaagcctgggcagcgtggcaggattcgactctcctccgtcgcctgaacacagctatgatctccagctcccaggtgatgaggagtttgccaaggagccacctatactgccacctcagcttgtaatgtctgttcttggtgatactgataactctgaagaacaaactctgaagccaaagcatgttgtcctcaaccacctgtatatcgagaaaggatggggatcgcagtcgctgcttgctcttggagtcactcaccggtttcaatccaagtatgtaagcttcgtgctgtacaagccgctgcgaaggtcatccacggcgaagcgaacaaagaatggtggttaaactcatggtaactgacaatgtacataagtgaaatgcaggaggtcttgttgtttgatgctgatcaaagcaatcaactttttttttaatttctctctttgtttctttaataagctgttgttgtagcatgatgttttagaagcctgaactctatgagaaaatgagtcaagagagggatgaaaaaaaaagagaatatccctctatgcttacctaatgtcagtgtgcaaatttgtgtggtctgagagtaatggtgcatggaaatttgaaaaagcctgtgaatttatgcaaaaaaaaaaaaaaa

SEQ ID NO: 387814 - DNA, 818 bp, Oryza sativa
  unsure (1)..(818): unsure at all n locations
ggcacgaggagacactactgctacctgcagatgaagaaagagacaagcttgcggatcctatgtataagcttgaacaccaggaagaggatcttaaaaagaagaaagaagctgaaccagttttagttcgccttcaacgactctccgatagccggcattctgatgactacgctcttaacagagcccttcgtgatcgtcttaggagccaaaagaagagagttgctgaagagaaaagatcagctagaaagatgggacttggagtacggcttttaccaccctctgcagaagatgccactgcagcggcttctgtgaagtttgcatcaaaatttgagaagagcagaagggacaaaagagcagcaattaaggctgcttccatcttcccggagtcatcaagctcaacttcaaagaacaagctggatcttgcactgaagaggcgaaatataaaagctggtgctgcctcagcgctgatggcgagcagggtgaagccgtcgtcatggcagagcgccggttctggaagttcaaggactcagatgccgatcatggcaacacgtaagtagccaccccaagaagaaaggcatttttcttcttctggaagaagaaataccatctgcttagtgcgccatcagaagttaaaaccagcttgtttcggttgtttctttgctccagtttctgtacgagtatgtgtaatgtgtagtgtataacttgaaatctttttggctgtatgcattccggtgtccagctcatgctagtcggtttgttacattatcttgtacactaagaatttagtaatctttgtatataaaaaaaaaaaaaaannnnnn

SEQ ID NO: 387815 - DNA, 364 bp, Oryza sativa
  unsure (1)..(364): unsure at all n locations
attccgggtcgaccacgcgtccgggatcttaaaaagaagaaagaagctgaaccaggcttagttcgcctgcgacgactctccgatagccggcattctgatgactgcgctcttaacagagcccttcgtgatcgtcttagggtcatccaatgaaatcctttatcatattttttttccgaaatagctatttaaaagtgtcatgattcttatccacttgtcctatttgtgtagagccaaaagaagagagttgctgaagagaaaagatcagctagaaagatgggacttggagtacggcttttaccaccctctgcagaagatgccactgcagcggcttctgtgaagtttgcatcanaatttgagaagagca

SEQ ID NO: 387816 - DNA, 963 bp, Oryza sativa
  unsure (1)..(963): unsure at all n locations
agcggntattgggcttgggcaggtacaagtaccagaatctgggcatacaaaaggtgaggaacaacaacaaagttttgcagaagatgttagtgtggaatccgttgcaacagctggagcaaacaaacacatgagtgaggatgatacaaagattccattttcgaatccgtcagcatccataacagaaggtactcaactatctagagaccctgatctaccagctgggcagcctttgcaacctggcatgtcatcatctggtgttggtgttatcggccggagagtggtatctgatcttggtgcaattggtgataacctcagtgtagcttctgcaagtactagtcatgatctgctttataatctgcaaatgcttgaagctgctttccataggcttcccacaaccaaaggactcggagcgagtcaaaaattatattccgaaagcaccctgcagtcaccctgccagcttcccgcaaattcaggcncctgtagtatcaaatcctgccttttgggaaagaatgggtggcgattcattatctacggatttgttgttctttgctttctactatccagcaaaacacataccagcaatttttaagtgccagagaactaaagaagcaatcgtggagatttcacagaaagtacaatacttggttccaacggcacgtggagccacaagttacaactgatgagtatgagcggggatcttatgtgtactttgatttccatgtcatagatgacggcacaggatcaggatggtgtcagagaatcaagaacgacttcacatttgagtacaacttccttgaggatgagctgtcagtacagacaaattagagagccaggatattagggctaatcaaatcattttcaccattgtgaatcttgtaacttttagaacggaactgctggaatctggaacacttacagattaactttgtggttggatttnnnnnnnnnnnnnnnnnnnnnnnn

SEQ ID NO: 387817 - DNA, 826 bp, Oryza sativa
  unsure (1)..(826): unsure at all n locations
ccacgcgtccgcggacgcgtgggacctttggcagcttagcttaccctatcttacacggcagaggcaggggtttgtttgattggttgatcgatcgattgacgagatgagcagcagctcgtacgggacgtcgtgggcggaccagtgggactacggcagcgacccgccgccgccgtcgtcgtcgtcggggaagaggagcggcggcggaggaggaggaggagggaagaagggtatggagaagacgaaggcggcggcggcgagcgggctgaggaaggtgaaggaggggacggcgcatgggttccagtggatcaaggacaagtaccagcagaagaagtccggtggcaagaagcacggcgaccagcagagctcggagatcgccggctactgatcgttgataccacatcatatcgttgatgatgatttgaggtgttcttgcgtgtagataggtcgatcgggggtcattctttggaccgatcgatatatggacgttaatttgttcgtctttgtgtgttatttgtatataggagatgagatttactccggtccaacaaaaagtaactcgaggtaccgatacctcacggtaccaaattgtttccgatcgttggatctagctgggtgggttgggcatcgttagatccaacgatcggaaatgattttgtaccgcgaggtaccgatacctcgagatactttttgttggaccgaagaaaaactcatataggagatgggtgctcttgttcgtagtttgtttgattctgttattttttttctcttgtagatataaaagagattgggatttgtttcnnnnnnnnnnnnnnnnnnnnnnnnnnnn

SEQ ID NO: 387818 - DNA, 1158 bp, Oryza sativa
  unsure (1)..(1158): unsure at all n locations
cgccgccgtnggtgctgcccggggcttgacggcgtcgctcctcagttcctgcctccgccgactgtttcttcttctttgagagcaagctggtaaagcaaagtagtatacgatctccagtccaaacatccattcgtgtgagcagtcaaacagttaatccttaagtatggtttctgtatacgaagaagcacgggaaaggtggacttggaaaaatcaagtaacagaagaagggccttatggctttaaaattctctcccaaataagacgccaggaccatgactgctgtaccttctctgctatggcttcaactctcgaggccaatgtaagagttcagcatggaaggaacgatcaattttccatacctcacctgcaatttatagatgctcaatcaaaaatcagtgcaccaaataccaatgagacaaaggtactgaggcttttgaaaagtctaaaagagagagacggtggggtttacttggatgaagactatgatagtgaggggaatctccgagccttagatgctaaagtttgcagggtatggaagttcaatctctaccatgtgaaggacattattcatcttcgaagtgctcttcatccgntgcgcaggcaaggccctttactggctgttatccgcatcagccgtaattatgatgagtnccgcaagtcaggccatgtctacaaatatgatcctgcccgaatctgcacatatgatgcggggaaacccaagacgcacgcgttgtgtgttgtttcgtttgtaactgagaagggtacaccatgccttgagtgtcaggactctcacggcacagcttggggtattggcggttacttaactgtggaaatcaggtcactaaaagagctatacagtgttagagttacgtagctggtggctgtcaagtcaatgcaactcaagactctacgtatgcactcattttctatcattttaatacttcctgcttacagtacgtggccaatgcaaagatttcatggctcagaagaaagggatctttggaattaatactttgtatttaagtgataatggcctgttgcttctcttgaccttttgtcccttttttggatgtgagagttatggaagttagatttggggaacagaagattttgtgattctatcaaagcgagatcatttctttaaaaaaaaaaaaaaaa

SEQ ID NO: 387819 - DNA, 260 bp, Oryza sativa
cgtccgaattcccggtcgccccgcgtccggtggtgcctagcccccggccgccgccgccgtggtgctgcccggggcttgacggcgtcgctcctcagttcctgcctccgccgactgtttcttcttctttgagagcaagctggtaaagcaaagtagtatacgatctccagtccaaacatccattcgtgtgagcagtcaaacagttaaggggggggggtgggttccggattccaaagaagcaccggaaaggtggacttggaaaa

SEQ ID NO: 387820 - DNA, 977 bp, Oryza sativa
  unsure (1)..(977): unsure at all n locations
gcgaaggaggccgccgccgccgcagagaaggaagagagggagagatcgccggatcgccgcccgccgccgccacgatgtcgtcgatgctgtccgcgttctcgcagtggttcgtgaacccgcgncgcaacccgctcgcccgcntncacatgaacgtcgtcgcctcccacctccacaaatacgggctccggtacgatgatctgttcgatgcctaccagtaccatggcctcgacatcaaggaggccctggcgcggctgccgcgggaggtggtggacgcccacaaccagcggctcaagcgcaccatggacctctccacgaagcaccagtacctccccgccgatgagcaggtgaagaagatttcgcatccttgatgtttttggttcaatccccacatttcgtatgtatgtgcgcgacctgtggaagtagtagaattgttttttttttccatttgagttgtgaatatggatatgagtatggtcaattatgcttgctccgtgactcggtgacctaggaattagaaggattgctacttgagagacaattagtggatagaatgggcggtggacaatcaatttgatgcttgtgatagggaatgaaactgttactaaatgatgctatggcactgttagttttgtcctcatgctgatacatttgctcgtgtctccttgttaggtctattttgtcgagatcgtttggtcaatttgcttcaattgacctattatccgttgtagtttccgggatgtacttgatttctttgttcctatcctgtgtccagaatatagtgagcttcccatttgaagctataagacctgtaatcctatctnactataaagttttcaccactaacttcttaagcttaacatgtaaagatgccacatcatcatcactaacaagatgncacatcatcatccactaattaacaagataccacgtcaagcattcactaacaatcacacatttaaacatcatgccagcatgcc

SEQ ID NO: 387821 - DNA, 800 bp, Oryza sativa
agcgaggacggaaggaggccgccgccgccgcagagaaggaagagagggagagatcgccggatcgccgcccgccgccgccacgatgtcgtcgatgctgtccgcgttctcgcagtggttcgtgaacccgcgccgcaacccgctcgcccgcctccacatgcaggcgatctcctcgcgcctccggaaatacggcctgaggtacgacgatctgtacgacccgaagcatgatctggacatcaaggaggcgctcgagaggcttcccagggaggtggtcgacgcccgccaccagcgcctcaagcgcgccatggacctctccatgaagcaccagtacctctccgaaaacgaccaggcgcaacagacaccattcagaggctatttgagtgacatgatggatctggtgaagaaggagagattagagcgtgaagaactgggagcccttccccttcaccagaggacccttccctgaagtcttatcttgataggccctgctgttttttcccaccacaatgcatcaaataaaatgcagtggatgactcatgatactgtctctcattttgaagttccattttcatatatattcgtgtgtgatgcattggtcgtcactgattacttcgcatccttttcaaatatgttaatttaacagcaacaatttttcttttacatcattgtcgtaaattcttcatgtattgtgcttcacatgagaagaatgtctgttgtttgctcaaaaaaaaacaaaaagcaaaaaaaaaaaaaaaaaaaaaaaaaaataaaaaaaaaaaaaaaaatcatcccctcccgctttt

SEQ ID NO: 387822 - DNA, 730 bp, Oryza sativa
  unsure (1)..(730): unsure at all n locations
ccacgcgtccgcccacgcgtccggagagagagagagagagcgtggaagcttctggaaggttctcgaagatgctgtcctccctgtcggcgtggctggtgaacccgcggcggaacccgctggcccgcctccacatgaacgccgtcgcctcccgcctccgcaaatacgggctccggtacgacgacctgtacgacccctaccacgacctcgacatcaaggaggccctggcgcggctgccgcgggaggtggtggacgcccgcaaccagcgcctcaagcgcgccatggacctctccatgaagcaccagtacctccccgccgatgcccaggcgaagcagacaccgttcagaggctatttatctgatatgctagcactggtgaaaaaggagagcgcagagcgcgaagcattgggagcactccccctgtaccagaggaccatcccatgaagcgtctacttcgtaggcctgtttctaattttcttgatgtatgaaagtgaattcaataaaacgcagtggacgattatgtaccatgtattatgctaaaatccttgttgtgtaatgtgttatgtgtatgcttattatgtgaagatacccaccgtcagttctccatagataccttttggtatgacaactgacatatggtgtatgttttgtaatcaatttaaaactctatatagcttcacttggagctgagtaggtaagaaagttttcattgtcgnacaaaaaaaaaaaaaaaa

SEQ ID NO: 387823 - DNA, 657 bp, Oryza sativa
ccacgcgtccgcccacgcgtccgctccgtgcccaagcttctcccgcggctgcagcggtggcatcggcgctcctgcaggcagatccggcggaggtggcggcgacggtgtttccagtgggtgtatctagcggtcctctaccccctccttctctgccgcaagcttctctcgcagatcaggcggcggcggcggcttctaccttcgatccattggcgacggcgatgtcagcgagcaggcggatctggccgaggggacctgcccgccgccgccgacgtcccctcgggcggatctgctggtgttgttgattagcttctggaaggttctcaaagatgttgtcctgcctgtcggcatggctggtgaacctgcgacgcaacccgctggcccgtctccacatgaacgtcgtcgcctcccacctgcacaaatacgggctccggtacgatgatctgttcgatgcctaccagtaccatggcctcgacatcaaggaggccctggcgcggctgccgcgggaggtggtggactcccacaaccagcggcgcaagcgcaccatggacctctccactaagcaccagtagctccccggcgatgagcaggcgatgcagacaacattaagaggctatttatctgatgcctacctatccagccaccgtggttggcgagaac

SEQ ID NO: 387824 - DNA, 809 bp, Oryza sativa
accacgcgtccgtccactcttccgcccacgcgtccgtccactcctccgtgcttctgcgtcgccatggccgcgcgccccggtttgtagcaccacctccacctgccgcccctgccgcccggcgcaggccgctgcttccaagccctccacctcctcgtcccctggtacgggtgtgcccgtgggtgtgccccgcgagcgcgggagctcggtttccaaggcagcgatttcgtggagcgagattggaggccgcggcgaggtgctctctcgtccgccagcgccccatgctgctggcgaccgtggcggtggggagtctggttgctgctggcgctgcaaatgctacagaaatcggtgattctctgttagggtcatctggacttgctttggctgaccttagcattggagattggtttggaaatttgctttattcagcgggtcagcaagccaacgaggctgttcaggatcagctctctgctcttagtctcactagcttggctgtaattttcggtgctggacttgtaactagttcgtctccttgtacactcagtgttctaccattgactctaggatatataggtgcttttggctcgggcaaagatcgatctgaggttgttggaaattcagctgctttttcattaggactggcaacaaccttagccatccttggcgttgctgcttcttttgctggaaaggcctatgggcaggtaggacacggacttccagtggctgcttcagggttagcagttatcatgggattgaaccttcttgaggtaattgagctacaacttccctcatttttcagcgattatgaccct

SEQ ID NO: 387825 - DNA, 655 bp, Oryza sativa
ccacgcgtccgggctcttcaaacgtaacatttgcgactatgttggtgataatctcaataaaggatttgaatcttttatagagaaaagagatttgggttcagaaggatttggtgatcttcttgcatgcataagaaattcaactgtacctcttcagaacatacattttgtgacataccgcaacaatcttaacaagatattggccacggcttatctaagagaaccatggaagatgggtgtgcacaaaagaaatggtgttgtatacctggacgtccataagctccccgaaagaccacaaagtgaggttgaacgccggagatgttattggggatattcttttgaaaatcttgcaactgagaattccattgatgaggatggaagaggtattgatgcaaatgtagagttctgtgctgtaataaaaacgaaattgggtgcacatcgtattatcatgggtgctgagatggactgctgtgacgcaactgatgatggtaggcggttctacgtggagttgaaaacaagcagagagctggagtaccatacagtggaaaaatttgagaaagagaagttgcttcgattctggattcaatcatttattgctggcgttccatatgttgttgtaggatttaggaatgatgcttgtgtccttatacggactgag

SEQ ID NO: 387826 - DNA, 717 bp, Oryza sativa
  unsure (1)..(717): unsure at all n locations
ggaggggaaggggcggccagcggtctgcgatggtgatggccggtggaggcggtgcgccgatgctagccgngtaaggtggagcccagtttgggcaagatgcatgtggccggcggaggtaagcaagttggtgaccggcggaggtggttgttgccggcgaagagggtgtcgaggtggccggagaagttgctggcctgcagggaggttgtgcttgggttggtcgggcggtcgctactatggctcgttcgtttggaaaacccgtagggcacggtgaacaatagtgttgtcggtggcttgttcgccggcatgtcccatgatcagttggggctcctcccgttcctggagctcctcccctcctgttgaccggtctgctctcagattccggttgtggggagttccttggcgaggggcgggttgctagctgggttggcagatttgcttggagttcgagagcctcagcactgcatgtgcctagcttctcttgcgtctgcgaggtgtttggtttggtggagttggtgcatgaaatccctacgacgcaacctgtcgatggtgtttggggtggagtcggagctgcttggccgggtgtggcaagctgggcaacgataacccccttgccccttctttttggtagcttcgttggggtggctgtgctgttggcttcctggcgtgtctttgggtaggtgtgttggggggagtcggtactgctttgatttacaatgc

SEQ ID NO: 387827 - DNA, 948 bp, Oryza sativa
aaatccccatcccgtggctcgatctccctatttctctctcccgtgtggtcggagctcactgcagcggcggcggcggcggcgaacgaggggggagagagagaggtcgaggtagagaggaaagggagaggagggcggaggaagatgagcgggaacggcgtgaagaaggtggcggaggtggccgcgaaggccgggaaggcgatcgactgggaggggatggccaagatgctcgtctccgacgaggcgcgcaaggagttcaacaccctccgccgcaccttcgaggacgtcaaccaccagctccagaccaagttctctcaggagccccaaccgattgacttggggagtactacagaaaaggaattgggtctaaagttgtagatatgtacaaggaagcttatgaaagcattgaaatccccaagtacgttgacaccgtgactcctcagtacaagccaaagtttgatgcgctgcttgttgagctgaaagaagcagaaaaggagtctctgaaggagtcagagaggatagagaaggagcttgctgaattgcaggagatgaagaaaaatatcagcacaatgacagcagatgaatactttgcaaagcatcctgaggtcaagcagaagttcgatgatgaaatccgtaacgacaactggggctactgaagagtggaggaactctttgtttccctttcttggaagagttaataattttgtcttgtgtcccagagtgtatgtataggggaatccactatcgcaacaatggtggtttccataccatgtggatggggcctgtttaaactcccaaactgattctaccatgtcgtccgtgctgcagttccaactgaatttgcttgtgttggacctcttcattttctagagggttgacccttaagaagtttatgttttattgtttttgtgctcatctccgttctacatgaatcaagatgatcaattgttg

SEQ ID NO: 387828 - DNA, 544 bp, Oryza sativa
gtccgatagtcatattcttgcctcccagcaggcaaatttggacggggagtcattgaggctggattacctaactctttttttgagacatttgactgatccactgaagacaatgcccaaggatgaagctgtgcaaaaagtggtggagtttatggatacctactctttaagccaggaagactttgacacaattgttgaattatcaaaatttaagggtcatccaaatcctatggatggtattcaaccagctgttaaaggtgccttaacaaaggcttccaaacaaggaagtagttctcgtgttgctcgagcagcagatctagtaaatatcccaggcatgaaaaagccattaaagaaacgagtggcagcaatccttgagccagtgggagagagtttgcctgaagaaaatggagtagcgtcatctgaaggcgatgaagaggattcctctgatgctgaaaataatgatgaactggtgcctggtgacacaaaaccaaaactggacctgcagagtgataagaagaaagggatccaagtgcagctcgacctgaag

SEQ ID NO: 387829 - DNA, 997 bp, Oryza sativa
  unsure (1)..(997): unsure at all n locations
ccacgcgtccgcaatatttgttggtgatctggctgttgatgttacggatgaaatgttgatggatctttttgccaaaaaataccgatctgtgaaaggagctaaagttattattgatgcaaacaccggacgttctaggggctacggctttgttaggtttggagatgataacgacaaaactcatgcgatgactgaaatgaatggtgcatattgctctacccggccaattcgtataggacctgcaacacctagaagatcttcaggtgattctggctcctcgccaccaaggcagtcagatagtgactcaactaacaggacgatatatgttggcgggcttgatcccaacgctactgaagatgaactaaggaaagcatttgctaagtatggtgatcttgcctctgttaaaattcctgttggcaaacagtgtggttttgttcaatttgtcaacagacctgatgcagaagaagcactgcaagggttgaatggatcaacaattggaaagcaggcagtgcgtctttcctggggccgcagtccagcaagcaaacagtctaggggtgattccggccaccggcgcaatggcatgtactacggtacacctttctacggtggatatggctatgcgtcgccacttccacacccaaacatgtatgcagcagcatatggagcctacccttactacggtaaccagcagcttgtgagttgatgagaggcttctctcttgtttcctccaatggaaaacgaggttttggtccagtaagcatagtagcgtgtgatgagatatttatagatggccataaagaagttggtgagacagcaggtattacctgaaatggtacctgcagatttgtgtcagtgagtaccgagtagaacctaaaaagcttgtagacaaaataagagttgttcttattctttcaagaaattttgactcgctaataaaactgagctatgtgatgtgcgactaaannnnnnnnnnnnnnnnnnnnnnnnnnnnnnnnnnnnn

SEQ ID NO: 387830 - DNA, 516 bp, Oryza sativa
ccacgcgtccgcccacgcgtccggaggatccctcggtgttcgcctacgacgaggtttatgacgacatgaagcagaagggcgccctccccaagatgcaggacagggtagttcgcgagtcaaaatacattgcggcacttaaggagaaagccgaacaacgtaaacgagagcaggacattatttatgagaggaagcttcaaaaagagaggagtaaggaagaccacctatatggtgacaaagacaaatttgttacatctgcctacaggaagaaacttgaggaggagcggaaatggctggaggaagagaagcggcggcagcttcaagaagaaaaggaagatgttactaagaagaaagacttgagtgatttttactttggtcttagtaagaatgttgctttcggtgcacagacacatgacaatacaaaacatgctaaacctgaaaagttagacgagaaagttcaagatgctaaaactagcaagggtggtgctgaagtatccgatcgctctcctaagcacaaaa

SEQ ID NO: 387831 - DNA, 1201 bp, Oryza sativa
gagagagagagagagagagagagagagagacgcagctctgttcttcttctcctctctggaaatttctggatctcgcgagagatcgggaggacgatggtgggtgggcgcgcgctcctgccgctgcttctgctctccgcgctgctcgtccagatccgcgcctccgatccgctgttctatgagccgttcgacgagagcttcgaggggaggtgggttctctccgggaaggacgactacaaaggtgtatggaagcacgaaaagagtgatggacatgaagactatggcctgcttgttagtgagaaggccaagaaatatgccataatcaaggagcttgatgagcctgttactttgaaggatgggactgttgtcctgcagtttgaagtgaggcttcagaatggccttgagtgtggaggtgcatatcttaagtacattcgtcctcaggatgctgcatgggatgccaaggagtttgataatgagactccttacactattatgtttggtcctgacaaatgtggatcaactaacaaggtgcatttcatccttaagcacaagaaccccaagactggcaagtatgttgaacaccacctcaagttcccaccttctgtcccatatgataagctctctcatgtctacacggctatcttgaagcctgataatgaggtgagaattttggttgatggggaagagaagaagagggcagacttcccttctgccgctgaggtctgagccatctactttatcccatccaagaccagccctgatcctgatgacaaaaagccagaagactgggatgagagagctaaaatccctgatccagatgctgtgaagcctgatgactgggatgaggatgcccccatggaaattgaggacgaagaggccacaaagccagaggggtggctggatgatgagccagaggaaattgatgatccggaggctaacaagcctgaagactgggatgatgaggaggatggagaatgggaagcaccaaagattgacaaccccaagtgtgaagaggctcctggttgtggtgagtggaagaggccgatgaagcagaaccctgcttacaagggctagtggcatgcgcctcttatcgacaaccccaactacaaaggaatctggaagccccatgagattcccaaccctgagtacttctagcttgacacgcctgactctgatccaatttgcgctattgggatttgagatc

SEQ ID NO: 387832 - DNA, 542 bp, Oryza sativa
  unsure (1)..(542): unsure at all n locations
ccacgcgtccggaagagcagaccgtttgttattcgtagcagtgatcgtgaggtgaaatgccatagtgtaatcattgctactggtgctgctgctaagcgccttcgattacctcgtgaagatgaattttggagtagaggtatcagtgcatgtgcaatatgtgatggagcatccccactatttaagggtcaagttcttgcagttgttggaggtggtgatacagctacagaggaagctatatatttgaccaaatatgcacgtcacgttcatttacttgttcgaaaggatcagctacgagcatccaaagctatgcaggaccgagtactcaacaatcccaacataacagtacatttcaatacagaagctgtggatgttgtcagcaatcccaaaggccagatgtctggtattcaactgaagagaaccgacacgggagangaatcagttcttgaggtgaaaggtctattctatggcatagggcacacttccaaacagtcagttgttcaaggncaaatttgatcttgacggttgctgggtaatattttngg

SEQ ID NO: 387833 - DNA, 739 bp, Oryza sativa
ccacgcgtccgcccacgcgtccgaatttttatgataaggtcaagtcatatcagaaaatttaaggtctgttcagagctttcaaatcaccggctttaacttgttcaatttcggcaagacatactcttcagattatcttgaatatggttgtgtgtcatcttaaccggaccatgtattgctttttggctttgataaaaatcgtcactatgtgctagggcgttggaatgattcttctgtgtcagttcttagttaaagtttaacatcaggatttctcgcgaggatttaaggagctctttttgaccgccttccctgtggattaatttatcctagtacaggaactacagattacttgctgcttgacctgctcagtttgagttggtttgcttccattacaagcaactgtccaagaacattttatttgtaatacgaacatttataaaccagagaaattgaagcttgttgtatgggattggtcattgttaggaatagtctttggtgtataagatgttttctccattccattcaagactgctgctacgcttttgggtcaaaataacaagtgagattgatattatttggaggccatttgtctgcttggaaaactctggttatttaagtccatcctgctgcgcttttatggttgtcttgtcagaacatagacatggccatagttctccgagaatttgacgttaacttgtttacttccggaaaagctatatccagtcagttattaacctgccgt

SEQ ID NO: 387834 - DNA, 802 bp, Oryza sativa
ccacgcgtccggactagttctctcaacggcccttctttcgattggtttatggctaatcgtgatttgttggtctggcaatactgattgcgaggtcggttggtttgcttcactttctgttcggtgagatggattgtcagcttaattaagctgtaccgtggatattttgggtatgatagataaaatgaagtttgtgctctgaaatggtcaatggttaggattgctcactcgcctacgattattgttgattattgttctgttcctttcaagtttgtgcatttgtgatgcttggtagttcgagacaattcggcagcttacaattatatacaatttttccttcagatctggtattttttatgatataaggtcaagtcatatcagaacatttaaacatgatcgtggtggctttcttaggtttgctcagagctttcaaatcaccgctgttaattggttaaattccagcaagaaagagtgctaaagtttgagttaaactagggtgttggaagattcttcagtattgttcttctgtgtcagttcttagttaaagtttaacttctggatttctttcacgaggatttaaggagctctttttgactgccttccctgtggattatttttatcgtagtacaggaactacagattacttgctgcttgacctggtcagtttgaggtacaaatccccgtattttcatgtgcactggggttagttggaggaaccttaatgccttggtttacggttatgactaattgcaataatttgaatttccaatatgtaatatggtgtagttgttgctccattagaagc

SEQ ID NO: 387835 - DNA, 1254 bp, Oryza sativa
ttcgaccaccgattccgctcgcaacccgggggcatcccaccaactcgggggcctcctcggtggttctcctctccgctcctctataaatgcagcccgatcctcgctgctttttcttcgttgaggatggtcccatggcttccttcctcttctcgcgcggtcattcttccccttttcccctccgccgcgggtgggctggtaagtcggtaggtaagggatcaatcggtttcgatctcacctcgttcgctgccgtttgttgattgatgatcaggcgcaccaactagccggatagattgcccgcttgctcgtccttttctggtgcttgatccgttcggtttggggggggtctagtttcggcgatttgcttctgctgttgtgttagttttctgaacacagtatctctttcgattggtttatggctaattgtggtttgctgtgttgggtacaatatgcgcgatcggttggtttgtgtcaattcatgtttggtgcgatggatttgtcatggatattttgggcttgatcaaaggctagatgaactgaagttttcgctctgaattggtcatgcttaggattgctcactggcctcagattattgttcggttcctttcaagttcgtgatgcttggttttgtttgagaccgttcgtctgcttgcagctatgcagtttttccttcggatctagtaatttttatgataaggtcaagtcatatcagaaaatttaaggtctgttcagagctttcaaatcaccggctttaacttgttcaatttcggcaagacatactcttcagattatcttgaatatggttgtgtgtcctcttaaccggaccatggattgctttccggctttgataaaaatcgtcactatgtgctagggcgttggaatgatccttctgtgtcagttcttagttaaagtttaacatcaggatttctcgcgaggatttaaggagctctttttgaccgccttccctgtggattaatttatcctagtacaggaactacagattacttgctgcttgacctgctcagtttgaggtacagatctcgtgatttccctgtttactggtgttagttttaggaaccttgatgctttggtttagggctatggttaattgcaatttattgaaatttcaatatgtcaatattgtgcagttggcttgctttcattacaagcaactgtccaagaacattttatttgtaatacgaacatttataaaccagaaaaattgaagcttgttggatgggattggtcattgtagga

SEQ ID NO: 387836 - DNA, 684 bp, Oryza sativa
  unsure (1)..(684): unsure at all n locations
ccacgcgtccgcggacgcgtgggctggtaagtcggtaggtaagggatcaatcggtttcgatctcacctcgttcgctgccgtttgttgattgatgatcaggcgcaccaactagccggatagattgcccgcttgctcgtccttttctggtgcttgatccgttcggtttggggggggtctagtttcggcgatttgcttctgctgttgtgttagttttctgaacacagtatctctttcgattggtttatggctaattgtggtttgctgtgttgggtacaatatgcgcgatcggttggtttgtgtcaattcatgtttggtgcgatggatttgtcatggatattttgggcttgatcaaaggctagatgaactgaagttttcgctctgaattggtcatgctatgcagtttttccttcggatctagtaatttttatgataaggtcaagtcatatcagaaaatttaagggggcgttggaatgattctcctgtntcagtncttagtgaaagtttaacatcaggatttctcgcgaggatttaaggagctctttttgaccgccttccctgtggattaatttatcctagtacaggaactacagattacttgctgcttgacctgctcagtttgagttggtctgcttccattacangcaactgtccaagaacattttatttgtaatacgatcatttata

SEQ ID NO: 387837 - DNA, 634 bp, Oryza sativa
ccacgcgtccgcggaaggtacgccatgaagcttaattccgaggcctacgccgtcacgtggcgcttcgacgccgaggccctgccctaggacctgttgctccaagggctcactgttctacaggacgacggacagctcgacctcaccataaaggactacccgtacgccaacgacgggctgctggtctggaactccatcaagcagtgggccccggattacatcgacttctactacaagtccgacgaggaggtcgcctgcgacgaggaggtgcgggcgtggtgggaggaggtgcgcaccaaggggcacgccgacaagaaggacgagccgtggtggccggcggtggacacccgggacgggctcatcggcgtcttgaccaccatcatgtgggtgaccttcggccaccacgccgtcgtcaacttcgggcagtaccactacggcggctacttcccgaaccggccgacggtgatgaggaagaaaatgccggtggaggagaacaaggaggaggagatgaagaagttcatggagatgccggagcacgtgctgctggacaccatgccgtccaagatgcaggccatcacgatcatggcgacgctggacatcctgtcttcgcacttcctcgacgaggagtacatggggg

SEQ ID NO: 387838 - DNA, 538 bp, Oryza sativa
  unsure (1)..(538): unsure at all n locations
antgtgcagcgaactcgataaacattaaacaagctgtgtgaacttcttttttcgtgacaagtttaattctttctcgatcgatcgtcgtgatggctgacgagtacggccgcggcggctacggcaggtccggcgccggcgccggcgacgactacgagagcggcggctacaacaggtccagctccggcggcgccgacgagtacggccgccggccgggaggcggtgccggtggctacaacaagcccggtggcaccgacgactacgacagcggctacaacaagtccgccggcggcgacgacgacgactacggccgcaccggcggcggcgggtacaacaagtccggcaccgacgacgactacgacagcggctacaacaacaggtcaggggctaacgagaagtacggtcgcaacaagtccggcgacgacgagtacagcggcggcggcggcgccgaagccgacgaggagtacgtcgacgggttgtcgtcccgggacgacccggagaagtacaaggtggaggagtaggagcacatgaacaggagcgc

SEQ ID NO: 387839 - DNA, 549 bp, Oryza sativa
cgtcctcttttgctccagttcaaagctcttcagggactgcaagtgccagcaaccaatctaccttagcacttcctgctccagcatcagccagtggtccaaaagctcctgcagcaccagttccggctatcgaccttcttagtggagatgattacatcaaacctgaacctgcaaactcccttgcacttgttcctgtcacagaatattcagcagctgatcagaatgtgctagctcttgcagacatgtttgagcaaaataatgccaacagaagcaacaataaccttactaactcttttaatacatcggcaccaaattcaaatttccctgcatcacaagcatatcctgctccagtgcaacctgctctgcctcagcatcctgttgcttattcaaatggggtttcatccaatgccatcgtaccttactatgatgatcaaaatggaggccttccaccaccaccatgggagattcagcaatccatggacaacccaccccaacccacccaacttggccagatgccacttgaaccagggcaaccagtagggatgcaccccc

SEQ ID NO: 387840 - DNA, 962 bp, Oryza sativa
ccacgcgtccgcccacgcgtccggtgaaaagggtacctttgtttgagaatatggacgaaagattgctggatgcagtgatgtgagaggttaacgcctacactatacactgaaaatgaatacattttgagagaaggcgatcctgtggatgagatgcatttcatcctccatggctgcttggagagtgagaccaccgatgggggccgaagtggattctttaacaaggtccagttaaaggagggcgctttctgcggtgatgagctgctcacatgggcattggatcctaaatctgctgctaacttcccagcttcaactaggacagtgaaagctcttactgaggttgaggcatttgcgttgtgtgctgaggagctgaaatttgtggccagtcagttcaggaggctccacagtaggcaagttcagcacacgttccggttctattcccagcactggaggacatgggcggcctgtttcattcaagcggcatggcgccgctattacaagaggaagatggccgagcagcatcgcaaggaagaagaggctgcaaaccggcaaagcagcagcagccaccaccctagcctcgcagcaaccatctacgcatctcgctttgcagctaatgcactccgaggaagttcacaggctcagaagcagggccagcccgacaattgtgagattgccaaagcctccagaaccagattttgccgtcgatgaagctggctaacaagaagaaacacactgaaattgcatgtattaagttgtggattggaggcatcatgtagattatgtacaaaattcaaaaacagccagcagagtttttgcttgtaaaagccctgtaagtttgtaaccacgcaagaaccatctcggagtacatgtactttagtcttgcactgctaaatcccatctatagcatacagaaattaagcagaagttcctttcggaaaaaagaaaaagaagttatgcagaagttt

SEQ ID NO: 387841 - DNA, 1132 bp, Oryza sativa
ccacgcgtccgattcccttgtgccatattcctgaaccagttcgcaacacagcgagtgactggatcaatcagagatctcctgatgccctgggagactttgtcatgtggtgcatagacagcatcatgtctgaactgtcaggtcaagcagtaggcgctaagggttcaaagaaggccgtacagcaaactccaagggcccaggttgcaatatttgttgtgcttgccttgactgtgggaaggaaaccagaggtactaacaaacgtcctgccaaaaataatgggaaacaataagtatcttgggcaggaaaagcttccaatcattgtttgggttattgctcaggcatctcaaggtgacctagtgactggaatgttttgttgggctcatttcctgtttcccacactgtgtgctaagccaagtgggaatccccagacgagagatttagttctgcagttgctcgaaagaattttgtctgcccccaaagctcgaggcatcttactgaatggtgctgttagaaagggggaacgcctgattccccctgttacatttgatctgttcatgagagctgcatttcctgtttccagcgctcgtgtaaaggctacagagaggtttgaagcagcctacccaacaatcaaggagttggcccttgctggtcctcctggctcaaaaaccgtgaaacaagcagcacagcagcttttgccattgtgtgtgaaagccatgcaagaagataacgcagacctcaccggggagtctgctggtgtattcatttggtgcctgactcaaaatgcagagtcctacaagctgtgggaaagacttcatcctgaaaatgttgaagccagtgttgtagtccttagcactatagtcacaaaatggagcgagctgtctcataagctcagtgctgaatctcttaaggtgactctgaagaacttaaggactaagaatgaggcggccctagaagcagcaacggactctggaaagcaggcatctatcaaggccgcggacaagtattccaaggagatccttggaaggttgagccgcggcggagcctgcctgaagggcagcctgctggttatcacgcttgctgttgccgcaggctttgtgctatcttctaaccttgagatcccattcgactgggacaa

SEQ ID NO: 387842 - DNA, 828 bp, Oryza sativa
  unsure (1)..(828): unsure at all n locations
caatccagagaaaaattctccgatcgccgccgccgctggttcgattcgccgaggccgagccgagagagagagatcgagagggatggagtgcttggccgagatgccgcgcgcgccgctggccgaccgccgcccgcggaagaggcagcggntggggtnggacgtcggccccgagatccaccaggttcagatagggttatgtgggcaagaagttgcaaatgtcatcagtgctgtgacgctgggtctctcgtcccaggaaatccctcgttttgcttcccctcctctgagagaagatgacaaggatggacactttgtctttgctgttggagacaacctcacaccacgatacaggattaatgcaaaaatgggtgaaggtcagttgggagagctgcctccgttagaattgaacatcttaacttgagatgtttcttgcatgctgaatttgttgacagagcggagtatattgaaactgaaactttttggatatacatcaggtacctttggtcaggtattggaatgttgggatagggaaaggaaagaaatggtggccattaagatcatcagaggcattaagaagtacagggatgctgcaatgatagaaattggcatgctcgagcagcttggtaaatatgaaaaaagtagatccaggtttcatcccgttctccaaaggaaggttcctatttcaagcagctgcccaagtccagtgctattaaggtgattgattttggcagcacaacatatgcccagcaggtccagacctatgtggtgtctactaggcattatcgagctccagaagtaatcttgggatttgtcttgcctagtgcaaagcct

SEQ ID NO: 387843 - DNA, 495 bp, Oryza sativa
ccacgcgtccgcggacgcgtgggatcacatccaatccagagaaaaattctccgatcgccgccgccgctggttcgattcgccgaggccgagccgagagagagagatcgagagggatggagtgcttggccgagatgccgcgcgcgccgctggccgaccgccgcccgcggaagaggcagcggctggggtgggacgtcggccccgagatccaccaggttcagatagggttatgtgggcaagaagttgcaaatgtcatcagtgctgtgacgctgggtctctcgtcccaggaaatccctcgttttgcttcccctcctctgagagaagatgacaaggatggacactttgtctttgctgttggagacaacctcacaccacgatacaggattaatgcaaaaatgggtgaaggtacctttggtcaggttttggaatgttgggatagggaaaggaaagaaatggtggccatttagatcatcagaggcattaagaagtacagggatg

SEQ ID NO: 387844 - DNA, 510 bp, Oryza sativa
  unsure (1)..(510): unsure at all n locations
ccacgcgtccgcccacgcgtccgcgcgcggagaaccccaccttggcaaaaagaaaagaaaaataatatcatcgcactttttgctgcccttttcatcccctcggatattcacgaagcaaatctctctgcaattcttttcttttttttttttgatcttgcggatcttctccattgaggaaaggcgagagctttgggatcgattccgggccatggcgaaggaggtggatccgtgcgaccacggcgaggtcgtcgacgccgggtgcgtccgcgccgtgctggccgagctcgtcctcaccttcgtcttcgtcttcaccggcgtcgccgccaccatggccgcaggggtgccggaggtggcgggggcggcgatgccgatggcggcgctggcgggggtgggcgatcgcgacggcgctggcggcgggggtgctggtgaccgcggggttccacgtgtccggcgggcaccttaacccggcggtgaccgtggcgctgctgcgcggnggcacatcacggcgtc

SEQ ID NO: 387845 - DNA, 635 bp, Oryza sativa
  unsure (1)..(635): unsure at all n locations
atcagctctggcaccaatctgtaaagtttgtagcgcagctaaacctaaaaccacgaaggccaaatatgcaacctggtcctgtaaattctgtactctagaaaacagtactaagattgacaaatgttcagcatgcgatcaatggagactattcacatgggaccacctgcagccacatattgtccaagctatgattgatctacattgaagctggcattaatagggactacagaattttggacagccatctgctgaattgtggatacacaaattcggtcccatcagcagtgctatctgttaccccattgcacttctgcataacgaatcagatgtgtaatgttactatctaaagcattccctctttcgtggatcacatcatgtgtatagagagaaccacctattggaaacatctgacatatcccaagctccctctgggagcagataacgcttgaaccattttcaatccttcctgctcctaaagtcctgaagcatgaccgagcacgcgggtatgttttggctctgaacttgtgacagcaacacatttgtcctaactgcattatctattgcaatggtgttgcaaccgtgcatgtttaaccaggtnnnnnnnnnnnnnnnnnnnnnnnnnnnnnnnnnnnnnn

SEQ ID NO: 387846 - DNA, 1265 bp, Oryza sativa
  unsure (1)..(1265): unsure at all n locations
cccattaccacctccacctcgcgcactcagtctgtactacctgtacgtacgtggccgccgctagctaagctaggaattgaaatggggatggagaggccgcaagagaaggtggccaccaccaccaccgccgccttcaacctcgccgagtccggctacgccgaccgccccgacctcgacgacgacggccgcgagaagcgcacagggacgctggtgacggcgagcgcgcacataataacggcggtgatcggctccggcgtgctgtcgctggcgtgggcgatagcgcagctggggtgggtgatcgggccggccgtgctggtggcgttctcggtcataacctggttctgctccagcctcctcgccgactgctaccgatctcccgaccccgtccatggcaagcgcaactacacctacggccaagccgtcagggccaacctaggtgtggccaagtacaggctctgctcggtggcacagtacgtcaatctcgtcggcgtcaccattggctacaccatcactacggccatcagcatgggtgcgatcaaacggtccaactggttccatcgcaacggccacgacgcagcctgcttggcatctgacacgaccaacatgatcatatttgctggcatccaaatcctcctctcgcagctgccgaattttcacaaaatttggtggctctccattgtcgctgctgtcatgtcactggcctactcaaccattggccttggcctctccattgcaaaaattgcaggtggggcccaccccgaggcaaccctcacaggggtgactgttggagtggatgtgtctgcaagtgagaaaatctggagaacttttcagtcacttggtgacattgcctttgcatactcctactccaatgtcctcatagaaattcaggacacgctgcggtcgagcccggcggagaacgaggtgatgaagaaggcgtcgttcatcggagtctcgacgacgacgacgttctacatgctgtgcggcgtgctcggctacgcggcgttcggcaaccgcgcgccggggaacttcctcaccggcttcggcttctacgagcccttctggctcgtcgacgtcggcaacgtctgcatcgtcgtccacctcgtcggcgcctaccaggtcttctgccagcccatctaccagttcgccgaggcctgggcgccgtcgcggtggccggacagcgccttcgtcaacggcaggcgcgtgctccggctgccgctcggcgccggcgacttccccgtcagcgcgctccgnctcgtctggcgcac

SEQ ID NO: 387847 - DNA, 759 bp, Oryza sativa
  unsure (1)..(759): unsure at all n locations
nnnnnnnnnnnnnnnnnnnnnnnnnnnnnnnnnnnnnnnnnnnnnnnnnnnnnnnnnnnnnnnnnnnnnnnnnncngcaactaagcnacnactttgttacattcatgtcaaatttaccacttacatgacatccattcagactgatcatcatcatcatcaggctaaatggaccacttacatagttaattacatctgacgaaacacttgagcactcatctcaaatcaacctgtcgatctgaactctgaaagacacgcacgaacacgacttaattaacatctgattgattaactatgtattatatatatcattcacgatcttgatcgatcgatcgatctcgctatatatatatatttgttcttcatcgatcgatggatcatatcatcatcatcatcagtattaacaaataattattaatttgatcatgaggagacgctgaatggcttgtaatgtgcgacggatttgatgaggccctggatggacccggcggcggcgaggagggagacgacgaggcaggcgaggctgagcacgttcatccacgtccacgtcggcgagaatcgccggaccttggcctgagacatgtacatctggacggggaagtagacggtgagcggccagaaggagacggcgccgatgaagccgaggaagtcgttgaanaaggggaacgccatggcggcgacggcggtgaacacgacgtangccgtgcgccaaacgaagcggacgcgctgaccgggaatcncccgcgccgancggcaacccga

SEQ ID NO: 387848 - DNA, 1038 bp, Oryza sativa
  unsure (1)..(1038): unsure at all n locations
tgcacccacgagctataccaagtactctctttctcactcgattgattcaagcagcaaataattagcctagcttactctttccatagctagctagcttgttgcgagcaagatcaggttgccggtgcagtaacagagagcaaccatgggtgtattggacagcctctctgatatgtgcagcctgacagagaccaaggaagccctcaagctaaggaagaagcggccactgcagacggtgaacatcaaggtgaagatggactgcgaggggtgcgagaggagggtgaagaacgcggtgaagtcgatgcgaggggtgacgagcgtggcggtgaacccgaagcagagccggtgcacggtgaccgggtacgtggaggcgagcaaggtgctggagcgcgtgaagagcaccgggaaggcggcggagatgtggccctacgtcccgtacaccatgaccacctacccgtacgtcggcggcgcctacgacaagaaggcccccgccggctttcgtccgcggcaaccccgccgccatggccgaccccttcgcccccgaggtccgctacatgaccatgttcagcgacgagaacgtcgactcctgctccatcatgtaaaaccaataatccatatatatactacaactccggcgacttctccggccggccggcaacatgcttgcttaattagctagcttgcttggttgatgtgtactactgcgttaagcctgcatagagatgaggtgtctagctactgtgtatattatggccatatgttatgtagtactacgtgctttgttttggattattactaaaatagttgcataaagagagtgaaagctagagctgtggctacgtgttctgaattgtgattacgtgtacgaactagaaacgacacgtctgttgtcgattgaattggtcttttttggagcggtagctaggccgggtgaaggggcggggttaatcaatcaattgtttggttgaaccgctaggtaagctctctatgatgatatgaataaaaaatccctgtcagtgtcaaaaaaaaaaaaaaannnnn

SEQ ID NO: 387849 - DNA, 666 bp, Oryza sativa
  unsure (1)..(666): unsure at all n locations
tnaacaagtggaggtcccagaagctgtgcagatcagaatggaagcctaccagaagtacatcgacactttactagagaaggcatgcaagatcgtctccgagcagcttgcctcaagcggcttcagcatctcggacaatgatctcccggagctctctggtggtgtcatgtgccgctccgctgacacattgagctcctccatcttccaccagctctctgtcagcccaatcaacctgcatagtcctgagggcaagccgacgccctcgggcatcgaaggccaaatgatcctccagaagtcacctgagcttaagcgcaagtcttgctgagccgtgtcgttcgacgcaatctggatgtgcaaacaccngttttcttgtcatgggggtagtcatgtcgaatttcggaattcgaatttcggtaagaaggggggatgctctgccaatcttgtagaggccatcttgttctctggctaatgcatgccaacattgtcaagtagcaaggttttctctcttatgttatcaatccaatcagcatatcttatataaaatgcctaatgtgctagatcaagtgccttccttgataaataatattattaccgtgagatttgggttctgacatgattaactgatatatccatctgaaacaatttcgaataaaaaaaaaaaaaaaaaaa

SEQ ID NO: 387850 - DNA, 1345 bp, Oryza sativa
cttgttttaactgaagttgaacttcccttgatgtctgggttcctgctgctctccacgatcatggaacatgacgcatgcaagaatatccccgtcataatgatgtcttcaaatgattccgttagcatggttttcaaatgcatgctaaagggtgctgcagatttccttgttaagccaatacggaagaatgaattaaggaacttatggcagcatgtttggagaaaacaactgtccagcggtgttcttgatgtgcagcatactcaacaagaagataatcttacagaaaggcatgagcagaagaccggagtgacgaaagctgaacatgtgactgaaaatgttgtccacaagaacatggaatgcagtgaacaagaaagtgatgctcaaagttcatgtacaaggtcagaactggaggctgacagtaggcaaaccaacaatttactggaatataagcagccaatgggaaggcatttctccaagcctgaccacaagaacaccgagaaaaatggagggactaaaattcatgcatctaatgatggcaacttgattccacggagggaagaggatgcatcactgaggaggatgacatgttcaaatgatattaattgtgagaaagcttccagggatatggagctggttcatattattgacaatcagcagaagaataacacacatatggagatggatgttgcgagagcaaattcccgtggaaatgatgacaagtgcttttccattccagcacaccagttagaactttctctcagaagatctgactacagtagattagagagccaggagaaaaatgaacgaagaacactgaaccactcaacttcatctccattttccttgtacaactgcaggacagcatcatctaccattaatgctggtgatgctcaggcatgcagcacctcggcaacacatatagatcttgaaaacaaaaatggagattccaaaactccctctcaagacaagagggaaacaaaccaacctcccattagagttgtaccatttcctgttcctgttggaggactaacatttgatgggcagccattctggaacggtgcacctgtggcatcccttttctatccacaatcagctcctcccatttggaatagcaaaacatctaccctggcaagacgcaaccacacaagcaatttctctgcagcagaatggtccaaaagatgcggatactaagcaggttgaaaatgtagaggaacaaactgctcggagtcacctcagtgctaatcggaaatggtacaactctaatgggaggttggtttgtttccctcttgtcttgagagggagttttggaatctctattatgcggacgcgtggtcgacggggattcgac

SEQ ID NO: 387851 - DNA, 743 bp, Oryza sativa
ccacgcgtccgatcatttatttacctaccatcatgcgtagacatattttactttgatttgctacagtatggtcttgcaagcatagaataaaacatgaaataatatggaagtagcagaaatttttgtatgatctctctttttgtgcatttagataatctaacttactggttaacttgctcctttacacagttttaccaagagccaacatatgagatctcacacttccgatcatttcttgttcataggtacaactgcaggacagcatcatctaccattaatgctggtgatgctcaggcatgcagcacctcggcaacacatatagatcttgaaaacaaaaatggagattccaaaactccctctcaagacaagagggaaacaaaccaacctcccattagagttgtaccatttcctgttcctgttggaggactaacatttgatgggcagccattctggaacggtgcacctgtggcatcccttttctatccacaatcagctcctaccatttggaatagcaaaacatctacctggcaagacgcaaccacacaagcaatttctctgcagcagaatggtccaaaagatacggatactaagcaggttgaaaatgtataggaacaaactggtcggagtcatctaagtgctaatccgaaacatctccgcattgaaaatcctacagaagagccgcggcatgtttcttcaaccaacggtgaaagtgggagcagtactgggctggacagcgccagaaa

SEQ ID NO: 387852 - DNA, 685 bp, Oryza sativa
  unsure (1)..(685): unsure at all n locations
ccacgcgtccggacttcttcccggccgtcgcgccgctcgacccgcagcggctgcggaggcgggtggcgagggtgttcgagcggctgcaggccgtgttcgacgggcacatcgaacggcgcctgcgggaccgcgctgccggggagccgcccaagaacgatttcctggacgctttgctcgactaccgcagcccggaggatggccggggttttgatcggccaacgctacagtttctgtttacggatttgtttagcgcgggaagtgatacaagcgcagtaactgtagaatgggcaatggctcagctgctacagaacccaccagcaatggcgaaagctcgtgaggagcttgctcgagtgattggctccaaacaagaaattgaggaatccgacattagccagctcaagtacctcgaagccgtcgtgaaggagacattacggcttcatcctccggcgccatttctgcttcctcaccaagccgaaacgaccacacaggttggtggctacacggtgcccaagggcacccgtgttctggtgaatgtttgggcgattggtcgggacagcaaggtgtggtctgaccctgacaagttcatgccggagaggttcctgcagagcgaggtggacctgcgtggccgtgacttcgaactgattccatttggctctggtcgaaggatctgtccggggttnccgct

SEQ ID NO: 387853 - DNA, 475 bp, Oryza sativa
ccacgcgtccgggcacggtaatattgattttgagaaagaaccaattggcatctcgaaagatgggaaggaggtttacttcagggacatctggccttccactgaagagattgctgaggttgttaaatcaagtgtgctacctgacatgtttaagagcacatacgaggcaataaccaaaggaaatcctatgtggaatgagctgtctgtatcagcaagcactctctacccatgggacccgacatctacttacatccatgagcctccttatttcaaggatatgacaatgtcccctcctggcccacggcctgtgaaggatgcttactgtctcctgaactttggtgacagtatcacaactgatcacatctcacctgccggaagtattcacccttgacagccctgctgctaagatatcttgaaggagcgtcggtgttgaaaggaaggactttaaactcatatggcaagtcggcgagggaaattg

SEQ ID NO: 387854 - DNA, 634 bp, Oryza sativa
ccacgcgtccgaatgaatcctacgagaggctggttcccaggtgcctgtatgaggctcatggaattgaaaacctggtgttaccaactagagattatctttatgcaccatcatttgagaacctttgccgggctgctgacttcatccacagaaatgctttgtgcgggaagttgacatatgttcactgcaaagctggacgtggacggagcacaacagttgttctttgctacttggtgcaatacaaacaaatgactccggctgaagcttatgaacatgttcgcttgcgcaggccaagggtgctattagcttctgcacagcggcaggctgttgagcaattctaccagcttagggtgaagaaatctgggaaatccatttgcctggacagcccaataatgaaaccaccgctgttccttgccactcgcaacctcattgcatttgacgagaagacattcgtcatggtttccaaatcggacctcgaagggtatgatgcggataccttggccgttaacgtgggcagtggcttgtgggagataagcctagtataccgcgtgcagtttgcgagccaggcggcctttgcagggttctcatacctgtgggtacgatgccgtgccccccgtaagaacaaggaggcactccc

SEQ ID NO: 387855 - DNA, 992 bp, Oryza sativa
ccggccggattccggtcgcccacgcgtcggataccttcacacatagctgggggtgcaaacaagaaagcatcaaatgttggacaattcatagatggtgctaatgtagcaaaagttgaagatggtcatgtggatagaagtataggtgtgaaaaaaccccgatattctgcagatgaagggccttctttgactgaactgagtggatacaattcaaagagacatgaatttgacccagagtatgataacgatgctgaacaggcactcgctgagatggagtttaaagaaactgattcggaaactgatcgtgaactgaagctaagggtattgcgtatttactttgtcaaggcttgatgaaagaaaaaggagaaaagagttcatactggaaagaaacttactatttcctaatcctttggagaaggatctcacaaatgaagacaaggaagtttaccatcgctataaggtgttcatgcgtttccttctaaggaggaacatgaagcacttgttaggagtgttcttgaggaacggaaaattcgaaggaggattcaagagcttcaggaatgtcgttctgctggttgccgtacattggctgaagcaaagatgcacatagagcaaaagaggaaaaaggaacatgaggtgaatgcccaaaaagctaaggaaagtggtcagctcttatccaacactaaagtggtgcataagacgaatctacctatgaaaatcgagtcagatggtaatttggatcagaagaaaggtggtgccagcttggattctactggcagggattctccaaaaaccacagggcatgcaggcactaaacattgggatgactgggatattgttggttttcctggggcagagctattaagcaccagtgaaaaaaatctatgctgtcagaacagattgctacccaaccattacctgaaaatgcaggaggttttgatgcaggaaatattcaagggtagtgtcgccaagaaggaagatgccatgtattatttaag

SEQ ID NO: 387856 - DNA, 547 bp, Oryza sativa
tctcactcacggcgaacttccagcctctcccgccgcggcttccgcgccgtccgctcggcagtggcgccgccgcctcgccgcgcaatggcccccgccgtgctcctccgcctcgccccctcgccgccgtatccccagaacccgccgccccggcggcggagccccgcctcggcatgcggcgcctcgcgccgcgacttcgccatccacaccgccatcgcctccgcctccgccgcggccgcggtctccgttcgtccggccaccgccgccgccgccgacgaggaggcgccaccgggggagccttcccaaaataagaagggctcccctctgctgggcggcatcgcgaacaccaagtcgtggtcgcagtactacggcagcggcttctccatccgcgttcccccttccttcgacgacatcttggagcccgaggagttcaacgtcgggatgacctactacggcgacaaggcgaagcccaggacatacgctgctcgcttcgcgtctccggacaggtaggccatagatataacagacctgggcactctaaaggaggcat

SEQ ID NO: 387857 - DNA, 498 bp, Oryza sativa
ccacgcgtccgctgaaagacgcaagggtgcataaccatagcagcagcaagaacccaccgctgaacgtctgcccggtgcaccgtggcgtgtgcacgccggcgacgacattctgcctcctcgaggccggcgccgtcgagggcctcctcgcctgcctggagaacgacgacgcccgtgtcgtggacgcggcgctgggagcgctgtgcacgctcgtcgacgacagggtggacgtcgagaaggccgtggtcgccctcgccggacagggcgcggcgaggcgcgtgctcgcggcgctgaggcagcacagggggaacagcctgtggcacaggtgtttctccgtggtggagaagctgctggtgcacggggacgacgtgtgcgtgagggaggtgaccggcgacaggatgctgcccacggcgctggtgagcgcattccaccgcggcgacgcgaacgccaagcaggcggccgagagcatcctcaggaggctgcacaagatgcctgactact

SEQ ID NO: 387858 - DNA, 505 bp, Oryza sativa
  unsure (1)..(505): unsure at all n locations
ccacgcgtccgcccacgcgttcgcccacgcgtccgcccacgcgtccgcccacgcgtccgcaagggatcagtaccaaaggattttgaatgttgtttcgaaaatgcaagagtctcagaccgtgcaagaaaagattttagacgaatcaaccgagatggatgaaggtgatttcatgagtgaattcaaggagctgtgggatgatgatacaccactccctggttatttctcagtgttcctagactaactggtggtgtctctgtaaatctcttctcttcagttctgctgaattgacacctgccgataacccaaactctcaacatagcatgaatagccatgatcttaaaatcttgaatgcttggatttggattccagttgtggtattcttgcttttatgttatagcgttatgtacagtagaatcttattttatcattgaaggagccatgtatatgcagtatnaaactaatgcagaaagttggtggttgtatcatttgaaaaaaaaaaaaaaaa

SEQ ID NO: 387859 - DNA, 480 bp, Oryza sativa
ccacgcgtccgcggacgcgtgggcggacgcgtgggatctcgtcccccctcttcccggcgcggcggttgctctccagccatggccgccgccgccgccgccgccgtcgcctgcggcatgtctacgtccttcctcatccgcctctcgccttcgccgccggcgtcttcccacgtgcctctccctcggtctccggcttcgtcggcgcgcccgcggcgagcgtcttccgtctccctctccaccgcgcctaggccgagggcacgcgccgccggctccgactctccctccaactttggaggtcaaacatcactgatgccaccattcagccttatgcttgatgaaggctctagatctaaaaagccatatagatggcaaagggtgttgcttaaagtaagtggggaggctcttgctggagatcacacagaaaatattgatccaaagatcacgatggcaattgcaagagaggttgcttctgtcaccagacta

SEQ ID NO: 387860 - DNA, 1068 bp, Oryza sativa
cggacgcgtgggcggacgcgtggggtcttggacatcatttctgaaggcttttgcacttaagaaacgcgaatagacaagaataagagcttcctcaggtggttggtagcagaacaagatagtataagttttcagtataagttttcaggtggataaagctaaagcaaggctaagaattaaacatgtgtaatggaagtatcaggaattcagaatggtagttggcgcatatggagcagatttgataaccgaaaattgtgtaccctgtgaagaatccattgctggttttaagttttaacttcataccgttatcatttcaaggaaagaaggtcttgcaatcgatcttcagaagagctgagaaaggagcgatttgtaaattaggttaatggaacaaaatattccacgttttgcccaatttctataaatttgagtacctgaattcactcacaccaaatggattgccacatcttttaaaaggccaaagttttggtctggtcatattgctgcccaatctcgacctgcacaacgggttgtgcaatggaactaggcttatgattagagcatttcagaattattccattagtgctgagattgtccgtggtgcacatgccgggaagagggtcttcataccacggattccattgcacccctcggaggatcttccattgccttttaagttcaagcggaagcagttttccatccgtcttagttttgcaatgactatcaacaaagctcaaggacagacaatcccaaatgtggcaatctatctccctgaacctggtttctctcatggtcaactctacgttgcactctctaggggtgtctcgagggggacaaccagaattttggccaagccaaggatagacattgaccccactggaaaaagcacaaagaacattgtatatcgagatgttttattctgaacagattgtctaaggttgattagagagtaccatgttcagattcttctgaaggcccagttctttatattatttcattggactgttgagcttggttgtttctggaggaccaggttgcatggatggcagaacgtggctgcatcgacagtaccat

SEQ ID NO: 387861 - DNA, 619 bp, Oryza sativa
ccacgcgtccgctgcaccagggactcttgtcaaagcattgaatgatgcacaaacggaggaaaaggatgcaaccgatgcaggtgcaaatattgaaactgctaaggccccaaaggaaagcaatggtcacctttctaaagagaaagatggagctgttcaagtgtcaccaaaagatagtacttcccaaggatccaaagaaactggtgaaggcaaatcttccaatcctgatgacgaacaaaccgttgttttggctggatcaaatcaatcagagacacaacctgagaagaaaagagatcttgtagcctcagatgtatcatcgtcatctcaatcattaacaacagtaactgaagctaatgccccaaacgaagtagcatctatggtgactgaggcaaatgattcttcctccaatgatgatgaaagagatgcaggagaggatgctcaagaacagatgtctagtggaggcgaaaatgagaaatcttcaccatctgaaagtgaaaagaatgattcaccaggtgccaaagagacggccagtaagctttttgctgctgctgctccattcaatccctccactgtttcagcttttgggtcaatggccattccaggtttcagagaacatggagga

SEQ ID NO: 387862 - DNA, 506 bp, Oryza sativa
ccacgcgtccgcggacgcgtgggcggacgcgtgggcggacgcgtgggcgcgactgaaaggagcgcctcgactcgcatctcgccgccgcgcagctaagctagggttttccgccaccgccgatctcgcccccgcccccggccagccatggacgcctctctcatgggcgccccctccgccgcagcgggcagacaatcccacctccggggagcaccggatggggaccaccatcgtcggcgtctgctacgacggcggcgtcgtcctcgccgccgattccagaaccagcaccggaatgtatgtggcaaaccgtgcgtcggacaagattactcagctaactgacaatgtgtacatctgccgctctggatctgctgctgatacacaagtaatttccgattatgtacgctattttctccaccaacacacaattcagcttgggcagccagcttaccgtgaaagttgcagccaacttaattaggttgttaggcttatcagaacaagaacatgttgca

SEQ ID NO: 387863 - DNA, 490 bp, Oryza sativa
catacacagctctctcgccgtctggtctcttctcgctcgcgcgactgaaaggcacgcgtcgactcgcatctcgccgccgcgcagtaagctagggttttccgccaccgccgatctcgcccccgtccccggccagccatggacgcctctctcatgggcgccccctccgccgcagcgggcagacaatcccacctccggggagcaccggatggggaccaccatcgtcggcgtctgctacgacggcggcgtcgtcctcgccgccgactcccggaccagcaccggaatgtatgtggcgaaccgtgcgtcggacaagattactcagctgactgacaatgtgtacgtctgccgctctggatctgctgccgacacacaagtcatttcggaatatgtacgctattttctccaccaacacacaattcagcttgggcaaccagctactgtgaaagttgcagccaacttaattaggttgttggcttatcagaacaagaacatg

SEQ ID NO: 387864 - DNA, 373 bp, Oryza sativa
ccatcgcgtccgcccacgcgtccgaacgatccaagcaaacgaccatcgttctcccagctcttgtcaccgctgaagcaattacagcggttagttgttccagaaaactgctgacatcccttcctgagaaaaaaaaagtctcaggtcaaacaaaaaatacaagtatgtaagctctactactacagaggccaagttttgcatgttgaagctctgatggagatgtattcgcagtctctgcatgcagcatggatgtgcatggacgaaggttctatgcatcctgttgtgaaaaaaaaaatgtgacaaaactttttttgtaaccctgccaaaggcgctgctggagaaagcaatagtgtgttagttccaagtgaagaaatgt
